United States Patent Application Publication US 2007/0067865 A1 - sequence listing, part 64

SEQ ID NO: 409027 - DNA, 290 bp, Oryza sativa
tcgttaaaatgtagactgctgaggcatgacgagaggagaatgtgtccatggcacagcttgacgagcatggtgagcgctgcaaggaaatggacgagttcattgctaacgtggcacttaccactgatgttcgtgagctcacgctggtggaccggaacctgctttttgtgtcttacaagaacgacattggggctcaggacgcattgcacaagagcatctcttctattgaccagaaggaggacagcacgtggaacgaggcctatgtggcatcaattaacgacctccagctcagg

SEQ ID NO: 409028 - DNA, 508 bp, Oryza sativa
ttctttcctcgctccccgccgccgccgccgttttcttggagaggagaaatccgtaggctcagaggatttttggtagtcttgtttcgtgatattcgtgaagagggggggagctaaggggggattcgtaagatcagaattggatcacgcgggggcgcgctcgggatcgggggttccaaacacagcttcttcgttgaatttaagtggatgtactaatggagtcaaagggtggcaaaaagaagtctagcagtagtcgttccttgatgtatgaagctccccttggctacagcattgaggacgttcgacctgccggaggcgtgaagaagttccagtctgctgcttacttcaactgcgcgaagaagccatcctgatagccctttcggcttctccatcctagtagtttaggatttcttgcaattccattttggcacttttcttctgacctatttctctggctgctgctttctgataatcaccagttctctagtttgctccttgacttctccttctt

SEQ ID NO: 409029 - DNA, 534 bp, Oryza sativa
  unsure (1)..(534): unsure at all n locations
ctgtatgatagaaaatgacatggtcgccgtggaaagggtgaatcagtacagtactcttccttctgaggcagcatgggaagtggcagattgtcttccctcaccaaattggcctagaagaggagatattgacgttaaagatctaaaggttaggtatcgatcaaacacacctctaatcttgaagggcattactattagcattaacagcggagaaaagataggagttgtgggaaggactggcagcggaaagtcaactttagttcaggctttgttcaggcttgtggagcctgtagaagggcatatcatcgttgatggagtagatattggcactttgggccttcatgatctcaggtcgcgctttggtgtgattcctcaagagcctgtgctctttgaaggaaccataagaagcaacatcgacccaattgggcgatattctgaggacgagatatggcaagcccttgagcgttgtcaactaaaagatatagtagctgcaaaaccagagaaacttgatgcactagttgccgacatggnggagaa

SEQ ID NO: 409030 - DNA, 442 bp, Oryza sativa
ctcctcctccatccattcccctcctcctcctcctcctcccatgcatgggaggccgtcgaggccattagcttcctcctcgtcgtcgtcgtcgtcccgcgtcttctccttcttcttggcgccgcgggttttcttgttcttggtggtggtggtggtcgtcgtcttcttgccgggtcggtcgtcttgctggtggctggagggcacggaggagttggaggaggagatggggtttgccggggactgctcgccggtcagcggtggcgggctcagtgaaaacggcaagttcagttatgggtatgcaagtgctcctgggaaaagggcttcaatggaggatttctacgagacgagaatcgatggtgttgatggagagaccattggattatttggcgtattcgacggccatggcggagctcgagcggctgaatatgtcaagcagcaccttttc

SEQ ID NO: 409031 - DNA, 494 bp, Oryza sativa
ttacccttcaagaaacaagaaagacaacaccaacaaacaatctatcttgctaatggcctcgttgtcctccttccggctcatgcgccactgagcttgccttcaaggtcggtgagggctctagcgacactagtctagagctcgtcaccaatgtcaccatctctgaggtggaggtcaaggagaagggtggcaagtactgggtggggctcaaggagtcgtcgactaacacctggacgctgaaaagtgaggcgctgctcaagggctccttctccgtccgcttccttgtcaagaacggcagctaccatgtcatcgacaacgtcatccctgaaagctttacagctggcactgaatacaagaatggcatcaacctctaattaatagacatacgtgctcttgtgttgggtcgcatgggaattattaacctctaaataattatgttttagaagatatcatgccgtgtgtgagtgagcaagcaattaatttcccatgattatttt

SEQ ID NO: 409032 - DNA, 497 bp, Oryza sativa
tttagcttagctttgctgctgctccttctcattcataagccagcagctagctagcaagcagcacacacatatatcacaggccatctctctatccctaattaagctatatactccatatagctagctaaacacaggaggagtggaggaaggagaggctagctgatctagctatctgcagtgattagttaaaatgatggcttctgataggttggatgcagaaaggatcatagagtacttcaagggcaagagcatcctcatcactggagcaactggctttcttggcaagattcttgtggagaagatactgagggtgcagcctgatgtcaagaagatctacctgctcgttcgcgccatcgaccaagcatctgcaaaccaacgcgtccaatctgaggtgacggagacggagctgttcagcgtggtgaaggagaagcacggcaagggattctcgcgattcatcgaggagaaggtggtcgccctcgccggcgacatcatctacg

SEQ ID NO: 409033 - DNA, 435 bp, Oryza sativa
tcggtaccacccgcactcgggccaaatcgcggtgccggacatagagacgatcgtgggtgggaacctggctactggagtggatgcaagtgcatgccggcgagcgaatgaagacaatgatcatcaacaagtgacggactcactgctacatgacgacttgcaaagagaaggtccaatagaacgcagcaagtttatcaagatggaaatgttaaccaacaggtaacttgactatgatgaccggagatcaactacaattgcaattgaataactcaacgctagacacttggaggggcagacaataaaagttaatggggcatatgccagcactaagagagaggatacctgaggccattttaatactaatgatgtcaatgtacgctcagaagaaacagatgctgctaaggttgctgtacgtgcatgattgaccagaggctcaca

SEQ ID NO: 409034 - DNA, 474 bp, Oryza sativa
tttgttttttaaactggagggggatttaacttttttgttttaaggaaatgacttatacagttctgagagtaaacagcaccttggatgaaagaaaattacatacaggatcgctaatcgagagaaggaaagctaacaaaaaatgcacctacagagtacaatatgactcctacatgatacgaggacagtaacagagggaaccatacaaataccaaagggggatcccatatctctaaaaatgcagaaaaacattatatatatgttctagatatatatatatagcctgcatccaactaatagaagattactagattggcaaataacaaaggtggaaaaggagaggttcacgaaaggcttcatctactatatgtataagggggtgcggggttcatgatcatactaattggccatacagagggggtccagctatgtacgcagtgtttttcatggggggtgacttacttatgctactctatg

SEQ ID NO: 409035 - DNA, 523 bp, Oryza sativa
  unsure (1)..(523): unsure at all n locations
tcggtcggatctaattaatttacctcctccacctcctcctcctccccccgatcggatcggcccggctcctcctcctccgccgccgccaccgccgccgcagataggagaagatggccgcacttgataccttcctctttacctcggagtctgtgaacgagggccaccctgacaagctctgcgaccaagtctcagatgctgtgcttgatgcctgcctcgccgaggaccctgacagcaaggtcgcttgtgagacctgcaccaagacaaacatggtcatggtctttggtgagatcaccaccaaggctaacgttgactatgagaagattgtcagggagacatgccgtaacatcggttttgtgtcagctgatgtcggtctcgatgctgaccactgcaaggtgcttgtgaacatcgagcagcagtcccctgacattgcacagggtgtgcacggccactttaccaagcgccctgaggagaatgtgcttgtgaccagngacacatgtttggatatgcaactgatgagacccct

SEQ ID NO: 409036 - DNA, 302 bp, Oryza sativa
tcgggcccgggttcttgctgctcttcgccttcttcgctgcgcagatggtggcgacggcgatcgccgtgtacgcgcgctgggatttctgccggatccagggcatcgggtggcggtggggcggcgccgtgtggcagttcagcgtcgtcacctacctcccgctcgacgtcctcaagttcatcatccgctacgccctcaccggcggcaaggccggggacagcgcccagaaaaagtgagggaatcctgggtgtttgtctcgcgcacacggcgttcacgacacaaggaggaggagctcacccagcccc

SEQ ID NO: 409037 - DNA, 350 bp, Oryza sativa
tcggctcaagctcggcctgagcatcgacgaggacgagacggcggaggccgacaccgacatgccgccgctcgaggacgacgccggcgagagcaagatggaggaggtcgactaagcgggtttcctttttttttcccctcgacaaatccttcgcagcgaaagtacaccatggagcattggagctagcttatctgttttaccttttgaacatcgcgttgttgggtcggttcggttattttgtgcgatttgctttacctttacctagcctgcaatgcatggggctagattgtgctatgggttctcgaactgcgtacgttaattatattgctaaatatgagtattatattagtgtc

SEQ ID NO: 409038 - DNA, 439 bp, Oryza sativa
ttacatgggacaacggcaagccgtatgcgcaagctgccaacattgaagtgccaatggtggcacggctgatgcggtactatgctggttgggctgacaagatccatgggcttgtcgtgccggctgacggcccacaccatgtacaggtgctgcacgagcccattggtgtcgcaggtcagatcatcccatggaactttccgcttctgatgtttgcgtggaaagttggccctgctttggcttgtggaaacactgttgtgctcaagacggctgagcaaactcctctgtctgctctatttgcttctaagctgttgcatgaggctggacttcccagatggtgttgttaacgtggtatttgggtttggacctactgctggtgctgctcttgctagtcacatggatgtcgataagattgcaatcactggaatcgccgatactggaaaag

SEQ ID NO: 409039 - DNA, 541 bp, Oryza sativa
  unsure (1)..(541): unsure at all n locations
ttgagaggacgctcctggctatgccagaaaatggcattggcttgttcccggacgttggctttgcttacattggtgccaaagctccaggaggtggtgctgttggatcttaccttgggatgacagggaaaaggatatcatcacctgctgatgcccttttctttggtcttggaactcattatgtaccttcagcgaacctgggacctctcagggaatccctcttgagtgctaacttcacagatgatcctcacagagatgttgagtcattgctgacaaagttcaagaacgagccagagtcagggccccagctagataagtttttaccatatatcatttcttcctttggtcctgacaaatcagttgctgaatctgtggaagagcttaagaagtgtagtcaaagtgatgatgctgcagtggcagaatgggccaacgaggccttggcaggactcaaaaaaggggctccattttctctatgtttaactcaaaaacanttttctcaagttgcatagcatataggaataatgaacactatctatcgaagttg

SEQ ID NO: 409040 - DNA, 559 bp, Oryza sativa
ttttattagagagagaagagagaagacggggggggaaaaaaatcacaagagaggaggagaaaaaaaaatcgcagcagcaaaccctcctcctccgccatccgccgccttccctcctcccccacgatctccggcggcggcggcggcgatggcccggaagaggaagacggacgcggcgccgcggctggacgaggccgaccggacgctctactccaccttctgcggcgccgccaactccctctcccagctctacacccaggccatggcccagcagaagctctccttccaggccggcgagcgccactccctcgaaaaactccaccagtggatattgagaaagcatgaggaagagtcgaggctcacggcggctgatataatgtctcatatccagcatgagttggattatggaggtaatgatccacatgtttcccccagagtacatcagcatagtgcaaatccgtttgcaaactcaagcatccaaccctcagctggttcctatggtcaagcaacagtaggatttgcgcctagacccagcatcagcgatcagtcaagaatccaattt

SEQ ID NO: 409041 - DNA, 452 bp, Oryza sativa
attgtacatactctactactactagccagtaagctagctaactaactacgtggctatggcccccaccgtgatggcctcctcggccaccttcgtggctccattccaagggctcaagtccaccgccggcctccccgtcagccgccgctccaccaactcgggcttcggcaacgtcagcaatggcggaaggatcaagtgcatgcaggtgtggccaattgagggcatcaagaagttcgagaccctatcgtacctgccaccactcaccgtggaggatcttttgaagcagatcgagtacctgcttcgatccaagtgggtgccttgtctcgagttcagcaaggttgggttcgtctaccgtgagaaccacaggtctcccggatactacgatggcaggtattggaccatgtggaagctgcccatgttcggctgcaccgatgccacccaggtgctcaaggagc

SEQ ID NO: 409042 - DNA, 339 bp, Oryza sativa
tcggaacgaacaacgcactctgcagctagctatacaatctctgtttaattagctaggtagctagcgagtcataaatcaagaagccatggacttttacgggcggcgcgagcagtacggcgggtatggcgggtacggtggcggcggcgccctggcgacgccggggtacgcgccggcggcgccgtacgggatgtcgcaggtgaacatcgaggggaacgggtgtggcaggacgctgccgccgcagccgacggtgaaggtgtactgtcgggcgaacccgaactacgcgaagacggcgcggaacggcgcggtggtgctggcgccggcgaaccccaaggacgagta

SEQ ID NO: 409043 - DNA, 443 bp, Oryza sativa
tcggtcttgcctaggcggcaacgcctcccgtcctttataaccctgcggctcctcccgcgtgaggcaccgaggcccgggtggtagaccgcgggacccgagccgagccgtgccctgccctgcccttcctccgcccagggtcgcagccaggtcgtcgtcgtcgtcggagggggaagagagccgcggcggtgtcaggaggaggaggaggggcgagatggaggcggagaagaagccgccggcggcgtccgacgtcggggcgtgggcgatgaacgtcgttagctccgtcggcatcatcatggcaaacaagcagctcatgtacttctccggctacgccttctacttcgccacgacgctgaccggatgccactttacggtcacggcgctcgtcggatggaactgcaacgccacccgctactccggatgcaagcacgtaccgctctgggagc

SEQ ID NO: 409044 - DNA, 404 bp, Oryza sativa
ttgtacataaccaaacccgacagatcttctcttcttcctcctccctttcccatcttcgacgaggcgacccggcgcgagagaagaagagatcgatcgatcgatcaaccgatctcgccggagaaggaagaggagcaaagatgtcgtccgtgttcatcggtgatgagacggtgcccttttttggctttcttggcgccgccttcgcccttatttttttatgcatgggtgcggcgtacgggacggcgaagagcggctttggcgaggagtccatgggcgtgatgcgctcggagctcgtgatgaagtccattcgcgcccgtggatatggctggtgtgctcggtatctacggccttaacatcgccgtcattattagtacagggatcaaccccaaggctaagccgtactacct

SEQ ID NO: 409045 - DNA, 220 bp, Oryza sativa
gttcttttactcttcggcgactagatgacgaagcgcaccaagaaggcaggaatcgttggcaaatatggtaccaggtatggtgccagtttgcgtaagcagatcaagaagatggaggtttcccaacactccaagtacttctgcgagttcttgggcaaggttgcttggaagaggaaagcagttggaatctggggaagcaaggactgtggcaaggtcaaggctt

SEQ ID NO: 409046 - DNA, 495 bp, Oryza sativa
tttattatagcggcggcggcggcgggagagaacgagaggtgaccgatggcgacgggcggcgccgccggcgaggacgtccccggcggcggcgagttctacctgcggtactacgtggggcacaaggggaagttcgggcacgagttcctcgagttcgagttccgccccgacggcaagctccgctacgccaacaactccaactacaagaacgacaccatgatccgcaaggaggtcttcgtctccccctccgtcctccgcgaggcccggaggatcatccaggagtccgagattatgaaggaggacgacaacaactggccagagcccgaccgcgtggggaggcaggagctcgagattgttatgggcaacgagcacatcttctttaccacctccaagattggctccctcgtcgacgtccagaccagcaaggaccctgagggccttcgcaatttttactacctcgtccaggatctgaaatgtttcggttttcactcatcaatc

SEQ ID NO: 409047 - DNA, 472 bp, Oryza sativa
gaccttaggacaccaactttgcacttgaattgacatacaattatggtgttgataagtacgacattggagcaggatttgggcatttcgctattgcaactgaggacgtgtacaaattggctgagaaaattaaatccagttgttgctgcaagatcactcgtgaacctggtcctgtcaagggaggatccactgtgattgcctttgcacaggatcctgacggttacatgtttgagcttatccagaggggtccaacacctgagcctctttgccaagttatgcttcgtgtgggtgaccttgatcgctccatcaagttctacgagaaggcccttggtatgaagctgctgaggaagaaggatgtacctgactataagtataccattgccatgttgggctatgctgatgaggataagacaactgttattgagttgacatacaactatggtgtcacagaatataccaagggcaacgcatatgc

SEQ ID NO: 409048 - DNA, 462 bp, Oryza sativa
ttggttttaaacgattttagggctttctcatttgctgccctctcgcagttttatcacgagcttaaattttgtacacaattgtacatcatgcagggccatgtaaggaatgaatactttcagggttaaacttcttctctgggggaagaccggggattagaacatctactgcctatccaagaacatgtaatccgcagttgtggactggaacccattgtgagccgccgttgcatctgccatctccttgaggaaggagacgacctcctctgacgagttaagcaggtagcgggcgttggaccgcttccttccaacagcgcaggagaaataattctcgcccttgaggtcaaggaccgaggacccttcgcgccagtcatggtggctgtttggggtgccctggcttgatgaagatgatgacgatgacctcttccgagcagcctgtgccttgggtgtccttgactgcgagtt

SEQ ID NO: 409049 - DNA, 457 bp, Oryza sativa
ttggtttttagaaatatgaggggaaggttcagtttttaataacagaaacagattccagttttcaatagcagcagaacaagcgcatgccacaagccaaaataaagacataggaattagcaatgtaaatactcgcattccacaacagccgaagggcaataatcaggctcagaacaagtttaaaccgaacagaaaatagagagttttaaacgacacagtgcacacagcgggcatatgataataacggtcaatgcaacgagtgccatggccgtgcacaaaacttaacgaattagtaaaagctagatatcttaaatgcagacacgcaaaccaccacttgaacgaggatcatttctttttggcggcagccttggtcaccttggcaccggttgggtcctttttctccacgttcttgatgacgccaacagccaccggttgcctcatgtcacgcaccggaaaacga

SEQ ID NO: 409050 - DNA, 446 bp, Oryza sativa
ttggtttttttaggtgggggggtttgcttattacgtttaatataatcatttgcgttccttcaaatcacgcttgcgccacgcaacatcaaaattaagcgttttgtgggagcatgtccacccacatctgaccgcggggaattattgctcaaaccctacgagcaaatctaaagcaccatcttcacaaaatttacggaaacgaagtggttctattcccatctagtagggctccactggtgcacggaatttggcttcggcatagaccgcaccagcaccaagctcctccttgatcctaaaaagctggttggacttggcaaggcgctcaaatctgcaaggagctcccgtcttgatctggccccgggataaaccaacctgccgatcagcaatgaatggatcctcagtttcaccactcctgtgactggggattacaccccagtcagaacgttttg

SEQ ID NO: 409051 - DNA, 295 bp, Oryza sativa
ttggttttttgatgttggggggtgtttgtttaacgatgtttccacaacaccagtatacagtatttgagttacttaaacaaaaggtagcacaacaatggtatacaaaagtgtgcattcaaattgatgcacagaagtaataaacaactagatacttagaatgctaacgctttggctaatttattcattcaccctatatttacaattgttaatcccaaaacagaacttctttagaggacttttagctaatttcttcagtgttgatgtcatatggattcagagaactaactggcagcat

SEQ ID NO: 409052 - DNA, 466 bp, Oryza sativa
ttgtttttaacagtgccaggggtcacaatcttgccattcttgaaagaattatgattcacaggctggttctcagacaataatgtggtgcaggaaaaaataattcgcacagcaggttaccgaccacttggagtaccacagaaagatttcaacggttgaagtcaagttaatcgataacatcaaaaatgatttctgaacttgttgcacaaaaaaatgatagttgagaaaacaataaaagttccaagcagggaagtctctagaaattcgaggagcatgaagaaaaccatttagaacacccggatcacttttcccatagtgctcttcaggtacaagcatctcacgttctgccaattcttcttcaaaagagagacaaggaagttcacgctcatttgcacattttggaaaatttgcttctcctccatagcacagttgcctacagcaacaccccatgcaagaaccttttttaggt

SEQ ID NO: 409053 - DNA, 387 bp, Oryza sativa
ttggtttttttttttttggggtttttatatggacatcaagcttattgagtatgctctgtttctcatccacaagaaaaattaacagaccaagttttgctggttttcaaatctaagggcaggccaaattatactccaatttccaaccaagcttgcaacaacgggggaaatttggggcaaaaacaaggaactaaaatcttttctgccgatgaatagcttccgaaaggggtagattccactttttcaacaaggttgcactgcattgggccattatctttgaggcttttgtgattgcctcagtcatatagaagttctccacaacagttttgaatggagtacagctcacttgttgctttaccgggggcttcacttcagaggaaatagtggacg

SEQ ID NO: 409054 - DNA, 452 bp, Oryza sativa
ttgttttttttttttttttggtttttttaagacaagaacaatttaaaggtggcattcttcaaaccagaacatgccatgacaaggggatgcgatagttagcacctagagtactttttagcgaggatttaactcatgtcaacaatgtatcaaaaaaggatggcacaaaaatttatcattactatccatcaccaacagcgcgtcccactgtaactcaaaggagagcttcagccctgatgatagcaggttcagtcaaattgtactttatccagctgcgtaatcatctcctcaaacttcaaaatctgtctcaaaaagtaatcaccatggttcttggttaacttggattcaacaacatgaataatgtcctcatcaatatagaagtcaaagtctgcactggatatgacctttccgtcactgtcgattgaatgcattttgtgcttgtatgtcataagaat

SEQ ID NO: 409055 - DNA, 440 bp, Oryza sativa
ttggtttttgtatgctgtgggatttttttaaactaaatcatattggtttcaagctgtttggaaaatcctatgaatacaccataggaaaaactgctcatttgaagctataggattatacataggcaagaagcaacgtttttggcctagtcaaaatctggcaaaacatgccatagtatcatcgacgacgagcacaagctgcttgtctaatcgtccagctcaatgatcttcacaaccgaggaatctcccaccttctggcagacaacatcgcgatcatgcgactttatcacaccagaaactttaccgtggtcaagagcaaccttcaaaacggattcatttgtagcgttggttgattcaactggatgcctcggaacagcaagcatcggaaagaggcctttaactatgagcgattgtcttgcttcaaatgcgccagtgaaactcca

SEQ ID NO: 409056 - DNA, 416 bp, Oryza sativa
ttggtttttggaaggggaggggatattattccaataatgaatctataagtgtttcttaattaactcgttgatcaccaactttacaaacatcgactgacgggtccttcttgggacgacccaatgcattcctccggcacaacaatgtcgaatccactcagcgggcactctgcctccgcatacttgctgacgtatatctccggtccgacgtccagcgacgaccaccttctcttcgccggtggcgtgcccggatcctggtagaagtagagcgcctgcgacaatgctccgacgtcgagctcccatgtcctggggtcaccgatccacccctggcctttcgccgtggggtagccgaactcaccccacaccgggtgcggcacgagctgcaggatctcctgcggcttggggttgctgtacccgtc

SEQ ID NO: 409057 - DNA, 377 bp, Oryza sativa
ttggtttaattatgaaacggggttaattaagctcagtgtaagaacaaccatgtagatgatcatcagttaataattaattgagcactgcacaattgcgacgaatgttgccttgcgacccggtcttgaccccaacccggcccaacttggtcatagccgtgacgaaggcctggttgaaggcggcgctgctctgggcccaagaatccacgatgggcctggaccgtgggtccgagtacagcacctggtcagagcccagaaggcccatcccgttctgcaggttcttgaagtactggttgtcgaaggcccgcggcgttaccgggtccatggtcacggggatccgcgggtccacgttgggtgggcacgacctctgtagctgggct

SEQ ID NO: 409058 - DNA, 417 bp, Oryza sativa
ggggagaatggaaaaagtcaaggttcgataaatattgcttcacttgtacaaaggacagataaaaatacattgatacatgacacggagagagccatgcacaccacttatttggacacacagagggcaaggctgcagagaaaatcaagcaacacaagctgaactcacgggcccacctgtcagcctttcactggtcgaggccggagacttttgggaaaaacagcaacaccacgcatgcagaagaagacaaattattacacacacaaatcgacgacacgggggccggcgacgtacggggaggtcgtcgccgccgccggcgacgttgtgatgaggtcgatcagccgaagaggtggtgctttttctcgccggtggactcctcggcgctcttgtggtccttcttcttttcgtggtgcttgtgga

SEQ ID NO: 409059 - DNA, 376 bp, Oryza sativa
ttgggtttttgaactttgtgggttattattgcaaaaacatcatcttcttcttcatcttcttagtgtacacaacaccaactcgatcatcatctcgtcgccctaaacccatctttcccaacccaaagacaacgaactcgctggccacaaatccatccaaccacaattaaccactgctaagctacggtcccccactttacttgccggggacgaagttggtggcgttcgcccaggctctgttgttgacggggtccgccaggtggccgccccggttcttgagggggcccttgccggtgactatggcctggacgaacaaacctaacatggagaacatggcgaggcggccgttttgatcttctttaccttgagctccgtaacc

SEQ ID NO: 409060 - DNA, 355 bp, Oryza sativa
ttggtttttgagaaaaaagggggtggcattgccattgtgcttcaccttaaacacttatatatgtgaaggtgaccaaaaattatataacactaccatgtagtagaaagctggagcaggagggacaaagattacagcaattcggtttaaggacacttaggtgagtgcagaattgcagtcaagttaaagcgaaacaggaaaatctggaaaaaaaataatcctcttttttctttctttatggacaggctggatcacacggtggtagactgatggatggtctcaatgtccaggcctttgagcttaacaaccggttctacatgccccttgagcgtatggagcttcctaagcctggcaaact

SEQ ID NO: 409061 - DNA, 359 bp, Oryza sativa
ttggtttttttttttttttggttttttttttttttttttttttttttttttttttttttaatcctcaaaaagggttacttatgcagggaaaagggttttatgctttttcatacagggggacagggggggtccatataattgggaaaaacaaagggaagatggatttacagcagcgtttttaaaatacaggggacttatagctacaagctgatcacacaagggaactttgctgctgatgatgatatggaacatgttgttatagcttacccccaccacgggttggcgccggtcctgaagtcggtctccacccacggcacgaaaagaaccttgccgtcgtcgacgttggcgtgcaccaatgc

SEQ ID NO: 409062 - DNA, 452 bp, Oryza sativa
ttggtttattaagaactaggggaatttttttcagtctggttgcgaggtctgaatagttaatatgaatcatagtttcatttttttttcttgatccactctatctatttcgtgttccagatactagaataaataatatccgacgaattagaatcatcttgatagagataacaggggctttctatgtattatcaataggagcaaattctaacaagtcacacactcagattccagagataccgaaaccaaaaaattccacggtcgaactaccagaatgtctagaaatgtagagcttaaagtagaaaggctcttttggatggaaaaactatgacttcgtagttttcgttagtagaaacctaattcattaaaattccgtccagtaaaacggaagaattataaatttctaaaataatagataggaataccgcgaataaagccattgcgacccccataaa

SEQ ID NO: 409063 - DNA, 405 bp, Oryza sativa
cttaatttcatggccatgtaccgaaagatttacaggggggaattccggtgcccgagatggttctccaaggatctttccagtctactgaatcgcatccttgacacgaacccagagacaaggatcactgtcaaagaggtcatggagagcaggtggttccagaagggattccggccggtcagattctatgttgaggatgatcaggttcacagcttggcagatggtgataatgatatgccggagttggaacctagtgagcctccttctccttctacgtttccgccgccgtcgtcgcagcaagatgatgacggtgaggagtcgggatgggagtcggactcattcgtggcatcatgttctgccacattggcatctgaggagctgtggcaaagacctctttggtctttcaca

SEQ ID NO: 409064 - DNA, 423 bp, Oryza sativa
tcgattcgacataggcataactatgctcatgtgacaactcacactgcacaagattgggccgaaacttttgtatgtgagttaaatgagacagttgctgaagctcagctgagaacaagacaagttccacctgatctccctagtcaagcagcaattcaacaatatctgcattccaaaaatcggttgctcatattggggttcaattcaacattgactgagccagttgaatcctctgggagaaggggtggtgaccaaatcaaggaaatggagctcaagttgcatcctgggttgaagggccctttgagagccctctgtgaggatgagcatactacagttattgttcttagtggaagtgacaggagcgttcttgatgaaaatttccgagaattaatatgtggttagcagcaaagcatgccatgtttttac

SEQ ID NO: 409065 - DNA, 401 bp, Oryza sativa
gagctcaatcagcaacaacatctatctccttcttgcttagttaagtccttcgccctcccaagaagaagaagatgtcttgctgcggcggcaactgcggctgcggcagcggctgccagtgcggcggcggctgcggcggatgcaagatgttccctgatgtggaggccacagccaccaccaagaccttcgtcctcgctgctccatccaacaaggcgagctctggaggaatggagatggcggtggagagcggcgagaacggcggctgcggctgcaacacctgcaagtgtggcaccagctgcagcggctgctcctgctgcttctgcaactgaatatatcgtcgtcgtcgcccggctgcatgaggatatatcgtatggatgctgctactgtcgatcaaagctttgatc

SEQ ID NO: 409066 - DNA, 440 bp, Oryza sativa
ccgcaaggggatccgccagcgtacgtggggcaaatgggcagatcaaatccttggtcctcagcaagggtgtccgtgtttggctcgcaacatataacactgttgaggaggcagatactgcatatgacgctaaagcccgcaagaaccgtgtcatgaatgccaaggtcaactttcctgatgatccaaatgttgctcagaagctccacctgaagcagaacgctgtcatgcatgacaaactagcttcacctctgaagacctgtggcgatgatgctttctttcagctcaacagttcatacaatgatctgtctagcaatgcttgcaaaggcgcctgcaaagtcggcagagactgctgaactatgcccttagtcaaacctgttgctttcactgtgaaatttctgattaacatgctctttgattcatcagcaactcattcggttcttcag

SEQ ID NO: 409067 - DNA, 353 bp, Oryza sativa
gctcgtttatcgccatctctctcagctctcacagctcactgcatcaatggccgcggccaccatggcgctctcctccccggtgatggcccgcgcggcgccgtcgacctcctccgcgctcttcggcgaggcgcggatcaccatgcgcaagaccgccgcgaagcccaagccggcggcgtcgtcggggagcccgtggtacggcgccgaccgcgtcctctacctcggcccgctctccggcgagccgccgagctacctcaccggcgagttcccgggcgactacgggtgggacaccgcggggctcttcgccgacccggagacgttcgccaagaaaccggagctggaggtgatccactccc

SEQ ID NO: 409068 - DNA, 259 bp, Oryza sativa
ttagtgagacactcactgatataatcaagctagctagcttaatcacctagctatccgtcagtttagctagatatggctgcagttaactgcaaggtggtggccgccgcgattgtggtggcgatggtggttgcggcgccgggggcgtcggcggcgataacttgcgggcaggtgggatcggcgatcgcgccgtgcatctcgtacgtgacggggaggagcggcctcacgcagggatgctgcaacggagtgaaggggctgtaca

SEQ ID NO: 409069 - DNA, 456 bp, Oryza sativa
tttcttgatctgatcgtcggacatggcgtcgcccatgctctccgccgccaccgtgccactccagggaggcggcttgtcggagttctccggcctgaggagctcgtcgtcgctgccgctgcggcggaatgccacctccgacgacttcatgaacgcggtctccttcaggacccacgcggttggcacgagcggcggggcgcggcgggcgccgacggaggcgaagctgaaggtggcgatcaacgggttcggccgcatcgggcgcaacttcctgcggtgctggcacgggcgcggcgacagctcgcccctcgacgtcatcgccatcaacgacaccggaggcgtgaagcaggcgttgcaccttctcaagtacgactccacgctcggcatcttcgacgccgacgtcaagcccgtgggcgacaacgccatcttcgtcgacggcaaggtgatcaaggtcgtcttcga

SEQ ID NO: 409070 - DNA, 449 bp, Oryza sativa
tagtttacgagcaccacacaccatcagcagcagcaagtcgatcgatcgcgagcacacactaccaagatcgagatggcccgtgcacagctggtgttggtcgccctcgtggcagctctgctcctggcgggcccacacaccaccatggccgtcatcagctgctgccaggtcaactccgccgtgtcgccctgcctgagctacgcccgcggcggctccggcccgtcggcggcctgctgcagcggcgtcaggagcctcaactccgccgccagcaccaccgtcgaccgccgcaccgtctgcaactgcctcaagaacgtggccggcagcatcagcggcctcaacgccggcaatgccgacagcatgccctgcaagtgcggcgttagtttcccctacaccatgagccctttcatcgactgcttcagcgtgaactaatttgatcgatcgatcgtacccgc

SEQ ID NO: 409071 - DNA, 327 bp, Oryza sativa
ttcatcccagagcaagaagctcatctcctcctgctgtcgcatggcagccatggccaccaccgggtccagcctcctcaagacctccttcgctggcgcgcgcctccccgccggcgaccgcaaccccaccgtctccgtcgcgccgcgcaccgtcggagccatctgcaactccatgtcgccgtcgcaggacactcccccctacgacctcaacgccatcaggttcagccccatcaaggagtccatcgtgtcccgcgagatgaccccgcggtacatgaccgacatgatcacctacgccgacaccgacgtcgttgtcgtcggcgccggctccgc

SEQ ID NO: 409072 - DNA, 433 bp, Oryza sativa
ttaatctcaagtctctgtctcgtcgtcctcgcatctccactcgccatgggcaagattaagatcggaatcaacggtttcggaaggatcgggaggctcgtggccagggtggccctccagagcgaggatgtcgagctcgtcgccgtcaacgaccccttcatcaccaccgactacatgacctacatgttcaagtacgataccgtgcacggccaatggaagcacagcgacatcaagatcaaggactccaagactctgctcttgggcgagaagccggtcaccgttttcggcatcaggaaccctgacgagattccgtgggctgaggctggtgctgagtatgtcgtggagtccaccggtgtcttcactgacaaggagaaggctgctgctcactcgaagggtggtgccaagaaggttgtcatctctgccccgagcaaagatg

SEQ ID NO: 409073 - DNA, 524 bp, Oryza sativa
tcgttccatctctctcagctctcacagctcactgcatcaatggccgcggccaccatggcgctctcctccccggtgatggcccgcgcggcgccgtcgacctcctccgcgctcttcggcgaggcgcggatcaccatgcgcaagaccgccgcgaagcccaagccggcggcgtcgtcggggagcccgtggtacggcgccgaccgcgtcctctacctcggcccgctctccggcgagccgccgagctacctcaccggcgagttcccgggcgactacgggtgggacaccgcggggctctccgccgacccggagacgttcgccaagaaccgggagctggaggtgatccactcccggtgggcgatgctgggcgcgctcggctgcgtcttcccggagctcctcgcccggaacggcgtcaagttcggcgaggccgtgtggttcaaggcgggctcgcaaatcttcagcgagggcgggctcgactaccccggcaacccgagcctgatccacgcgcagagcatcctcgccatctgggc

SEQ ID NO: 409074 - DNA, 404 bp, Oryza sativa
tcgttcttctcctccccctctttaccttttcctcctcggttcggttccgtggttcgtctagggtttagtgggttgagatggcggcgccggatgtcgagtaccgctgcttcgtcggcggcctcgcctgggccaccgacgaccgctccctcgaggccgccttctccacctacggcgagatcctcgactccaagatcatcaacgacagggagacggggaggtcacgtgggtttggcttcgtcaccttctcctccgagcagtcgatgcgcgacgccatcgagggcatgaacggcaaggagctcgacggccgcaacatcaccgtcaatgaggcccagtcccgccgctccggcggcggaggcggtggctacggcggcggcggtggcggctaccgcggcggtcgtggaggc

SEQ ID NO: 409075 - DNA, 534 bp, Oryza sativa
ttcgtgtcaccgacaggaggcgcgtctcctccctcctcacctccatctccataaacacagcaggctcacgcacacgcctccgccccggaggaaggaaggaaggaaggcaaggaagccaagcccgcgaccccgacctacccccaccaattcaaccctccctcctcagatccaccaccaccgagcgcccgcgatgacggccaagggcggcgccgcgccgccgccgggcggcgcgggcggcctcccgaacggccgcttcttcaccgtggggctcgccaccgcctggtactcctccaacattggcgtcctcctcctcaacaagtacctcctcagcaactacggcttcaagtacccaatctttctcaccatgtgccacatgtccgtctgcgcccttctttcctacgccgtcatcgcctggctccgcgtcgtccccatgcagatcgtccgttcccgcgtacagctcgccaagatcgccggcctaagcctcgtcttctgcggctccgcggttccggcaacgtcttgctccgctacctcccg

SEQ ID NO: 409076 - DNA, 434 bp, Oryza sativa
tgctgatcctgtcctacaaccagctcaccggcccgatcccgcgcgacgacgcgcaggacgagatcaacaccggcgacctctcgcacaaccgcctcaccggcgacgcctccttcctcttggccgacggccggcccatcggcaaggtggacctgtcgtggaacgacctcgacttagacctcagcgagctcgtcttcccgccggagctgacctacctggacctcaggcacaaccgcatgaggggcaccgtgccacgctccctcgccgtgctctccacgcgtgagacgctggacctcagatacaaccgcctctgcggcccgctcccgaggctgcacggcgtcatccgccacggctggaagccgtacgagcacaaccagtgcgccggcggcgccccgctcggcgggtgccaccaatcgtgagcatccatccatccatca

SEQ ID NO: 409077 - DNA, 475 bp, Oryza sativa
ttaacatcacagtttgatttggtcaagtccggagcaaaggctgaaggggatgttgtatcagtgaattttgcatacttgaaggctggcacaccgacaccaacgggttttgtcatgaatctacaaccatctgaagcagagataggtctagacatccgactccctcctagtgttcatactgaggctctagagaagcgtcttgctgaagaatgggcaccttcttcacgcaacttgacatttgagttcaaacaaaagacctctgtacttgacaactttggcaagccagccgtcacccctgctgatagctcaaatgtatggtgggctctatttgaagaggctgtgaagagagccggtggcaaacttggtaagccggaaatattcccggcctctactgatgctcgttactttcgggtgcttgggataccagcatttggtttttcttcaatgacaaacacaccgatattgctccatgatcaca

SEQ ID NO: 409078 - DNA, 512 bp, Oryza sativa
tcgttatggtccaggaggccgagaagtacaagtcagaggatgaggaacacaagaagaaggtggagtccaagaatgcgctggagaactacgcctacaacatgcgcaacaccatcaaggatgagaagatcgcctcgaagctcccggcagcggacaagaagaagatcgaggatgccatcgatcaggccatccagtggctggacggcaaccagctcgccgaggctgatgagttcgatgacaagatgaaggagctggagggcatctgcaaccccatcatcgccaagatgtaccagggcgctggcgcggacatggccggcggcatggacgaggacgatgctcccccggcaggcggcagcggtgctggccccaagatcgaggaggtcgactaagcgcgaaatttgctagtgatccgcgctttaagttatcttattgcattagtgtctctctgatgctgcgttttaaaaaactttgctgctatgatgatacccttggtctgtttggcagtctttttggat

SEQ ID NO: 409079 - DNA, 449 bp, Oryza sativa
tcttcaagaagagggagagcaccaaggacacgcgactagcagaagccgagcgaccgcctcctcgatccatatcttccggtcgagttcttggtcgatctcttccctcctccacctcctcctcacaggttcttggtgtagcttgccactttcaccagcaaagtttcatgtctgatctcgacattcagatcccaactgccttcgatccctttgctgaggccaatgctggagactctggtgcggctgcaggatcaaaggactacgttcatgtacgcatccagcagcgtaatggccgtaagagcctgaccactgtccagggattgaagaaggaattcagctacaacaagatcctcaaagatctcaagaaagagttttgctgcaatggtactgctgtccaggacccagagcttggccagtcattcacttcagggtgatcagaggaagaacgtatc

SEQ ID NO: 409080 - DNA, 552 bp, Oryza sativa
tcgtaaggatgaaatgttctttgactcgcgggcatggttagattctgattgcgaggacgacttctacagtgtgaatggagattttactccgtctcgtggcagcactccaaactaccaacccagaacacaaacagttatgagcaatgtctttgtacctgataatgtacagaattccaaatcacctgaaccttctccaactggaaggagaaaactagccgagctcttgcaggaggcgatgcagaatggttccgaagatagcaccgatgcatctgttccagacatcagcaagaatgagaagcagcaattccagcctatttctgcagctgtgaagccagtatctgagtccagctccacgtgtagcacagaaccgacgccgatcagagaagcgaagaatcgcaaggagaaggcgtggtacaccggtcgctgttgcttgccggcttttgttcataccctagacttagatgagaggaggcagaagatgacccctgggccttgtgcttgttgacatggcttgttcccttctatgaagctgatctacaatatactacctga

SEQ ID NO: 409081 - DNA, 473 bp, Oryza sativa
gttcttgcggacggagcaggatcttcaaggtctcaaccatctgataggtaagattgtagaatcaggggcgaaggattttgccagggcaatcctcaggacttcattgctcgcatcttgtgtcgttgcctgccaaagcaaggcgcttactttaggtgatagcaaggaaatcatagctcagagattacatgatcgtctacaagattgtcctggtggtgaacgtttacaaattgaggcaggtgccaaagtgcagaagtttatagaatgggcattgcagtgcattcatctgcatcgttgttctgaagatacagagtgttacaaagcaaactgcagcactcaccaagaggtacagttccatctatcagcgtttaaagccttcttggacatagctggtgacaatctcagtggcaagattttcactgaggcattcgatgcggcctgcttcccacttacactattctcaactttatttgaac

SEQ ID NO: 409082 - DNA, 425 bp, Oryza sativa
tttcttctcctccccctctttaccttttcctcctcggttcggttccgtggttcgtctagggcttagtgggttgagatggcggcgccggatgtcgagtaccgctgcttcgtcggcggcctcgcctgggccaccgacgaccgctccctcgaggccgccttctccacctacggcgagatcctcgactccaagatcatcaacgacagggagacggggaggtcacgtgggtttggcttcgtcaccttctcctccgagcagtcgatgcgcgacgccatcgagggcatgaacggcaaggagctcgacggccgcaacatcaccgtcaatgaggcccagtcccgccgctccggcggcggaggcgggggctacggcggcggcggtggcggctaccgccgcggtcgtggaggcggcggctccgaggaagtggcggc

SEQ ID NO: 409083 - DNA, 351 bp, Oryza sativa
ttatcttccgaacaagcacaaccgtctttacatggaagctcgccccttggaggagggactggccgaggccatcgacgatggacgtattggcccacgtgacgatcccaaggtgcggtccaagatcctgtctgaggagtttgggtgggacaaggacctcgccaagaagatttggtgctttggacctgagaccactggccccaacatggtggtcgacatgtgtaagggagttcagtatcttaatgaaatcaaggactctgttgcggctgggttccagtgggcattaaaagaaggtgcattggctgaggagaacatgcgcggcatctgcttcgaggtatgtgatgtggttctcca

SEQ ID NO: 409084 - DNA, 299 bp, Oryza sativa
tttgtgtttttttaacgacggggggatcattattagattattatatatgaaaaatatataagtagcgcccatagtacactacatgttaacgttggaactcaccattacattatatagggcccgtacccttgcagcaagaaaataaacaaagctagcagggaacagtaactctctagatcttcccatacatatcgatctcagctggagatgatcaagctagtaaataggtgatcttggagcaaactactggggtgctgatggggaaggcgacggaaacgccacattttctggggatggag

SEQ ID NO: 409085 - DNA, 538 bp, Oryza sativa
ttacctgtcctaagaaccccctcaaacatgatgaaacaagtgtcagaaatatacacaacaactgtgttcaacattcttgaggaagaattcattggatctttaggctattatatctctagtcttgacaatgatgggttgattgctgcgtatagcgtcacaaaggaggatactgaagccacatgcagagtcaggtatgatacttctggcaatatagctaagtgcagctgctgcaagtttgagagttgtggtatcttgtgccggcatatactaagagtattcttggcccttgatgtacgcaccataccagatgtttacatattgaaacggtggacaaaagaagcaaagaatggctttgcgttggacgaatgcttgcggtacagtgagcttcaccgtgatgcccttagatatgcaagggaaggatcaacgtctggggatgtttttacctttgcacaacaaacttttaggttgcttctgctgaggtggttcacatgaaacaggaaactttttagccatgtacaatccgatgaactttgatgct

SEQ ID NO: 409086 - DNA, 253 bp, Oryza sativa
acccactccgatcgcaaatactctctctcgccgatagcagcagcagcagcaatggccgccctcgccgccgcatccaccgccttcgccgccaagccgcgcctggcgcgcgcgccgtcgtccccggccgcgcggttctccgtgtcgtgctccgcgtcgggcaacaacggcggcgccggcgagatggcgcagtcgctggcggcgtcggccaagacgttctccgcggcgctggcgctgtcctcggtgctgctctctc

SEQ ID NO: 409087 - DNA, 497 bp, Oryza sativa
ttacgctttcttgcataagaactcccccccctcctcgctccccgccgccgccgccgttttcttggagaggagaaatccgtaggctcagaggatttttggtagtcttgtttcgtgatattcgtgaagagggggggagctaaggggggattcgtaagatcagaattggatcacgcgggggcgcgctcgggatcgggggttccaaacacagcttcttcgttgaatttaagtggatgtactaatggagtcaaagggtggcaaaaagaagtctagcagtagtcgttccttgatgtatgaagctccccttggctacagcattgaggacgttcgacctgccggaggcgtgaagaagttccagtctgctgcttactccaactgcgcgaagaagccatcctgatagccctttcggcttctccatcctagtagtttaggattttttgcaattccattttggcacttttcttctgacctatttctctggctgctgctttctgataatc

SEQ ID NO: 409088 - DNA, 441 bp, Oryza sativa
  unsure (1)..(441): unsure at all n locations
tcaccattggttcctgaaattgagtcatggctgccaagctagctcgcctccacagtctccgcgaacgcctcggtgccaccttctcgtctcatcccaatgagttgattgcactcttctctaggtatgttaaccagggaaagggaatgctccagcgtcaccagctgcttgcggagttcgatgccttgatcgaagctgacaaagagaaatatgctccctttgaagacattctccgggctgctcaggaagccattgtgctgccgccctgggttgcactggccatcaggccaaggcctggcgtctgggactacattcgggtgaatgtaagtgagtcggcagtggaagagctgagtgtttctgagcacttggcattcaaggcacagcttgttgatggacacaccaacagcaactntgctcttgagctcgattttgagccctttaatg

SEQ ID NO: 409089 - DNA, 438 bp, Oryza sativa
tgaagcttctagaagcttcttccgagatgaaggtgatcgagaagatccaggaggcggcggcggatgggcggacggtgttctcgttcgagtacttcccgcccaagacggaggaggggctcgacaacctgttcgagcggatggatcgcatggtggcgcacggccccaacttctgcgacatcacctggggcgccgggggatccaccgccgacctcacccttgagatcgccaaccggatgcagaacatggtgtgtgtggaaacaatgatgcacctgacatgcaccaatatgccagctgagaagattgatgatgccttaacaacaataaagtctaatgggattcaaaatgttctggctctaagggcgatcctccacatggtcaggacaaatcttgtcaagctgctggtggatccgcttgtgctcttgatttggtacaacacat

SEQ ID NO: 409090 - DNA, 445 bp, Oryza sativa
tttgtgttgaaacacaactgagggtttattgatatatgttggatgaatccaataaaaccgatacaagtcacgaaaaatcagactagatgaatccttcgagatcacatgagcaaaagctttcgacgaaagctgtcctatagtcgtggaagcaataacacttgataaagataggaattcagacacgagaggttgcagactataagatgtcatcaaatctccttgaacgccgcgaagagatcaccgttgatgtagtcgttgtccacaagactaaccaagaagtagctcttctggaccttgtctagtatctccctagatgagtcgccctcagggaacaggcaagcccaaccctttgaccaaatttcgaaagcttcgtctttccaaaccataaagctggctgagtcaacgacagttggctggactatttccttgccagggaaaacacccc

SEQ ID NO: 409091 - DNA, 508 bp, Oryza sativa
cagagagcttgcggaagcgggggtttggtgcgggcgcgcgcgtgtgaggggggagagaaggccaggaggaggcgacgccgtcgcccgagggaggcaaaaatccgatcctcctcctgccctgctcgctcgctcgctcgcctgcgctgcgcgcacttggccccgtcccgtccgttcccgctcgccaggcatagaaagatggtgctctgggtcttcggctatggctccctgatctggaaccccggattcgacttcgatgagaagatcctgggcttcgtcaagggctacaaacgcaccttcaatcttgcttgcattgaccatcggggcacgccggagcatcctgcgaggacctgcacacttgagtccgacgaggaagccatatgctgggggattgcatactgtgtcaaaggggggcttaaaaaggagcaagaagcaatgaagtacttggaaaggagagagtgtgagtatgaccagaagatctctgtggattctacaaggaggagatctttga

SEQ ID NO: 409092 - DNA, 445 bp, Oryza sativa; identical to SEQ ID NO: 391952

SEQ ID NO: 409093 - DNA, 485 bp, Oryza sativa
tgtaacggacgcctcaacaagtgtggtgtcatcagccctcgcttcgatgttggtgtcaaggaaatcgaatcatggactgcgaggctgcttccctccagacagtttgggtacattgtccttactacttcagctggcattatggaccatgaggaagctcgcagaaagaacgttggtgggaaggtcctcggtttcttctactagaaagatatatcttgttgacactctacggggatttcttatacagtagatggattctcccagtaggtgttagtggaagagcattttattagcagttgagtcaaaaaccttgttaagatgatcctcgaatgtctgaattgccccttaatgccataatgttgcctgtttaattttgcttggcgacttgagtaagctgctgtattcttgctccttggatgccgcatgctttttttgtaaacttttataagctattactgaaaaattctggaagatattctatccttttt

SEQ ID NO: 409094 - DNA, 544 bp, Oryza sativa
tgttcttaagcagcagcagcagctagattggttggttgccaatgatcccggccatcttcccgatgatggacggcgccgcgcctctgcttcccgagacgagccccgagagccgccagcaacgtgatccggagagggggaagaggcggacgccggtcctcccggccgtcgtcgcgtccgccgtggtccttctcggcctcgcggcgctcttcctggtgtatggatttcacgacggtggagacgggagggcggccgtactcgcgcccggcaccgtggaggtcgcggcctcgtcgtcccgcggcgtcgtggagggcgtctcggagaagtccaccaccccggcgctgcgcctcggcggcggcgcggtccgggactacgcctggaccaactcgatgctgtcctggcagcgcacggcgttccacttccagccccccaacaattggatgaacgatccgaacgggtcactgtactacaagggatgggacccatttggtctaccaatggaacccggactcggccggggggggaacatcaccctggggcatgccgt

SEQ ID NO: 409095 - DNA, 461 bp, Oryza sativa
tgctcatagctatatacccagttttagtttcatactcgtcacccgacaagcaagcattccctcggcatacgttgagccgggctgctctaatcatgagtgagagccccatatttcttctggatgcatttacgaaccttattgtttactattcaccgtctgctgatccttcacttccttttcctccacctcatgactgtcttttgagaaccatggctaatgagttgaagcagggcaggtgtataacaccaaagctgacatttatccatggaggacgagaagatccagcattgtttgagaggtatcttattgaagagcaagatgttgacggtacagggtttacaagtggcaaagggttctgatcgcttcgtgagagcatcaagcatgctgcaacagacatcatcgagacagaaagtagtatctagttcaagacgtagcacatttagcttcaaaatcatggagta

SEQ ID NO: 409096 - DNA, 486 bp, Oryza sativa
tatatgtccgagaaatatattcggatgttagattaatttttgccaatgcaatgaagtacaatgatgaacgacatgatgttcatataatggcgaaatcattgcttgagaaatttgaagagaaatggctccagcttcttcctaaagttgaaaatgaggaaaggaaacaaaaggatgaggaatccaacggtgttccaaaagtgaacatttctccagaagaagctattgcaaaactagcaaaagatactgacaatgagctgattgaaatcaacaagcagttggaggagcttcggcaaatggtggtccagaaatgccggaaaatgactacatatgagaaaagaaaactgggtgcaggtctctgccacctgtctccagaagagcttactaaggcattggagatggttgcacaagaccaccctagctctgaagctaaaggagacgaactggaacttgatatggatgctcaaagtgagacaccctctggggctg

SEQ ID NO: 409097 - DNA, 440 bp, Oryza sativa
ttctgattggtggccactatggtctacttgacacccaaacttttttgccaaatcctgattactatagtgctctactatggcatcggcttatgggcagggaagttctttcagttgatatcaatgcgccgcgtaaactgcgtgcttatgctcattgcaggaaacagcagcaaggaatcaccctcctgttgatcaacctgagcaataccaccggatacaacgtcaccctccagaatgacatcaatgtcagccttgacaaaacagccagccttcataagcacaattctttctcacacagcctcagaagagcggtttcatggctggggcgcaagccgtcaagcgacgtcgcgaggagggaggagtaccacctgacggccaaggacggcgacctccagagcaggacgatgctgctcaacggcgcaccgctggaactctccgacgac

SEQ ID NO: 409098 - DNA, 511 bp, Oryza sativa
tcgtttcgcatcgcacttgtagctctcgacccccgcatctcatccctcctctcgcttagttcagatcgaaatcgcaaatggcgaagattaagatcgggatcaatgggttcgggaggatcgggaggctcgtggccagggtggccctgcagagcgacgacgtctagctcgtcgccgccaacgaccccttcatcaccaccgactacatgacatacatgttcaagtatgacactgtgcacggccagtggaagcatcatgaggttaaggtgaaggactccaagacccttctcttcggtgagaaggaggtcaccgtgttcggctgcaggaaccctgaggagatcccatggggtgagactggcgctgagtttgttgtgggagccactggcgttttcactgacaaggacaaggccgctgctcaccctgagggtggcgctaagaaggttgtcatctttgcttccagcatggatgcccccatgtttgttgttggtgccaatgagaaggagttccagccttg

SEQ ID NO: 409099 - DNA, 454 bp, Oryza sativa
  unsure (1)..(454): unsure at all n locations
tagaaacaaacccctctcactcccactaccatggatccttgcaagttccggccgtcgagctcgttcgacacgaagacgacgacgacgaacgcgggagctccggtgtggaacgacaacgaggcgctgacagtggggcccagggggccgatcctcctcgaggactaccacctgatcgagaaggtggcgcacttcgcccgggagcgcatcccggagcgcgtggtccacgcccgcggcgcctccgccaagggcttcttcgagtgcacccacgacgtcaccgacatcacctgcgccgacttcctccggtccccgggcgcccagacccccgtcatcgtccgcttctccaccgtcatccacgagcgcggcagcccggagacgatccgcgacccgcgcgggttcgccgtcaagttctacacccgcgagggcaactgggacctnctcggcaacaacttccccg

SEQ ID NO: 409100 - DNA, 494 bp, Oryza sativa
tttggaggagtgcacgcgaatccctcctcgccggcgagaatgcaggagcaggcgacgagctcgcggccgtccagctccgagaggtcgtccagctccggcggccaccacatggagatcaaggaaggaatggagagcgacgaggagatagggagagtgccggagctggggctggagccgggcggcgcttcgacgtcggggagggcggccggcggcggcggcggcggggcggagcgcgcgcagtcgtcgacggcgcaggccagcgcgcgccgccgcgggcgcagccccgcggataaggagcacaagcgcctcaaaaggttgctgaggaaccgggtatcagcgcaacaggcaagggagagaaagaaggcatactcgaatgatcttgaggtgaaggtgaaggactttgagaagaagaactcagagttggaagaaagattcttcaccctacagaatgagaaccagatgctcagcagatactgaagatacaactgtgagca

SEQ ID NO: 409101 - DNA, 398 bp, Oryza sativa
caagtccaaggaacagctgcttcttgaagctaatcaggttgctgagcagcaagaagcaacaattaaggagctccggagtgaaattaaaagaaaagaaattgatttttccagatcgaatgaattgagaaaggccaatgaacagaaactaaaaatcgccgagcaagaacttgagaggcagaatatgggatggttagcagcacagaaagagttaaaggaagtggcgcaactagcatgcaaggatatggatggtatcaaggatacagtcagtgacttcaaacgtgtgaggtctctgctggatgctgtacggtctgaactaatcgcttcaaaagaggctttctcctcctctcgaaaacagatagaagatcaagcagtgcagatgcagaaacaagttcaagaac

SEQ ID NO: 409102 - DNA, 455 bp, Oryza sativa
ttcgcttctggcccagataaaggtgttgaattggatggcatccttcgcacaaagccccttgaaactggaattgtcaatggcatggatgtttatgaatggaatccagcaacagatcagtacatcagcgtgaaatacgatgcaacaacggtaactgaagcaagggcactcaataaggaaatgctacaagctgaagttgggttgcctgtggactcgagcattcctttaatagtttttgttggtcgtcttgaagagcagaaagggtcagacatactaattgcagccattccagagttcgtggagggggaatgtccagataattgttcttggtacagggaagaagaaaatggaggaggaactgatactgctcgaagttaaatatccaaacaacgctagagggatagcacaatttaatgttcttttgcgcatatgatgtttgctggggctgatttataatt

SEQ ID NO: 409103 - DNA, 375 bp, Oryza sativa
tacgggtgcacctggaaagtatgttgagctgaaggagagcgttcaaagtttccagggtgtattggacgggaagtatgatgaccttcctgagcagtcattctacatggttggaggaatcgatgaggtcattgccaaggcagagaagattgccaaggagtccgcttcataagcgatgcaatttttaacatttggaggtcaacatgttgcgccttttatgtttgttagccaggacatgtacttacatgcaggaggcccggccctgctgatcgatgtttttcccctccacttttttccaaataaggatttgcagtgacctatttgtttggcttactgcccttcaaggaagaattgagttctcttttaaaataaaaatct

SEQ ID NO: 409104 - DNA, 478 bp, Oryza sativa
tttgtagcaatggcatcctcctcccttctactcgcctgtgttgtggtggcggctatggtgtccgccgtctcctgcgggccacccaaggtgccaccgggccccaacatcacgacaagctacggcgacaagtggctggaagccaaggccacctggtatggtgcgcccaagggtgctggccccaaggacaacggcggcgcctgcgggtacaaggatgtcgacaaggctcccttcctcggcatgaactcctgcggcaacgaccccatcttcaaggacggcaagggctgcggctcatgcttcgagatcaagtgctccaagccggaggcctgctccgacaagcccgtccttattcacgtcaccgacatgaacgacgagcccatcgctgcctaccactttgacctctccggccttgccttcggcgccatggctaaagatggcatggacgaaaagcttcctaaggccggcattatcgacacgcagt

SEQ ID NO: 409105 - DNA, 512 bp, Oryza sativa
tcggagcccccgggtgctcgtgctcgtgttgggttgaccggtttgactgttgcggaacatttccgtgatgccgaaggacaagatgtgcttttgttcattgacaacattttccgtttcactcaggcgaactctgaggtgtctgctcttcttggacgtattccatctgctgtgggatatcaaccaactcttgctactgatcttggaggacttcaagagcgaattacaactacaaagaagggttccattacatctgtccaagctatttatgtgcctgctgatgacttgacggatcctgctcctgctactacttttgcacatcttgatgctactactgtgttgtcacgacagatctctgagcttggtatttaccctgctgtcgatcctctggactccacatccagaatgctcttcccccatgtgttgggtgaggatcactacaacacttgtcgttgtgtccaaaagggtcttcagaacttcagaatctttaggattttattgcaatttggggtttg

SEQ ID NO: 409106 - DNA, 418 bp, Oryza sativa
ccactggaattgtagggataatatatgaacatgtcccattggggcattcaacaatctgcaatgttcgacaagacttgatccatttgcggacttttattcccaacaagaaaagattaaccagaatattcaacaaaagtaacaacactgaaaccatcagatggtagcaattgtacacttgtatgagactctgtttctgctagcagaggaattttacaacgatgcaggagatgtcgtctttgcttttccggttcacggcctgctccgttagatgcttcgcagctgcctgagcatccttgaagtccttgatttcatccaccgcctcttggttggacatcaccttccataatccatcacttgcaagaattagaaaatcagtattctcgtctataggttcctccaccacatctggctctgagct

SEQ ID NO: 409107 - DNA, 472 bp, Oryza sativa
tccaagtccaatcgacctcatttcattcgattcatcgatcgctcggcgcggcttagggtttttggcggcagcgatggcgtcggagaagcacttcaagtacgtcatcctcggcggcggcgtcgcagcgggatatgcggcacgggagttcgccaagcagggtgttaagccaggggagctcgccatcatctccaaggaggccgtggctccttatgagcgccctgctctcagcaagggatacctctttcctcagaatgctgcaagactcccaggatttcatgtgtgtgtcggcagtggaggagagaggcttttgcccgaatggtactcagagaaaggcattgagttgatcctgagcactgaaattgtcaaagctgatcttgcctccaagactttgactagtgcagttggagcaacctttacatatgagattttgatcattgcaactggctcctcagtcatcaagctatcagatttt

SEQ ID NO: 409108 - DNA, 435 bp, Oryza sativa
gttactgaggttgaatttagaaggtattttgagcaatttggtgtgattacggatgtggttgtcatgtacgaccacaacacgcagaggcctaggggctttggattcatcacctatgactcagaagatgcggtggacaaggcactgcacaagaacttccatgagctgaatggtaagatggttgaggtcaagagagctgttccaaaggagcaatcacctggacctgctgcacgttcacctgcgggagggcagaactatgctatgagcagggtccatagcttcttgaatggtttcaaccagggttataacccaaaccctattggaggttatggcatgagggttgatggaaggtatggtctgcttacaggcgcacggaatggattctcttcatttggccctggttatggaatgggcatgaattctgaatctgggatgaat

SEQ ID NO: 409109 - DNA, 413 bp, Oryza sativa
gccgttgtcgtctgctccgattccgctcgcggcagggatccctaccgctctcgtcgccgtcgccgtcgccgtcgccgacgagatcatccgccgcgatgcctcggtactattgcgactactgcgacacctacctgacccatgactctccatctgtccgtaaacagcacaatgctgggtacaaacataaggcaaatgttcgaacctactatcaacaatttgaggagcagcaaactcaaagcttgattgatcaaagaattaaagaacatcttggacaagctgcagctttccaagttggtgctccttttaatcaacatcttctcttatttccaggaggtgtgcctcgtccttgtctttcaattctgccaacacctggcatgccacttggtgttcctcaagtacctggtgcacctttg

SEQ ID NO: 409110 - DNA, 319 bp, Oryza sativa
acactccacacaggtaagaagccggcggcggcggcggcgatggtttccctcaagctgcagaagcggctcgcctccagcgtgctcaaatgcggcaagggcaaggtctggctcgaccccaatgaggtcaacgagatctccatggccaactcccgtcagaacatccgtaagttggtcaaggatgggttcattatcaagaagccccagaagattcactccaggtcccgtgcacggagagcccatgaggccaagcagaagggacgtcactctggctatggtaagcgtaggggtaccagggaggctaggctccccaccaagatcc

SEQ ID NO: 409111 - DNA, 470 bp, Oryza sativa
ttcgttaattgaatgtgctactattgctaatgggtgttcgaaggttggtgcagttggaataaattgcacacctccaagatttatccatggcctgatactctccattcgaaaggtcacagataagccaattctgatatatcccaacagcggagaaagatatgatgctgagaaaaaggagtgggtggaatcaactggcgtgtcagacggtgattttgtttcctacgtaaacgaatggtgcaaagatggggctgtcctcattggcggctgctgcaggacaactccaaacaccatcaaggccataagtagatcacttaaccaacgccactcttcgctgcatttacctgtggcatagagttgcacgctctttcaggtgtgctactcatgctggtacctgaacctgatgaacatatcctggaggtccttactagcagcatgatgttctctgctgcaatgagatggctctgcactta

SEQ ID NO: 409112 - DNA, 466 bp, Oryza sativa
  unsure (1)..(466): unsure at all n locations
gagctttgcagtcatcttgcatgctctgatatacgctagtctttctccaaagcaaaactctgcccgaaatttcggtgcaaaacctcgtttttcagggtgaaactccgcccaaatttccggtggcaaaatcctgctgttcagggcgacactctgctgaaattttcggccggtgaacagcgctttttcagggcgacgccctgctgaaattttcaccaaggattgtcgtcttggtgaacagaaactctgcccgatattcgattggatttccttggtttttctgggggagattctgccgaaattttctgcacgtacgtgtacgtgtatgctcgtgctgttccaaccttggtgtttatgataacatccactgttcttgttcagtccttctccgtcgtcttcctctactggttctacgtcttctcataatcaacccaaatcactctacangaatntccaactggttaattac

SEQ ID NO: 409113 - DNA, 473 bp, Oryza sativa
tctcgccggccaggagaggtatagagctgtcacgagtgcatactacagaggagcattgggagctctcctagtctacgatatcaccaagcgccagagctttgatcacatccctcgctggctggaggagctccgtggccatgcggacaagaacatagtcatcatgctggttggcaacaagagcgatcttgaagacgagcgggccgtgagcaccgaggatgccaaggagtttgctgagaaggagaacctcttcttcctggagacctccgctctgcaggccaccaacgtcgagaacgccttccagaccgtcctgtcagagatattcaaaattcacagcaagaagaacatggcagcggacccaaaagcaaacggcgctgccccatcgctagcagggaagaaggtcgtcgtcccgggcccagcgcaggagatccccaagagcaagtgctgcagttccatgtgatcttactctactcaga

SEQ ID NO: 409114 - DNA, 346 bp, Oryza sativa
tcgtccacacactcccacccaggtaaggagagggaggaggaagggaacctcgaaggcggcggcggcggcggcggagatggtttccctcaagctgcagaagcggctcgccgccagcgcgctcaagtgcggcaagggcaaggtctggctcgaccccaatgaggtcaacgagatctccatggccaactcccgtcagaacatccgtaagttggtcaaggatggattcattatcaagaagccccagaagattcactccaggtcccgtgcacggagagcccatgaggctaagcagaagggacgtcactctggctatggtaagcgtaggggtacacgggagggttggcctccc

SEQ ID NO: 409115 - DNA, 424 bp, Oryza sativa
ttgcagattccgttgcccgcactacagtaagccctccaatgtcacaagatgcacaacaacatggatctgctggccaaaatggtgtgacatccacagacttgagttcgaggagctatctgaagagtgcaagcattagtgcttccaagtgtgtcgctgtcaaggacaataaagaaccagaggatgattacatctctgaagaaatggaagggtcggtcgatggattgtctgaacaagtctccaggatgcactcctagtgcacaacgatgacgatgatcagtgcaagattctgtgaggcgcaccagatgctgataatttccaagcagaatgctgcactgcaggtttggactttggacaaatgcaagtatgcaacagccagcccgagatgattggcatcttcttatgctcatccatgttcacatattct

SEQ ID NO: 409116 - DNA, 412 bp, Oryza sativa
tgtgaggctcttgaggctgcgcgtatcgcgtgcaacaagtacatgaccaagtctgcaggaaaggatgccttccacctcagggttcgggttcacccgttccatgtgctccgtatcaacaagatgctttcgtgtgccggggcagataggctccagactggaatgaggggtgcttttgggaagccacagggaacctgtgctagggtggatattggccaggtcctcctttctgtgcggtgcaagcccaacaatgctgtccatgccagcgaagccctccgtcgtgccaagttcaagttccctggtcgccaaaagatcattgagagtagaaagtggggtttcaccaagttcagccgcgatgaatacgtcaggctttagagcgagggtagaatcatgcctgatggtgtcaatgcttagc

SEQ ID NO: 409117 - DNA, 415 bp, Oryza sativa
tcttcttatctttccatttttggatctggacattaagtactatgacttgggagttctccaccgtgatgcaactgatgacaaggtcaccgtggaggctgcagaggctactctcaagtacaatgtggctattaagtgtgcgacgattactccagatgaggctcgggttaaggagttcaacctaaagcaaatgtggaagagccccaatggcacaattaggaatattatcaatggcactgtattcagagagccaattatatgcaaaaatgtcccaaggcttgttccaggatggactaagcccatttgcattggaaggcatgcttttggtgatcagtaccgagcaactgatgcagttctgaaggggcctggcaagctcaagctgtttttgagggaaaggtgagccgattgatctggaggt

SEQ ID NO: 409118 - DNA, 436 bp, Oryza sativa
tgcatatctctctcgttccccttttgctctccgaaaaccctaacccctcgccgccgatccggccctcctccgccgttggccgccatgccggacgtgcagccgctcgtcagcgagttcgtcctcaagctcaagcgccgcaaggtggaggggtcccatgccgtggcgcggcagacggcggagctgctgcggtcggtggtgtcgcagcaccggatgggcagcaccaaccaggcggcggcgcttgcggacgccgtccgcggcgtcggggagcagctcatcgccgccaaccccatcgaacttgctgttggaaacattgtgagacgtgttttgcatataataaaagaagaggatatatcttctacagcagttggtattgaaggcctttctgtcaccgctgagagcgatgatgaatatgacagtggaaatgatgatcacccta

SEQ ID NO: 409119 - DNA, 386 bp, Oryza sativa
gacccacgcgtacatatgatagcagatggagatacaagcagagatggaggcatccaagctagcaatctgcagcttgttcgcgctcgccggggtagccgctacaatgtttcactgctccgatgcccagaactcgccgcaggactacctgtcgccgcagaacgcggcccggtccgccgtcggcgtgggtccgatgagctggagcacgaagctgcaggggttcgcggaggactacgcgaggcagcggaagggcgactgccggctgcagcactcgggcgggccgtacggtgagaacatcttctggggctccgccggcgccgactggacggccgcggacgcggtgcggtcgtgggtggacgagaagaagtactacaactacgccagcaaca

SEQ ID NO: 409120 - DNA, 403 bp, Oryza sativa; identical to SEQ ID NO: 391959
  unsure (1)..(403): unsure at all n locations

SEQ ID NO: 409121 - DNA, 352 bp, Oryza sativa
gtgaggtgctccgcgaccaggactccgtcttcgccaaccgggtcatgctggatgccggcgacgccgtctccttcggcggcgcacagaatatcgtgggcaacccgctcgggcctatgtggcgcctgctccgccgcgtctgcgtccaggagatgatgagccccgcggggctcgccagcgtgcacggcctccgtcggcgcgagttcaggtccaccctccggtacctccactccaagcccggcgagccggtggacgtcggcgcgcagatgttcctgaacaccatgaatgtgatcacgggcaccatgtgggggggaacgatcggaagcgagagcgagaggtcggcggtggggagcga

SEQ ID NO: 409122 - DNA, 403 bp, Oryza sativa
  unsure (1)..(403): unsure at all n locations
tcagatcgcaatccgaaattcagagatccaaattcgcccacaagaattcacctctgcttgttgatcggagaggaggaggtgttcgtccagatgggcaaggtgagggcgttcttctcgcgcaagggcagggggaacagcagcggcaggtccaggtcgatgcgggaggcggcgatgaacgtggactggtcgccgaggccgtcggatctcgccgccgccgccgccgcgaagccccgcccgcccgcggcggaggacgagacggagcgggtgttcaggaagttcgacgcgaacggcgacgggcggatctcgcgggccgagctggcggcgctgttccgcagcgtgggccacgccgtcaccgacgacgaggtggcgcggatgatgcangaggccgactccgacggcgacg

SEQ ID NO: 409123 - DNA, 407 bp, Oryza sativa
ttatttagaaaagaaaggctttcgtctcggtgggcaaaagcgcgagggcaaagcgaaggtatagcatctagtaggcgatggcgagctccggtttctcatggacgctgcccgaccaccccaagctccccaaggggaagacggtagctcctcgtcgtgcttgacggatggggcgaggccaacgccgacaagtacaactgcatccatgtcgcccagacgcccgtcatggattcgctcaagaatggtgctcccgagaggtggagaatagtgaaggctcatggaacagctgttggtctttctagcgaagatgacatgggcaacagcgaagtgggtcacaatgctcttggtgctggccgcatttttgcctcaggggctaagctctggggccctgctcttgcctttggaaaatt

SEQ ID NO: 409124 - DNA, 484 bp, Oryza sativa
gtctttttagccggagcctccggatgtccacgccgtcgaccatcacctcgccggccgacgggtcgtagaaccgctccagcagcgcgatcaccgtcgacttgccggacccgctaccgccgaccagtgccacggtgcgccccgccggcacgcggaggttgaagctgacgaagatggggctctccggccgtgacgggtagcagaacttcacgttccggaactccacctcgccggcgacgttgcccagctcctcgccggtgtcgctctcggagtcgatcttgggcacccgccggatcacctccaggatccttttcgtcgccgagctcgcctccgagaggccgccctggataacggcgtatgagacgacgaagacggtgccacccttgtagccatgggacatgacgaggcggcttccgtaccagacgttgaaggccaagatggcgaatgtgatgccgttgctaccgatggcgaccgccttggcaagccc

SEQ ID NO: 409125 - DNA, 431 bp, Oryza sativa
gatttaaacccgccgtttccaagcttgctctcctctcccccccaatccttccctcccgagtggcagggtgctcgacgggatggcgcagaaggaggccaatggcagcagcaacggggagcacaccacccgcccgccgccgacgccctcgccgctccggttctccaagttcttccaggcgaacctgaggatcctcgtcaccggcggagctggcttcatcggctcgcacctcgtcgacaagctcatggagaacgagaagcacgaggtcattgtcgcagacaactttttcactggttcaaaagacaacctgaagaagtggatcggacacccaagatttgagctaatcccgcatgatgtcacccagcccctggttggggagggttgaccaaatctatcaccttgcttgccctgcttcaccaatcttctacaagcac

SEQ ID NO: 409126 - DNA, 314 bp, Oryza sativa
  unsure (1)..(314): unsure at all n locations
ttgtcgcgtgggctggagcaaaagcaaattgcaggtcattgttggaacagtggcgtttggaatgggaatcaacatgccagatgtcaggtttgtgattcaccacagccttagtaaatctatggaaacatactaccaggaaagtggaagggcagggagagatggactaccttcagaatgtattctgtattatcgacctggtgatgttccacgccaaaggtcaatggtcttttatgaaaactgnggcctgcaaaatctttatgacatagtacgatattgtcaggctaagaggagctgttgtcgtggtgctttttttt

SEQ ID NO: 409127 - DNA, 427 bp, Oryza sativa
tacctctggtgcttctaaaggtgttgaaaatgcccaatgttatgttaaagctacagagttggtatttgcggacaaacatgggtcatggggcactcctttagttcaaatggaccggcctgctgggctcaatgacattggtatggtagcttggaccttgaagatgtccactcctgaatttcctagtggtagggagattattgttgttgcaaatgatattacgttcagagctggatcatttggcccaagggaagatgcattttttgaagctgttaccaacctagcctgtgagaagaaacttcctcttatttatttggcagcaaattctggtgctcgaattggcatagcagatgaagtgaaatcttgcttccggttgcgtggtctgatgatggcagccctgaacgtgggtttcagtacatttatctaagcg

SEQ ID NO: 409128 - DNA, 290 bp, Oryza sativa
ttaaaaaaagctatgcaaatcgaaacccctctcttagatctcgtccacggggaattaggatgagagagagctatggtcgatgatgagggagtcacgatcgcctgctacagcaaggaccagttcaactactagatgaccaacgccaaggaggtcggccaaggggtcataattgtctacagtgctttgtggggtggcctttgccggttgatcatcccagtgttctctgaatacgccaaacaggtaactggtgctgactttctgcaggatgatgttgatgagctgaaggaaga

SEQ ID NO: 409129 - DNA, 409 bp, Oryza sativa
ccctcatgttgagaggtacttctggaccatggttaatcagccaaactttaagaaagtcttgggtgatgtgaagcaggcagagtctgtcccaccagttcaaaagaaggctccaccaccaaaggagcagaagccaaaggaagccaagaaagaggctccaaaacctaaggcagttgagaaaccagaggaggaagaggaggcaccaaagccaaagccaaagaaccctcttgatttgctccctccaagcaagatgatccttgatgagtggaagaggttatactcaaacacaaaaacaaatttccgtgaggttgctatcaagggtttctgggatatgtatgacccaaaaggttactccctgtggttttgtgactaccaattcaatgacgagaacactgtgtccttcgtgaccatg

SEQ ID NO: 409130 - DNA, 467 bp, Oryza sativa
tcgtacaaagagaccaatggtgactccattaaccttgtcaaagataacaaggaaaagagccacaggtcaccctcctcaaaagaaaaacagcctcagcatctgcctcagaagcaacagtttacagttgagacaagatcagtgtctacattgcaagaagacaagacattccaagaaagatcatcctgacttcctgacagtgatcatggcaaagaaagggattccgttcaatgaggactacgcaaagaagtgaaagatccattagagttgccaatagagttgaagcaaaagttgaggctgttggagatcttcgcctagaactcgcgaatggcttcacacttttacttccagacgtttttatgtcccttctttgcaaagaactcgataataagggtatcccaattgggattttgatagatatgattgccattttggaaatggcaaatgtgaactatggtattaatatgaat

SEQ ID NO: 409131 - DNA, 354 bp, Oryza sativa
taaccccaagggcttggagtactacaacaatctgatagacgaattgataatgcatggaatacaacctcatgtcaccatctaccattttgatctccctcaggcccttcaggatgaagaagattactcggcttatgccgaggtgtgcttcaagaacttcggtgacagggtgaagcactgggccacctttaaccagccgaacatcgagcccatcggcggcttcgacgccggcgaccggccgccgcggcggtgctcctaccccttcggcaccaactgcaccggcggcgactcctcgacggagccgtacatcgtggctcaccacctgctgctcgctcatgcctcggcagtgtccatcta

SEQ ID NO: 409132 - DNA, 434 bp, Oryza sativa
gtctgtttttatcaggcgcaggacagaggaagacatcaacttggcgaacagcgttgacattggatctcttcgtgacccacagcaggatgcggaacgagtcaagaaccctgagtggctggttgtgattggggtgtgtactcatctgggctgcattccacttcccaacgctggtgactttggtggctggttctgtccatgccatggatcacattatgatatatcaggtagaatccgtaagggccctgcaccatacaaccttgaagtcccgacctactcatttctggaagagaacaaattgctcatcggctgagattacattgaccacagggtttaaaaatctatggcacttctattttctgttggtttgacggttcacctttttggtgctttactttggtggacaccttctagtaaagaataatgagctgctactt

SEQ ID NO: 409133 - DNA, 369 bp, Oryza sativa
ttatgatcggtgctactggggtagtcagccaagaatgcaagacagttgtttctcaatatggacaacagatcctagatctgttgcttgctgagacacagccatcaaaaatctgctctcaggttggtctgtgtacttttgatgggaagcatggtgttagtgctggaattaagagtgtagtagatgatgaagctggggaatcgaatggtctccaaagcggtcccatgtgcaatgcctgtgagatggctgttgtatggatgcagaaccaacttgcacagaacaagactcaagatctcatcttgaactacattaatcagctctgtgacaggctcccaagtccaatgggagaatcatctgtggactgggggcagc

SEQ ID NO: 409134 - DNA, 411 bp, Oryza sativa
ttctaacccaaaggcaagggagaagaggagcggacgccatggatgcttctcgcgttggcgagctccgcactttcgtggaggcctgcaagaaggacccctccctcctcgccgaccccaacctcgccttcttccgcgactacctcgagagcctgggcgcccacctccccgtcgccgtcttcaccaaggccacccccaagcccaagccgtcctccatggatgacatcgacgatgaatacgacgacgacgacgacgacgatctcaacatgagggatgccactccggagccggacgagcttgaccaggacatcgtcgagttcgatcttgaacttgaaggagacattgtcgaatctgaccatcaggacccttcgcaaaagatgggagatccttctattgatgtcaccgaggaaaatc

SEQ ID NO: 409135 - DNA, 337 bp, Oryza sativa
tcgtggctctcgtcgtcgaatcgaatcctctcgcgtcctcaagatgcagatctttgtgaagacattgaccggcaagactatcaccctcgaggtggagtcctctgacaccatcgataatgtcaaggctaagatccaagataaggagggcatccccccggaccagcagcgtctcatcttcgctggcaagcagctggaggatggcaggacccttgctgactacaacatccagaaggagtcgacccttcaccttgtcctccgcctccgtggtggcatgcagatctttgtcaagactctgaccggcaagactatcacccttgaggtggagtcttctgacacc

SEQ ID NO: 409136 - DNA, 297 bp, Oryza sativa
ttctatatggagggaggagctgcggcagcagcagtcgcaggtcgacgcactgcgggagaggctcgtggaggtcaaggtcgggatgaagtgctcccaggaggactcgaggaaggagctggatcacctctgccgcagggtgaagaccatcgccacgctgctggcctacctcaaatccaaggccaggatcatggcgataccgcacctcgcgcacacgttctgcgggattaggcaccaggatggcgtggggtacgtcgacaggaaccgggtgccactggctgattggtccaagggcggcga

SEQ ID NO: 409137 - DNA, 490 bp, Oryza sativa
tcgttcaaggaggaaatcagcaaggttgttaagatccaggaagagcttgacatcgatgtccttgttcacggcgagcctgagagaaacgatatggttgagtacttcggtgagcagctttctggttttgcattcactgccaacggatgggtgcaatcttatggatcacggtgtgtcaagccaccaattatctatggtgatgtgagccgccccaaccccatgactgtgttctggtccaagttggcgcagagcatgacctctcgccccatgaagggaatgttgactggtcccgtcacaatccttaactggtcttttgtcaggaatgaccagccgaggtttgagacatgctaccagattgctcttgccatcaagaaggaggtcgaggaccttgaggctggtggtattcaggttatccaaatcgatgaggctgctttgagagaaggtctgccactacgcaaggcggagcatgctttctacttggactgggctgttc

SEQ ID NO: 409138 - DNA, 500 bp, Oryza sativa
tcttagaaggaccccgagaagaagaagtaccccggcggcgccttcgaccccctcggcttctccaaggaccccgtcaagttcgaggagtacaagctcaaggagatcaagaacgggcgattggccatgctggcttttgtgggtttctgcgtccaacagtcggcgtacccgggcaccggcccactggagaacctggccagccacctctcggacccgtggcacaacaacatcggcgacatcatcatcccgagaaccatctacccttgagcttggcacgaaccggtgcgtgcgttcgggcgtacgtgaaggctatgggtggtttttatgtgcgtgcgtactgcgtgtgattggttgattattgcgcgcgcgtgcgcacgcagtggttggtccgcaggcagctgctggctggccttggaaatgaaagctttagcagaggggggctctctggtgaatcccgccatctaaatttttggatcaaacacgacatcaaactggtcttagtt

SEQ ID NO: 409139 - DNA, 366 bp, Oryza sativa
tcgtgatccatcagtagctagctagctagctagctgcattgtccggcgagagagatagctgctgcagggggcggccatggggaggggcaagatcgagatcaagcggatcgagaacgcgaccaacaggcaggtgacctactcgaagcgccgcacggggatcatgaagaaggccagggagctcaccgtgctctgcgacgcccaggtcgccatcatcatgttctccttcaccggcaagtaccacgagttctgcagccctttcaccgacatcaaagggatctttgaccgctaccagcaagccatcggcaccagcctttggattgagcagtatgagaatatgcagcgcacgctgagccatctaaggacatt

SEQ ID NO: 409140 - DNA, 458 bp, Oryza sativa
tggacgcgtgggctctccacgcctccacaaataaagctcgtcccgaggaagggcggcgacccaccccccccaatcgccaaaaccctaactccgatccgatcgagctctgcttcccatggcgactgccgcgagccaggcgagcctcctgctccagaagcagctcaaagatctcgcgaagaaccccgtggatgggttctcggcggggcttgtggacgatagcaacgtgttcgagtggcaggtcaccatcatcggcccgcccgataccctgtatgatggaggctacttcaatgcaataatgaccttcccccagaattatccgaatagtcccccatcagtaaggtttacctctgagatgtggcatccaaatgtttatcctgatgggcgcgtatgcatttctatccttcatccacctggcgaagatcccaacggttatgagcttgcgagcgaacggtggacac

SEQ ID NO: 409141 - DNA, 468 bp, Oryza sativa
taatttctgttcaagagaggataccattttttgtggtgtttttgatggccatggaccaaacggccatttggttgctaagagggtgagagatcttctgcccattaagcttggtgcggatttggggacggatgaaggacgacagacatccactagcagcatcaaaagcaatggagatgaaacaggatcccctggaaacatgggcagagatgctgagcagaacggagagtacccagagatcttcacagcattgagaacttcatttttgagggcgttcaatgtcatggatagagatctcaagttacataaaagtatagattgttttttcagtggaacaacagcagtggcagtgctcaagcagggacggaatcttataattggtaaccttggggacttcgcggccattttaggcacacgagataaagatattcagctatggctgtccaattgacagttgatcttaaacctaac

SEQ ID NO: 409142 - DNA, 422 bp, Oryza sativa
tgctgacatgagtgtctacttcccgtacaccgaggctgacaagaggctcactgccttccaccctgaaattgaggagcttctctacagtgaagtcgagaacgatgaacacaagtttgtattgaaggacaagaacaagccaatcatcttctccatggctcgtcttgaccgagtgaagaacatgacaggtctggttgagatgtatggtaagaatgcacatctcagggatttggcaaaccttgtgattgtttgtggtgaccacggcaatcagtccaaggacagggaggagcaggctgagttcaagaagatgtacggtctcattgaccagtacaagttgaaggggcatatccgctggatctcagctcagatgataccgtgttcgtaacgggggagttgtaccgatacattttgtgacaccaagggga

SEQ ID NO: 409143 - DNA, 468 bp, Oryza sativa
tcgttacccattgtccgtgatgcaggtagacaatctaaggcgccaagccaccaacattgtatcaacaaggctgagccgtgcagaaccaccactgcggaaggaaattgtggagtacatgctggatgttgactctcatatgtggagcatgcggaagagcaaggcaaactttttccgtatcatgggtgtcctaagccctctgattgcggtggccaagtggtttgatcagatctgccattggagaaatccgctgaccaccatactgatccacattctctttgtgattttagtcttgtatcctgagctgatactgccaacaatcttcctctacctgttcctgattggagtgtggtactaccgctggcggccaaggcagccacctcacatggacactcgcctctcacatgcggagagtgctcatcctgatgagcttgatgaagagtttgacacattcctactttttcgtcgctg

SEQ ID NO: 409144 - DNA, 494 bp, Oryza sativa
ttccactgaatcctcccacctcggctcgaaggaatggcaagcggtagtgaagctgagaagtcacctgaggttgtgctggagtggcctaagaaggacaagaagaggcttctacatgctgtttaccgtgttggagatttggatcgcaccattaaatgttacacagaatgctttggaatgaaattactgaggaaaagagatgtgcctgaagagaaatatacgaatgcatttcttgggtttggacctgaggacaccaactttgcacttgaattgacatacaattatgggtgttgataagtacgacattggagcaggatttgggcatttcgctattgcaactgagggacgtgtacaaattggctgagaaaaataaatccagttgttgctgcaagatcactcgtgaacctggtcctgtaagggaagaaccactgtgaatgccttgcacaggatcttgacggttacatgtttgagcttatccagagggggccaacacctgt

SEQ ID NO: 409145 - DNA, 337 bp, Oryza sativa
tcgttctcctccaattcacctcgacggttcaggcgctctaggagggtggtggccatggccagcgtggggcagaaggtgtacgcgcccggcgtggcggtctccgagggcaatggcgggctgccaaagatcgacctcaagtccccgcatgggagtgaggctgaaattcatctatttggagcctgcgttacatcttggaaagcccccagtggaaaagacctcctatttgtcagaccagatgcggagctcaacggtcagaaacccatcagtggaggaatcccacactgcttcccccaattcggtcctggcaccatgcaccagcctggattctgtcggaaca

SEQ ID NO: 409146 - DNA, 404 bp, Oryza sativa
ttttatatggggctccagacagctctattgctgaggataagcctgatgaaccagaagaatcgttgatagtagaagaggttccagtaactgcaagtagtgagtctgaggataaagaacctgctgcggtacctgaagaagtagcagcctcaagtgagaaaactgcagatgttgctgttgcaggagctgaagcaagcacggccacagcaactatttctcctgctcttgtcaagcaattgcgtgaagcaactggagcaggcatgatggactgtaagaaggctcttgcagaatcagggggtgacattgagaaagcacaagaattcctccgaaaaaaggtttggcggctgctgacaagagggctggcagggccactgcagagggaagaattggtttttacatacatgaca

SEQ ID NO: 409147 - DNA, 432 bp, Oryza sativa
  unsure (1)..(432): unsure at all n locations
ttatggttgaaattgacaaggatttgaagtctatgcaaccactttccaataagaaagaaaatgatgaagttttcatcaaactgggatctgacaaggatgctttgaagaagaaagaaaatgctgaacgtgatgagcgtgctaagaagtctgtgagcatcaacgagttcctaaaaccagctgaaggagagaggtactatggcggccgtggtcgtggcaggggccgcggggatcgtggctggtttcaggggtggatatgtgagggccatcgctctgcagctccaccagctccagaaatcaaagaccaatcccaattccccactcttggtcggaagtgaaatgcatgtactgcctgcagtatcaagttatgtttgcggtcaactttgaattttgtctattcgtaaatcactgtgcnagtgctgatctgatcaaaca

SEQ ID NO: 409148 - DNA, 435 bp, Oryza sativa
ttcagatgtgggatgccaagaacatgatgtgcgctgctgatcctcgccatggccgttacctcaccgcctctgccatgttccgtggaaagatgagcaccaaggaggttgatgagcagatgatcaatgtccagaacaagaactcatcctacttcgtcgagtggatccccaacaatgtgaagtccagtgtctgtgacattccaccgagaggcctctccatggcatcgaccttcattggcaactcaacatccatccaggagatgttccggagggtgagcgagcagttcactgctatgttcaggaggaaggctttcttgcactggtacactggcgaaagcatggacgagatgggagttcaccgaggcagagagcaacatgaacgaccttgtctctgagtaccagcagtaccaggatgccaccgccgatgaggagggcgag

SEQ ID NO: 409149 - DNA, 365 bp, Oryza sativa
tcgttccccttcttctcctcctcctcctcgattcggagctccacccgcagccatggctaagaactaccccgtcgtgagcgccgagtaccaggaggccgtcgagaaggccaggcagaagctgcgcgccctcatcgccgagaagagctgcgcccctctcatgctccgcctcgcgtggcactcggcggggacgttcgacgtgtcgtcgaagaccgggggcccgttcgggacgatgaagaccccggcgtagctgtcgcacgccgccaacgcggggctggaatccgcggtgcggatgctcgagcccatcaaggaggagatacccaccatcttctacgccgatttttaccagcttgccggaagttgtggcc

SEQ ID NO: 409150 - DNA, 371 bp, Oryza sativa
tcgtatgaaccggcggagaagcagaaagttcacaagcaacttgtgcaatgggaccagacacaacctcaaacaagctcctcatcatcctccttcatgatgagggaagcccttccaacaactaatatcagtaactaccctgcagcatctggcgaaaggatagaggatgtagcagcagggcagccacagtatgttcgtattgggctgccaccatggatgctgagccacatcaacggttaaggaggtttcagatccataccagtaatcacaagttgcaacctgacctggtccggtcgcctgctgctctggattactaactagcactattgtcatcttgcggttgcaagaccaggaaagcatttttaagccctaaa

SEQ ID NO: 409151 - DNA, 290 bp, Oryza sativa
tattcagcaaaaaaaatcaaacaaaaagaaaaaatattccccatctgtgaaattcgcaaaaccctagcgcggcggtgatgtcgaacacgagggtgttcttcgacatgaccgtcggcggagctccggcggggcggatcgtgatggagctgtacgcgaaggacgtgccgcggacggcggagaacttccgcgcgctctgcaccggcgagaagggcgtgggcaagagcggcaagctcgtgcactacaaggggagcacctttcaccgtgtgatcccggagttcatgtgccagggc

SEQ ID NO: 409152 - DNA, 363 bp, Oryza sativa
tagtttccaattcgcaccgatcgatcgatcgatcgatccagcaactagatcaacagtactagctaggaagcatggcccgtgcacagttggtgttggtcgccctggtggcagctctgctcctcgccgccccgcacgccgccgtggccatcacctgcggccaggtcaactccgccgtcgggccctgcctgacctacgcccgcggcggcgccgggccgtcggcggcctgctgcagcggcgtgaggagcctcaaggcggcagcaagcacgaccgcagaccggcgcaccgcctgcaactgcctcaagaacgcggcccgcggcatcaaggggctcaacgccggcaacgccgtcagcattcccttcaagt

SEQ ID NO: 409153 - DNA, 428 bp, Oryza sativa
  unsure (1)..(428): unsure at all n locations
tggttgtgaacgccgcggcggccaccatcatgacgaagcgtaccattcactttgcggactgttgccccacggcgtacaagtgatgtgttaactaccaggcgcacagagtcgtcccggagggagacctggccatggttcagagggccgggcgcatgaactgcaactacaccaggagaacaggggagtgctaccgcatagacaccaggtacgaccttatgcactgcaagcgcgccgtccctcactggtgctatatggaggacatggatgggtngaaagctttctgcgggggctcaggcctgtgcatactatgcccaagatggctattggagatatggagttgcatgcaagtgtgaccacccaagtggcacgcttgggtaccagccgggtgctttggccctttctgatatgccaattgccccatattctat

SEQ ID NO: 409154 - DNA, 373 bp, Oryza sativa
ttatatggaaaaaaaaacaaaacacaccaagccaaataacagcgacaatgggatcgctcaccaccaacatcgtcctcgccgtcgccgtggtggcagcgctggtcggcggcgggtcgtgcggtccgcccaaggtgccacccggcccgaacatcacgaccaactacaacgccccgtggctccccgccagggccacctggtacggtcagccctacggctccggttccaccgacaatggtggtgcgtgcgggatcaagaacgttaacctgcctccctacaacggcttgatctcctgcggcaacgttctcttcttcaaggacggccggggctgcgcttcatgctcccaggtgatgtgtgagccgccggcggcctgctc

SEQ ID NO: 409155 - DNA, 332 bp, Oryza sativa
tctttaaaagccccactgggatcaagatacccccctgctgctctcaacgagcgcatcctttcttccatgtctcaaaaacatgttgctgctcatccatggcacgatctggagataggtccaggagctccagcagttttcaactgtgtggttgaaattcctagaggcagcatggctaagtatgagttggataaggcaactggtctaattaaggttgatcgtgttctttactcatctgttgtttacccacacaactatggtttcattccacgcacactttgtgaggacggtgaccccatggacgtcctcgtcctgatgcaagaacaagttgccct

SEQ ID NO: 409156 - DNA, 329 bp, Oryza sativa
tcgtcaaactgcaattaattgtttgtttcgcaaaacaagcatcctcgcctcggcgtcccagatctctgctgctgggctgggctgcctgcctgacaagagaggcagcagccatggcgttcgaccccttcaccgacaagaacgccgccttccgccgcctcaaggccaagcccgagaacaagatgtgcttcgactgcagcgccaagaacctcacctgggcctccgtcacctacggcatttttctctgccttgactgctccgccgttcaccgcaagcttcggcgtccacaataccttcgtcagggcaaccaaacctagattcatgggcctcca

SEQ ID NO: 409157 - DNA, 221 bp, Oryza sativa
tcgtatggacgcggacgcggtggcgaaggcgttcgtggagcactactaccggacgttcgacacgaaccggccggcgctggtgtcgctgtaccaggacgggtccatgctcaccttcgagggccagcagcttctttgccccgccgccatcgacggcaagctcggctccctccccttcgcgcagtgccaccacgacatcaacaccgtcgcctgccagccgttgg

SEQ ID NO: 409158 - DNA, 442 bp, Oryza sativa
tcgtagatggactgcgaggggtgcgagaggagggtgaagaacgcggtgaagtcgatgcgaggggtgacgagcgtggcggtgaacccgaagcagagccggtgcacggtgaccgggtacgtggaggcgagcaaggtgctggagcgcgtgaagagcaccgggaaggcggcggagatgtggccctacgtcccgtacaccatgaccacctacccgtacgtcggtggcgcctacgacaggaaggccctcgtcggctttgtccgcggcaaccccgccgccatggccgaccccttcgtccccgaggtccgctacatgaccatgttcagcgacgagaacgtcgactcctgctccatcatgtaaaaccaataatccatatatttactacaactccggcgactttttcggtcggccggcaacatgcttgctttattagctagcttgtttggtt

SEQ ID NO: 409159 - DNA, 402 bp, Oryza sativa
tatccaatctccagctctcttcccccccgcgtccagttccatctaatcagcttctcgtcgagatgggccgcaagttcttcgttggtggcaactggaaatgcaacgggaccactgatcaggtggacaaaattgtgaaaattctgaatgagggacagattgcttctacagatgttgttgaggtggttgtcagcccaccttatgtgttcctttccgtggttaagagtcagctgcgcccggagatccaagttgctgctcagaattgttgggtgaagaagggcggggctttcaccggtgaggtcagcgctgagatgctttgccaccttagtattccctgggctatttcttggacactttgaaaggaggaggtttgctgggtggaatcaaatgagtttggttggagac

SEQ ID NO: 409160 - DNA, 324 bp, Oryza sativa
gccttggactatgaccaggaaatggagactgccaagaccagctcctccgtggagaagagctacgagcttcctgatggacaggttatcaccattggtgctgagcgtttccgctgccctgaggtcctcttccagccttccttcataggaatggaagctgcgggtatccatgagactacatacaactccatcatgaagtgcgacgtggatattaggaaggatctatatggcaacatcgttctcagtggtggtaccactatgttccctggcattgctgacaggatgagcacggagatcactgccttggctcctagcagcatgaagatc

SEQ ID NO: 409161 - DNA, 450 bp, Oryza sativa
gtattactatatgtcgacatgccacgtgaatcgcagaatgcctctggtcagattgttttggactataccaaagcaatccaggaaagtgtctttgagcagttgcgtgtggtacgcgaaggacatctaaggatagtttttaatcctgatctcaagatcgcttcttgggagttttgtgcatggcgtcacgaggagcttattccacgtagatcaataatcccacaggttagtcaactgggcgcagttgtgcaaaaataccagagtgctgttcaaaattcgacaaatttgtcaactcaagacatgcagaataattgcaactcgtttgttgcatgtgcccgccaattggctaaagcactggaggtgcctttggtaaatgatctgggatacacaaaacgatatgtgcgcttgcttcagattgctgaggtggtaaactgtttgaaagatttgattggt

SEQ ID NO: 409162 - DNA, 282 bp, Oryza sativa
ttttgattaatttcagagatagagtgagtgctcacacgagtgttgatgcataaacatggttgcctctgacatggcttctatgcttctgaaaccatctgcagctgcattactagaacgttcgaagcttcgagggaaagggacaatggcaaggccatctgtgatcatagcggccaagaaagcaaagaagactcagacattcgagccctatgggcctgctggaggagtcgcgtccatttcaggggtgcgcatgcttagggccatcgctctgcagcttcaccagct

SEQ ID NO: 409163 - DNA, 394 bp, Oryza sativa
ttgaaagcataagcaacacaagggattaactcatcactcacttagctaattaaatcttcgaccatgtcggacaagtgcggcaactgcgactgtgctgacaagagccagtgcgtgaagaaaggtaccagctatggcgtcgtcatagttgaagccgagaagagccacttcgaggaggtcgccgccggcgaggagaacggcggctgcaagtgcggcaccagctgctcctgcaccgactgcaagtgcggcaagtgaagtcacgaagcaaccgaacactcgccgccggcgagtcacctaccttaattagtccacaataaaaaccacccatatgagtgtggtttgtggggtgtgctgattattgctggattaaacccgtgtggtatcgattaattaagca

SEQ ID NO: 409164 - DNA, 411 bp, Oryza sativa
tcgttcaccttctcccttctcctcgctcttccccctccgccgtcgccgcagcggagcagcaacagcaggcgagcgacatgggagggtttgtcaagacccagaagacccatgcctacttcaagcgtttccaagtcaagttcaagagacggaggcagggcaagactgactacagggccaggattaggctcaccaaccaagataagaacaagtacaacacaccgaagtaccgctttgttgtgagatttacaaacaaagatatcacagctcaaattgtctatgctaccattgcgggtgatatcgtgatggctgctgcctactcccatgagctgcctcgttatggctctgaagttggtctcaccaactatgcggcagcttactgcactggcttgcttctggctcgccgtgtgctca

SEQ ID NO: 409165 - DNA, 443 bp, Oryza sativa
  unsure (1)..(443): unsure at all n locations
taaattgacaaggatttgaagtctatgcaaccactttccaataagaaagaaaatgatgaagttttcatcaaactgggatctgacaaggatgctttgaagaagaaagaaaatgctgaacgtgatgagcgtgctaagaagtctgtgagcatcaacgagttcctaaaaccagctgaaggagagaggtactatggcggccgtggtcgtggcaggggccgcggggatcgtggcggtttcaggggtggatatggtngagggccatcgctctgcagctccaccagctccagaaatcaaagaccaatcccaattccccactcttggtcggaagtgaaatgcatgtactgcctgcagtatcaagttatgtttgcggtcaactttgaattttgtctaatccgaaatcactgtgcaggtgctgatctgatcaaacaataatggtgtcgcttttg

SEQ ID NO: 409166 - DNA, 449 bp, Oryza sativa
ttcctaacttcccgccggacaacccgcagaagttcgtgcacgtgcaccgggtgttcggcgcgagcaacgtgaccaagctgctgaacgagctccacccttaccagcgggaggacgcggtgaactctctggcgtacgaggccgacatgcgcctccgtgaccccgtctacggctgcgtcggcgtcatctccgtcctccagcaccagctccgccagctccagcaagacctttcccgcgcccgctttgagctctccaagtaccaggcggcggtggcggtgtcgttgtcgaacgggcaggcggtggcggcggcggcgatggcggatcacttcattgggagcgcggtgcaaacgaactgcacgagaactttattagtggtggttgtgtggtggcggcggccaatcggctttgcggaggggccgcggtgggtttcctgaactaccacccccgttttt

SEQ ID NO: 409167 - DNA, 333 bp, Oryza sativa
ttctttgaagaacttggaggagataatccgtgcttcagatggtgccatggtagcccgaggggatatgggtgcacaaattcccttggagcaagtcccctcagtacaacaaaagatagttaaactgtgcaggcagctcaacaagccagtcattgttgcgtcgcagcttcttgaatcgatgattgagtatcctacgcccaccagggccgaggttgctgatgtttctgaagcagttcgtcagcgtgcagatgcgcttatgctttcaggtgagtcagcaatggggagatatccagagaaagctcttagtgtcctccggagtgttagcctaaagattga

SEQ ID NO: 409168 - DNA, 383 bp, Oryza sativa
gagatcttcagtgttactgttggtggtcgtgatctcattcaagattgcactgtaacacttgcttttgggaagctcatctggttcaacggcagaaagatctagagtatgaggctgagtttgagcagagcgcgtccaaaagcaaggatggtcttgacaaagatgctatcagcaagaggcttgaggagatatacaaacgccttgagtttattgatgctgatgctgcagaggctcgtgcagcatcaattctggcgggtcttagtttcactcctgaaatgcaacgtaaacgcacaaaacagttttctggtggatggcgcatgagaattgctctagcacgtgctctcttcattgagcctgaattggtgctacttgatgagccaacaaat

SEQ ID NO: 409169 - DNA, 490 bp, Oryza sativa
ttctatatgcttcgtttaaggtcacactattagagtcacgggaccgacttggtggccgtgtgcatactgactattcttttggctgcccaattgacatgggagcatcttggttgcatggtgtatgcaatgagaattcattggcaccactgattaggttgcttggccttagattatatcgcaccagtggtgataactctgtgctatatgaccatgatctggagagctatgctctctttgataaggatggtcgtcaagttccccaggagatagtgacaaaagtcggggaaacatttgagaaaattcttaaggagacggtgaaagtaagagctgaacatgaagatgacatgcctcttatttaagccatctcaattgtgcttgacaggaattcacacctaaagcttgatggtttgcaatatgaagactgcaatggtgcatatgtaagctggaggcatggtttggcacaaaagtggatatatatctctgaaaattg

SEQ ID NO: 409170 - DNA, 241 bp, Oryza sativa
tcttatcaatgctggtggtattgccgagatggctggtatgagccacagaatccgtgagagaactgatgcccttgatgctgctggcaacacaactgctgctattgggaagggttttgccattggatcacctgctctggtgtcccttgcactttttggtgccttcgtcagcagagctggagtgaaggttgttgatgtcctgtctccaaaggtcttcattggtttgatttgttggagccatgct

SEQ ID NO: 409171 - DNA, 370 bp, Oryza sativa
gtatttgcagcagcaagcagctaatcgcgcacgtacgcacaccgtgacccggggcgagatggcgcagtcgatgctggtgtcgggagccaatggcacggtggccgccgcgagcaccagcaggctgcagcccgtgcggccgacgccgttctcgcggctcgtgctgtcgcagccgtcgtcgtcgctggggcgcgcggtgtccgtcaagacggtggcgctgttcggcaggtccaagaccaaggccgcgcccgcaagaaaggctgagccgaagccaaagttcaagaccgaggacggcattttcggcacgttcggtgggatcggtttcaccaaggagaacgagctgttcgtcgggcgtggtcgcatgcttgggttt

SEQ ID NO: 409172 - DNA, 347 bp, Oryza sativa
cctcgctcctccacgcgccgccgccgccgcatcggttcagccacagcaggcgagcgacatgggagggtttgtcaagacccagaagaccaatgcctactacaagcgtttccaagtcaagttcaagagacggaggcagggcaagactgactacagggccaggattaggctcaccaaccaagataagaacaagtacaacacaccgaagtaccgcttcgttgtgagatttacaaacaaagatatcacagctcaaattgtctatgctaccattgctggtgatatcgtgatggctgctgcctactcccatgagctgccttgctatggtcttgaagttggtcttaccaactatg

SEQ ID NO: 409173 - DNA, 472 bp, Oryza sativa
tacatcgcagccgccacaaaacccttctccccgcgcgcgcgccctccgctccttcctccgcccggctgcccgccgctcgttcgccaccgccaccgccgccgccgccgctgcgtcgatcgaagatgtatctccagtactacatcaacgagaagggggacaaggtgtacaccaccaagaaggaatctcctctcggtgttcccacgcagtctgctcacccagctcgcttctctccagatgacaagtactcacgccagagatacctgttgaagaagagattcgggttgctgccaacccaaaagccagcaccaaagtactgaaggagaaacctcggaccaccatgttccatggatcccacgaagagaatcagtcttgcctacctcgctatttacctgtatcactcaaatgatccggtgtatcgcgatgctatctacgaatcgtactttctcttgaccatattagtatgaccatgaaa

SEQ ID NO: 409174 - DNA, 248 bp, Oryza sativa
ttcgtctctcccccccccttccgctccaatggcgaaggaaccgatgcgcgtgctcgtcaccggcgccgcaggacaaattggatatgctcttgtccccatgattgctaggggtgtgatgttgggtgctgaccagcctgttattctacacatgcttgacattccaccagctactgaattttttaatggccttaagatggagctggttgatgctgcattccctcttttgaagggaattgtcgcaacatctg

SEQ ID NO: 409175 - DNA, 338 bp, Oryza sativa
tctttcagggtaagccccttgtggatcctgttgtcaccctttttggaagtgtccatgagaagatgcctgagataatgggaagcatgcggagcacattgtttcctaactttggcagcatgtttagtgtggcggaacagcagcaagctaaaggtgattgggatgctgagagtcaacgggagggtgaagattatggatcagaccatggtggggatgacattgaagatagcctccaaagcccacttatttctcgtcaagcgacaagcgtggaaggaaaggagatcgctgcacctcatggcagtataatgggtgctggggaaagaagttttttgttctatgca

SEQ ID NO: 409176 - DNA, 373 bp, Oryza sativa
ttcgatgagaagctgctctccgtcttccgcgagggtgtgaagtatggtgctggcattggccctggtgtctatgacatccactccccaaggatcccgtccacagaggagattgcggaccgcgtcaacaagatgctcgcggtgctcgacactaacattctctgggtgaaccctgactgcggtctcaagacccgcaagtacaacgaggtcaagcccgcccttaccaacatggtttcggccgccaagctcatccgcacccagctcgccagcgcgaagtgaggatatccatagctgcaagttcccttcggttgcgaggacgatgccgtcatagccatctgtttttgaataattctggtccagtggatccaattgtctg

SEQ ID NO: 409177 - DNA, 437 bp, Oryza sativa
  unsure (1)..(437): unsure at all n locations
tcggtatagtggtgtggttttcttatcgatttgtgcattggacaccatccggtcggccggcgccattggaggaggaacatggcggcgatggcgtcgccgccgccgccgacgagagtgtgcgtcaccggcgccggcgggttcatcggctcgtggctcgtcaagctcctcctctcccgtggctacgccgtgcacgccaccctccgcgacccgtgtgatcccaagaacgctcatctgaagcagctggacggggcgtcggagatgctgagcctgttcaaggccgacgtgctcgacgccggcgagctgtccgtcgccattgccggctgcgagggnggttttccatgtcgcctttcccgtgcccggagacaagattcgttgaatctgagttagaagctatggcttcctgctgtaaagggaacaactgaatgttcttgaagttt

SEQ ID NO: 409178 - DNA, 330 bp, Oryza sativa
tcgctacaacttcgtcttcggccagtccggcgccggcaacaactgggccaaggggcactacaccgagggcgccgagctcatcgactccgtcctcgacgtcgtccgcaaggaggccgagaactgcgactgcctccaaggatttcaagtctgccactctctaggaggaggaactggttctggtatgggtaccctgctcatctcaaagatcagggaggagtacccggacaggatgatgttgacattctcagttttcccctcaccaaaggctactgaaaccggggtggaaccttacaatgccacactatctgtccatcagcttgttgagaatgc

SEQ ID NO: 409179 - DNA, 395 bp, Oryza sativa
tcggttatggcctcacggatccagcaatccagtacaaagcttacaccgattatgcattggacatgaaccttattaaaaaatcagattacgacaggatcaacaagttcatcccaccatgtgaatttgcaataaagctttgtggtaccaatgggaaagcatcttgcatggcagcatacatggtctgcaattctattttcagctccatcatgaagcttgttgggacaaagaattactatgacgttaggaaggaatgcgaagggaaactttgctatgatttctcaaacttggagaagttttttggagataaagcagtcaaagaagcaattggagttggcgacctttgatttgtcttatgcaggactactggttaataagcaatgctgacagactggatg

SEQ ID NO: 409180 - DNA, 388 bp, Oryza sativa
atcggttatggcctcacggatccagcaatccagtacaaagcttacaccgaagatgccgggccatggcgccgtcgtacgtcttcgctggcctcgcgcaggcgccggaggaccccatcctcggggtgacggtcgcgtacaacaaggattccagttctgtgaaggccaatctcgcccttggttcatggagcgccatggcagggagtcggcgcaatccgacccggcggaggcggcggcgaagccttcgggccccgccaagcccgtgccgccgtacgggaagcgtggcgggttcgtgccgcggcggtcggaggactttggggacggcggcgccttcccggagatccacgtcgcgcagtacccgcttcggatgggccggcgcgacgagaagggc

SEQ ID NO: 409181 - DNA, 176 bp, Oryza sativa
ctccattggctcttcttcagtatcgaatcctctcttgtcctcgtgcccaccaccaccaccgtagcaatggcgggcaacgggccgatcaacaaggaggacccgctcaactggggcgcggcggcggccgagatggccggcagccaccttgacgaggtgaagcgcatggtggcgcagtt

SEQ ID NO: 409182 - DNA, 356 bp, Oryza sativa
gttccttaaggacttctccaagggcctggtgaacaacatggacatcgagaacctcaagctggaggtcgagaagttcgccacctccttcgacatgcccggcttcaccctcgacagcatgaagtacaaggagtaggaaaacaaaaacacacacaaaccatggtcctaccgccgctaatcgtcgaccagctgtgctctcgtggaccgccgtcgtcgtcatcttcttcctcggcacaagctggccctgtgttacggattttgtctgcccatcgagatgataggtttcataaaacgctctttcccccaccctgctgctgcctctggtttggttgccaacctcattccccatcggttttttt

SEQ ID NO: 409183 - DNA, 414 bp, Oryza sativa
gttaatttcctatgagctgcaagccaaccagtcaccaggaaacgtctcagtactcggggattatgtatcctcggaccctgtagatccttttgaaataaaggaaagtaacagacccgccaaattgaagcttgcgcagttggaaccagatgagagaagcacaacaaacataaaagaaagtgttcgagacttcgtggttggcagtggggaatatgtgatcaaggattttaaattcactgttaaccaagctgtacggccagtcgagaagcggtttgacaaattgatgaaaaagaacaagaaaagccaggatgacaactgggtgagtgcagtgtcaccagatagaccggttcgtggaattgatgatcctctgtaggtggtagcacaagtgatagtgggttcaccaaggggaaaaaacat

SEQ ID NO: 409184 - DNA, 186 bp, Oryza sativa
atcggtaatggcctcacggatccagcaatccagtacaaagcttacaccgagtatgcagggccatggagccgtagtacgtattcgctggcctcgcgcaggcgccggaggaccccatcctcggggtgacggtagtgtacaacaaggattccagccccgtgaaggtcaatattggcgttcgcgcctacc

SEQ ID NO: 409185 - DNA, 394 bp, Oryza sativa
atcggtaatggcctcacggatccagcaatccagtacaaagcttacaccgagtatgcacggccatggagccgtagtacgtattcgctggcctcgcgcaggcgccggaggaccccatcctcggggtgacggtcgcgtacaacaaggattccagccctgcgaaggcaaatctcgcccgtggttcatggagcgccatggcagggagtcggcgcaatccgacgcggcggaggcggcggcgaagccttcgggccccgacaagcccgtgccgccgtacgggaagcgtggcgggttcgtgcccgggcggtcggaggacttcggggacggcggcgccttcccggagatccacgtcgcgcagaacccgctcggtatgggccggtccgaccagaagggcggctcg

SEQ ID NO: 409186 - DNA, 375 bp, Oryza sativa
tcgttatgtctaccccaagctctgttatggatgagattatgaagaggataccctcccatctctctccctatcacaccccccccccccctcactccctcctccccccccactacccccttcccccaccaccccccccgcgtcctcactcttccatcccacttacccccttccccccccccctcccatcctcccccccactctcccttcacccacctccctcctctccaatacccctcctccacacccccacccccctcccttctccacacccccccctcctctcacccatccccccccccactcaatcactcccccctcccactcccacctatcccacccatcacctcccctaccccacttccccacccccccccc

SEQ ID NO: 409187 - DNA, 479 bp, Oryza sativa
tcggttacctgtctcaatcgtggttgagatggaccgaattttgaggcctggaggttgggccatcatcagagagaagcttgagatccttgatccattagagaaaattctgaaatcattgcattgggaaatagtgatggcattcaggaaggacaaggcgggcatcatgtctgtaaagaagacgacttggcggccatgatctaatctgttgatacgagtctcccgacataccaattttgaagtggtacaggcgtacagctattgatttcttaatctgggttaaagatacaccaatgaatcattgtttgcacccacaatattgctagcctttactccccgtggaggaatcctttggagcatcccagttcaggccgcgggaagagaccctgaattcaggctggatactgaaaaacagggttggacaagctgtaacatttagcaattgtttgtatttcttggaaattggaccaatatgaaagaat

SEQ ID NO: 409188 - DNA, 240 bp, Oryza sativa
tttaatattgatcgagaggattctcgatttgagctatgccatggctgaggaagggtcctgcacacaacaagacgtgagatccaccgtctgcctgcctgcaggaccttctcgcactggaccaccggcagcctcgcctcatgtaatcggaaattgacaggcagtgggcaaccattccccagggtgacatgaaggaatctgtacccaagaagctgccatttgtgcactagggagctgatgaga

SEQ ID NO: 409189 - DNA, 412 bp, Oryza sativa
gccgagcgcgttcgtatacgcttcctcatgctatcctccggttggatcttgctggccgagacctcactgaccatttcatgaagattctcacagagagagggtattccctcacaacatgcgctgagcgggaaattgtcagacacataaaggagaagctcgcttatgtcgcccttgattatgagcaggagctggaaacttctaggagcagctcctctgttgagaaaagctatgagatgcctgatggccaagttattaccattgggccagaaaggctcaggtgccctgaggttctgttccagccatcttttgttggtatggaatctcctggcatacatgaagctacatacaacttcctcatgaaaggtgttgcacacataaggaaggtcctgtatggtaatggtgtcctaagtgg

SEQ ID NO: 409190 - DNA, 378 bp, Oryza sativa
gtttaggctgcctcctggagaggatctcaatgaatggttagctgttaacactgctgatttcttcaaccaggtgaacatcctttacggcactctgatggagttctgcacgcctactacatgtccaacaatgtcagctgtacctaagtttgagtacagatgggctgatggaattcagatcaagaaacccatcgaggtttcggcaccgaaatatgtcgagtatctgatggactggattgaggtccagcttgacgatgaatccattttttctcagaaacttggaacccccttcccacaaaattttcgggaagttgcgaagacgatattcaagcgccttttccgtgtttatgctcatatttaccacacacattctcagaagat

SEQ ID NO: 409191 - DNA, 329 bp, Oryza sativa
tcgctgacgcgtggggaaagagagagagacccataccaatgccaagaacaagaaatcagagagcccaagcaaaaaatccaatccgaatcccctccaaaaacccaccaaacaatctcctccatctccaagaacaagaacaagagagcatcctagaacattaggggataaaggaggaggagaagaagaccaagaaaagtttcgagaggagagggaggagagttcaagaacttggagagaaggggatggatccggtgttgctggacgacattatacggaggcttatcgaggtgaagaatttgagccggggaagaacgcgcagcttttggagt

SEQ ID NO: 409192 - DNA, 471 bp, Oryza sativa
ttgtttttttaaactatcttgtttaaacttaaaacttttcttttttatcatataccactaattttttattctctaatattctttaatactctttcattccatcattcaaaaatggcaaagagcacaaagtcagataaagctatagagaactaggactccaggagatgggggccaaatgacaaccatggcgcttaaaccacctcctccatcttgctctcaccacatactcctccaacgacaacatgtcggcgacagcctcagcagactcgtcctcgtcgatgctcaggccgagcttgagcatccgctggatcctggtgccgaaagtgttgggctcctcaaggctgaagccggaggtcaggagggcaccctccaagagcatcatcaccatttccttcacagacttgtctttcttgtcagcatcagcacgcttgcggagctcatccatgatggaattctccgggttgatctcca

SEQ ID NO: 409193 - DNA, 358 bp, Oryza sativa
ttgagtgtgctcgccgaacaacatgtcgccctggaaccagaccatggcgtaggcgtggtcgcaccacagcgacgcgtccatggccgggctcggcggcgcgccacgcatggcgcccgggaccagcctcatcggctcgctggtcagggaggaagggcacatctactcgatcgccgccaagaccgacaccctgtacaccggctccgacaggaagaacatccgcgtgtggcgcaagcagaaggattgcggcgggttccagtcgtctagcggccttgacaaggccatcgtcatctgctgcaagcgcagcttaaccggggaccgtgaccgcaagatcagggtgtggcaggcgtctgccaagaac

SEQ ID NO: 409194 - DNA, 260 bp, Oryza sativa
tcgtgatctgaccaccattggttcctgaaattgagttatgtttgccaagctagctggtctccacagactccgcgaacgcctcggtgccaccttctcgtctcatcccaatgagttgattgcactcttctctaggtatgttaaccaggtaaagggaatgctccagcgtcaccagttgcttgcggagttcgattgccttgatcgaagcttgacacagagatatatgctccctttgaagacattctccggactcctcaggaagc

SEQ ID NO: 409195 - DNA, 293 bp, Oryza sativa
tacatgggctcagcctcttcccggaatcgttcacttctctagtaactctaaacttttcatgcttagagggggaggtcaatatcactgtacttgaacggttagtgaccagatgtcacaacctgaagactcttaagctcaacaatgctattccccttgacaagcttgctagcctccttcataaggctccttagctagttgaactcggaactggcaaattctctgctgattaccattccgatctgtttgcaaagctggaggcggtgtttggaggcttgtaaagcttgagaaggctt

SEQ ID NO: 409196 - DNA, 481 bp, Oryza sativa
tatagtttgatgttattatttgcggaagaaaaagacatgggctagttagtgatgaagacatatctggtgtccgaattggcttggtgtttcaaagtgcagctttgtttgattctctcacggttcgtgaaaatgttggattccttttatatgaaaattccagcctgcctgaggagagaatagctacactagtgacagaaacattggccgcagtaggcctaaaaggcgttgaagatcgaatgccatctgaattgtctggtggcatgaaaaagcgtgtagctctagctcgttcaataatatacgatgatacaaaggaaacaatagagccagaggttattttgtacgatgagcctactgctggacttgaccctattgcatccaccgttgttgaagaccttatacgttccgtacatgtaacagggaaagatgctcttggtaagcctggaaagaatagatcttatgtggttgtcactcattagcatag

SEQ ID NO: 409197 - DNA, 379 bp, Oryza sativa
tcgttcatcccacgccttccccccccccattcgtggcctcctgtcccgggggccgcgagcaaaacccccacccccaaatcgcagcctcgctcagctcgatctctctctcgtctcgccatggcccccagcgacgacctcgtctacatggccaagctcgccgagcaggccgagcgatacgacgagatggtggaggcaatgaatagtgtggcaaagttagacgaggggctgacaaaggaggagaggaacctcctctcagttggctacaagaatttgattggtgcaaagcgtgcggcaatgcgtatcattggatccattgagctaaaggaggagacaaagggcaaggagagtcatgcaaggcagacctgctgagtatcctccc

SEQ ID NO: 409198 - DNA, 373 bp, Oryza sativa
ctaccttctcctccggctcttcttcagtatcgaatcctctcttctcctcgtgcccaccaccaccaccgtagcaatggcgggcaacgggccgatcaacaaggaggacccgctcaactggggcgcggcggcggccgagatggccggcagccacctcgacgaggtgaagcgcatggtggcgcagttccgcgagccgctggtcaagatccagggcgccaccctccgcgtcggccaggtggccgccgtcgcccaggccaaggacgccgccggcgtcgccgtcgagctcgacgaggaggcccgcccccgcgtcaaggccagcagcgagtggatcctcaactgcatcgcccacggcggcgacatctacggcgttaccacc

SEQ ID NO: 409199 - DNA, 429 bp, Oryza sativa
gtcattatttaagcagaagcttatttctcagtttgatgggacaaatataaaagttgttaaccccaagaattgccaatcagtggagatgtatttcagttctgagaaaatggccaagacaattggcaggttggctgaaaaggtaccggaagctggagaatcagttaatggcttgcttgtaaagaagggattcacatatcaaattatggctcctgaggatctccgtgtgtacacgcagctatctacagctaacattacccaaaggattgccgtcccatattctggttcttttgaagtcataaagtacagactgaagcaaatatatgagagcgtggagtcatcaacagaggagtctgatgttccaacattgattgtgcatgagagagtgaccattcgcctggaatcagaaagctatgttacattgcagtggtc

SEQ ID NO: 409200 - DNA, 240 bp, Oryza sativa
gtgggtaggcttctcctccccctcccggttcggttcggttcggttcgggtccggttcgatttcggtttttccttcggttcgggggttggtgggaaagcatggcggcgccggatgttgagtaccgctgcttcgtcagcactctcacctgggccaccgaccaccgctccctcgaagccgtcttctccacctacggtgagatcctcgagtccaagatcatcaacgatcgggagacggggaggt

SEQ ID NO: 409201 - DNA, 222 bp, Oryza sativa
ttttctcttgggccacgactcccgcggtaaggcgcgggcacggttgcaacttccagggctcgcccatcggcgtgttcatggacaacacccgcctcgccatcgctgtcatcggcaagctcatgctcgcccactttctctcatctcattaactacttttacaacaactgcctgccattcaacctgtggggcggtcgcaacccgagctaggactacgggttcaag

SEQ ID NO: 409202 - DNA, 435 bp, Oryza sativa
tcgttcgaaacaggggaatccggagcaaagtgcgacgcgagcgcgcgaggaagcagcagccatggcgctctccctctccacctccttcctcccgacccaagccgccgcggcggccacgaggaccaccctccgctccctcgtcccctcccagaggatgcggtgctcgatgcggaagaaggggctgcacccggagatctacgaggacgcgaaggtgtactgcaacggggagctggtgctggtgacggggggaaccaagccggagtacacggtggacgtgtggtcggggaaccacccctactacgtcggcgacacgtcggcgatggtcgctatggacagtcagatcgagaagtttccgcaagaagggggggcccatcaagggggactgggccgaggaccagtggaggggagagcacccccgcacgcgaccccgagttc

SEQ ID NO: 409203 - DNA, 138 bp, Oryza sativa
tcgatgatcaagagatcgatcatatcgtattttggggtaatttagcagctagctagcgttagctgcaagctattagcgactgcatgctttgatccatccatctagctaattgtcgaatccatctaagcttaacggctc

SEQ ID NO: 409204 - DNA, 343 bp, Oryza sativa
gtagcctccgccgcagcctcctctcggctgctcccatcctctccttcgagttagcttcctccttattcaaccatgggtaaggagaagacgcacatcaacattgtggtcattggccacgtcgactccggcaagtcgaccaccacgggccatctgatctacaagcttggaggtatcgacaagcgtgtgattgagaggttcgagaaggaagccgctgagatgaacaagaggtccttcaagtacgcgtgggtgcttgataagcttaaggcccagcgtgagagaggtattaccatcgatttcctcctgtggaagttcgagacccccaagtcttactgtcgggcattga

SEQ ID NO: 409205 - DNA, 380 bp, Oryza sativa
ttccattcgtttttgagttcctcgtttgctccgcctctctttcactcatgggcaagattaagatcggaatcaatgggttcggccgcatcggcaggctggtggccagggtggcgctgcagagcgaggatgtcgagctcgttgccgtcaacgatcccttcatcaccaccgagtacatgacatacatgttcaagtatgacaccgtccacggccagtggaagcatcatgaggtcaaggtcaaggactccaagaccctcatctttggcacgaaagaggttgcggtgttcggctgcaggaaccctgaggagatcccatgggctgcggctggtgctgaatacgttgttgagtctactggtgttttcacccgcaaggacaaggcagca

SEQ ID NO: 409206 - DNA, 272 bp, Oryza sativa
  unsure (1)..(272): unsure at all n locations
ttctctttcaaagtcgcaacgcgctcctcctcggtgaaacgggagtgaggtgcgtgcggccatggcgtccagcgcctcccggttcatcaagtgcgtcacggtgggcgacggcnccgtgggcaagacctgcatgctcatctgctacaccagcaacaagttccccactgactacataccaacggtgttcgacaattttagcgcaaaccgtgttgtggacagcaccacggtgaatctgggcctttgggatactgctgggaaagaggattacaacc

SEQ ID NO: 409207 - DNA, 360 bp, Oryza sativa
ctcatctccatctctctcagctctcacagctcactgcatcaatggccgcggccaccatggcgctctcctccccggtgatggcccgcgcggcgccgtcgacctcctccgcgctcttcggcgaggcgcggatcaccatgcgcaagaccgccgcgaagcccaagccggcggcgtcgtcggggagcccgtggtacggcgccgaccgcgtcctctaccttggcccgctctccggcgagccgccgagctacctcaccggcgagttcccgggcgactacgggtgggacaccgcggggctcttcgccgacccggagacgttcgccaagaaccgggagctggaggtgatccactcccggtgggcgatgc

SEQ ID NO: 409208 - DNA, 457 bp, Oryza sativa
tttagttgtgtaccgtctggggcagctgtttgacttctttaggatgcttactttctttttcaccacagttggttattatgtctgcacaatgatgaccgttctaactgtgtatatctttttgtatggaagggtttatctggcactctctgggctcgactatgaaatatctcgtcaatttaggtttctgggaaacactgcactcgacgctgctttgaacgctcaatttttggtccagattggtatttttactgcagtaccgatgataatgggtttcattttggaactggggctactgaaggctattttcagttttattacaatgcaactgcagttctgctcagtgtttttcacattctctcttggaactagaacacattattttgggagaacaatacttcatggtggtgcaaagtattatgctactggtagaggttttgttgttcgtcacataaaattt

SEQ ID NO: 409209 - DNA, 360 bp, Oryza sativa
tcgttctcatcgacatcactgacggctccaccgccatcaccatctccaactcccacttcaccaagcacgatcacgtgatgctgttcggtgcacgcgacgactcgccgaaggacaagatcatgcaggtaacgctggcattcaaccactttggcaaggggctcgtgcagaggatgccgaggtgcaggtttggattcttccacatggtgaacaacgactacacgcactggctcatgtacgccatcggcggcaacatgaacccgacgatcattagccaggggaacaggttcagggcaagcgacgacatgaagcttaaggaggtgaccaagagggagtccacgagctacgactagtacaaggagt

SEQ ID NO: 409210 - DNA, 273 bp, Oryza sativa
tcgctaccccccacccctctcgccgccgcagccggggaggctacccctcccccgccgtcgccaagatgcagatcttcgtgaagaccctgacggggaagaccattacgctggaggtggagtcctcggacaccatctacaacgtgaaggccaatatccaggacaaggaagggatccccccggaccagcagcgtctcatcttcgccggcaagcagctcgaggatggtcgcacccttgccgactacatcatccagaaggagcccaccctccacctcg

SEQ ID NO: 409211 - DNA, 328 bp, Oryza sativa
ttttgatataaaatcaaacaaaaagaaaaaataggcccgatctgttaaattcgcaaaaccctaccgcggcggaaatgtcgaacacgagggtgttcttcgacatgaccgagggcggagctcccacggggcggatcctgatggacctttacttgaaggacgtgccgcggacggtggacaactttcgcgcgctctgcaccggcgagaagggcgtgggcaagagcggtaagccgctgctactacaaggggagcacctttcaccgcgggatcccctgagtcatgtgccagggcggtgacttcaccccttggcaacggcacgggagggggagtt

SEQ ID NO: 409212 - DNA, 378 bp, Oryza sativa
tcgattttaatggagagacatatgtacacaggtgtattggtcgataccactcatgacaagtcggttgtgatggctaagactggtaggacatatacggattaatataacatagacttctgcctgttcgaaggatatgttttgctcattttgcaaggcaaagccatcacccattgctgtattatgaacaacgagcatggacccttaaactaggtattaaaaagtaaaatgaccgacatggacaacatttggatagtctgaattaacatcatcatggataggaaggcgtgcgggaagtcataccctgagaataagcatgtgaaatcccttgccgatggtttgggaacatacaccaaggcacttggccttgagcttgacctt

SEQ ID NO: 409213 - DNA, 241 bp, Oryza sativa
tcgctctttcacaccatatcctataatggcgaactcaccgacgccgacaatgctggcgttcctggctcttgggctagcgctcctcctgtccgccaccggccaggcgagcgcgcagaactgcggctgccagtcgaacatgtgctgcagcaaatgggggtactgcggcacgggcaaggactactgcggagatgggtgccgctctggcccgtgctacggcggcggcggcggtggaggaggagga

SEQ ID NO: 409214 - DNA, 457 bp, Oryza sativa
ttggtctaagcttctttcagaagagagggagcatttactcaaggaaagagattctgctcttcaagaagctcaaatgtggcgttctgaactaggaaaagctagaggaaatgctgtaattttagaagcagccgctgtgagggcggaagagaaagcaagagtttcagcagcagatgctgatatgcgaataaatgatgctgcgagtagactcgattctgcgacaaaagaaaaggaagaactcgtagctcttgtggacgcgctacagttgcaaatacgaagccaagacactagcacaaaacaagtctgcgaggagaggtcggagctgtgctccacgtcttcaaagcatgtagacatggaagatgataatgtggataaagcttgcttaagtgatacagatccattacccattactgagaacatagttgatttggaagatgaaggagtcgatatccctacaact

SEQ ID NO: 409215 - DNA, 241 bp, Oryza sativa
tattctcgaagaaggagaagaaggagaggagcagccatggcgtcgtcggtggcagcggcggcgagcacgttcctggggacgaggctggcggacccggcgccgcagagcgggaggatcgtggcgaggttcgggttcggcggcgggaagaaggcggcggcgaagaaggcggcgaggccgtcggcgccgacgacggacaggccgctgtggttccccgcctcggtggctccttactaccttgacg

SEQ ID NO: 409216 - DNA, 382 bp, Oryza sativa
ccaatcctcccaaggccgtgaaccacaaaccgacgagcacagcgggcgcgagggcggccggcgccgggcggagcacacgcctctttcacaccatcatcgccagcgccggatccatccacgatgggcggcggcaacgggcagaagtccaggatggcccgcgagcgcaacatggagaaggccaagggcgccaaggggagccagcttgagaccaacaagaaggccatgaacatccaggttttagttttggatgggcatattaaaaactgatgaactgtgttggcgggtggcatgaggcccttcgaccaaatttgccgaaacccgtggcgaaggctatgaaccaaggatgatgctaggcgaagggtcgcgtgagttcctgccgaag

SEQ ID NO: 409217 - DNA, 385 bp, Oryza sativa
ttctcccagctaccactcttcacaaagcgatagccggaggaagaagaagaagcaacagcagcagtcaagccaacccgtccggcgagcaagaagcaaccgaggcagcaaaaggaggaggagggaggactccactgttcgcttgtatcgtcttatgggggaagaggatatcagcaacgacagcaagagcagctgcggctgcgaggacggcacggtggaggctccggcggctgcggcgccgaaggagaacggccgagccgcggacccgcgcctccaggccatctccgacgccatccgcgttgtcccgcactttcccaagccagggatcatgttcaacgacatcacggcgctgctgctccggcccggcgtgttaaggacgccgtggaca

SEQ ID NO: 409218 - DNA, 388 bp, Oryza sativa
ttacagtttttactggattagcccaggaagctgtagaagtttgctccacatctcttcagaatgcaagcaaggtcattgcaaaaaaagcaactgcaatggatggacagcttttcctaattaagcaccttcttattttaagagaacagattgctccatttgatattgagttttctgtcacgcataaggagctggatttctcccatttgctggatcacttaagaaggatcctcagggggcaggtctcgttatttgattggtcaaggtcaacatcacttgctaggacgtttcctccccgtgttctggagaaccaaattgatgccagaaaagaattggaaaaaagcctcaacaccacctgtgaagagttctattattgtccattacacaatta

SEQ ID NO: 409219 - DNA, 454 bp, Oryza sativa
tttcgtctctgaccaccattggttcctgaaattgagtcatggatgccaagctagctagcctgcacagtctccgagaacgcctaggagccaccttatcgtgtcattcgactgagtggactggactcttctgtaggactgttaaccagggaaagggaatgctacagcgccaccaggtgattggggagactgatgcctcgatcgaagctaacaaagagaaatatgctccctttgaagacattctccggtctgctcaggaagccattgtgctgccgccctgggttgcactggccatcaggccaaggcctggtgtctgggactacattcgggtgaatgtaagtgatgtggcagtggaagagctgagtgtttctgagtacttggcattcaaggaacagcttgttgatggacacaccaacaggaacttttgttcttgagcttgattttgagcccttcaatg

SEQ ID NO: 409220 - DNA, 562 bp, Oryza sativa
  unsure (1)..(562): unsure at all n locations
tcttcagtgagactggtgctgggaagcatgtcccccgtgctgtcttcgtcgatcttgagcctaccgtgattgatgaggtgaggactggtgactaccgccagctcttccaccctgagcagctcatcagtggcaaggaggatgcagccaacaactttgcccgtggtcactacaccattggcaaggagattgttgatctgtgccttgaccgcatcaggaagcttgccgacaactgcactggtctccagggcttccttgtgttcaacgctgttggaggaggaacgggctccggtctcggttcccttctccttgagcgtctctctgaggactatggcaagaagtccaagctcgggttcaccgtgtacccgtccnctgaggtctgcacctctgtggttgagccatacaacagtgtgctgtgcacccactccctgcttgagcacaccgatgtcgctgtcctgctcgacaatgaggccatctatgacatctgccgcctctccctcgacattgagcgcccaacctacaccaacctgaacatgcttgtgtcccaggtcatctgctcactgac

SEQ ID NO: 409221 - DNA, 445 bp, Oryza sativa
tgatttccggcacatccaggcacctgggtggcagctggggtggacatgggcaaagaaggaggtcatttggtcgatggttggagcacagaccactgagcagggcgattgcttaaagttcaagggtggcacgccccactgctgcaagaaggatcccacagttgttgatctgcttccgggcaccccatacaacatgcaaatcgctaattgctgcaaagctggagttataaatacatttaaccaggacccatcaaatgctgcttcttccttccagatcagtgtaggtcttgctgggactaccaacaagacagttaagttgcctaagaacttcactcttaaggccccaggtcctgggtacacgtgcgggcgtgctatgattgtcaggcctactaagtttttcaccggagatgggcgcagaggcacccaagctttatgacatggtatgtga

SEQ ID NO: 409222 - DNA, 464 bp, Oryza sativa
ttcggacgcgtgggcgagaagcctcttttggatctatccattcgggtcaccgtggcagttcggtaattttggcggagaggaggaggaggacgacgacgacgacgacgtgatgggtctcctcgacaagctgtgggacgacaccgtcgcggggccccgccccgacaccggcctgggccgtctgcgcaagcacgccgccgcccgccccgccgccgtcaagatcaacgacccgacaggggacgcggcgatggtggccgtcccgccgacgacgccggccggggcggaggaggcgccggtgaaggtgacgcgcagcatcatgatcaagcgccccgcggggtacccggcgtcgccgaggagcgcggccagcacgccgtcggtctccccgtcggatccacccctaccatcttgccggtcgccggcgccggtgagttcccgggattgcacacgctctctgtttttccaacttt

SEQ ID NO: 409223 - DNA, 370 bp, Oryza sativa
ttcagtggcctgtccacccactccctccttgagcacaccgatgacgctgacctgctcgacagtgaggccatctatgacatctgccgccgttccctggacactgagcgcccaacctacaccaacctcaacaggctagcgtgccaagccatctcctcactgactgcctgcctgacgatggctgcgtgctccgaatgtggatgcgaacgagttccagaccaacctggtgccctacccgaggaggcacttgatgctttcctcctacgccccggtgatctcggtcgacatggcctaccacgagcagctgtccgtggcggagatcaccaacagcgccttcgatccctcctacatgatggacaagcacgacccgagc

SEQ ID NO: 409224 - DNA, 535 bp, Oryza sativa
tgcctccgccgtcgccgccgcttgccccgtactgctcctcttcagcggcgatgaagggacggcaaggccagcgcgtgaggctgtacgtccgctgcaccatcctcggctacaagaggtcgaagtcgaaccagtacgagaacacgtcgctgctgcagatcgagggggtgaacaccaaggaggaggttgggtggtacgccgggaagcgcatcgcctacgtctacaaggccaagacgaagagcaacgactccaccatccgctgcatctggggcaaggtcacccgcccgcacggcaactccggcgtcgtccgcgccatgttccggtccaacctcccgcccaccttcatgggcaagaaggtccgcgtcttcatgtaccccagcagcatctaaaagcaaccaaggagtcccaatccaggtcgggatcatggccccatcctaacttaacagaattggggtggcaggaggaacttactgggatccctgggatggtttcaggcttccagttgtttgtggaaaggactggagtttttgcccaatga

SEQ ID NO: 409225 - DNA, 455 bp, Oryza sativa
gcgaactcagtctcccccaaatctcctttgcgtcctctcgattcctcagcaaccatgtcggcctactgcggcaagtacaaggacgagctcatcaagaacgctgcctacattggcactcctggcaagggtatccttgctgcagatgagtccactggcaccattggcaagcgctttgccagcatcaatgtcgagaacgttgaggagaaccgccgctctctccgcgagctgctcttcaccacccctggtgccctgcagcacctaagtggtgtgatcctgttcgaggagaccctgtaccagaagaccaaggacggcaagcccttcgtcgatgtcctcaaggagggtggtgtcctccctggcatcaaggttgacaagggtaccgttgaggttgccggcaccaacaaagagaccaccacccatggccactatgatcttggcaagcgttgcgccaagtacta

SEQ ID NO: 409226 - DNA, 426 bp, Oryza sativa
agcgtggaattaaagccgctgctccaatttaccatacgcagcatttgattacaggaataccaaaaaactactaccgatgacaggtattaattattaaaaagcacaggttcagattattgcgacaaaagtttttgatacccgtaagattggacgcttgatagccaaaccacactcagaaccctaaatatgcatacggaggatgtccaatcggatcttcagccaccaccagaggcagatcagtacttgtagtccttgacgtgaaggctctcagaggcaccctcgccgagcacagcatcaccctggtatgtaccaagggtagcctcagagttggccttgcacctggtgatgaaggccttctgcgccttcaccacgttctccgtcttgccgccccaggccttgagcgtgctctgctggagagcacggccg

SEQ ID NO: 409227 - DNA, 483 bp, Oryza sativa
gcttattctgcaaaagcggctcttgaattgggttactcgttcgcatctggtgactcaaggtttactcgcctaatgaaggagtgtgatgagcgcattgctgaggagcttagtgaagtccctgttaagaaggctgaagatggagcagctgcgccctctgttgcttcttttgttgaggaaaaggatgatgctgcaaacatggataatacaccaccaatggtagaagtgaagccaaaatacaggcacgacttctacaacagtgctacagaagttgtattgacaatttttgcaaagggtgttcctgctgagaatgttgttgttgattttggtgaacaaatgttaagtgtgtcgattgaagtccctggagaggagccgtaccattttcagcctcgtctgttttctaagatcattcctgagaaaagcagataccaagtgctatccacgaaagttgaaataagactggctaaagctgaacagattacatgg

SEQ ID NO: 409228 - DNA, 328 bp, Oryza sativa
tcgatggatcaaccgctctcgccggagacggaagaggcgcatagatgtcgtcggcgttcaccgtcgatgagacgggccccttcttcggctgtctcggcgccagctacggcctgatgttctgatgcatgggtgcggcgtacgggacggcaaccagcggcatccgcttggcggccatgggcgtgatgcacccggagctcgtgatgaagtgcatcgcgcccttggtcatggctggcgggctgggcatctacggactcatcatcgccgccatgctctggacagggatcagccacctggctaagccggactacctgtgtgaccgctactcgca

SEQ ID NO: 409229 - DNA, 419 bp, Oryza sativa
tcgccgccgccgccgccatgccgtcgcacaagacgttccagatcaagaagaagctggcgaagaagatgcgccagaaccgccccatcccgtactggatccgcatgcgcaccgacaacaccatcaggtacaacgcgaagcgcaggcactggcgccgcaccaagctcgggttctgagcttggggaggagaggaggacgaggcgccggacgccgctgccctgggaagaagaagaagaaggagaagctagggcttatgggttgcgtcgtgttcgtttcgaggttttgcctgtcctgaagagactatcagtagctgtgtgtatcttggagcatcataattttgctgattaaagaaccactttcttatcctgcctaaagttgtctgaattttatctcagctgcagtggattgatcagttgaactcc

SEQ ID NO: 409230 - DNA, 495 bp, Oryza sativa
tgaaaaaggctcatgaccatgctgttgacaactggactttaggaatcttgtgctatgagttcttatatgggtcaccaccttttgaagcagcagaacaggatgatacattgaggaggatagttaaagtggatttgtcgttcccctcaactccttatgtttctgcagatgctaaggatctcatttgcaagcttttggtgaaggattcaaacaagagactttctcttgatgacataatgaaacatccatggattgtgaagaatgcagacccatcagggagttgtagtgaccaaaaggctcgcacataatacctttaagaaacaaggtacattgggaagcataacgtgctaatgaaatacacaccttaccttcccagtcatcaccctagtatgctgagctaaacattaaactttatacacatttgtcaggctacattaaaacgattctgttctgttctcattatggactataataattttcttcattggtttgtgaagc

SEQ ID NO: 409231 - DNA, 495 bp, Oryza sativa
ttgacgatgaaaacgtgaaaggaggtgataattcttcgaattatactgaagatcagaagcctgcctggaggtgtttcagctaccaggagatttcagttgctaccaatgacttccatccagataacatggctgggagaggaggctatgcagaagtatacaagggtatcctatctgatggacaatgtgtaccttgtgccaatctctttgcacttggagcagctgttcaggcaggagtgttgtctggtgatgtgagcgacattgttcttcttgatgtaacaccactttctctgggtttggagacactgggtggtgtgatgaccaagattatcccaaggaacacaactttgcccacctccaagtcagaggtcttctcaaccgctgctgatggccagactagcgtggagatcaatgtccttcaaggagagagagagtttgtcagggacaacaaatctcttggtagctttcggcttgatggaattcctcctgccccacggg

SEQ ID NO: 409232 - DNA, 467 bp, Oryza sativa
tgctgtaaaccctagctctcgctcgcgcggggtgcgccgatgcggaggtggctggcggagggggtcatggagctggcggcgggggcgccggagtcgaactcctccttctgctcctccccctcgggcgcgacgccgtcgtcggggggcccgatgtggtgggtgtcggggtgccacgggacggtgtacagcctggcggtgatgctcccgtcgttggcgttcgtcgggttcctggcgtggcaggcgcgccggagcttccgccgcctcagctactgccgctcccacgtcgtcgtcgtcgcctactacgcgctcctctgggccgtcgccgtcctcaacctcctctggtgcttcctgcaagcgtggcaatgtatgcctgatagggcgttctcatggaatgtgctgtctctgtttaccaaatcagggatgttattctgggaagttagtcttatagcatttctgcttcaggaaac

SEQ ID NO: 409233 - DNA, 549 bp, Oryza sativa
actataggtgaaggctggttcgcccgcactgtacgtgcccgtactgcccgggtggacccacgcatgcggattgcataagcaacacaagggattaactcatcactcacttagctaattaaatcttcgaccatgtcggacaagtgcgggaactgcgactgtgctgacaagagccagtgcgtgaagaaaggtaccagctatggcgtcgtcatagttgaagccgagaagagccacttcgaggaggtcgccgccggcgaggagaacggcggctgcaagtgcggcaccagctgctcctgcaccgactgcaagtgcggcaagtgaagtcacgaagcaaccgaacactcgccgccggcgagtcacctaccttaattagtccacaataaaaaccacccatatgagtgtggtttgtgtgtgtgctgattattgctgaattaaacccgtgtgttatcgattaattaagcagctggtcgcttcggcgactatgcgtgtatcaacgtatgaatttgtgtgatgtgatgtacccgtgctattctcagtgaaattaatcaatcg

SEQ ID NO: 409234 - DNA, 550 bp, Oryza sativa
  unsure (1)..(550): unsure at all n locations
tgacatatgccctgcccatatctatgcaacatccatgtcacctccagctgttcagcaggtcatttctgcaataaaagttatccttggtgaagatggatctaacagaggggccaagaagcttgctcagattcgagagaacagcaatttcttccgttcagagcttcagaaaatgggttttgaagttcttggagacaatgactcgccggtcatgcctatcatgctttacaatcctgctaaaatacctgcattctcaagagagtgcctgaggcaacacgttgctgttgttactgttgcatttcctgctacaccactactgcttgccagagctaggatatgtatctcagcttcccactcaagggaagatcttattaaaggattggaggttatcagcaaagttggtgacctcgtgggaatcaaatacttcccagtggaacatgaaaagactgcatctgttgagaaactgaagaagcttcaatgaacacctacaaccagaagaaatatactgggtgatctangcagtgtgccatgcctcggttcggctcatgtgcct

SEQ ID NO: 409235 - DNA, 567 bp, Oryza sativa
ttctccctcgaggccgccttctccacctacggcgagatcctcgactccaagatcatcaacgacagggagacggggaggtcacgtgggtttggcttcgtcaccttctcctccgagcagtcgatgcgcgacgccatcgagggcatgaacggcaaggagctcgacggccgcaacatcaccgtcaatgaggcccagtcccgccgctccggcggcggaggcgggggctacggcggcggcggtggcggctacggcggcggtcgtggaggcggcggctacggaggaggtggcggcggcggctacgggcgccgtgagggcggctacggtggcggcggcggctacggcggcggccgtggcggcggcggcggcggctacggtggcagccgtggcggcggctacggcggcgactccggcgggaactggaggaactgattggtggggcccatcgtggccagttatccttagctatccgtgtcagaatcatcttatcatcgagtcgagtcgttatcgtgtccagtggctctctcgagtcgagaagccctctatccatccatccagtggtaggtggtcttc

SEQ ID NO: 409236 - DNA, 551 bp, Oryza sativa
tgtttcatctggaaaacaagtaggaattgatacacacgagcttaatatcatccttaaagttgattttcagggttcagttgaggccattaggcaagcaatccaagtgctgcctcaagaaaatgtctccttgaggttcctacttcaagctccgggagatgtgagtgtcagtgatgttgatctggctgttgcttcagaagggattatatttggttttaatgtcaaagctccaggatcagttaaaagctattctaagaagaaaagtgtggaaattcgtctgtacaaggtgatctatgatttgattgatgatttgcggaatgccatggaaggacttcttgaacttgctgaggaggaagtaccaattggttcagccaaagttcgtgctgtttttagtagtggcagtggcaaggtggcgggttgcatgattactactgagaaagttgttcatgactgcaatgttcgggttcttcgaaagggaaagaagttatatggtacacttgattcgttagacgggtgaagaaactgaaaggaggtggtgctggctagatgggcat

SEQ ID NO: 409237 - DNA, 538 bp, Oryza sativa
tacacaactttgcccacctccaagtcagaggtcttctcaaccgctgctgatggccagactagcgtggagatcaatgtcctccaaggagagagagagtttgtcagggacaacaaatctcttggtagctttcggcttgatggaattcctcctgccccacggggtgttccacaaatcgaagttaagtttgacatcgatgccaatggcatcctttctgtcagcgccgtagacaagggtactggaaagaagcaggacattacgataactggtgccagcacattgccgaaggatgaggtggagaagatggttgaagaagcagagaagtttgccaaggaggacaaagagaagagggacgcaatcgacaccaagaaccaggcagagtctgtcatctaccagactgagaaacaattgaaggagctcggtgacaaggtcccaggcgatgtgaagggtaaggttgaggcgaagctgactgagctcaagacgctgtgcaggtggctcgcacagacatgaagatgctctcgctgtctgaaccagaatgatg

SEQ ID NO: 409238 - DNA, 438 bp, Oryza sativa
ttcacaactgtgcccacctacaagtcagaggtgttatcaaccgctgctgatggccagactagcgtggagatcaatgtcctccaaggagagagagagtttgtcagggacaacaaatctcttgatagctttcggcttgatggaattcctcctgccccacggggtgttccacagatcgaagttaagtttgacatcgatgccaatggcatcctttctgtcagcgccgtagacaagggtactggaaagaagcaggacattacgataactggtgccagcacattgtctaaggatgaggtggagaagatggttgaagaagcagagaagtttgccaaggaggacaaagagaagagggacgcaatcgacaccaagaaccaggcagagtgtgtcatgtaccagactgagaaacatttgaaggagctcggtgacaaggtcccaggcgat

SEQ ID NO: 409239 - DNA, 506 bp, Oryza sativa
tctcctctcgaaccttccaaagtccaaaccctagtggtgacctcgcctcggcctcgaaaccctagccgcagatctggcctctccttgccccgcgccatggacgacgacttcgagatgccgccgcccggcgccgacgacgacttgatgatgggggaggacgggatgggcgacttcggcggcgccgacgggccgccgctgaaggtcggagaggagaaggagatcgggaagcagggtctcaggaagaagctgctcaaggagggcgaggggtgggagacccccgaggtcggcgacgaggtcgaagtacactacactggcacactgcttgatggaaagaagtttgattcaagccgtgaccgtgggacacccttcaagtttaagttgggacaaggtcaagtgataaaaggttgggatctaggtatcaagaccatgaagaaaggcgaaaatgctgttttcaccattcctcctgattgggcctatggtgaatctggttcacctccactattcca

SEQ ID NO: 409240 - DNA, 476 bp, Oryza sativa
ctccaatccaagctccaacaatggctaaaccatccttgctcctccttcttcctctgctcatcttctccatcggcgcggctctcgcccgcgccgatctcatgctggacaggttcgagcagtggatgatcaggcatggccgcgcctacaccgacgccggtgagaagcagaggaggttcgaggtgtacaggaggaacgtcgagctcgttgagacgttcaactccatgagcaatggctacaagctggctgacaacaagttcgccgacctgacgaacgaggagttcagagccaagatgctggggttcagacctcatgtcacgattcctcagatttcaaatacctgctccctgacatagcaatgcctggagagagcagtgatgatattctgccgaagagcgtagattggaggaagaaaggggcagtggtggaagtgaagaaccaaggagattgtggttcttgctgggcgttctccgcggtgg

SEQ ID NO: 409241 - DNA, 508 bp, Oryza sativa
tataagctcacagttcagttctaccacgtacaacagcagaagtgagagagggagaagaagacaagggaagaggaggagcttagctagccagccatggcgaggcgctctccttgcctcgccgtcgccatgctcctgcttggggcgttggcggtggcgagcgccttcattgatgaagcggcggctgctggccgggggctcggccatggcgcccgcttcatgagcaagcagggtcgtgtgacatacgagaagctgccggagccggagccgaagccaaagccaaagcctcatcctaaacccacgccaaaacctgagcccaagccagagccggagccaaaaccagtacctgagcctgagcctaaaccggaaccaaagccagaaccaaaacctgagcctaagcctgaacctaaaccatacccagagccaaaaccggagccgaagccagagccaaaacctgagccggagcctaaacctgagcctaagccagaaccaataccagaaccaaagccgt

SEQ ID NO: 409242 - DNA, 557 bp, Oryza sativa
tggtatccacaaggttttgaagcctgaaggcatatttgtatcaattacctttggacagccacatttccgtcgtcgattttttgaagcacctgggtttacatggtctgttgagtggagcacctttggtgatggcttccattatttcttctatattcttaaaaagggcaagaggttgttggattccaacggtaaccaacatacacagcctgctgctccaagcattaatatgttccatgaagagcttgagagtgaggactacatattccgaacaaatgttgatgagttgtaactggcaatttaacaagtgcatcatcggcttggtgggagttttgatgaagctacttcacatcaagagagacgtcccgtccagcatcaacttggtagatgaatgatcttggacagatgcatggaaagatcttgcttggtgcttgaccattgccctggctagggatttctgtgccagctgaattgactagaaaacaggtacccttattattgttccagattttaagtaacctttcaagaagttccttttgttgtcaacatgcattttttgt

SEQ ID NO: 409243 - DNA, 497 bp, Oryza sativa
gcggcggcgcggcagccagctgatgaggggccccgtcaacgacgtcaagtgcatgcggtacctcctctgcgagcgcttcggcttccccaacgactgcgtcctcatcctcaccgacgaggagaaggacccgtgcaggttggcgacgaaggagaacatcaggatggcgatgaactggctggtgcaggggtgcagctccggtgactcgctggtgttccacttctccgggatcggggtgcaggtgccggacgacgacgcgacgaggtggacgtgtacgacgaggcgatctgccccatggactcgttcagccagggccccatcctggacgacgagatcaacgaggccatcgtgcgcctgctcgtgcacggggccaagctcacgctcgtcgtcgacgccgagcacagctccaccgttctcgacctcccctttctttgctgcctctcgtccaggttcggctgggtggcagtgggaggacccaccgcccgccaccggcgcctaca

SEQ ID NO: 409244 - DNA, 548 bp, Oryza sativa
tcggacgcgtgggggcaggctcttgagctaccaagtatgtcagcttcaaatgagaagtggattgatgggctccagttctcatcactgttctggcccccaccacaggattcacaacaaaaacaggcacaaattctggcctatgttgagtactttggccagtttacagctgacagtgagcaattccctgaagatatagctcagctaattcaaagttgctatccatcaaaagaaaagcgccttgtagatgaagtattagcaacttttgttcttcatcatcctgagcatggccatgcagttgtgcatccgattctgtcacgcatcatagatgggacactcagttatgatagaaatggtttcccgttcatgtccttcatctctttatttagccatacttctgagaaagagtactcggagcagtgggccttggcctgtggagaaattcttagagttctaactcactacaacaggccaatcttcatagttgatcaccaacatagtggaagcgaatgtatcatcacatctgatcaggccccatcatgtgagtctat

SEQ ID NO: 409245 - DNA, 265 bp, Oryza sativa
ttctagggagagaaaggaagagacgagaggagagagatggccactgcttatgctcccatggcgagccagctgatgaagagcagcttggtgtgctccaagccgagggggctgtctggtgcttcgctgacaaggaggccccgcttcacagtcaaggccatccagcctgagaagccaacgtaccaggtggcgcagcccatcactggctaccccttcatcggtagcctggagacgccggtgacctccagcccgatggtcgcctggttcc

SEQ ID NO: 409246 - DNA, 544 bp, Oryza sativa
tgaacaaactgtttcgggaaaacattgatttcctactggagcgctttgaaagtggggatctatgtggtgtagtggaactgcaacaactgttggatattttggagcttacgcatcagtcaatatcaaaatttcttgagttggattcttactctcttatgcttagcgagatgcaagagaacctttcgctggtttcttattctagtcgcatctcttctcagatatggaatgagatgcagacagatttcttgcccaattttatcctatgtaataccacacagcgatttgttcgatcattaaaaggaacccatcactcttctcagagatcaagcgcctctaccgggaaggcctatttctattgtggatcacatgatttgaccatggcataccagggcatttctggtttgtaccgtgacttttttgggatccctcatatgtttgcagttgttaagctttcttgttccagatcattaccctgtattatccgtgctttattggatcatatatcaagtaagataacagctatggtgccaaaaataactgcatt

SEQ ID NO: 409247 - DNA, 458 bp, Oryza sativa
ttcctccgactactgggccggctcaccaaccgccgcgtagaggagttcatccacgcatggacactatctgcatcacaccttcgcgatcccgatatttcagctatgctggcgacacaactgagggaatcccacatccttgacatgcctggcccgaaatatggactcatttgggaccgactgcaaaactggttaaaaactgcaaggaacctgtgctcatgtgatgaatccaggaaattccggctgtgctgcctgccaaacgagatagctgcattgcagaaagaattctcaggggattaccacgggattgcattttgccacaacgatcttcagtatggcaacatcatgactgatgaagacaccaacatgtagactatcatcgattatgaatatgccagcctaatccagttgccaatgacatcgataatcatttctgcgagatggcaccagactatcattca

SEQ ID NO: 409248 - DNA, 550 bp, Oryza sativa
  unsure (1)..(550): unsure at all n locations
ttactccccagcagcagcagcagcagcagctgagcttgaagcagcagagcgaggtagacatggccgccgccaccatggccctctcgtccccggcgctggccggcaaggccgccgcgaaggtgttcggcgaggggcgcatcaccatgcgcaagtcggcggcgaagcccaagcccgccgcgtcggggagcccgtggtacggcgccgaccgcgtgctctacctcggcccgctctccggcgagccgccgagctacctgaccggcgagttccccggcgactacgggtgggacaccgcggggctctgcgccgacccggagacgttcgccaagaaccgggagctggaggtgatccactccaggtgggcgatgctcggcgcgctgggctgcgtgttcccggagctcctcgcccgcaacggcgtcaagttcggcgaggcggtgtggttcatggcggtgtcgcagatcttcagcgagggcgggctcgactacctcggcaacccgagcctgattcacgcgcagagcatnctcgccatctgtgcggtccaggtggtgcttat

SEQ ID NO: 409249 - DNA, 540 bp, Oryza sativa
  unsure (1)..(540): unsure at all n locations
ctgacacgcctgccatgcctcccgccctcacctgcaaccccccctccttccgccccctctgcacccctgtaacccgccgccgtgccgccacaaccttcctctgccgtgtcggccctggcaagccttccaaggacaccggcgcggatgacgagccgaagaagaggtcgttcttcgccgatttcggtaagctctcggatggaaggtcgctgataccggccttcccgccggccgcggctgggtctctgttcgccggcgggagggggaggaaggacccgcagacagtgttcgtcgcgggcgccacggggcaggcgggagttcgcatcgcgcagacgctgctgcggcaggggttcgccgtgcgcgccggggtgccggacctcgcgtccgcccaggagctggcgcggctcgcctccgcgtaccggctcatttcccccaccgaggcgcgccgactcaacgcggtggagtccgatttcgaggaccccgaggcgatcgccaaggcatcggncctggcactaaggtggtgttacagtcggcgcagctgag

SEQ ID NO: 409250 - DNA, 491 bp, Oryza sativa
tcaatctctcgccgccgccgccgtgatgtctcgccggtacgacagccgcacgacgatcttctcgccggaggggcgtctctaccaggtggagtacgcgatggaggcgatcgggaacgccgggtcggccctcggcgtcctggcggccgacggcgtggtcctcgtcggcgagaagaaggtcacctccaagctcctccagacctcgcgctccgccgagaagatgtacaagatcgactcccacctcgcctgcgccgtcgccgggatcatgtccgacgccaacatcctcctcaacacggcgcgcctccacgcccagcgctacgccctctcctaccaggagcccatccccgtcgagcagctcgtccaatccctctgcgacaccaagcaggggtacacccagttcggcggcctccgccccttcggcgtctccttcctcttcgccggctgggacaagcaccatggcttccagctctacatgagcgatcccttcggcacta

SEQ ID NO: 409251 - DNA, 559 bp, Oryza sativa
ccgcccttttttttttctaaagataggatgtcctaaccatccaacagctattccatccccattgtccattgagcctgctctgaataatcccccctttgccggattattaccaatataatcataaaaggctaatttttcgggaattttagaccaagcttctgataaactgagattttcggctaacccatcactaactcttcgatatatttcttgctgaaagtatccctgatcccactgataacgagtaggcccaaacaattcaattggggtagttgctgacccataccacatagttccggcaactacgaaagctgcaaaaaaaaacagcagcgatactactggaaagtacagtttcaatattgcccatacgtaatcctttgatagacgttgaggtggacggacactaagatggaataggcccgctaatatgcccaatgtacccgcagcaatatgatgagaagctattccccccggaacagaaggatcaaaaccttctgcaccccacgcctgatttacagcttgtacttgtccagttagtccataaggatcagacacccat

SEQ ID NO: 409252 - DNA, 544 bp, Oryza sativa
tcgtcctgctcctcgcgctgccgaacgacccgtccaccggcgtcgcgcacgccgccgtgttcttcttcatggggttcgccatctcctggaacgcgtgatccacaaacaacccaatcttcgcggagattgtaccggagaaggcgagaacaacggtctacgctctcgacaaatgctttgaagcggtgttcgcttcattcgcgccaccgatcgtcggtgttctagcagagcaagtgttcggctacaagccggtctcctctgacgcaagcgtcgaaacggacagagaaaatgcggctgcattggccaaggcagtgtacacggagatcgccgtgcccatggccatctgttgcctgacatacaccttcctgtactgcacgtatcctcgggacagagatcgtgctcgaaggaacattctgatggcatcggatgaccagctctgccaagaagcaggtgagagtgactcaagtgagatttgtacccaggaggatgaagaatctgctgttggttccataaaccagaggttaatacatgcaagagagtagcatca

SEQ ID NO: 409253 - DNA, 488 bp, Oryza sativa
tcaattcttgagctcaatcagcaacaacatctatctccttcttgcttagttaagtccttcgccctcccaagaagaagaagatgtcttgctgcggcggcaactgcggctgcggcagcggctgccagtgcggcggcggctgcggcggatgcaagatgttccctgatgtggaggccacagccaccaccaagaccttcgtcctcgctgctccatccaacaaggcgagctctggaggaatggagatggcggtggagagcggcgagaacggcggctgcggctgcaacacctgcaagtgtggcaccagctgcagcggctgctcctgctgctcctgcaactgaatctatcgtggtcgtcgcccggctgcatgaggatttatcggatggatgctgctactgacgatcagagcttggaccgaagccttaatttgcttgcattagtacccagcttatatggaggcaggccttgccttttgctctgacgcctaaataaaa

SEQ ID NO: 409254 - DNA, 537 bp, Oryza sativa
ttccaaatgctgtacctgtgaatgctcacccgtacagatactctccagctcaaaaggatgagactaagcgtcaggtatctgatatgttagcagcaggactaatctgcccaagttgtagcccctttgcttctcctgtgctgttagttaagaaaaaggacaattcttggcgtttttgtgtggattaccgacggttgaattctgttactgtcaaaaacaagtttcctctacccattgtggatgagttgcttgatgagttacctggcacaaaatatttttccaaattggaccttcgcagtggttatcatcagattagaatgttggaagctaatgagtttaaagctgctctcaagacacatgatggacatttccaattgcgggtcatgccttttggtctgtccaatgccccagctacttttcaatatctcatgaattccatctttgctcttttttgcgcaggtttgttttagtcttcatggatgacattcttgtttacagtaaatcttgggcagagcatcttcaccatctaagatgtgtttt

SEQ ID NO: 409255 - DNA, 549 bp, Oryza sativa
tggaaggactacctcaagttctacaagatgggcacctactggccctacaccccatccatccagctcctctacggcctccgcaccgccctcgacctcatcttcgaggaaggcctcgagaacgtcatcaagaggcacaaccgcctcggcaccgccaccaggctggccgtggaggcgtgggggctcaagaactgcacgcagaaggaggagtggttcagcgacaccgtcaccgccgtcgtcgtgccgccgtacatcgacagcgccgagatcgtgaagcacgcctggaagcggtacaacctcagcctcggcctcggcctcaacaaggtcgccggcaaggtgttcaggatcggccacctcggccacctcaacgagctgcaattgatgggtgccctgagtggagtggagatggtgctcaaggacatcggctacccggtgaagctcggctccggcgtggcggcggcggcggcgtacctgtcgaattcgacgccgctcatgccgtccaggatctgaagcacaacgaacgaaggaaggaagcaattctcaacagcgatg

SEQ ID NO: 409256 - DNA, 535 bp, Oryza sativa
tgttctcactactctccttcctctccccaccgtgtgacaccacaccacacaacaccaccaccgccgccatggccgccaccgaccgccgcctgctgttcctcctggccgcctccctcgccgtcgcggcggtgagctcccacaacattacggacatgctcgacggctacccggagtactcgctgtacaacagctacctgtgccagaccaaggtgtgcgacgagatcaacagccggagcacggtcacctgcctcgtgctcaccaacggcgccatgtcctccctcgtctgcaacctctccctcgccgacatcaagaacgcgctccgcctcctcaccctcctcgactactacgacaccaagaagctgcactccctcagcgacggctccgagctcaccaccacgctgtaccagaccaccggcgacgccttcggtaacatgggccacgtcaacatcaccaacctgcgcggcggcaaggttgggttcggctccgtcgcgcccggctccaagttccaggccacctacaccaagtccgtcaagca

SEQ ID NO: 409257 - DNA, 494 bp, Oryza sativa
aggatagggagcatgatctccatgcccgtgaggacagagaccgtgattaccgtcgttcaagctattcaagtaggaatgttgacagacaaggccgtgaaaggagggacagggattctgatcgacatggacgttcgagtgcccgcaggagcaggagcaggagtccaaaccgtggcagaaccgaaggtgaaaatcaccgctctagcccatttggtagaccaccagagccatccaacttggcaaaattgaaggatttatatggtgacgcgacaaacacaaaggatgatacaggtgatgataaagctcgcagggattctggaactgaagaggtaatcagattgggaggtgcaaggtggaggtgaatgccaaagggcacatgaaagacatccacccctatttgttcttgttaacagcaatataacagccagagatatttgctatccccagtgctgcattcccagggacactcagaagaggaatgagctttcatttggtaa

SEQ ID NO: 409258 - DNA, 508 bp, Oryza sativa
gcttttcgcgcgcggcggcgaaggccgtcgtggagagcctcccgaccgtggtcgtcgacgcggcccgcggcgacacgcagtgcgcggtgttgcaggacggcatggaggccggcgagcgggccaggaggctgccctgcgcgcacctgtaccacgacggctgcatcctgccgtggctcgccatccgcaacacgtgcccgctgtgccgccatgagctgcccaccgatgaccccgagtacgagaactggaaggcgaggcgagcagccgccggcggcaatggcgatggcgacaggtacggcatcattaggcaactttcaatgattgattgaatattaataattaaaagaggaagagagattaatttgatattcaggagttaggcggcccaaaaaaggatctttttgatcgagaggggaagggaggggatcgaatcaatgtgaaattgtggcattttttttttggtacagagtgatgataatacagtgcattttcaagtcgattatggtagagt

SEQ ID NO: 409259 - DNA, 435 bp, Oryza sativa
taaggcgagctctggaggaatggagatggcggtggagagcggcgagaacggcggctgcggctgcaacacctgcaagtgtggcaccagctgcagcggctgctcctgctgctcctgcaactgaatctatcgtcgtcgtcgcccggctgcatgaggatttatcgtatggatgctgctactgtcgatcagagctttgatcgaggccttaatttgcttgcattagtacccagcttatatgtaggcaggccttgccttttgctctgacgcctaaataaaaccgtcgtcgtcgttgtcagtgtgtgcgtgtgtcgatcaatgttggatggatccctagctagcttggatggatcatctatcattatggtgatctcatcatgtactcctgctccatctgctcatgcgtgccaggcttcttaatataatctacctttgctttca

SEQ ID NO: 409260 - DNA, 480 bp, Oryza sativa
tggttgaggagcttgagcttggagagagacaacaatggcggctcaggctcttctctctgggaggcagctgctggggaggccattgcaatcttcagtctccaggtcttcttcctccaggaaggcacccttcatggtcagggcagaggccactccccctgccaagcaaggtgctgacaggcagctgtggttcgcatccaagcagtccctgagctacctggatggcacgcttccgggagacttcgggttcgacccgctggggctatcggacccggaggggaccggtgggttcatcgagccacggtggctggcctacggcgaggtgttcaacggccggacggcgatgatgggcgtcgtcggcatggtcgccccggagctcctcggcaagctgggcctcgttcccgccgagacggcgatcccgtggttccagaccggcgtgatcccccccgcgggcacctacacctactgggccgacccttacac

SEQ ID NO: 409261 - DNA, 527 bp, Oryza sativa
  unsure (1)..(527): unsure at all n locations
tgaataaaaaaggaaaaaaaaacaaaacacaccaagccaaataaaagcgacaatgggatcgctcaccaccaacatcgtcctcgccgtcgccgtggtggcagcgctggtcggcggcgggtcgtgcggcccgcccaaggtgccacccggcccgaacatcacgaccaactacaacgccccgtggctccccgccagggccacctggtacggccagccctacggctccggctccaccgacaatggtggcgcgtgcgggatcaagaacgtcaacctgcctgcctacaacggcatgatctcctgcggcaacgtcccaatcttcaaggacggcaggggatgcggctcatgctacgaggtgaagtgtgagcagccggcggcgtgctcgaagcagccggtgaccgtgttcatcacggacatgaactacgagcccatctcggcgtaccacttcgacttctccggcaaggcgncggcgccatggcttgcccggngaaggagaccgagctccgcaggccggcatcatcgacatgcagttc

SEQ ID NO: 409262 - DNA, 542 bp, Oryza sativa
ttccatatctccaccattagaccggcttaaacgcccccgcggtggtcttcctccccgacgcaagcagacgagcccacggccgccgacgcctgccgccgccggacttcgccggaatttcgccattctgatataaattagtgcattgcatcagaaaaatggttgtggggttaataaatgctaaccctgtagtttatgagaaaaaagagaggcgttctcggcaggcaccagaaaccacagatgaaaatgcggcagaggctattgaccagctagaaatatttgatcatattagagacataaaggatccagagcacccatactcactcgaagagcttaatgttgtaactgaggattcagttgaaatcaatgatgaacttagtcatgtcagggttacttttaccccaacagtggagcgttgcagtatggcgaccgtcattggactttgcctgcgtgtgaaacttatgcggagtcttccccctcgtacaaggtggacataagggtggcgcctggatcacatgcaactgaaactgcagtgaacaagcaac

SEQ ID NO: 409263 - DNA, 436 bp, Oryza sativa
ttggggcaaggaggccttccttacctgaaggaggggacggagttgaggaagaggtcgatccactggatctcgacgggggtggcctttcgcgggttgtcggaggcgaagcggtaggggatggtgcaggccctgtacgtgctctccaccggcgcctgcagcagcgggaacggcaccgacggcgacgagctctccatgtgctccggcttactagtcagatcgctcctcctgctcgtcggcggcggcggctgggattcgtgaggtgattaggtaaccgcctaaacttggggcgccgtgagatccggcggtgaagtggttattctgcacgcgaggaagacggaggagaaggcgaaggggaagcaacctgccgctcgccacagatgcatattctgctcacgtaacatgggctatagaggccggaatggcctaatgcctggcc

SEQ ID NO: 409264 - DNA, 484 bp, Oryza sativa
tgttcttgggtgtgactgcaactgtcaccaattgggatgctgagggtacaagctgcagctttgtattggaggacaatcctcttgtagactttgttgaacttcctgatacttgccaaggtcttcagtactgcaatgtgctaagtggagttattaggggtgcactggaaatggtgtccatgaagaccgaggttacatgggtccgtgatatgcttcgtggggatgatgcctacgagatgcgagtgaagcttaccaagcaagtcccagaggaatacccctacaaggatgatgactgacttgacaatttcgtgggtagtttctcagttctcacatgctgcctgtttgttcgtctggatttcccttcttttctttcctatgtgactctggttctggatcgacttggctggacgctacatgagatagctgtgcattatattctacacttgaccttgtcacggcagcatcaagtaggtatggaattaattca

SEQ ID NO: 409265 - DNA, 467 bp, Oryza sativa
gtggtggccacacattctcgaagaaggagaagaaggagaggagcagccatggcgtcgtcggtggcagcggcggcgagcacgttcctggggacgaggctggcggacccggcgccgcagagcgggaggatcgtggcgaggttcgggttcggcggcgggaagaaggcggcggcgaagaaggcggcgaggccgtcggcgccgacgacggacaggccgctgtggttccccggcgcggtggcgccggactacctggacgggtcgctcgtcggcgactacggcttcgacccgttcggcctcgggaagccggcggagtacctgcagttcgagctggactcgctggaccagaacctggccaagaacaacgccggcgagatcatcggcacccggttcgagaccggcgaggtgaagtccaccccgttccagccctacaccgaggtgttcggtcttcagcgcttccgcgagtgcgagct

SEQ ID NO: 409266 - DNA, 509 bp, Oryza sativa
tttcttagatgtccagacggtctgagcttcggtgacgatgatcagatcgagccattgcacctgaacaacaagggacatagacctactgcctctgaacccggactgtgtgaaccattcgcccacagcggcaggagctgagctgacccacagcttcttgagcaacgagaactccctcaccttcggtacccagaacactatggagccgattaccgtcgagaaggcccggttcaacaattccgggaaggccagcgcgctggtccagcacgagaggaggccatagtttgtgaggaccatctgagcataagttgagaccaaggtcattgacatgagcttaaaggtcctgattgcggtggacctcaagacttgactttttctagggggtacttacattcaaaggatgaatctggatgagtcgaaaatcatcttggcgcatgctcattttttgtttgtagttgctattagatttcaagaactgccatgtttaatgtgaggatattttttttctggta

SEQ ID NO: 409267 - DNA, 458 bp, Oryza sativa
ctcggcgccgccaccccgcaccaggtaagggaggaggagtaagaagatgtcgcacaggaagttcgagcacccgaggcacggatccctcggcttcctcccgaggaagcgctcctcccgccaccgcggcaaggtgaagtcattccccaaggatgacgtcaacaaaccatgccacctcacctcctttgtcggttacaaggctggaatgacccacattgtgcgtgaggtcgagaagcctggttccaaactccacaagaaggagacctgtgaggctgttaccattattgagacacctcctattgtcgttgttggacttgtggcctatgtgaagactccacgtggcttacgcagtctcaactctgtctgggctcagcatcttagtgaagaagtaaggagaaggttctacaagaactggtgcaaagagcagaagaaggctttcaccaagtatgctctcaagtatg

SEQ ID NO: 409268 - DNA, 401 bp, Oryza sativa
gctctctccccagcagcagcagcagcagcagctgagcttgaagcagcagagcgaggtagacatggccgccgccaccatggccctctcgtgcccggcgctggccggcaaggccgccgcgaaggtgttcggcgaggggcgcatcaccatgcgcaagtcggcggcgaagcccaagcccgacgcgtcggggagcccgtggtacggcgcctaccgcgtgctctacctcggcccgctctccggcgagccgccgagctacctgaccggcgagttccccggcgactacggatgggacaccgaggggctctccgacgacccggagacgtttggcaagaaccgggagctggaggtgatccactccaggtgggcgatgctcagcccgctgggctgcgagttcccagagctcc

SEQ ID NO: 409269 - DNA, 464 bp, Oryza sativa
gctgttttaccaccaccgccgcgccagatgtggaagacggacggggtagagttggggtctcgcggtgagccgattcctctctagtggtcgcgcctggtgtgttcgccgacgacgccggcgtcgcgtcagccatgggtgggctcgaggagatcaagaatgaggccgttgatctggagaacataccgatcgaggaggtgtccgagcagctgaaatgtacgcgcgaggggctctcctccgaggaggggaaccggcgtatcgagatgttcggccccaacaagctcgaggagaagaaggagagcaagatactcaagttcttggggttcatgtggaacccgctgtcgtgggtcatggagatggccgccatcatggccatcgcgctggccaacggcggcggcaagccaccggactgagaggactacgtcggtatcattgtcctgctggttatcaactccaccatctgcttc

SEQ ID NO: 409270 - DNA, 385 bp, Oryza sativa
ttttgtgtaaaacctctctagaggagggaaaccggaccatatatttggtagcactttacaactagggctgttcagatcagccatgtttttttgttttttgttcttccaatcattcatcgaaaatttcctttaaccagagcgccgtttgcaattcccgctccagcgctgatgacgatctctcgttgaatgccgagggggttcctcacactgtgtagttctgctggatcgtgtcgatgtccagccccttcagcttcaccaccgattcgacgtggcccttgagagtgttcagctctctcagcctcgcgatctcagctcgtctcttggcttgctcagcgatctcagagagctcgcggtagctgcttttgtcgttgaagagcgtgttgga

SEQ ID NO: 409271 - DNA, 525 bp, Oryza sativa
ttcttgagcagcagcatagcaaagattaagaggagatgcttaatcttcacaccattaggatgtccattccttcgctacacagatcctccccataccgatgtgcgctgctaaagaggaagagatcttgtatccgtgcctgcagctctgaagatgatggatccgatgcttcgtcgtcgcttggcggagacaaacgccagcaggaggtccttgcgaagatcgcaatgcttcaggcgcagaaggtgcgcatcacaagcttcttggacgagcgctctgcttacctgaccaagtttgcgaaggatgcggacaccgagttcgatctgattggccagaacgccatgaaagagcttgatgaagttggggaccagataatggagaggctggacagcaagatgcaggcctttgaggagactgctgaagttaaaggcaggagatagaaatgaacgagagggtgcttgaagacttcgaagattggattgagaaggagaaaaatgaaggtatgttcttcaaaagccttgggaaggtgga

SEQ ID NO: 409272 - DNA, 563 bp, Oryza sativa
ttggttctgctcatactggtccggctttaacccctgctgaagttcttatagccattcatgatattaatcctgaaaaggatagagttgccctgaagaaggtcactgatgcttgcacagcttgctttgaacagcgcacggtatttactcagcaagttttggagaagtcactgaataaattggttgacaatgtaccaattccacttcttttcatgagaacagttattcaagcacttgatgctttcccagctttggttgattttgtcatggaaatactctccaggcttgttaataagcagatatggaaaatgccaaagctgtgggttgggttcttaaaattggcatatcagactcagccacgctcgtttgatgttattttgcagttacctccaccccagcttgaaatagctctgaataagtaccccaatctacgaactcctctttgttcctttgttaatcagcggaacatgcacagcatcttgcccagacagattttgaaagttctgggcttcaatcatgaacccgaccaggcaccaattccatttgtgcctgctgcaatgcaaacg

SEQ ID NO: 409273 - DNA, 511 bp, Oryza sativa
tctcttgtttagggtttccctcagccgccgccgccgcatccacgctcagcagccatggcggtggtcgagcagccgcagcagcaggtggtgaagctcttcaactgctggtccttcgaagacgttcaggtgaacgacatatccctcgccgactacctcgcggtgtcctcgacgaagcacgccacctacctgccgcacacggttggccgctactcggcgaagcgcttccgcaaggcgcagtgccccctcgtggagcgcctcaccaactccctcatgatgcacggccgcaacaacggcaagaagatcatggctgtccgcatcgtcaagcacgccatggagatcatgcacctgctcaccgacgccaaccccatccaggtcatcgtagatgccatcatcaacagcggcccgcgtgaggacgcaacccgtatcggctctgctggcgctgtgaggaggcaggctgtggatatctctcccttgaggagggtcaaccaggcaatctacctgctcaccactg

SEQ ID NO: 409274 - DNA, 471 bp, Oryza sativa
tctgtagaacacacagggtcttatctttgttgttgatagcaatgatcgggaccgtgttgtggaagctagagatgagctccacaggatgctgaatgaggatgagttgcgtgatgctgttttgcttgtgtttgccaacaagcaagatcttccaaatgctatgaatgctgctgagatcactgataagcttggactgcactcccttcgccagcgacactggtacatccagagcacttgtgccacaactggtgagggtctgtacgagggcctggattggctgtccagcaacattgctagcaaggcttgaggcttggaactccgaccgtaaaacttcgagctgactaggagctatgcatgtatctcattcatacgtaggacgaacactgtttcaatcttgttaggtgtctttcgcaaggccaatatttttgtaatgatacctcactccatcgttatcttcttcgtattatttggacc

SEQ ID NO: 409275 - DNA, 555 bp, Oryza sativa
ttagctgcggcaaaaagcttgaaaatacttcaggctgacaataataacttcagcgggagttccatccctactctgtattacaacatgtccggactatttaaactgagtcttcgaaactgcagtttgcagggtgctattcctgatctgagtgccatacctcaactggactatttggatcttagctggaaccagctgacaggatctatcccaactaataagcttgcttcaaatatcactacaattgatttgtcacataacatgcttaatggaactattccatcgaacttttcagggcttccttatcttcagctattgtcacttaaaaataatcttttagatggttctgttccctcggaaatttgggctggcgtcaaccctaacagaaacggaagccttgtactggacttccaaaataattctctcaatatgcttccagctgaaattagtcctccttcaccaaatgttactgtcgtgttatatggaaatcctatatgtgagaattctagtgaaactctgataatcaacctttgccgctgcagtcaataaacctggaaa

SEQ ID NO: 409276 - DNA, 506 bp, Oryza sativa
ttgcttaaatataatgctggattgagcttcagtaatgatgatcttatcgcgtcattgaacctgaacaacaagggagatagtctcactgcatcttattaccacattgtgaaccattcggccacagctgttggagctgagctgacccacagcttctcgagcaacgagaactccctcaccttcggtacccagcacactctcgacccgcttaccgtcgtgaaggcccgcttcaacaattccggcaaggccagcgcgctgctccagcacgagtggaggccaaagtctgtgtggaccatctcagcataagttgacaccaaggccattgacaagagctcaaaggtcggcattgcggtggccctcaagccttgatttttctcagggtgtacttacatttcaaagatgaaattgagatgagttgaaaaacattttggcgcatgcgcatcttttgggtgttgcaagctattaaaattccagaactgccatggttaatttgaggattttttttttct

SEQ ID NO: 409277 - DNA, 340 bp, Oryza sativa
gtttatttctggactctaaagcccggactatgtgttggttggagaccttgggccgaagaacccgaagttaattggggcatcacgcgacatacgcggtccccgtatgataggaacgcgagatagaacattgggcctggactaccctgggatctcggttatcaatgctcctacgacatggcagagcatgctggaacaggagctgatggcatagaacgtgtattccacttggtagaacgcggacccggatgcatactcgtggggtgagctccttgctggtggcagggatccgatgcacttgagggggatcacacctgccaacgtgtttgccacagaggctact

SEQ ID NO: 409278 - DNA, 502 bp, Oryza sativa
ttgcaagccatattctacgcacagacaagagatctgcattttcactgtgctttgcacagaaaaaggatggctgagacgtacaccgtgcaggtgggtgaagcaactccggccgacggcggcaagccgtcggtcgatccattctaccggaggatctactacaaggatggcctcatgaatctccctgaagatatcctgtccgcttgggacttcttcagtggagcaatcaagcaggaccccaagaacatgatgctgggccagcgcatagcttaagatggcatggctggtgactatgtgtggcttaacatatgaagaactgtaccagatggtcatataagattggatcagccatcataagctcacgtgtcacgccgggtggtcactgtggaatatatggatcatactgtccagaatgggttatggctatgcaggcttgcaacagccaaggaatatgctatgttccactgtctgacacccttagtgcaaatgcagttgaatgcataat

SEQ ID NO: 409279 - DNA, 445 bp, Oryza sativa
tttttgagtgggctgccgcagggatgctgcatcggagtgaaggggctgtacaacgccggctgcaccaccggcgaccgccaggcaggactgccgctgcctcaagagcctgggcggcagcattaagtggctgaagctcgggaccgtcggcggcgtccccggaaagtgcagcatcatcgttggctttctcattagactctcgaccgactgcaacaaggtgaggtaaatcaatcctgcttggatcgatcgatcgagcttaacatgctagctcaataggagatgatcagctagtaaataagcacgtgcttgctacagcatatatgaacaaagtaattaaaatgacggggtgggcagacatgcaatgctgcaggtcttctgtgtatcagctgtatactgtatgttgcacgctgcctgtgtgcatgatctatcgtaattttcgtcagcatgt

SEQ ID NO: 409280 - DNA, 433 bp, Oryza sativa
  unsure (1)..(433): unsure at all n locations
tcagaaatggggttactggctttcaagccactggaactgaaggaagccatcctgatcaaacaagtgatcaaatgggaggagccagcggaactatgaatcaatgcatccatccaacacttcctgtggatccaaaattcgacggcaatgccgcagcacagccctttcctcacaactatgcagcctttgcaccaatgatgcaatgccactgcaaccaagatgcctacagatcttttgccaatatgtcatccaccttctccagcatgcttgtctccacattgttgtcaaaccctgcaatccatgcagctgccaggcttgcagcatcgtactggcctacagtagacggcaatactcctgatccaaatcaagaaaatctttctgagagtgctcaaggaagccacgctggctctcnctccaacatggcatctattgtcac

SEQ ID NO: 409281 - DNA, 499 bp, Oryza sativa
  unsure (1)..(499): unsure at all n locations
ggcgtccagaacgtgctggactaccttcaggatgacttccctgacatggatgtcatcagcatatcaggtaacttctgttctgacaaaaagtcagctgctgtaaattggattgagggacgtggaaagtctgtggtttgtgaggcagtaatcaaagaggaagttgtgaaaaaggttctcaagaccaacgttcagtcactagtagaattgaacgtcatcaagaaccttgctggttcagctgttgctggagctttgggtggcttcaatgcccatgctagcaacattgtaacagccatctttattgccaccggtcaggatcctgcacagaatgtggaaagctcccagtgcatcacaatgttggaagctgtaaatgatggcaaagatcttcatatctccgttactatgccatcaattgaggtgggcaccgttggtggaggcacacagctggcctcacagtctgcttgcttggacctactnggcgtgaagggcgcaaacagggaat

SEQ ID NO: 409282 - DNA, 425 bp, Oryza sativa
ttgtggagtgggctgacgcagggatgctgcaacggcgtcaaggggctgaacaacgccgcccgcaccaccgccgaccgccaggcggcctgccgctgcctcaagagcctcgccggcagcatcaagtcgctcaacctcggcaccgtcgccggcgtccccggcaagtgcggcgtcaacgttggcttccccatcagcctatgcaccgactgcaacaaggtcagttaaatcaatcctgcttggatcgatcgatcgagcttaacatgctagctcaatcggagttgatcagctagtaattaagcacgtgcttgctacagcatatatgaacaaagtgattaaaataacagctgcggcagacatgcagcgctccactctgtctctgtatgagctgtatactttatgctgcacgctccctgcgtgcatgttctatc

SEQ ID NO: 409283 - DNA, 507 bp, Oryza sativa
tgttcagtcacaggcaaaccatctacattctacacacatatctcactcatcctgtcatccacccatcaacgtacgtacgtgtgatctgcttaattgggagttagaagaagaggccgaggtaagttgaatttgctgcagagagagagagagagaatcaatggcgcttatcccgtcgctggccgccgcccgctacgcgctgctcgcgttgccgcctctcatggtggccgcgtatgtttataacggcgggggtcggggaaatggagatagaccgcgtgcaagaagcatcaacaaattcaccgatggcggtccagctaccgccggccctgcagcccggaaagacagcagtgccttgtgatcgatcaactgtaagcccttcacacatgtacttcctccatctcataatgtaaatcattttagcattgcgcatatttatatatctagattttttaacatccatatgaatacggacaatgctagaatgacttatattatgaaacggagggagta

SEQ ID NO: 409284 - DNA, 387 bp, Oryza sativa
gtcgttcgcgccgcaggcgcctgctgccaaggctcaggtggttggatggccaccaattcgcagctaccgcaagaacacgatggctactaaccagctgaagagcagcaaggaggatgctgaagcgaagcagggccaggggttcctgtacgtcaaggtcagcatggatggtgccccctacctcaggaaggtggacctcaagacctacaagaactacaaggacctgtcaactgcgcttgagaagatgttcattggcttcacaactggtgagatgtctcgggttaccctgcttgcatttctctttgtaattgcatttccttttgatgtggatgctcttacaattacatcgtctaggatgcctgtgactaggaaccaatatatgcttgatct

SEQ ID NO: 409285 - DNA, 489 bp, Oryza sativa
tctggtacccgtgtgctgtatctcggtggtgcctcaggaacaaccgtgtctcatgtgtctgatattgttggaccgaccggtttggtctatgctgttgagttctcgcacaggagtggtagggatcttgtcaacatggccaaaaagaggaccaatgtaattcccatcattgaagatgctaggcacccggcgaggtaccggatgttggttggcatggttgatgttatcttctctgatgttgcccagccagatcaggctaggatcttagccctcaatgcatcctacttcctgaagaatggtggacattttgtcatttcaatcaaggcgaattgtatcgactccaccatgccagctgaggctgtgtttgctagtgaagttgagaagctgaaggcagatcagttcaagccctctgagcaggtgacgctggagcctttcgagcgtgaccatgcctgcgtcgttggtggttacaggatgcccaagaagcataagggt

SEQ ID NO: 409286 - DNA, 501 bp, Oryza sativa
ttgattttgggtttgctcatttgagtgctggtgaccttctacggagtgaaatttcaactggcagtgagaaaggggagttgatcttaaatataataaaagaagggaagattgttccatcagagattactgttgaactgattagaaaagctatggaatcgagcgatgctaaaagggttcttattgatggtttcccaaggtgtgaggaaaacaggatcgccttcgaaagaataactggaacagaaccagaccttgtgattttctttgactgccctgaggatgagatggttaaacgtttactaggccgtaaccagggacgagtggatgataacattgaaacaatcaagaagcgcctaaaggtgtttgagagtctaaatattcctgttgttgactactacacttcaagaggaaaggttcacaagataaatgcaaccggaactgaagaagaaatctttggagcagtccacaagctgttttcctccttaaggttttgagacttttgtc

SEQ ID NO: 409287 - DNA, 502 bp, Oryza sativa
ttcgagctgagcacgtctagctagctatatctctcaacatcttccgagctactactagtagctagctagctagaggaagcagcagcaatggcgaaatcttgcaccttggtactactacttgtcgcactggtcgggctctcacttcttgtgagccccattgcttgctcccgcaagctcagcaagccgaaacccaagccgaagccgagcatgaagaagccggtggtccgggctcacaacaactacaccggtagcccgtcggtgacggtcaccaccggctgggccgccgccggcgccacgtactacggcgcccccaacggcgacggcagcgacggcggcgcttgcggctaccagaccgccgtcgggcagcggccgttctcgtcgatgatcgccgccgggagcccgtcgctgtacaagggaggcaaggggtgcggcgcgtgctatgaggttaaatgcacgaccaacgcagcttgctccggccagccagccaccgtcgtcatcacct

SEQ ID NO: 409288 - DNA, 373 bp, Oryza sativa
gggggatgaaagcagaggtagattatattaagaagcctggcacgcatgaggagatggagcaggagtacatgatgagatcaccatgatgatagatgatccatccaagctagctagggatccatccaacattgatcgacacacgcacacactgacaacgacgacgacggttttatttaggcgtcagagcaaaaggcaaggcctgcctacatataagctgggtactaatgcaagcaaattaaggcctcgatcaaagctttgatcgacagtagcagcatccatacgataaatccttatgcagccgggcgacgacgacgatagattcagttgcaggagcagcaggagcagccgctgcagctggtgccacacttgcagg

SEQ ID NO: 409289 - DNA, 514 bp, Oryza sativa
ttgctctcacccaccgcgaccgaggaagaagaagagaggagatcaggaggaggggaagaggaagtagggatgggtttcgtgatggagttcgcggagaacctgatcctgcggatgatggaggacccggggaagcgggacgcggcgcatcgggagcacgtgtaccggatgaaggagcggtgcgagcgcaccaaggcggcgtggagcctcccgctccgcccctacggcttctggaccttcgaccgcttcaactcccagctctcctgggatccccagatcagccacgcccccggccgccgcgacccctacgacgacgttctccaccgtcactccaacccacccccctcctccttctgatcccccgattcgatccggaatagatgccgttcgtgaggaagtgtggtcgcaataagaaacccgtttccatccaaatgacgtctttgaaaattttatccttgaactaccgtgctttggtcatatgctttctgtttggtaaaagctcagatccagaaggtct

SEQ ID NO: 409290 - DNA, 513 bp, Oryza sativa
ttcgtttctcttctcctagccgacgcgacgacgacgacgacgtcgtcggtgtcgcctccgcgcgcgcggcgcgctgctcccctgcacgccgccgccgacccacggagaggactccccacccatcccaggtacggcgcctcgccgcgttctcttctccaggttcgctttgcagaactccctaacaagaaccagatccaacccgaccaccgctccaagtcttgagggttcttgcattgggagagggggagatgagcggcccaatgcaacgctcgtcgcagccacagtttatctctagcgtcgagcggaacaatcaatcgaatggtcctggcactcctcttattgacagcatagatgttgatcagattgttattccagagaaaaatagttggaagaacctattttcatacatagggcccggatttcttgtctctattgcgtatattgatcctggaaattttgagacagacctacaggctggagcacagtacaaatatgagcttctttggatcatac

SEQ ID NO: 409291 - DNA, 515 bp, Oryza sativa
tttgctctagcgccactagtctagagctcgtcaccaacgtcgccatctctgaggtggaggtcaaggagaaaggcggcaaggactgggtggggctcaaggagtcgggctctaacacctggacactcaaaagtgatgcaccactcaagggccccttctccgttcgcttccttgtcaagaacggtggctaccgtgtcgtcgatgatgtcatccctgaaagctttactgccggctctgaaaataagagtggcatccaactctaagtaacaggcatgcatactcttgtgttgggtcatattggaattatgaacctctaaataattatgtcttaaaagagatcgctccatgttcgagcgaaccattaattaattttctattaattaattttctgggggtatttttttgtaatgggctaatggcaaaataaggcatacatgtgtactccaaaatattgctgtggagctatatgcaaagcatggttttgaatatatgttatttatataagatatatgggaaaa

SEQ ID NO: 409292 - DNA, 390 bp, Oryza sativa
ttcgtctcgccgcgcccattccaccacctttccgaaccttccactcccttccagactccacccccacgtcacccctatttaaacccctcctcccaccgagcaatcaagcgacaagatcgagaagccacaaaccccagcgcgatccgaggtagaagaagaagaagaagaagaagaagaagaggcgatcgagagatggagagcgccatgttcgggctggagacgccgctgatgacggcgctgcagcacctgctcgacatccccgacggcgagggcggcgccgccgggaagcagggcgcgaccggtggcccgacgcgtgcgtacgtgcgcgacgcccgggccatggcggcgacccccgccgacgtgaaggatcttgccggggcgtacgcgttc

SEQ ID NO: 409293 - DNA, 390 bp, Oryza sativa
ttaaatttgaggtcatagacttccaccagacattggaagttaatggcatacgcttctggtgctatactgctggccatgtacttggcgctgcaatgttcatggtggacattgctggggttcgcgttctttacactggtgactactcccgtgaggaagatcgccacctgaaagctgctgaacttccccagttctcccctgatatttgcattatcgagtcaacttatggcgtgcagcagcaccaaccccgccatgtacgagagaagcgcttcactgatgtaatacacacgaccgtcttgcaaggtggtcgcgttcttatcccagcctttgctcttggaagagctcaagagctgctacttatcctggatgagtattgggccaaccacccagagc

SEQ ID NO: 409294 - DNA, 484 bp, Oryza sativa
ttgttcggggaagcccgatgccacctggtgcggggtagatctccggcgagacggccgttggaagcagccgagccggccccgatccgatgggtggcgaggtgccggagccgcggaggctcaaccgggcgctcagcttctacgactgggtccccgacgaggcgctgcacctcgtgatgggccacgtggaggacccgcgggacagggaggcggctactcgggtgcgccgtcgatggcaccgaatggacgcgctcacgcgcaagcacgtaaccgaggacttctgctacgccgcgcgccccgagcgccttcgggagcggatcccgaggctcgagtcgctctcgctgaagggcaagccgcgcgccgacatgcacggagtcatccccgacgactggggcacctacgccatgccatggatcgactagctcgtcgtgccaatcgagtgccttaaggcgctccaccgtcggcgtatgaccgtcaccgacgccga

SEQ ID NO: 409295 - DNA, 494 bp, Oryza sativa
tcgttcttatcaagtaagtggagatccatgtggacgcttcgctcaaaaatatctcttgatggtggagcagtgtgtggtagtcgcaggcgtggtcaaaataaatattgtcagagattcattaataatgttgaaaaagttctacagaattatcaaggaaagatggtggaagcatttggaattaagtttgaatttgacagcattctagttgataatctgaataagtgggttagttttgctgtgtcagcgaggacaaaacatctatcttttgatttagtgcctattagatttgctcgttgtgacgatcggttcatatttccatttgaacttttagacagtggaagcatttgccgtctacaacatcttcaatttagctttatctctttgcaaccaccttcctggttcggaggttttccaaacctaatgaagcttgagcttaatttggtgcatgttacaagaaaggaaccttgtgaacatgttgtgcaactgttgctgtc

SEQ ID NO: 409296 - DNA, 460 bp, Oryza sativa
ttcccgagctctcctcgccgccgccgccatgtccgggttcgcgcggcgcctcggcgggatcccgtggagggagatcgccggggaagccttctcccgcgtcttcctcgtcgcgcaggccgtctgcgccgtccacgtcgtcaacgcccacgtctgctccttcgcgctggtgatgggcccgagcatgctgccggcgatgaacctggcgggggacgtggtggtggtggacctggtgagcgcgcggctcgggcgggtggcgagcggcgacgccgtgctcctcgtctcgccggagaacccgcgcaaggcggtcgtcaagcgcgtcgtcgggatggagggcgacgccgtcacgttcctcgtcgaccccggcaacagcgacgcctccaagaccgtcgtggtaccaaaaggccatgtctgggtgcagggtgataatatttatgcttctagagattcaagacagtttgga

SEQ ID NO: 409297 - DNA, 388 bp, Oryza sativa
tttcgtcttgatttgggtggttgccattcatgtccatctttcgatccatttctccccccaaattcttctccaatcagctcgattccgtcctcttcgagcagatcagctcccgctgatcgaatcggtgtcgaattttggttgtggttgctgttcttgggttggatcttggcggtgagaaagatcgtgatttttgttgttgggatttgggaggaattgtttgcgctggagggaggagttgagctcgctggccatggtttgccgaggcgagcagagaagaaatctctgagctttatgaagatcgccactcacctgcgccgctcctgcttcctccactccttctcggttgtcttcctctaccgggtttatgtgatcctcataattctggggg

SEQ ID NO: 409298 - DNA, 508 bp, Oryza sativa
  unsure (1)..(508): unsure at all n locations
tttctttcccaacccagtggctgatgaagttttgaaccttttttctaatatccgttgaaaatttgtgtgtttctgtttgagccgtacgagatgaaattctcatatacggttctcggaggggggttcgggttagttacctatctcaataaagtatatgattggtttgaggaacgtcttgagattcaggcaattgcagatgatataactagtaaatatgttcctcctcatgtcaacatattttattgtttagggggaattacacttacttgttttctagtacaagttgctaccggttttgctatgactttttactatcgcccaaccgttacagaggctttttcctcggttcaatacataatgaccgaggccaactttggttggttaatccgatcagttcatcgatggtcagcaagtatgatggttctaatgatgatcctgcacgtatttcgtgtgtatctcacaggtgggtntaaaaaaccccgcgaattaacttgggtcactggtgtgg

SEQ ID NO: 409299 - DNA, 472 bp, Oryza sativa
gttctctcaccattgcttgcaaagctggtcgtgtcactcctcccgttaagcttcccgcggcggcgagagcaagctaagctaggtcgggcatggggaaggacgaggtgatggagagcggcggcgccgccggcgagttcgcggccaaggactacacggacccgccgccggcgccgctgatcgacgcggcggagctggggtcgtggtcgctgtaccgcgccgtcatcgccgagttcatcgccacgctgctgttcctgtacatcaccgtggccacggtgatcgggtacaagcaccagacggacgcgtcggcctccggcgccgacgcggcgtgcggcggcgtgggcgtgctcggcatcgcgtgggcgttcggcggcatgatcttcatcctggtctactgcaccgccggcatctccggcgggcacatcaacccggcggtgacgttcgggctcttcctggcgcgcaaggtgttcctggt

SEQ ID NO: 409300 - DNA, 511 bp, Oryza sativa
tccttttccttggatactgataacagtgggacaataactcttgaggagctaagatctggtttaccaaaacttggcaccaaaatttctgaatcagaaattaaacagctgatggaggcggctgatgttgatggaaatggaaccattgactatgctgagttcatatcagcgacaatgcacatgaacagattggagaaggaagaccacatacttaaagcatttgagtattttgataaggaccacagcggatacataacagtagatgagttggaagaagctctgaagaagtatgatatgggggacgataaaacgattaaggaaatcatcgctgaagtagatactgatcatgatggaagaattaactaccaggagtttgtcgccatgatgaggaacaacaaccctgagattgctcccaaccggcggcgcatgttctaactttctttacaattgttgaaagaatactgtttgtctttcctcattatattgcaagaaccccttaagaggcttgatcatc

SEQ ID NO: 409301 - DNA, 454 bp, Oryza sativa
ttctcctcccccccacggcggcggcggcggcggcggcggcaggatggcggactcgacggcgcggacggtgaaggacgtgaaccctcatgagttcgtcaaggcctactccgcccacctcaagcgctccggcaagatggagctccctgagtggtttgacatcttgaagactgcgaggttcaaggagctccctacttatgatccgtactgttactacacgagggctgcctcaattgcaaggaagatctacctgaggcaggctattggtgcatgtggctttcagacgacctatggtggccgccagaggaatggctcacgtcccccgtacttttgcaagagcagcggttctatctcacgcaacatactttagcagctgcagaagatgggcatcatcgatgtcgaccccaagggctgaagactcatcatctcccagggaaggcgtgatctggaccaagtg

SEQ ID NO: 409302 - DNA, 291 bp, Oryza sativa
ttgcaagaagctcatctcctcctcctctcgcatggcagccatggccaccaccgcgtccagcctcctcaagacctccttcgctggcgcgcgcctccccgccgccgaccgcaaccccaccgtctccgtcgcgccgcgcaccggcggcgccatctgcaactccatctcgtcgtcgtcgtccactcccccctacgacctcaacgccatcaggttcagccccatcaaggagtccatcgtgtcccgcgagatgacccggcggtacatgaccgacatgatcacctacgccgacaccga

SEQ ID NO: 409303 - DNA, 429 bp, Oryza sativa
tatcttcgcagtcgtgaggaaaataaggaatcatccaatatgctaataccagagttcagcgattacttcagtgctgaagagccccagcaccaagattctgttgcaaaagaatcgtcccttgatgacatatgcaacgcattcagcgggatgcacctcagaggagatgcatatcttgatcctactgagtccatgacttgtccggggaatagattgatcattgctaggaggaggagaacaccggaagaggaggaatatttgagaggttttaacccaagggctccaaattttgttcctcttgaactggacccagaatcagaaaaggtggacctcaagcatcagatgatggatgagcgcaagaatgctgaagaatggatgattgactatgcacttcggcgagctgtgaataatttatgccctgctcgaaagaag

SEQ ID NO: 409304 - DNA, 509 bp, Oryza sativa
tcagtctcatgaccaagtgaagctctcgccgtctcgcggtgactccaccatggcgagggcggcgagggggaaggcgccgaggccgaggccgaggccgccgcgcgggctggcggcgagcctccggcggctcctcgccggggccggcggcgggctgggcgtcgcggcggcggcgtacgtcggggtggactacctgcggtacctctccccggcgtggcacgggcggctgatgccggcgctgtgggcggcgctggcgctcgccgccgcggcgcgggcgccgttctaccgccactggtccgccgagctccgcgccgcgctgccctttctcggctccatcgacttcatgcttggggccttcctctgcgaggccgtctccgtccgcttcgtctccgtcgtgatggggctccagtggcacagatctgctgctccactttctgacactgggcaatggctggctttaccattgaacgagaagcttcctcaaagtgtggctggaccactgagagcccatg

SEQ ID NO: 409305 - DNA, 499 bp, Oryza sativa
tcgtcggtttgcgcgccctctgcagggcccagattgtctctgttctggatcttgcacggtgcaccattgtgtccgagctgtccaacaaggactttgactcctatgtcctctctgagtccagcctgtctatctattctgataagatcgtgattaagacctgtgggactacaaagctcctgctcacaattccaaggattcttgagcttgctgaagggctttctatgccacttgctgctgtgaagtactcccgcgggatgttcatcttccccagtgcacagcctgctccccacaggagcttctctgaggaagttgctgacctcaaccgctactttggccatctgaaatctggtggtaatgcttatgtgattggagatccagcaaagcctggccagaagtggcatatctactatgctactcagcacccggagcaacctatggctacccttgaaatgtgcatgaccggaccggacaaggagaaagctatagtctctttcaagac

SEQ ID NO: 409306 - DNA, 398 bp, Oryza sativa
tctttccccgctccccgcgtaccgtctgcgagccagccaaacaccggcaccgccgcgctactcgagcacgggaccgcggcacggggcgactccgcaagcaacaagccgaggagaaccccgagcgctgccgcccgcatcaccgtcggatggccgtcggccgccgccggtggggcgataggcggcaagatccagatccagcggggcgggatcatatacaccgcgcgccgatggggggcgccgtgccagggctgtgccctctggacataaagggccgtgtcctagtctggcgcgactaccgcggagacgactccagcctccaggctgagcgcttcttcaccaagctactggacaaggagggcgactcggaggcgcactcgccgggggtctacgacgatgcc

SEQ ID NO: 409307 - DNA, 501 bp, Oryza sativa
ttcaatcgttcctgaacgccgtccgctcctactcggtcttcgccaatgaccgcaccaacgacgactccaagcgcgagatcgctgccttcttcgcgcatgtcacacacgagactggacatatgtgctacatcaatgagataaatggggcaaacatggactattgtgacaagagcaacaaacagtggccgtgccagccgggcaagaagtactacggacgcgggccgctgcagatctcatggaacttcaactacgggccggcggtaaagaacatctggctcgacgggctaagggacccatacaaggtggcgcaagacccgacaatctctttcaagacggcgctctggttctggatgaacaacgtgcaccaggtgatgccgcaggggtttggcgcccccatccgggccatcaacggtgcgctcgagtgcaacgggaagaaccccggtgccctaacgcaagggttaactactacaaggactactgtccgcagttcggcgttagccc

SEQ ID NO: 409308 - DNA, 459 bp, Oryza sativa
tttcttcgacgccggcgaggaagcggctgatgcgggacttcaagcggctgcagcaggacccgcccgccggaatcagcggcgcgccgcacgacaacaacatcatgctctggaacgccgtcatattcggaccggatgacacgccgtgggatggaggcacgttcaagctgacactacaatttacagaagattatcccaacaaaccaccagttgttcggtttgtctcaaggatgtttcacccaaatatttatgcagatggaagtatctgcttggatatcctacaaaatcaatggagccctatatatgatgttgctgcgatattgacctctatccagtccctgctctgtgatccaaacccaaactcccctgcaaactccgaagcagccagactgttcagcgagaacaagcgcgagtacaaccgcaaaagccgcgagattgtggagcagagctggacggccgact

SEQ ID NO: 409309 - DNA, 511 bp, Oryza sativa
ttatgtagctcatctcctcctcctctcgcatggcagccatggccaccaccgcgtccagcctcctcaagacctccttcgctggcgcgcgcctccccgccgccgcccgcaaccccaccgtctccgtcgcgccgcgcaccggcggcgccatctgcaactccatctcgtcgtcgtcgtccactcccccctacgacctcaacgccatcaggttcagccccatcaaggagtccatcgtgtcccgcgagatgacccggcggtacatgaccgacatgatcacctacgccgacaccgacgtcgtcgtcgtcggcgccggctccgcggggctctcctgcgcgtacgagctctccaaggacccctccgtcagcgtcgccgtcatcgagcagtcggtgtcccccggcggcggcgcgtggctcggcgggcagctgttctccgccatggtggtgcgcaagccggcgcacctgttcctcgacgagctcggcgtcgcgtacgacgagcaggaggactacgtcgtcat

SEQ ID NO: 409310 - DNA, 438 bp, Oryza sativa
ttcgctctggactgtactacactgctaagcgtgacgccgacttttaaacaggcgcactatccattcataggaggagtggctcatggggaccctgacggaactggactgatcagtgagacactcattggtaatgctcttgttgatatgtattcaaactgctcagatcggcgacgaactaataagatattcacgaatatggaacaaaaaaatgtggagtcatggacagcattgatcacaagttataccagggctgggcattacgacaaagaggctgagctacttcacgaaatgggattagaaggtattagaccacatgtgttagcactcaccagagctctcgatgcatttgctggcaacgaatcactgatacatgggaaatctgtccatggatatgccatcagaaatggaattgaggaagttcttccacctgctaatgca

SEQ ID NO: 409311 - DNA, 487 bp, Oryza sativa
tcttctgcactcccactaccatggatccttgcaagttccggccgtcgagctcgttcgacacgaagacgacgacgacgaacgcgggagctccggtgtggaacgacaacgaggcgctgacagtggggcccagggggccgatcctcctcgaggactaccacctgatcgagaaggtggcgcacttcgcccgggagcgcatcccggagcgcgtggtccacgcccgcggcgcctccgccaagggcttcttcgagtgcacccacgacgtcaccgacatcacctgcgccgacttcctccggtccccgggcgcccagacccccgtcatcgtccgcttcttcaccgtcatccacgagcgcggcagcccggagacgatccgcgacccgcgcgggttcgccgtcaagttctacacccgcgagggcaactgggacctcctcggtaacaacttccccgttttttcatccggacggcatcaagtttcccgacgtcatccacg

SEQ ID NO: 409312 - DNA, 462 bp, Oryza sativa
ctccctcccctgcaacagaacatggctcctccaacaccaagattggtagttcctatagatgtgagcaagaagccatgggagcaaaaagtccctctccataaccgctggcatccagatatccctcctgttgcagatgtaactgaaggggaattgttccgtgttgagatggtcgattggactggaggaagagtcagtgatgataactccgcagatgacatcaaattcctggatctcacaattactcattatcttagtgggcccttaagaatagttgatgctgaaggggttccagctgcacctggtgatcttcttgctgtagagatctgcaaccttggtccacttcccggtgacgaatggggatatactgccatatttgaaagggagaatggtggtggattcttaaccgaccacttccctagtgcaagaaaggcgatttggtattctgaaggaatttatgcatac

SEQ ID NO: 409313 - DNA, 476 bp, Oryza sativa
tgtccactcgcctcctctctcgcgcggctttccatttccatctccccctcctgctcctacgtctccgccgctcctcacttcctccactcgatttcctttcttggcctctcctcctctgacacaggggtgtgcaggtttgtgtttgcgcgtggcgcgtccgccatggctcgcggcagcggggccggaggaggcggcggcggtggtggcggggggctggagctgtcggccggggtcggcggcggcggcggcgcgcgtggtgggggaggcggtgaggcggcggcggcggtggagacggcggcgccgatcagcctcgggaggctcatcctctccgggatggtcgccggcggcgtgcagtacgggtgggcgctccagctctccctcctcaccccctacgttcagacactcggactgtcgcatgctcttactttattcatgtggctctgcggccctattgctggcatggaggttcaaccatg

SEQ ID NO: 409314 - DNA, 450 bp, Oryza sativa
gatgatgatggaagctcactttcacttagttcactgcacttttcctgaccattcattacacactaattaccaagcacactgcacacacacacaacacaaaacagttttacagttccatattattctgcatgatctgcttattctcttctaccgaggtggcaacaaagacgtgggccccagctgcagggccacctcaccccttcctaattaacagcccttaattaattaattaccctatgtaaaaaaaaagagggggctcctttgatccattgcaaacgagaactacaaagctcaccacttccggcggcgctgctccggccgccgccgtcgacgtagccggcggcgagagcggggcggtcagtgaccgccgtccatgctgaccgaccggaactggcgcttggagatcttgggccgcaggaatattccggcgacccccccgatgagcgcgaa

SEQ ID NO: 409315 - DNA, 505 bp, Oryza sativa
tttcttaatacgaagataggtacaaactacattccagtgggtgcacacttctcaaacaaagcatgcaagaaggtgtgtgaactatctatgtcgttgccacaaataatgaaagtgacagagctccctaagttgaaagcctggcctaagagttgggagaaggcatcagtacctagtgctgagagtattggcttatttttcttttcacagaatacgaggtcaaataaagaatttgatgacctagtgaagcatgtcattgattatgatattgttctagaaactgatgttagttttgccaagctgctagtcttcccttctgttgtacttccagctgaatatcgggtattccaaggaaaacactatttgtggggagtgttcaaacgcagtaaagatatggctgaaagagatgccttagtggaacagaattgtacgacatgtctggcagatgaagatgttccagaacagaatgccttaatattgtgccatgtaaagccctggatcaagaaat

SEQ ID NO: 409316 - DNA, 464 bp, Oryza sativa
ttttctgaagtcaggttctcagtgcccaggctgccgtttcatatgagagtgcaagagcaaaagttgcagattctgtcaatgccactaatatgagagagattgtttttacacgtaatgctactgatgctatcaatttagttacatatacgcggggcatgctcaacttaaaacaaggtgattagatcgttgttactattgcaaagcatgataagactgttgacgcttgacattttgcttcccataagactggagctactttaaagcatgatgggctaaccaaaaaaggagttgcagacattgagcaattgatatgtcttgtgtcatacaagacgaagattgttgttgttcatcatgtctcaaatgtactcggttcaatgcttcctattgaggatattggaacatggtcaaacagaatcggtgctaaagtccttgtccatgcttgtcaaagtgtttctcatatgcct

SEQ ID NO: 409317 - DNA, 500 bp, Oryza sativa
tccgttcgcttcgccgcaggagtttgcaaagatggtggtgccgttgctgacgaagaagatcgtgaagaagcgggtgaagcagttcaagaggccgcacagcgaccgctacattggcctcaagacaagctggcgcaggccaaagggtattgactctcgtgtcaggagaaagttcaaaggatgcaccttgatgcccaacattggatatggttctgacaagaagacaaggcactaccttcccaacaagttcaagaagtttgtggtgcacaatgtctctgagctggagctgcttatgatgcacaacaggacatactgcgctgagattgctcacaacgtctccacccgcatgcgcaaggagatcgtcgagcgcgctgcgcagctggacatcgtggtcaccaacaagcttgccaggctccgcagccaggaggacgagtgaaattttctgcagtttttcgtgcttatggctgcattgttcgtagggcagtgccttggtaccttaaaat

SEQ ID NO: 409318 - DNA, 509 bp, Oryza sativa
ttcattatgtatcttccactgaagtagaaagctatttcaacctatcttgctatgaaaacccaggcatcactgcttgtcaagaaatgctagagaggaacaaaaactcctggagcgacttaaatatctctaaaagtttccatcttcctccactgaatgatgagaacatacggaagtctatatttggtgatagagactcttcagggaccatccctggtgataccctatctacaacatatttccccagactagacggaactgattacaagtttggttttcagtttgatgattcagaatatatccgccaagaggatgacaggagaaccttggaggctctctatacattcccgactcttctgccatgtgtaaatgaaaatgtcccgctgtcagagatcttacctttgcagaaagatagcacacttgcctcaagagctttgaagtttattcagagcatgagtttgagagatcctcttcaccagttggtatcatccaagaattgccttctaatgtat

SEQ ID NO: 409319 - DNA, 474 bp, Oryza sativa
ccgttcgttccacgtcgccgacggcttctccggcctgcacttcatcaactcgtgggcggacctctgccgcggcgtcccgatcgccgtcatgccgttcatcgaccgcaccctcgttcgtgcccgcgacccgccggcgccgtcgcacccgcacgtcgagtaccagccggcgcccgccatgctggcccccgagccgtcgcaggcgctgaccgccaagccggcgccgccgcccaccgccgtggacatcttcaagctgtcccgctccgacctcggccgcctccggtcccagctgccccgcggcgagggcgcgccgcggtacagcacgtacgcggtgctcgcggcgcacgtgtggcggtgcgcgtcgctggcgcgggggctccccgcggagcagcccaccaagctgtactgcgccacggacggacgccagcggctgcagccgtcgctgcccgacggctacttcggcaacgtgatctttac

SEQ ID NO: 409320 - DNA, 507 bp, Oryza sativa
ttgactttgagaacggccttgttagcctggactcaaggcaaatggaaatcactgacttctttcgtcaacgctaccagtgggatgtgctagcagcaaggtcaatatgggcttttgggcctgaaaagcagggtcctaacattctcttagatgacaccctttcagtcgaggtggataaaaacttgctcaatgcagtcaaagattcaattgttcaagggtttcaatggggtgctagagaaggtccgctgtgtgatgaaccaattagaaatgtgaaattcaagatcttaaatgcaaacatagctcctgaaccgttgcaccgtggtggtggtcagataattccaacagctcgtcgtgtggtttactcagcgttcctaatggctaatccacgccttatggagcctgtatattatattgagatccaaacaccaattgactgtgtctctgccatatattacggtgctatcccgtcgtcgagggcatgtaacagcggatgtaccctaaccaggaact

SEQ ID NO: 409321 - DNA, 423 bp, Oryza sativa
tcgtttactgagtcatggctgccaagctagctcgcgttcactgtctccgcgaacgcctcggtgccaccttctcgtctcatcccaatgagttgattgcactcttctctaggtatgttaaccagggaaagggaatgctccatcgtcaccagctgcttgcggagttcgatgccttgatcgaagctgacaaagagaaatatgctccctttgaagacattctccgggctgctcaggaagccattgtgctgccgccctgggctgcactggccatcaggccaaggcctggcgtctgggactacattcaggtgaatgtaagtgagctggcagtggaagagctgagtgtttctgagtacttggcattcaaggaacagcttgatgatggacacaccaacagcaactttgttcttgagcttgatcttgagccct

SEQ ID NO: 409322 - DNA, 432 bp, Oryza sativa
tttcgtgccgccctttgatttgttttttcggtttttgttttatttttttttccagtcgtttcctttttgtggaaccgcaaaagaggatcatgcccatgttcatttagacatagcaaaaaacattcgccctttcgaaaggccgtctatccttgaggtttggggcgctctacggtttcctggctggcatttttttgggcattccatttctgttcaacaaagagggagggggggcccattccattccttggggaattcgagcacaggggctatgggcttgccctctttgatggcgacgagccccttgggcagctcctcgcacgggaaaccccgttttttcgccggggaggaacttggaggctacctactctggcacaaaccgggggagcgggctctaggggaccttcttgttccggttggggacaagcggggtgc

SEQ ID NO: 409323 - DNA, 330 bp, Oryza sativa
tgtttctttgggtgcactagtatggatcacggggtgtcctgcctacaactagtgatagaaagtgagcgccaccaacaccaggtgactgtggtcgactccatggtcgcccacagcatgacctgtaggcccatgaagggatggttgcctgttagccagaccatgctgaagcggtattaggcgaagaatgaccagacggagcttgagacatgctaccaggatgatcttgccgtcgacaaggaggctctggacctttatgctggtggcgccgacgtcatccacagcgatgaggctgctttgagagaaagtgtcccactgaccaaggtgtaccac

SEQ ID NO: 409324 - DNA, 500 bp, Oryza sativa
tttcttcaaagcatgctggagcatactggctcgatagtccgaattatggagtttttacctgggatgacaagcttccaggagctcaggttcttctgagcaggttgcggcttttcctaagtcctggatatccttacgaagaaatactgagaacatttcacatccaaacagacaatgttatgtgctcgtatctgccgatgtacaattcattcaactttaccaaaggaggaatgatacagctcaaccacggaaggcctcagccacttcagtatgttgtcaatgcggctttccttgcctttttatacagcgattacctggatgctgcagatacacctgggtggtattgtggacctactttttacactacagaagtcctccgcaaatttgcaaggtcacagctcgattatgtcctaggtaagaacccactgaagatgagccacgttgtgggttttgaaacaagtaccccaagcgcgctcatacagaggtgcatcaatccctataat

SEQ ID NO: 409325 - DNA, 457 bp, Oryza sativa
gtcgtttgtagcgggagggagggagagagtacgtgcgggcgtccggaggtctcagcgcacgcccgcggccgggccgtcgcgccgatcgcgatggggtcgtggcggcgcaaggcctacggcgccctcaaggactccaccaaggtcggcctcgccaaggtcaacagcgacttcaaggagttggatattgcaattgtgaaggccaccaaccatgtagaatgccctcccaaggacaggcacgttagaaaaatattcgtggcgacctccattaaccgccctcgagcggacgttcaatactgcatctatgccttgtcaaggagattgtccaagacaaagaattggacagttgcattgaagacattgatagtggtacataggctcttgagagaaggtgatcctacattcaaaagagagttcctggcctactcatacaagggaagcgttttgcagagagcaaact

SEQ ID NO: 409326 - DNA, 499 bp, Oryza sativa
tagctcaaggctggcacggggcccggctcctccaagccatcctccgcatccacctcctccgctctcagcatcgggagggcggggagggcggctggcgcaggggggaggaggttcgggatggtgcggggctcgcggctcccgtcgcagctcacgtccatgtcggcgatctcgccgccgccgccgtgccgcccgtgggaccgcgccgacctcatgcggcgtctcgcgaccttcaaggccatgacctggttcgccaaacccaaggttattagcccagttaactgcgcaaggagaggatggattaatattgagcccgatgttataacgtgtgaggcatgtgaggcacggcttctgttctccactcctttctcatgggcaccgcagcaagttgaaaaggctgctgctgtttttagcttgaagctggacaatggacataaactactgttgccatggattgacaacatatgtgatgaatcacttgccctatttccaccaacaccac

SEQ ID NO: 409327 - DNA, 505 bp, Oryza sativa
ttctctgctcctctccgcatcctcctcatcgcctgcgcttctgcttttttttttcttttttctctcgttgatcggtttgttcgatcagatcggttctttggagagatggagcagtccttcatcatgatcaagcctgacggcgtccatagaggcctgattggagacatcatcagcaggttcgagaagaaaggattctacctgagggggatgaagttcatgaatgtggagaggtcctttgcacagcagcactatgcctacctttccgacaagcccttcttccctgggttggtggagtacatcatctctggccccgtcgttgcgatggtttgggaagggaaggatgttgttgccactggccgcaggatcattggggccaccaggccctgggaggcatcccccggcaccatccgtgctgactatgccgtggaagttggcaggaatgtcatccatgggagcgactccgtggacaacgggaagaaggagatcgctctctggttccctgaag

SEQ ID NO: 409328 - DNA, 468 bp, Oryza sativa
tcgttagagatccccaaaatcagcagcgaaactccctgcagttcgcgagtgccaaaccgcccgggggctgagctgagctgagctgaacctcagcttagccatggggcggttctccaatggcgtcctgggcgccctgagcttcgccgccctcctcgcctccgtgccgctcatcggcgcgggcgcctacctcctcgaccacccggccagcgagtgccagcgccttgtgcgggtgcccgccgtggcgctcggcagcgcggcgctcctcctctccctcatggcgatcgccggagttacctgctgccgcggcgcggcgctcctctgggcctacgcgtccgccatgttcctgctcatcgtcggcatgttctttgtcaccgccttcgtgttcgtcgtcaccaacaggggcgtcgccaccgccgtgttcggaaccggctacggtgactaccgggtcagggactactcggagtggct

SEQ ID NO: 409329 - DNA, 477 bp, Oryza sativa
tcgtccaaggaggataggcgggggcggcaactgggggaaagtgatcagagctcgcgaggacgaaggcgacggtgaagggcaggtacgagggcgacaaggccacgggcgacgacaccctggacttgaccccctacggcggcgacctacgctacaaggccatacgacaccgatgccgtcttcgcccgggggccctccctcgagggcctcatgctcaccctcgagaggccggggtccttcctcctagagctcacgccgcactcctaggatgtgcgcttgcaattgatgaactccgcgctgctgctggaccgccgcgtaaggctcacgtacacgcactcgaccagcctctccccgggccccgccaagctgaccgcccgcaccgccctggacggatgcctgacctttgatccagacaacaaggttagcctctaccacacgctgggatcctccggatgccgagtcaagtactcctacgcacac

SEQ ID NO: 409330 - DNA, 507 bp, Oryza sativa
tcgtcagagaaaggcgtcttcgtactcgcctatgtccgcgcctccgcgcttttcctcctcctctcccctctctcccttctccgccgtcgtcgcagcatcaacccaatccgccgccatgagggagtgcatctcgatccacatcggccaggccggtatccaggtcgggaacgcgtgctgggagctctactgcctcgagcatggcatccaggctgatggtcagatgcccagtgacaggactgttggtggaggtgatgatgctttcaacaccttcttcagtgagactggtgctgggaagcatgttccccgtgctgtatttgttgatcttgagcctactgtgattgatgaggtgaggactggttgctaccgccagctcttccaccctgagcagctcatcaatggcaaggaggatgcagctcacaactttgcccgtggtcactacaccattggcaaggagattggtgatctgtgccttgaccgcatcaggacgcttgctgacaactgcactgg

SEQ ID NO: 409331 - DNA, 506 bp, Oryza sativa
tctgtcatggcctccaggagatgatgcttgtggtacgagctcttctactgcatattatgctaagtctggatttgattttatagagaagagcaaccaaataggcccactgttccacaacatcgcgctgcagcaatacatcctgctttgcgcacaggtgctggatggagggttgagggataagcctgggaagaacagagatcactaccactcgtgctactgcctgagtggtctgtcagttagccagtacagcgccatggttgattctgatgcgtgccccttgccgcagcacgtgcttggtccttactcaaacttgctagagccgatccatccgctctacaatgttgtactagacaaataccatacggcctatgagttcttttcaagctagtgatacaactgtctaggacatgtatgatatgtatgagctctacaatgttgcgccttacaagttacaactgtctaagacatgtatgatatttcattcttttttacactgactgaacggc

SEQ ID NO: 409332 - DNA, 491 bp, Oryza sativa
gctatagacactctatctgggctcttgtttgctagctttgcaccgctatcgtgcaccttgactacaacttttaagttcctcaacgacaatcctgaagtttttgacaagctcaaggaggagcacgaaatgatactgaagaaacgagagggtgcgaattctgggttcacatgggaggaatacaagtccttgaaattcagtactcaggttgtgaatgaaattaatcgaatcactacggttatacctggtggtttcaggaaagcactaacagacgtgcaagtaaacggatatacaattccgtctgggtggctagtcatgattagccccatgggagtgcatctaaacccaaaattgttcgaggatccactcaaatttgatccatggagatggacggaggagaagagaatctcgatgcaaaggaatttcatgccatttggaggaggaatcatgatgtgtcctgcggaaaatttaacaagcttttatcacactttttt

SEQ ID NO: 409333 - DNA, 414 bp, Oryza sativa
ctgatttctagggcggacatgagcgtcgcccatgctggtgcgtcgtcaccagagccactccagggaggacggcttgtcggagttctgcggcactgaggagctcgtcgtcgctgccgttgcggcggaatgccacctccgacgacttcatgaacgcggtctccttcaggacccacgcggttggcacgagcggtggtgcgcggcgggcgccgacagaggcgaagctgaaggtggcgagcaacgggttgggacgcatcgggcgcagctccctgcggcgctggcacgggcgcggcgacaggtcggccctagacgtgatcgccatcaacgacaccggaggcgtgaagccagcgttgtacctgctaaagtacgactccacgctcggcatcttcgacgccgacgtctagcccgtgggcgaca

SEQ ID NO: 409334 - DNA, 462 bp, Oryza sativa
ctccttttcgcacacagtcctaagtatcacacacacactcacgctcacgctccactacaacgcactgtacacagttgattattagctagttgggtttctggcccggccggcggcgagatgggcatggacaagcaccaccgcgactggatcctccggcggtgctgcggctccatcgacgcctgcatgctcacgctcgccgtcctcgtcggcttcatcgagctcgtcatctacctcgcgattcacccctgcaagccttatttctacctccaggacgtccagctccgtaacatcgacctctccgaccctgccatctacctcaacctccaggtgacgatcgcgtcgaggaacccgaacgacagggtgggggtgtactacaagacgctgcacgtgttcacgacgtacagggaggagccgatcacggtgccggtggagctgccggagatctaccaggggcacaaggac

SEQ ID NO: 409335 - DNA, 503 bp, Oryza sativa
tgctcactctctctgaaggcctcttggcctgtattgtggtgaattgggctgagaaagtccctttgaacctgaacaggataatgcctgcgaagggagtgtgcatttctacttttatgtttccagggaactctcaacacaacccctttttggtgggagatcgagctatccaatatgttcctgaacgtgtgagctcagcagctggatatacctgtttcttacaactgaggtaacatggtaataatacttcatttggtaagtggcatgctgacatttctccaacaggagaggatttctgcagataccactttgtaatgtcccataactgatttagtcatacatttattatccgtgtaaatttgcaaagcgtcggccatgtgctatgcaattgattttaaaccatctatctgcacatatctaattaaagtataaaacaatttataaactctacataatggacattttagctgcatgccacttgtcaattgagcacacaatatactgac

SEQ ID NO: 409336 - DNA, 462 bp, Oryza sativa
  unsure (1)..(462): unsure at all n locations
ttttnctcctattcgaggcgtgaagagaggagcggtgcttgcgataggagagagatggcctcaaccaagcagaccggtcgtacgtccacaggacgaagggctcccaggaagcaggtctgcaaccaactgctgctcggacgtgctgctcccaccacctggaggagttaagaagccccaccgttaccgacctggatctgaagcccatagtgagattcgtaagtaccagaatagtactgacctttggatcaggaagctgcccttccagaggcttgttagggaaattgcacaggacttcaagaccgatctgtgtttgcagagccattgctgacttgccctccaagaggctgcggaggcataccttgttggtctcttttaggacaccaacctgtgcgctattcatgcctagcgtgtgaccattatgcctaaagacattcagctggctaggaggtttcgtggtgagag

SEQ ID NO: 409337 - DNA, 359 bp, Oryza sativa
acacgaacagcaacggaacattacattaacacggattagagacaggtgaattacaatgtaattgtatctagccatgcacagtgccaaagaggcagcaccgctagaataagacgcaaacgaatccgactaacaaaatacgagtcaccaaacacactgacaatattctgagtattttgacagatccaccaataagacgaatacagcaccatcatgtcacagagagaaacatattgttccacaaaatacaccctactcagattgttcttataagcaaaagattaaacccactactaacactacgacgcatggtttatttgtcaaaggagtcgccgaggggaatttaagccctttttaccacg

SEQ ID NO: 409338 - DNA, 487 bp, Oryza sativa
ttgttcggatctgtagcaaagagcgaagagcgaagctgcagcctgcagctacgcttgttcgcttgagacctagggtacgagcaacaataatagagagtgactgagtgagcgagcactgagtagcaagggcccggcacaaacaggacgcagccggcaacgtgtacgtcgaaccaaacagagaacagctagctaatcgatcggtcgccatgaccaaggacgacgccgtcccggtggccgtggcgccggcgaagcgcccgcccatcaacaagtacgccttcggctgcgctctcctcgcctccatgaactccgtcctcctcggctatgatatctcggtgatgagcggcgcgcagatattcatgaaggaggatttgaagatcaccgacacgcagatcgagatcctcgccggcgtcatcaacatctactcgctgttcggctcgctggcggcgggcatgacgtccgactggctgtgccggcggtacaccatggt

SEQ ID NO: 409339 - DNA, 407 bp, Oryza sativa
tcgtccaatctcttgaaagaagagagactagcaggagcttcattgctggtgtttgcaaataagcaagatattcaaggcgctctcaaaccttctgaaattgctaaggtactcaatttggaagcgatgtacggaagccggcactggcagatcgtaggctgcagcgcgcacaccggggagggccttcttcaaggtttcgattggctcgtccaagacattgcatctcggatctacgtgctagaatgatgtgaacctcgtttctctgtagtatttatgtgctggaacgattgaacctcatttcttatcaacctcttcgtcttgttctgtaacggtgaactattggcatcatgatttttgagcatgatggttctgttttgtgcaccatgaccatctgaaaagtttcattcctt

SEQ ID NO: 409340 - DNA, 414 bp, Oryza sativa
tcacctcagcagcagcagcagcagcagctgagcttgaagcagcagagcgaggtagacatggccgccgccaccatggccctctcgtccccggcgctggccggcaaggccgccgcgaaggtgttcggcgaggggcgcatcaccatgcgcaagtcggcggcgaagcccaagcccgccgcgtcggggagcccgtggtacggcgccgaccgcgtgctctacctcggcccgctctccggcgagccgccgagctacctgaccggcgagttccccggcgactacgggtgggacaccgcggggctctccgccgacccggagacgttcgccaagaaccgggagctggaggtgatccactccaggtgggcgatgctcggcgcgctgggctgcgtgttcccggagctcctcgcccgcaacggcgtc

SEQ ID NO: 409341 - DNA, 406 bp, Oryza sativa
tagcgcctttgctctgtaccgggatgaccaccggcaccaccggttcactttgcaccaccaccaccgacaccggccagaagaagggcatcatggacaagatcaaggagaagctgcccggccagcactgagctcgacacaccaccacaccatgtgtctgcgccgccggcgacggtcgtcacgtcaccttactgaataataagatgagctagccgagcgcaataaaaggaaaaaaaaatgttactgtcgtgtgatgagtgtgaatgtgtgatggcgttctccagtacggaccgtgtctgcgtgttgtttgtactgagaaagtaccctgtgtatagacgtcgtatgtgtacaattccgctttgatgaatacgtataaatatactactgtgtgtacattatacggtgtctt

SEQ ID NO: 409342 - DNA, 473 bp, Oryza sativa
ttcactcttgagtatcttggtcgagttgttttcaacacagatggaattatgtatcctgacagcgcggttggtaccgattcacacactactatgattgatggtttgggtgttgctggttggggagttggtggaattgaagcagaggccacaatgcttggtcagccaatgagcatggttttgcctggtgttgttgggttcaagttgactgggaagttacagaatggtgtcactgctaccgaccttgttcttactgtcacccaaatgttaaggaagcatggcgttgttggcaaattcgttgaattctatggcgaaggcatgggaaagctttctttggccgacagggccacaatcgcaaacatgttgactgaatatggagccacaatgggtttcttccctgtagaccatgtgacactcgaattatttaaattgactggcctgagtgatgaaactgtggcaatgattgaagcatattt

SEQ ID NO: 409343 - DNA, 233 bp, Oryza sativa
tcgttctccctcgcaaggggtctcccacgcatcgtcgtccgccgctgacgcgtgggacccaccccttccaagatatacgaggccttctacaagaatctcaagcttggcatccattatgactccaccaacaggaccaatattgctgagctcctgaggtataactccaccaagagtaatgatgagatgaccagacacaaagactacacaacccaaaagaaagagggccagattga

SEQ ID NO: 409344 - DNA, 504 bp, Oryza sativa
tcgttcccatctcgtcgtcgtcgcctctagggtttctctccccccctccctcctccacctcccaaaacctcgcccccctcgccatggccaagaccaagcagggcaagcgggacgtcgactcctacaccatctccggcaccaacaaggtcgtccgagtgggggactgcgtgctgatgcggccggtggactcggacaaccagccgtacgtggcgcgggtggagaagatggagctggacgggcgcgggagcgtgcgggtgcgggtgcggtggtactaccggcccgaggagtccaagggcgggaggaggcagttccatggcgccaaggagctcttcctctccgaccacttcgacatgcagagcgccaacaccatcgagggcaagtgcgtcgtccactccttcaagaactacaccaagctcgacaacgtcggccccgaggacttcttctgccgcttcgagtacaaggccgccaccggcgccttcacccccgaccgtgtcgccgtatact

SEQ ID NO: 409345 - DNA, 483 bp, Oryza sativa
tcgtctctagcttgggaagaggaggaggagcttgagcttggagagagacaacaatggcggctcaggctcttctctctgggaggcagctgctggggaggccattgcaatcttcagtctccaggtcttcttcctccaggaaggcacccttcatggtcagggcagaggccactccccctgccaagcaaggtgctgacaggcagctgtggttcgcatccaagcagtccctgagctacctggatggcacgcttccgggagacttcgggttcgacccgctggggctatcggacccggaggggaccggtgggttcatcgagccacggtggctggcctacggcgaggtgttcaacggccggacggcgatgatgggcgtcgtcggcatggtcgccccggagctcctcggcaagctgggcctcgtccccgccgagacggcgatcccgtggttccagaccggcgtgatcccccccgcgggcacctacacctact

SEQ ID NO: 409346 - DNA, 497 bp, Oryza sativa
gctttaagctatttttgcaggcggacctattgcgcgcttgcgaaaatcaactattttcgtaggcgttgaggtgcaggcgtatggcttgtccgcctgcgaaaatatgattctgccgactgggaaaagagtttttctagtcgtgagagctcgtaaaaaatatctagtatccaattagtatacccatttgctcagaagattgcgaatttcactgatcaaattccatgctctgcattaattatctaatatttggtgtaggttccaggagggtggatcctcaatgggcagaagcgatggccggccaacggcagttttgcggatgtgttcgtcgttcttgcctgcaataccagtaataatcagattaacggggcttaagatcagcaagatcgagaacaagacgtcgctgagggttgtccagaactgtgacattctgctggaggacgtgttcgtccctgacgatgaccgtcttcccggcgccaactctttccaagacctagtga

SEQ ID NO: 409347 - DNA, 495 bp, Oryza sativa
tggatgtcaaccagctctggttactgtgggcaacactcgccgtgtcactgctctactacatcagcaaccggagacgccgcgtgggcggccggcgacgatgtccacctggtcccatgccgctcccgctcgtcggcaacctgctcaacctgcgcggccacctcccacccgcgctcgcgaggctagcgcgcacgtacggccccgtgatgatgctaaagatgggcctcaccaccaccgtcgtcatctcctccggcgacgcggcgagggaggccttcacgaagcacgaccggcacctcgccgcgcgcaccgtcctggacgtcactcgttctctcgacttcgccgaccggtccatgatatggctgccgagctccgataccgtctggaagacgctccgcggcgtcacggcggcgagcatcttctcgccgcgtggcctcgccgccctgcgcggcgtccgcgagagcaaggtgcgggacctggtgggctacttccgtgggcgcg

SEQ ID NO: 409348 - DNA, 519 bp, Oryza sativa
tgcatcaataaagttgtctcacgatggcctatgatggagatgaggaacaaagccaggattatctattcaagattgttctacttggtgactcttctgtcggtaaatcaaatttgctggcaagatttgcaaggaacgagttctatccaaactctaaatctactattggagtggagttccagacacaaaagttggtaattgatggcaaggaaatcaaagctcagatatgggacactgctggacaagagcgcttcagagcagtcacatctgcctactatagaggagctgttggagccctacttgtttatgatattagcaggcgtcagacttttgatagtgttggtcgatggctgaatgaactgcacactcattccgatatgaatgtcgtcacaattcttgttggcaacaagaccgatctcaagcatgcgcgtgaggtgagcaccgcagaaggcaaagctctggctgagtcacagggcctcttcttcatggagacctcagccttggactcatcaaatgtcgcgg

SEQ ID NO: 409349 - DNA, 504 bp, Oryza sativa
tgcggccagcgctgatctccatccatctcgcgagcatagcggagccggagcggagcaggggaggggcgccttcgtcctactgcatcctgggagagatcagggcagagaatcagcatgatgatggagactgaactatgctcttcccgggttctgtctctgcctcggtacgatagtggagatgaggagctctcagtgcttcctcggcacacaaaggtcatcgtcactgggaacaaccgaacaaaatctgtcttggtcggtctacaaggtgttgtcaagaaggctgttggtctaggaggttggcactggctggttctaaagaatggtgtagaggtgaagctgcagaggaatgctttgagtgtcttggaacctccaactggtaacgaagacgactatgatattgacggcaacaattcattctgtagcagttccgacatgggagacaaagacatggactattcgatcatagaataccataaaccaaccaagccaagagtttcgcataca

SEQ ID NO: 409350 - DNA, 334 bp, Oryza sativa
tttccttcggagcagatcaaggcgtccatggagaatggcgtgctcaccgtcaccgtgcccaaggaagagcccaagaagcccgacgtcaagtccatccagatctccggctagagccccgtttgtttattctgctgcttctcctcaatgctgcaattgatctcctcctttggtactttgcttgtgtcgtgagggacacagtccaaaatgtgtgtgatatgatcatgtgtttatgaatgtgtggtctccttcaagggtcccaaatgtgtttgtctcctatgcgtttatgtacgggaaataaactttaagcttgattaatgtaccaatgtttgagttt

SEQ ID NO: 409351 - DNA, 491 bp, Oryza sativa
tattgtcacttccatctcattctcctaattgtcatcactagcttctagctagcttaattaattaattagccatggcggaggagaagcaccaccaccacctgttccaccacaagaaggacgacgagccggccaccggagtagactcctacggcgagggcgtctacacgtcggagacggtgaccaccgaggtggtcgccggcggccaggacgagtacgagaggtacaagaaggaggagaagcagcacaagcacaagcagcacctcggcgaggccggcgccctcgccgccggcgccttcgccctgtatgagaagcacgaggcgaagaaggacccggagaacgcgcacaggcacaagatcacggaggagatcgcggccacggcggcggtcggcgccggcggctacgccttccacgagcaccacgagaagaagaaggaccacaagagcgccgaggagtccaccggcgagaagaagcaccacctcttcggctgatcg

SEQ ID NO: 409352 - DNA, 513 bp, Oryza sativa
tgttttgtgcttggaagctaccttgctctgatgaccgttattttcttctgggccatgcacaagacagactttttcacggacaaattcggtgtcagatcaatcaggaacagtgaacatgagatgatgtctgcactgtacctccaagtcagtattgtgagtcaggccctcatcttcgtcacccgttctcgcagctggtccttcatcgaacgccctggtcttctcttggtcactgcattcatgcttgcacaactggttgcgacattcctcgctgtctatgccaactggggctttgccaggatcaagggcattggctggggctgggctggcgttatctggctttacagcattgtgttctacttccctcttgacatcttcaagttcttcatccgctttgtgctgagtggaagggcctgggacaacctccttgagaacaagattgcattcaccaccaagaaggattacggtagggaggagagggaggcacaatgggccaccgcacaagaacacttcacg

SEQ ID NO: 409353 - DNA, 383 bp, Oryza sativa
ttaagaagtactcgagcaaagaaggagagagcttggtgagctgcagagatggccccctccgtgatggcgtcgtcggccaccaccgtcgctcccttccaggggctcaagtccaccgccggcatgcccgtcgcccgccgctccggcaactccagcttcggcaacgtcagcaatggcggcaggatcaggtgcatgcaggtgtggccgattgagggcatcaagaagttcgagaccctctcctacctgccaccgctcaccgtggaggacctcctgaagcagatcgagtacctgctccgttccaagtgggtgccctgcctcgagttcagcaaggtcggattcgtctaccgtgagaaccacagatcccccggatactacgatggcaggta

SEQ ID NO: 409354 - DNA, 516 bp, Oryza sativa
aagccacatcttattgtcacttccatctcattctcctaattgtcatcactagcttctagctagcttaattaattaattagccatggcggaggagaagcaccaccaccacctgttccaccacaagaaggacgacgagccggccaccggagtagactcctacggcgagggcgtctacacgtcggagacggtgaccaccgaggtggtcgccggcggccaggacgagtacgagaggtacaagaaggaggagaagcagcacaagcacaagcagcacctcagcgaggccggcgccctcgccgccggcgccttcgccctgtatgagaagcacgaggcgaagaaggacccggagaacgcgcacaggcacaagatcacggaggagatcgcggccacggcggcggtcggcgccggcggctacgccttccacgagcaccacgagaagaagaaggaccacaagagcgccgaggagtccaccggcgagaagaagcaccacctctttcgctgatcgacctcatcacaaac

SEQ ID NO: 409355 - DNA, 380 bp, Oryza sativa
cggagaaagtccagggtcgataaaaattggttcacttgtccaaagtaccgataaaaatacattgctacatgacacggagagagccatgcccaccacttatttggacacacagagggcaaggctgcatagaaaatcaagcaacacaagctgaactcacggccccacctgtcagccttttactggtcgaggcccgaaacttttgtgaaaaacagcaacaccccgcttgctgaagaagacaaattttttcccacccaaatcggcgacccgggggccggggacctacggggaggtcgtctccccccccggcgacattgagatgagggccatcaccccaaaagggggtgctttttctcgccggtggactcctcggcgctcttggg

SEQ ID NO: 409356 - DNA, 522 bp, Oryza sativa
tttgaatttgctgttacctaagaataatatggctgaggaactatgctggtttctagtgtacatagttcatattgggttaaatggccacagtgcatatacacataagcagataatgtagtcatttatagaagacaatacaagtgacacaccaatgtatatgtattttcatccacaagatcagggttgtggaacctaccagcactaacagattcggcattttaagatttgagtggtatttcctcttgtctcttccatgccctctctcctctgtcccctactcccctttgttgaactggacttgactcgtgaggatggtcatagtcaatggtaaatattggttcaataagttacacctgtgatgttacctggattttttattttgcgctggtcaattttcattctgtttaattgctttgctcatttgaagtgtaagtgtcctttctaacacagacgtgtctggtaactgataaaggttctagatgaagctgatcgaatgctggatatgggttttgaacctgaagt

SEQ ID NO: 409357 - DNA, 528 bp, Oryza sativa
tggcgacgaactcatcacctccactctctgctgcaacacgagtgaatcggaggcggcacgatgcgcaagtgggcgctctcctccgcgctcctcctcctcctcctcctcaccacactccccgatccagctaagaagctccaagtcaatgctgatgacagcactgatgagttagttgatccgccgaaggtagaggagaagattggtggtgttccccatggcctgtccacggactctgaggttgttcagagggaggctgagtcaatctcgaggaagaccctcaggagctcagcggagaaatttgagttccaggctgaggtgtccagactcatggacatcatcatcaactcactctacagcaacaaggacattttcctgagggagctcatctccaatgcttctgatgctttggacaagattaggttcctggctctcactgataaggaggttttgggcgaaggtgacactgctaagcttgaaatccagattaagctgggataggagaagaagattctcttcattcgggatagg

SEQ ID NO: 409358 - DNA, 524 bp, Oryza sativa
tgcggagagaaaggaggagaaaagtagtaaagaggaaaggggggcgagagtctcccgagcaacggctctccactactagcccacagctgccaagaatctctgccatttgttgagctggtcgatccatcggggagggagagaggtcgaggaggcggacgaaggggacaggatggggtctggatctttcctcaagctgctggccaacaacttccacgacctgtccgggccattagtttcacttgcttatccattatatgcctctgagagagcaatagaaaccaaatctcctgttgatgatcagcaatggctcacttactgggtgctgtactcgtttatcactttgtttgagcttactttcgctacaataattgaatggcttgcttcttggtcctatgcaaagttgttcttcaactgctggttggtcttaccttgcttccatggtgctgcttatgtttatgatcactttgtgcggccaatgtttgtgaatcgtcaaatagtaaatgtctggtatgttccaagaaaag

SEQ ID NO: 409359 - DNA, 524 bp, Oryza sativa
  unsure (1)..(524): unsure at all n locations
cgcttcgcgaaccctcgtcgggtcgatcccgccgccgccgccgacgtccccaaatccaatccgcccatcgcaaggaggcagcatcagttttgctgcaatctgacaaagtggagggtctaaaagttgaagcttcttttatgtctgaacaagacttgctttacttgggatcagttggattacttggagaatattctcggacgagaaaaaggcacaagctcccgcttggaaggccctgctgcatgcatccgaagccttgtcaatttatgcaaacttctggctgctcttggagtgcactggtttctgctgatccacttcaaggatcaagactattgtcacttctggctcttggtgcttctgatattatctcggtgaaagaaaattaatccaagatggctctgcaaaacattggtgcttcaaaccgcgatgatgctttctacaggtataagatgcccaggatgatcaccannatagaaggccgtggcaatggcatcaagactaacatcgtgaacatggtggatatagca

SEQ ID NO: 409360 - DNA, 520 bp, Oryza sativa
tcggacgcgtgggggcaaaattgaattcccccatgaaggttacatccttgcctctgtattttttgtagcaaagttacttgagacgctcactgctcggcagtggtacttgggcgtggatgtcatggggatccatgtcaagtctgggctgacggccatggtgtacaggaagggccttaggctgtcgaattcctcgcggcagagccacaccagtggtgagattgtgaattacatggcggttgatgtacagcgtgtgggggactatgcatggtactttcatgacatctggatgcttccactgcagatcatcctcgccctcgccatcctgtacaagaatgttggaatcgccatggtttcaacattggtagctactgtattatcaattgctgcctcagttcctgtggcgaagctgcaggagcactaccaagataagcttatggcctcaaaggatgagcgcatgcgcaagacatcagagtgcctgaagatatgagggatttgaagcttcaaagcgtggaggatcgat

SEQ ID NO: 409361 - DNA, 396 bp, Oryza sativa
tgtttcgatcctgccgatgacgctcaagaacgccgattagctgggcctgcttgagacgctgccctccgacgccgacgccggaggaggggggaaggtggcgctgctgacgcccgcggaggtggacgacaagctgccgtccaaggcgaaccccgcggcggccgacatggaggaccgcatgctccgcctgctcgccttctacaacgtttgtaggtgcgagatggaggagggcgccgacggcaagctcttccgacgttacgccgccgtgccggtgtgcaagtggttgacgcccaacgaggacggcgtttccatggccgacctcgccctcatgaaccaggacaaggtccttatggagagctggtactaccttaaggacgcattcctggcggcggcatcccg

SEQ ID NO: 409362 - DNA, 492 bp, Oryza sativa
cagcacaaatgcacaatatataaacttaatttctttgttattaccatttttttttgaacggcacttcattattactggatgaactatgtcctatagcctagacagaaacatgggactgcctatgttgatatcttccccccatcattcaatcatcatcatctggaaccaccttcttgatcttggcgtggccatcttcatcaggcttaagcctgatatcaccggagtcgtaatagctgactctattgcctgcctccgctacctcaagcacagtcggagtcggaggacgggccagcccctcgcacaccttgggaggatggcccttgtaggccttgcagatgtaagcctcgaagttctcgtaatcctcgtagagcggctgaccgtcgacgaccacccagggaacgtacttgtggggaggctgcaaagcgtcagtctgtcttccatacttgagcgagagctggtggccgcgttcgcccttgtagcagtcggtgacag

SEQ ID NO: 409363 - DNA, 507 bp, Oryza sativa
tttattgtcacttccatctcattctcctaattgtcatcactagcttctagctagcttaattaattaattagccatggcggaggagaagcaccaccaccacctgttccaccacaagaaggacgacgagccggccaccggagtagactcctacggcgagggcgtctacacgtcggagacggtgaccaccgaggtggtcgccggcggccaggacgagtacgagaggtacaagaaggaggagaagcagcacaagcacaagcagcacctcggcgaggccggcgccctcgccgccggcgccttcgccctgtatgagaagcacgaggcgaagaaggacccggagaacgcgcacaggcacaagatcacggaggagatcgcggccacggcggcggtcggcgccggcggctacgccttccacgagcaccacgagaagaagaaggaccacaagagcgccgaggagtccaccggcgagaagaagcaccaccttttcggctgatcgacctcatcacaacg

SEQ ID NO: 409364 - DNA, 381 bp, Oryza sativa
tattttgagagactgctctccttctgcgaagacgggcaatcgataccgcgggggtgaggctccgcacgaggcatttctagaacatgaccatggcgacacttaccgtgccgtggatcgtgacgacacgtgtacgacgactgacgagcagctgcacagggcctaacaagggtgcgctacgaacggaggactaaggataggcatcgagggccacggcgatgcggtgcagggggaggacattcgaccggccgacaccgacacctatgggccggagctgctacttaacatcaccgacgagatctgcagggacttcgataggcccctgaacgtgtggacactgggcgcggcagatcgcgacccgaagcctcggcatgctgtccatga

SEQ ID NO: 409365 - DNA, 523 bp, Oryza sativa
gacttgttacgcctgttggtgttcgagtggtaggagcccttgggcttttccaggttcagatcgacgcctccttcctctggacattgttgctagttggtgatggctgagcaggctaatcaaccgactgtccttcagaagttcggtggccagttccaccttggctccagcttttctgaaggtgtacgggctcgcaacatctgcccatctgtctcatcctatgacaggcgctttaccacaaggagttacatgacccagggccttgtcaatggtggcatcaacgtcccaatgatgtcgtcctctccaatttttgctaatgctccagctgagaaaggcggcaaaaacttcatgattgatttcctcatgggtggagtgtcagccgcagtttcaaagactgctgctgctccgattgagcgtgtgaagctgcttatccagaaccaggatgaaatgatcaaggctggtaggctctcagagccatacaagggtattgaagactgcttacgacgcactatcaaggatgaggggt

SEQ ID NO: 409366 - DNA, 499 bp, Oryza sativa
gacagcaactcaataatctttcgatatttcaccgagggtaatgtatggtaggaaaatcgccagacataacagagccggccagactcaactcaaactcaaccctatgatggtaaactgtttgcgattaacgcctccgcctatgacaatgtttggagataaacgcttccaccaaaaaacgaatgtcggggagtgttctcccctacaagaattattattgttttcaatgttaaaaaggcaaaattcaccagatcccgttagtgcaggaccaggaataaacacttgttcgtcatcattttctgccagtttaggcaccgcccgagccgtacttctttccaaagaagaggatctgcagctggtcatagcctgagagcacaccagcaccagcaatggcacgtaggatgttggcaccagcacccttgaacagtgacttggcaccctcgttcttcaggatctgggagaaagcatccatggagctcttgtacttgacagcctcttcaga

SEQ ID NO: 409367 - DNA, 514 bp, Oryza sativa
gcagaaacaaacccctctcactcccactaccatggatccttgcaagttccggccgtcgagctcgttcgacacgaagacgacgacgacgaacgcgggagctccggtgtggaacgacaacgaggcgctgacagtggggcccagggggccgatcctcctcgaggactaccacctgatcgagaaggtggcgcacttcgcccgggagcgcatcccggagcgcgtggtccacgcccgcggcgcctccgccaagggcttcttcgagtgcacccacgacgtcaccgacatcacctgcgccgacttcctccggtccccgggcgcccagacccccgtcatcgtccgcttctccaccgtcatccacgagcgcggcagcccggagacgatccgcgacccgcgcgggttcgccgtcaagttctacacccgcgagggcaactgggacctcctcggcaacaacttccccgtcttcttcatccgcgacggcatcaagttccccgacgtcatccacgccttcaagcccaac

SEQ ID NO: 409368 - DNA, 489 bp, Oryza sativa
tagaaacaaacccctctcactcccactaccatggatccttgcaagttccggccgtcgagctcgttcgacacgaagacgacgacgacgaacgcgggagctccggtgtggaacgacaacgaggcgctgacagtggggcccagggggccgatcctcctcgaggactaccacctgatcgagaaggtggcgcacttcgcccgggagcgcatcccggagcgcgtggtccacgcccgcggcgcctccgccaagggcttcttcgagtgcacccacgacgtcaccgacatcacctgcgccgacttcctccggtccccgggcgcccagacccccgtcatcgtccgcttctccaccgtcatccacgagcgcggcagcccggagacgatccgcgacccgcgcgggttcgccgtcaagttctacacccgcgagggcaactgggacctcctcggcaacaacttccccgtcttcttcatccgcgaccgcatcaagttcccgacg

SEQ ID NO: 409369 - DNA, 523 bp, Oryza sativa
tgccgccgccgacatggatcagtccatcgctagccagatcttggagaggcacgggctgtcggtggccaaggcggtggaggacaagctggacgagcagatcgccgcgctcgaccgcttcgacctggacgacatctaggcgctccgcgagcgccggatcctgcagatgcgccgcgctcgctagcgcagggccaagtggcgcgccctcggccacggtgagtacggggaggttcccgagacggagatctttgccgccgccaaggccagtgaccgtctcgtctgccacttctaccgcgacaactggccctgtaaggttatggacaagcacttgtcaattctcgcgaaacagcatatagaaacacgttttgtgaaagttcatgctgaaaaggctccctttttgacagagaaactaaggattgttgttctcccaactgttgcattgttaaagaacaccaaagttgaggattatgtggttgggtttgatgagcttggtggtaaagatgatttcagcactgaggatctggag

SEQ ID NO: 409370 - DNA, 527 bp, Oryza sativa
ttagtcgcaccctcactccctcctctctcctctcctcccccccacggcggcggcggcggcggcggcggcaggatggcggattcgacggcgaggacggtgaaggacgtgaaccctcatgagttcgtcaaggcctactccgcccacctcaagcgctccggcaagatggagctccctgagtgggttgacatcgtgaagactgcgaggttcaaggagctccctccttatgatccggactggtactacacgagggctgcctcgattgcaaggaagatctacctgaggcagggtattggtgtaggtggcttccagaagatctatggtggccgccagaggaatggctcacgtcccccgcacttctgcaagagcagcggcgctatctcacgcaacatccttcagcagctgcagaagatgggcatcatcgatgtcgaccccaagggcggaagactcatcacctcccagggaaggcgtgatctggaccaagtggcccgaagagttgatgttaccatcgcctgaacagatccatggat

SEQ ID NO: 409371 - DNA, 526 bp, Oryza sativa
ggaccaccgtagcacgccgcctccccgcccagcgacctcggcaactccggcgaagatgggcgccttcaggttccaccagtaccaggtggtggggaggggcctgccgacgccgaccgacgagcaccccaagatctaccgcatgaagctctgggctaccaacgaggtccgcgccaagtccaagttctggtacttcctccgcaagctgaagaaggtgaagaagagcaacgggcagatccttgccatcaacgagatttttgagaagaacccaacaactatcaagaactatggcatctggctgcgttaccagagtaggactggctaccacaacatgtacaaggagtaccgtgataccaccctcaatggtgccgttgagcagatgtacactgagatggcttcccgccaccgtgtcagattcccttgcattcagatcatcaagactgctactgtccactttaaactctgcaagcgtgacaacactaagcagttccacaagtcagatatcaagttcccactggtgtacaggaag

SEQ ID NO: 409372 - DNA, 525 bp, Oryza sativa
gaaaggcgtcttcgtactcgcctctctccgcgccctcctccgccgccgctcgccgccgttcgtctccgccgccaccgccgccgccatgagggagtgcatctcgatccacatcgggcaggccggtatccaggtcgggaacgcgtgctgggagctctattgcctcgagcatggcatccagcctgatggacagatgcccggtgacaagaccgttgggggaggtgatgatgcttttaacaccttcttcagtgagactggtgctgggaagcatgtcccccgtgctgtcttcgtcgatcttgagcctaccgtgattgatgaggtgaggactggtgactaccgccagctcttccaccctgagcagctcatcagtggcaaggaggatgcagccaacaactttgcccgtggtcactacaccattggcaaggagattgttgatctgtgccttgaccgcatcaggaagcttgccgacaactgcactggtctccagggcttccttgtgttcaacgctgttggaggaggaacgggctc

SEQ ID NO: 409373 - DNA, 412 bp, Oryza sativa
ttggttagggctgcccgtcttcctctacaactactgcacccacgcagatgcacggcatgttgcaggctgcgagctttggcggaacaaacatccgtccgacggggggggaggacaagaagtgccccggagagtcacgcttacctgaacaggcgaaggttgcgactaggaagatctatgacccgctggaggaggacaccttccggacaatcctcgaccactgcgacgggcccatgttaaggctggaggttagcgttgccgaggcactctcccttgttgacatgttcgcagacaaggaggacgcctgcggctactgtttccctgatgctgcttgttgaggaatatcaggggactgccgcagaaggacacaaggcataaagatcatacgtgtatccgttgagagatatacagacat

SEQ ID NO: 409374 - DNA, 523 bp, Oryza sativa
tggccagggctgcccctcttcctctacaactactccacccaccagctccacggcatcttcgaggctgcgagctttggcggaacaaacatcgatccgacggcgtgggaggacaagaagtgccccggcgagtcgcgcttccctgcacaggtgaaggttgcgacgaggaagatctatgacccgctggaggaggacgccttccggccgatcctccaccactacgacggccccaagttcaggctggagctcagcgtcgccgaggcgctctcccttcttgacatctttgcagacaaggatgacgcctgaggctactgcttccctgctgctgcttgctgaagaatatcaggggactgccggtgaaggacacaagtaataaagattcgacgtgtatccgttgtgagatatacatacataaatacataaatacaagtagtaagtaattaacggtgtgtgctgatgaatttggaacgattagtacaatttctgagggggtttcccatctcgcgggctaagagatgatgcgtcc

SEQ ID NO: 409375 - DNA, 516 bp, Oryza sativa
tccaatttcgttcgccattttctccttccattttctcggcgaggaggagggggaagagctaggatgccggcgtggtggaagagggggaaggggaagaaggggaaagggggatcggcggcggcgggggaggaggaggaggggaggaggaaggcggggagcttcgacgaggtgctcctagccggtaagcatactcgttaggagacgttgggggaggtgatgatgcttttaacaccttcttcagtgagactggtgctgggaagcatgtcccccgtgctgtcttcgtcgatcttgagcctaccgtgattgataggtcaggactggagactaccatcagttcttttatcctggacattttattattatgtaatgatgcttttgccattctctccttgagcgctctacatctatttcgactaatctgttgatctgtgccttgaccgcatcaggaagcttgccgacaactgcactggtcttcagggctttcttgtgttcaacgctgtttggagaagaacgggc

SEQ ID NO: 409376 - DNA, 519 bp, Oryza sativa
tatcgacgcgcgagcgctttgcttagattccttcgtcgccggcgaatccgtccccttcgcgccgcccgcaatggcgaatgcagcatctgggatggctgtggacgatgagtgcaagctcaagttcctggagctgaaggcaaagaggacctaccgcttcatcatttacaagatagacgagaagaagaagatggttgtcgtggagaaggttggcgagcccgtactgaactacgacgattttgccgctagcctccctgccaacgaatgcagatacgccatattcgactacgatttcgtgaccgaggagaactgccagaagagcaagatattcttcattgcatggtctcctgatacatcgcgcgtgagaagcaagatgatctacgcgagctccaaggacaggttcaagagggagctcgacggcattcaggtggagctccaggcgaccgatccaactgaggttggcctcgacgtgatcagaggccgtgcaaactgagcattgttttgatgctgctacctataaag

SEQ ID NO: 409377 - DNA, 503 bp, Oryza sativa
tcggacgcgtgggccgagacccgcatcgaggagctcaagcagctcggcctcgagtacaccgtcgtcagcgtcggcaagaagggcaacgcctacttcatccgccgccccttcatccccaccgagcggacgctggaggtgaacggcatccccaccgtgaaggactcccagtccatctgcgacctcgtctactcgctgttcgtgtccgaggcggtggacaaggtggagctcctctactccaagttcgtctccctcgtccgctccgaccccatcatccagacgctgctccccatgtcgcccaagggggagatctgcgacatcaacggcgtgtgcgtggacgccaccgaggacgagctgttccggctcaccaccaaggaagggaagctgaccgtggagcgggagaaggtgaagatcgagacgcagcccttctcacccgtggtgcagttcgagcaggaccccgtccagatcctcgacgcgctcctcccgctctacctcaacagccagat

SEQ ID NO: 409378 - DNA, 526 bp, Oryza sativa
gtttttagcagcagcagtacagtagttggctgggtgctaccactacacgagctcggcaggaaggaaggaaggaaggaaggaatcgcacggcgaacagtcggatctggcggaggaggaggtgctcgcgatggggtccgagggatccgccggggtcgtcgtcgttcccagaaactttagactgcttgaagagcttgagcgaggtgagaagggcattggtgatgggacagtgagctatggaatggatgatgctgatgacatatatatgcgttcctggacaggaactatcattggccctcctaatactgttcatgagggacgaatctatcagttgaagttgttctgtgatacagactatccagacagaccacctactgttcgattccagactcgaatcaatatgtcatgtgtgaatcaagaaactggaatggttgaaccaagtctattccccatgcttggtaactggcaaagagaacataccatgcaagacatcctgatcggcttaaaaaaggagatgtctgctcctcag

SEQ ID NO: 409379 - DNA, 500 bp, Oryza sativa
gatttggggtggtcgcaggttccattcgggggtggagttacttacgcaggcatatgatgctggggaagcactattgaaaatgctatgggactacaaagacgctattctgcgctgttctttcaaggaaaaacctgcgtttacttttgccaactagatgggactaaacatgctagagacatctctcgtggctctccaagatctctcactggacaagatatttgatgaagccggtaggaaggccctatacaacgagatcccgaaattgatggaacagggagagagccacttgcaaaatccccattttattttccccatgtcataacagcagtgcactaaccgctaaacacaaaccaagtacagaggcaagaactcaccgtagacacagagtaatctttcgatttcgattcagtctgttgttgctcagggttacgtgtacctgtctggtggagcgtgcttgtccgggatggcgcgccatgtttctttcgagcaagctgtagcat

SEQ ID NO: 409380 - DNA, 519 bp, Oryza sativa
ttgatgtggcaaccctgagactgaggtcctaatctccaagacccagatgattacactgaagtgtgctgcctgtggttttgtgtcagatgttgacatgagggacaagctcacaacttttatcctgaagaatccacctgaacagaagaagggtgctgggaaagacaagaaggcaatgaggagagctgagaaggagcgtctaaaggaaggtgaggctgctgatgaggagatgaagaagctaaagaaggaagcaaagaagaaaggtgcatccaaggaaagtacctcctctaaaagtggtgctgggaagaagaaggctgctgctggctctgatgaggatcattcaaattcaccaactcgcagccatgatggtgacaatgtggctgcagatgaggatgatgatgatgatgtccagtggcagactgacacttcgttggaggctgcaaaacagcgcatgcaggaacaactgagcgctgcaactgctgagatggtaatgctgtccacttgagaacctgagaagaagaa

SEQ ID NO: 409381 - DNA, 491 bp, Oryza sativa
ttgttatcttatccgcataagctgcagctgagctctgtttctagaattagctccagcactggcggatccaagctttttaggcggaatcgtggggaacgtaatctcaatactggtcttagagtctccaattgcgactctccggaggatcgtgaggagcacgagcacggaggaattcaggtggctgccgtacgtgaccacgctgctgagcacctctctgtggacgttctacggacttcacaagcccggtggtctcctcatcgtcaccgtcaacggctccggcgccgtcctcgaggccatctacgttacgctctacctcggctacgcccccagggagaccaaggcggtgctggccgtgaacgtgtgcgcgctggcagcggaggtggctgaggcgcaggtggcgctgcacggaggtgagcggctgttcgtggtcggcgtgctgagcgcggtgctcaccatcggcatgtacgctgcgccgatggccgtgatgagga

SEQ ID NO: 409382 - DNA, 494 bp, Oryza sativa
ttccatttttcctctcctcgcttctcgccgcagccgccgccgcctcctcctcctctcgccatggccgccgctgctccccccgcgggccccgggctctactccgacatcggcaagaaggctagagatctcctgtatagggattaccacacggaccagaagttcacgctcaccacctacgccgcgaacggagctgcaatcactgttgctggcacgaagaaaaatgagtccatcttctctgaaatccagagccaggtgaagaacaacaatgtgtccgtggatgtgaaagcaacttcagactcaaaattgataactacattcacagttcatgatctgggcactccaggcctgaagggaattctatccattccttttccctaccagaagtctgcaaaggctgaagtccagtacttgcatccacatgctggcctgaatgctattgttggcctgaatgcaaatcctcttgttaggctttctggtgtgtttggaactggggc

SEQ ID NO: 409383 - DNA, 516 bp, Oryza sativa
tatttgactgaagcaatgtacagaatgatgtggggatatttcttccctggtgatgaacagcacccacaaaagcggcaggaacttttcaaagtctccacaacagcagggacacggcgagtaaagaaaagcacatctattgctgaaacgaacagtcccagtaaacaatcatcgaaagactccatgcttttacaaaagcctgaacttcgacgcacatcttcgtttgacaggacgtgggaggaaactgttgctgaatctgtagctaatgaactcgttacacaatttcagagtcagtcaaatgcgccgcctgaatctcaagatgctcctaaggaagccaaattagtacgatctgctcgctctactcgtgaagagaaaaaaaatatggaccctaatgaggtgaaacaaactagacctcagaaaatgatggacttccgcaacataaacataagtcaggttgaattgcagctcacgtacgagggattgccatttgctgttagtgatgtaagactactaatggat

SEQ ID NO: 409384 - DNA, 524 bp, Oryza sativa
tgcctgcctccggggctgttccccgccagcgtcaccgccttctccctcgccgccaacggcagcctcgccgtcgacctcggggggccctgctacgcccactacgagtacctcacctacttcgagccccgcgtcactggggtcctccgctacggctccctcaccggcctctccggggtcaaggtccgccgcttcctcgtctggttcgacgtcgtccgcgtcaaggtcgacctcccgccgcccccgcgctacgtctacctcgacatcggctggatcacccgcaagctccccgccgacgagttcgagtccccccacgagtgcgaggactccaagaaatgccgcctctcgtccgcgctcgccacggtcgccgcgtggttccagaacttctttgcccagttttaggggatggagaagggatttggtcttgtgacagtgttacatgagcttcgggccttcacgagtgtagtgattgccagcatccaactacagaagaataagcagtggttgagatatttctctacagcttt

SEQ ID NO: 409385 - DNA, 521 bp, Oryza sativa
  unsure (1)..(521): unsure at all n locations
ttcaaaatctcaattccagacattggtatcaaaagcagtttctgaaggatggctcgactcttcgtttgtacatgtaggtgccaatggggatgtccaagatgatgaacatgagaagctgaggaggtacaagaaagaggctgtttctatgattcatgagtactttctctctgatgatgtacctgagattattcgcagcctcaaagagcttggttctccagagtacaaccccgtctttattaagaagcttataacaattgctatggaccgcaaaaacagggagaaagagatggcttcaattcttctatcctcattaagcatggaattgttctcaacagaagacattgtcaagggtttcataatgcttcttgaatctgcagaagataccgcacttgatatattggatgcctcagatgagctgggactgttcctagccagagcagtgattgatgatgtgcttgcgcctctgaacttagatgagataagcggcaagcttccaccaaactgtagcggngctgaaacat

SEQ ID NO: 409386 - DNA, 512 bp, Oryza sativa
tctcgcgccgccgccgccgccgagcgcctggagcagcgtcagccatggccgtaggtaagaacaagcgcatctccaaggggaagaagggatccaagaagaagaccgtcgatccctttgctaagaaggactggtatgatatcaaggccccgtcggtgttcaatgtgcggaacatcggcaagaccctcgtgtccaggacacagggtacaaagattgcttctgagggcctaaagcatagagtgtttgaggtctccttagctgatctccagaacgatgaggatcaggcgtacaggaagatcagacttcgtgctgaggatgtgcaagggaagaacgtgctcaccaacttttggggcatgtcgtttactaccgataagctcagatcacttgttaagaagtggcagacactgattgaggctcatgtggatgtcaaaaccacagacggctacatgctgcgtctgttctgtatcggcttcaccaagcggcggcctaaccaggtgaagaggacttgctatgct

SEQ ID NO: 409387 - DNA, 499 bp, Oryza sativa
ttcaagatccccgacaaggagatcctcaagatcgtcaaggagaacttcgatttcaggcccgggatgatgaccatcaacctcgacctcaagaggggcggcgaccggttcatcaagaccgcggcgtacggccatttcggccgcgaggatccggacttcacatgggaggttgtcaagccgctcaagtatgagaaggcatgttgctgaggaagaagataaagatgatgaccatgagaggggggtctgtctctcgatatctacctacattgccggccgttgtcggcgccgccgccgcctacctgatgtgtctttgatcagtagtgactggttgctccatggaagaagaagaagatgggaagatgatgaaagggttgaaatcgacttgcgaagttgctagtgatatcggtgtagcagccagagttttagtgttcagatatcttcggcgttttatccttttttcatttttttgagtcagctgaaactgcaagagagctttgcagtt

SEQ ID NO: 409388 - DNA, 529 bp, Oryza sativa
  unsure (1)..(529): unsure at all n locations
tgtctaatccgattcaaacccgccgtttccaagcttgctctcctctcccccccaatccttccctcccgagtggcagggtgctcgacgggatggcgcagaaggaggccaatggcagcagcaacggggagcacaccacccgcccgccgccgacgccctcgccgctccggttctccaagttcttccaggcgaacctgaggatcctcgtcaccggcggagctggcttcatcggctcgcacctcgtcgacaagctcatggagaacgagaagcacgaggtcattgtcgcagacaactttttcactggttcaaaagacaacctgaagaagtggatcggacacccaagatttgagctaatccgtcatgatgtcacccagcccctgcttgtggaggttgaccaaatctatcaccttgcttgccctgcttcaccaatcttctacaagcacaaccctgtcaagaccatcaagacaaacgttatcggaaccctgaacatgctnggactngccaagagagttggagctaggattttgttgac

SEQ ID NO: 409389 - DNA, 525 bp, Oryza sativa
  unsure (1)..(525): unsure at all n locations
gttgtgacagatatggaaactaagattgcagcaaagaacttcgagattgcaaggctatccgatagggtccagtactatgaagctgcaaacagggagatgtctcaaagaaaccaagaggctatcgagatgtcgaggcaacaacgaaatatccgaaagaagagacagaagtggttctggggctcggttgggcttgcagttacccttggcacaccagccattgcctggtcctacctacctgcagcgcagccccaagccagtcaagactctaataccaacagcgattagagctagatgaagatgtatcttctcgacccttcagaaatcctaacaagctctaactatacaatcctaggggaaagaaaagattgtataagttcttttggtgatcggccgngatcactgcaatcttcattcgccgcttcctctgtaaatgtcgaatgggccatctccctacaggactggctccattccctcacagtaaatccctctntgcatagttggttgtgcagaaataatacgaggaat

SEQ ID NO: 409390 - DNA, 515 bp, Oryza sativa
ggtatcgacaagcgtgtgattgagaggttcgagaaggaagccgctgagatgaacaagaggtccttcaagtacgcgtgggtgcttgataagctcaaggccgagcgtgagagaggtatcaccatcgatatcgccctgtggaagttcgagaccaccaagtactactgcacggtcattgatgcccctggtcaccgtgacttcatcaagaacatgatcacgggtacctcccaggctgactgtgccgtgctcatcattgactccaccactggtggttttgaggctggtatctccaaggatggccagacccgtgagcacgctcttcttgctttcactcttggagtgaagcagatgatctgctgctgcaacaagatggatgccaccactcccaagtactccaaggcccgttacgatgaaatcgtgaaggaagtctcatcctacctgaagaaggttggctacaaccctgacaagattcccttcgttcccatctctgggtttgagggtgacaacatgattgagag

SEQ ID NO: 409391 - DNA, 517 bp, Oryza sativa
gcgggagctccggtgtggaacgacaacgaggcgctgacagtggggcccagggggccgatcctcctcgaggactaccacctgatcgagaaggtggcgcacttcgcccgggagcgcatcccggagcgcgtggtccacgcccgcggcgcctccgccaagggcttcttcgagtgcacccacgacgtcaccgacatcacctgcgccgacttcctccggtccccgggcgcccagacccccgtcatcgtccgcttctccaccgtcatccacgagcgcggcagcccggagacgatccgcgacccgcgcgggttcgccgtcaagttctacacccgcgagggcaactgggacctcctcggcaacaacttccccgtcttcttcatccgcgacggcatcaagttccccgacgtcatccacgccttcaagcccaacccgcgctcccatgtccaggagtactggagggtcttcgacttcttgtcccaccaccccgagagcctccacaccttcttcttcctcttcgacgacg

SEQ ID NO: 409392 - DNA, 456 bp, Oryza sativa
aaatacttaatagtaatagactctttgatggagtattacaacatgcagcagtggcattaatacgccagtacattaattaagttacacatatgcaggctccattttggtttcttttaatttatcgtattacagaatttctgtagccttgcagatgatcacttggatatcatgtactagtaattaacaataggatgcatacaaaagatggcccaacgacaacagaagatgcgtgcatctgacattgtctggccttatttgttggtagtactccaattaattaacaagagatgatgcattcttgtgccttagtttcttcacatgcttggcttcacgttgagcctattcgcaatcttcacccccaacgactcatcacactgggagaggtagttgacccagatggcgcggagctcaggggagaccttggggtgcgcgagctcgccggcgaaacggcggatg

SEQ ID NO: 409393 - DNA, 520 bp, Oryza sativa
gcgattccacccccaccgccacccgcgaccacagactccacgattctctcagagagagagagagagagagagaggggactcagcgagcggtgggcgagagggggagatcgaaaccctagctagggtttgcgcgcggcggcggcggggatgtcgacgccggcgaggaagcggctgatgcgggacttcaagcggctgcagcaggacccccccgcggggatcagcggcgcgccgcacgacaacaacatcatgctctggaacgccgtcatcttcgggccggatgatccgccgtgggacggaggcacgttcaagcttaccttgcagtttacagaagattatcccaacaagccgccgactgttcggtttgtttctaggatgttccacccaaatatttatgcagatggaagcatctgcttggatattctacagaaccagtggagccctatatatgatgttgctgccatattgacttcaattcagtctttgctgtgtgatccaaaccccaactctccagcaaactcag

SEQ ID NO: 409394 - DNA, 519 bp, Oryza sativa
tgatctatccatccatcccatcctcgatccttcattcctgcccggcggcgagcgagagagaggcggaggagatccgagatggcggggagcgggtggaggaggatcccggcggcgaggaggccgcccatgtcgcgcccggcctcggtctgcctctggatcgtgctcgtcgccgccaccctggcgctcgcccaggcgaagaaatcgaaggcggatttgactgaggtcacccacaaggtctacttcgacgtcgagattgatggcaagcccgcaggacgggttgtcatgggacttttcgggaagactgttcctaaaacggcagagaacttccgagcactttgcacaggagagaaaggaactggaaagagtggcaaagcactccacttaagggaagtgcattccacagaattatacccagctttatgatccaaggaggtgacttcacacttggtgatggaaggggtgggtgatctatctatgggacgaagttcgccgatgaaaactttcagatcaagcacaccg

SEQ ID NO: 409395 - DNA, 520 bp, Oryza sativa
ggccaccatggcgctctcctccccggtgatggcccgcgcggcgccgtcgacctcctccgcgctcttcggcgaggcgcggatcaccatgcgcaagaccgccgcgaagcccaagccggcggcgtcgtcggggagcccgtggtacggcgccgaccgcgtcctctacctcggcccgctctccggcgagccgccgagctacctcaccggcgagttcccgggcgactacgggtgggacaccgcggggctctccgccgacccggagacgttcgccaagaaccgggagctggagggtgatccactcccggtgggcgatgctgggcgcgctcggctgcgtcttcccggagctcctcgcccggaacggcgtcaagttcggcgaggccgtgtggttcaaggcgggctcgcagatcttcagcgagggcgggctcgactacctcggcaacccgagcctgatccacgcgcagagcatcctcgccatctgggcggtgcaggtggtgctcatgggcgccgtcgaggggtaccgcat

SEQ ID NO: 409396 - DNA, 510 bp, Oryza sativa
tgtcacgctcggtgtgttcactccactgacatgcttcaagcgagtcgattcactgaaatacacgtcggccttatcggttgctctggccgtcgtgttcgtggtgatcactgccggaatcaccaccatcaagctgatgagagggcagattccgatgcctaaactgttccctgatgttcatgactggagctccacctggagacttttcactgcagctccagttcttgtgaccgcctacatttgccattacaacgtgcacccaattcacaacgagctcaaggaccactcccagatcaggccaatagtgcgggcgtcgctgctgctctgcttggccgtgtacaccaccaccagcttcttcggcttcctcctcttcggcgaggcaacgctggacgacgtgctcgcaaacttcgactccgacctcggcatcccctacagcttggtgctcgacgacgccgtcagggtcagctacgtgctccacctcatgctcgtcttccccattgtgttccacgcgct

SEQ ID NO: 409397 - DNA, 377 bp, Oryza sativa
  unsure (1)..(377): unsure at all n locations
ttatcctctgattagactgaggtcctgatctccaagatccagatgattacactgaagtgtgctgcctgtggttttgtgtcagatgttgacatgagggacaagctcacattttttattctgaagaatccacctgaacagaagaagggtgctgggaaagacaagatctctttgtggagagttgagaaggagcgtctaaaggaaggtgaggctgctgatgaggagatgaagactcttcctacggaagcaattaataaaggttcatccaaggaaagtacctcctctaaaagtggtgctgggaagaagaaggctgctgctggctctgatgaggatcattcaaatttccctnctttcttccctttctttctttcttctttctt

SEQ ID NO: 409398 - DNA, 492 bp, Oryza sativa
ggtgggctgtacgtagatgaatgctcttttgtgcagtcaactgtaacatagctgcgcattcttagcctctaggtgaagcttgcgaagaatggagtcgaggaagttcttgggttgaaccagctgtgatactttgataaggacggactgccgaatcttaagggcgagctcaagggttcaattgagaagggtatcaaatttgcatatgcgtactgaggccatattgcagactagctactcatacctgcacatgaggcttctgttgatttgatttatgcttttttctaccgcttgtgctgggataccgaggatttgagctttacaataataatccggggggctaatgcctaacagaacagaacttgtacgagaggaactatttgtgtcaagctgtgagttgttacattggacacacattgcattatgcaccttttgccttagcacatgacaaggaggtggaggcgcgccgccgctaggccgagaaggagcgcgccc

SEQ ID NO: 409399 - DNA, 531 bp, Oryza sativa
gttgtgtccatgtcggccaaagttgaggaaatggagaaatttgcagtgggtacgaatggtatgctgaatgagatgaggcagagggttgaagacatggtgttggagaccactcgacaaaggcaacgtgcggctgaaaatgagcaggagcttagtcgtgtgaagcatgacttcgagtctctcagaacctatgtcggcactctcgttaatgtcagagaaactcttctttcatcagagaagcagtttgaaacaatggagaaactcttcgacaggctagttgcaagaaccaaccaacttgagagtgagaaagcacaaaaagaagccgaagtccagaaggtggtggaggagaatgtgaggctgcgtgcgatgattgataagaaggaagcgcagcttcaggcgatgagtgagcagtgcaagttcatggcgctgagccgtcccaactagctggatactccctccgtcccaaaaaaaaaggcaaaccctgggttttcgtgtccaactttaacgatggacggtcaaacgttggacacggaa

SEQ ID NO: 409400 - DNA, 524 bp, Oryza sativa
gccgtgaactccggaaccgaacgccacacgcgccttcctcttacttaatccgccatgcttcctcctagggttgccccctcctctctggccgccgccgccgccgccgcgcctacctatctcgccgccgcggtctcgacccctgcttccgtctggctgcctgtgccgcgtggagccggagccgtggcagtgtgcagggccgccgggaaagggaaggaggtgctcagcggcgtggtcttccagccattcgaggagctcaagggggagctctccctcgtcccccaggccaaggaccagtctcttgctaggcaaaagttcgtcgacgagtgcgaggccgccatcaacgagcagatcaatgtggagttcaatgcatcgtacgcgtaccactcccttttcgcctactttgaccgtgacaacgttgctctcaagggattcgccaaattcttcaaagaatccagcgatgaggagagggatcacgcagagaaactcatgaagtaccagaacatgcgtggaggcagggtgcggct

SEQ ID NO: 409401 - DNA, 456 bp, Oryza sativa
tggacgcgtgggttgatctcaaggtttatacgaagtcagatatgggagtgcttggagccacatccatcgacttctctggtcactcatgccgctactttgggtaccttgtctcacgcaagaagtatgtcatctcaattgatgacaattgcctcccagcgaaggacactggtgggttgactgttgatgcagttgcacagcatatgtccaatctgaagacacctgctacacctttctttttcaacacattgtatgatccattccgcaaaggggctgactttgtccgtggatacccatttagtctgcgcgagggggttgagtgcatgctctcttgtgggctgtggcttcacaatgcagactatgacccaatgactcatgttgtgaagagaaatcaacgcagcacaacgtatgtggatgctgtgatgacagctccacttggtgcgatgatgcctgtgagcg

SEQ ID NO: 409402 - DNA, 530 bp, Oryza sativa
  unsure (1)..(530): unsure at all n locations
tttaaagcctcccatcaacttcttgcacacaccctccctttggctttcatctgcatctattcagttgcagattgagagccaaagacattatcttgattctatcaggagggttgtgctagcgaattcttgttagcaacaaattgacatattgctcggcacatccccaccgagaataccaagatgacgttctctggtacacaggacaagtgcaatgcttgtgacaagaccgtgcatttcattgatctccttaccgcggacagtattccctaccacaagtcttgcttcagatgcagccactgcaaaggcacactttcgatgtgcagctattcgtccatggatggggttctttactgcaagacccattttgagcagctattcaaggaaacaggcaccttcaagaagaacttccnctcaggtacaaaggcaaacagtgaacaggctaagattcccagcaagctgtcctctgtgttctgtggaacccaggacaagtgtactgcctgcaagaagactgtgtatccattggagaagat

SEQ ID NO: 409403 - DNA, 503 bp, Oryza sativa
  unsure (1)..(503): unsure at all n locations
caacttggaagcaattcaaattcttaagaaaactggagggtctctaaaggactcctttttggatgaagggttcattctagacaagaaaatcggtcttggccaaccgaagaggattgaaaacgccaagattttggttgcaaatactgctatggacaccgacaaagttaagatatatggagcacgtgtacgggttgattcaatggctaaggttgctgaaattgaagctgctgaaaagcaaaaaatgagagaaaaagtgcaaaagatcataggtcatggaatcaactgtttcgttaacaggcagttgatctacaacttccctgaggaactctttgcagatgctggcatactggcaatcgagcatgctgattttgagggcattgagcggcttgctcttgtcactggtggtgacatcgcctccacttttgataacccggagtctgtcaaacttggtcattgcaaggtcattgaagagattatgattggngaggacaggctgattcatt

SEQ ID NO: 409404 - DNA, 520 bp, Oryza sativa
gtaccttgcaccatgacgttatatgtttccattactacatccagtaccatctatatatgcaattatcagaggcagctgcctatgcaaggaagaaaaaggttattctgaaaggagatttacctattggtgttgataggaatagtgtggatacttgggtataccccactttatttcgcatgaatacagctactggtgcacctccagattatttcgacaaaaatggacaaaattggggttttcctacatataactgggaggaaatgtcaaaggataatctatgggtggtggcgagctcgtctgacacagatggcaaaatacttcactgcatataggatagaccatatcttgggtttctttaggatatgggagcttccagatcatgcagccacaggtctagttgggaaatttaggccttcaattgctctcagtcaggaggagcttcttagtgaaggcctatgggatttcgatagaatgagccgcccttatattcttcaggaaacactggaggagaagttgggtc

SEQ ID NO: 409405 - DNA, 293 bp, Oryza sativa
tttgctgcttccggaggatcagagatgggggcggagaacggcagctgcggctgcaacacctgcaagtgcggcaccagctgcggctgctcctgctgcaactgcaactagaagaaacttatctccatccaattcatcacctgatcaacgagctaccagtaccactacatatgccatgtactagctacctagcttgcatgcaagtccttaatttgctgctagctagctagctagctaccttagcgtctcatgtatgtcatgttgccgcctggcccctaaataaaattccttacata

SEQ ID NO: 409406 - DNA, 435 bp, Oryza sativa
tttttcttctcctccccctctttaccttttcctcctcggttcggttccgtggttcgtctagggtttagtgggttgagatggcggcgccggatgtcgagtaccgctgcttcgtcggcggcctcgcctgggccaccgacgaccgctccctcgaggccgccttctccacctacggcgagatcctcgactccaagatcatcaacgacagggagacggggaggtcacgtgggtttggcttcgtcaccttctcctccgagcagtcgatgcgcgacgccatcgagggcatgaacggcaaggagctcgacggccgcaacatcaccgtcaatgaggcccagtcccgccgctccggcggcggaggcgggggctacggcggcggcggttgcggctacggcggcggtcgtggaggcggtggctacagaggaggtggcggcggcggtt

SEQ ID NO: 409407 - DNA, 401 bp, Oryza sativa
ataaaaatcaaatatcttagatggtggtattacattgcaaaccaaaagaatacaatggatttatcaaacagcaagattacatcaatgaagaaacacataggagcaaataatttagccaggaaacacctcttgaactagtagtgataatcatttgccttcttgaagatctcagcctgggaagaagcaacgccatcagaggtcatggccacgacgatgcaatccttaacctgttgggtggtaaaagggaatttcttgttcacaatggagttgaggtatgcagctggttccttgcggggcaaagcaccagtaccatcagttccagtgtttgaaagtgcatcatgaagattttttagctttttgccagtgatcaaactgcagcagtcccgagtgttttgccaatg

SEQ ID NO: 409408 - DNA, 521 bp, Oryza sativa
ttttgggtgagatcggagcagcgaagcggaggcagccgcagccatggcgttggccgctcgcctcgtctcccgctcccggcagctatactctgctcaagctgccttggcaaatggaggtgccactcaagtccgcttgtatgccaaggaggcagatcgtactcccgtcaatggtgatgacctattgaagggcatattttttgaggtaaagaagaaatttgagactgcccttggtgtacttaagaaggaaaagatcactattgatccagatgatcctgcagcagtttctcgttatgcccaagtcatgaagactgtaagacaaaaggcagatcttctatccgactctgagaggattaaatataccatcgacacctttacaaagggcatccctgatgcacggacttacttgaatactcttcaggagatcaggataaagagtggccttatagatgatatgggtgctgaggctatgatgatggaagccctcgagaaagttgagaaggagattaagaagccacttctga

SEQ ID NO: 409409 - DNA, 457 bp, Oryza sativa
cagcaggcgaaggcgccggcttggagaggctggtggcttcgtggtctctctcttctctctccccctagcagcagcgcagaggcggaggaggggggagatggccgagaagggtgacaatctggaggccgtgctcaacgagtccgtcgatctcgagaacataccgttggaggaggtgttcgagcacctgcgatgcaaccgcgagggcctcacctccgccaatgccgagcagcgcctcaacctcttcggccccaacaggctcgaggagaagaaggagagcaagttcttgaagttcttggggttcatgtggaacccactgtcctgggtcatggaggccgccgcaatcatggccatcgctctcgccaatggaggagggaagccgccggactggcaggatttcgtgggcatcattacactgctcatcatcaactccacaatcagtttcattgaggagaacaat

SEQ ID NO: 409410 - DNA, 525 bp, Oryza sativa
tgccgatcagccggtgaagagcttcgatgatcgccgcagggcgcaggtgttcctccgggacgagataccggactcggtcaccattggctgctatgtcctcctgtcgatcatctccatcgccgccatccctcacctctacccacagatgaggtacagccatgttgcgctcatctacctcgccgcgcccgtcttcgccttctgcaacgcctacggcttcggcgtcaccgacatgaacctggctagcacctattgcaagatcgccatgttcgcgttcggctcgtgggtcggcatcaagagccggcgcgtggtcgccgccctggtcgccggcgggatcaccatgtcgatcctgggcaacgcggccgacgtcgcgcaggacctcaagacgggctacctgacgctgacgtcgccgcgcgccgtgttcatcagcgaggcgatcggcacggcgctgggatgcgtcgtcaaccccaccgtgttctgggtgttctacagggtgtacaagatgggcagcggcgacatgggcgacat

SEQ ID NO: 409411 - DNA, 353 bp, Oryza sativa
tggacgcgtgggcaccgacctcccctccccttgcagatctgatcggcgacggcgatcgccggaccaccaccgcccgccgccatggcgctcaccctccgcaagaagcagctcgattcgatcgtgaggatgctgcatctgaaccagcagctgcagggctcgccggacggggtcggcggaggggtggggtcggcggaggaggaggaggcgtacaagatcctggtgatggactccccctgcgtcgcgctcctcgcgccggtgctccgcgtcggggagctccggaggcacggcgtcacgctccacctcaacatcgacaaggcgaggcagcaggtccccgacgcccccgccgtctacct

SEQ ID NO: 409412 - DNA, 523 bp, Oryza sativa
  unsure (1)..(523): unsure at all n locations
accacgcccaaccaacgccaccaccaaccccactacgcacgcactcacccaccccacctgtcgccccgccgcgcccgacttcgccgtcgacgtcgacccgctgctgcctccgccgtccaacggcgacaccggcgcggaggcgtcgatggttgtggcgttgggcgtggtgacgtagacgtcgagctcgaacacgccggtgctggcgctcatgctggccgtcttccacaccacgtagccggtggccatcctgaacttgcccgtgccgcccaccacggacagctccctcaccgtggccgtggtgtcgtcgtggccgatcaccgcgatggtgctgccgttgttctcgccggcggtgaagtagaggttcacgcacatcatcagcgtcgggctcgacagcgacgacatcatgtagaacccctgcgcgcgccccacctncggggacgtcgccgacgaggtctccgtgagcgcgtcgtcgacgacggtggtgtctncgagccggtgcttgacgccaccgtggccgacgtcg

SEQ ID NO: 409413 - DNA, 500 bp, Oryza sativa
gttgagccatacaacagcgtcctctccacccactccctccttgagcacaccgatgtcgctgtcctgctcgacaatgaggccatctatgacatctgccgccgctccctcgacattgagcgcccaacctacaccaacctgaacaggcttgtgtgccagggcatctcctcactgactgcctgcctgaggttcgatggtgctctgaatgtggatgtcaacgagttccagaccaacctggtgccctacccgaggatccacttcatgctttcctcctacgccccggcgatctcggccgagaaggcctaccacgagcagctctccgtggcggagatcaccaacagcgccttcgagccgtgctgcatgatggacaagtgcgacccgcgccacggcaagtacatggcgagctgcctgacgtaccgcggcgacgtggtccccaggacgtgaacccgcggtggccaccatcaagacgaagcgcaccatccagttcgtggactggtgcccca

SEQ ID NO: 409414 - DNA, 482 bp, Oryza sativa
tccctgttcaagctgtcgtcggcgttcgggttctggtgggtggtgcgcgtctacggcgtgccgctgctgatcgtgaacgcgtggctggtgctcatcacctacctgcagcacacccacccggcgctgccgcactacgactcgagcgagtgggactggctccgcggcgcgctggccaccgtggaccgcgactacggcatcctcaacaaggtgttccacaacatcacggacacgcacgtcgcgcaccacctcttctccaccatgccggactaccacgccatggaggccactaaggcgatccgccccatcctcggcgagtactaccagttcgacccgacgcccgtcgccaaggcgacatggcgcgaggccaaggagtgcatctacgtcgagcctgaggacaacaagggcgtcttctggtacaacaacaagttctaactggtgctgctgtgaaatcagcatcacacatccatagccaagcagcaaac

SEQ ID NO: 409415 - DNA, 487 bp, Oryza sativa
tcttgagcttggagagagacaacaatggcggctcaggctcttctctctgggaggcagctgctggggaggccattgcaatcttcagtctccaggtcttcttcctccaggaaggcacccttcatggtcagggcagaggccactccccctgccaagcaaggtgctgacaggcagctgtggttcgcatccaagcagtccctgagctacctggatggcacgcttccgggagacttcgggttcgacccgctggggctatcggacccggaggggaccggtgggttcatcgagccacggtggctggcctactgcgaggtgttcaacggccggacggcgatgatgggcgtcgtcggcatggtcgccccggagctcctcggcaagctgggcctcgtccccgccgagacggcgatcccgtggttccagatcggcgtgatcccccccgcgggcacctacacctactgggccgacccttacactttcttcgtcttcgagc

SEQ ID NO: 409416 - DNA, 465 bp, Oryza sativa
tcgttaccaccgggtgccagaagaagctcgagatcgatgacgaccagaagctccgggcattttatgacaagaggatctcccaggaagtcagtggtgatgctcttggcgaagaattcaagggctatgtattcaagatcatgggaggctgtgacaagcaaggtttccccatgaagcagggtgtgcttacttctggacgtgtccgccttctcctccacaggggtaccccctgcttccgtggatatggcaggcgtgatggtgagcgcagaaggaagtcagtccgtggttgcattgtcagccaagatctctctgttatcaacttggtgattgcaaagaagggtgataatgaccttcctggcttgactgacactgagaagcccaggatgaggggacccaagagggcatctaagatcaggaagctgtttaaccttgccaaggatgatgatgtccgcaggtatgtaacactta

SEQ ID NO: 409417 - DNA, 306 bp, Oryza sativa
tcgtcaatccgccattgctactagtaggagtagagctctctggacgttggaatacttattgacaaacggctacggttgattaaataatcgtagcagcagaagaagcagctgtttgtagacaaggtgtttgtggaaatgtcgtcgtcgtcgctgtcgccggcggggtcgtcggacggggcactcggcgggggtggtggtggcggcggaccaccggagggagaagcggcggctgtcgaacagggagacggccaggcggtcgcggctgccgaagcagcaccacctgtacgagctggtgcacgaggtggc

SEQ ID NO: 409418 - DNA, 493 bp, Oryza sativa
  unsure (1)..(493): unsure at all n locations
gtgtcagacgacacatagaaggttttcatggagaaagtactggtgctctccttgatatgtatttcactctgccaaggatgggtggtgcaatctttagaatatgatcatacagcaagtattgagtgccttcgcgatccgatgaagccgctgtacaacggcggcatcatccagaacggcgagttcaacagcggcctcatgggctggtccacgcaccgcgacatcaaggccggcctgagcagctcgccgtccggcaacaagttcgccgtggtgcagcgcgccgactccctctccggcgccgccgtgccgtcgcgcagcgtctaccagaagatccagctgcagggcgacacccactnactcgctgtcgcgtggttgcagttgtcggccggcgccgcgcacgtgaaggcgttcgtcaagacgcccaacggcgagcgcgtcgtcgccggcagcgtctccgcccagtccggctgctggagcatgctcaagggcggcatga

SEQ ID NO: 409419 - DNA, 469 bp, Oryza sativa
  unsure (1)..(469): unsure at all n locations
ggtggtgacaccgctcgcctccgtccgcctcgcctccaccgagaggttctctctgccgccgattcagatttacagggagattatcttgtgatctgtaaacatgtttgggcgtgtaccgaggagtaacaacaccaagtactatgaggttcttggagttcctaaaactgcaagcaaggatgagctaaagaaggcataccggaaggctgccataaaaaaccatcctgacaagggaggggatccagaaaagtttaaagaattatcacaagcgtatgaggttctcactgatcctgagaagagagacatatatgaccaatatggggcaggatgctcttaaggatggaatgggaggaggcagtgacttccataatccatttgacatanttgagcagtttttcgggggtggtgccttgggnggaggtagctcaagagtacgcaaacagagacgggtgaagatgtggcgcatactttg

SEQ ID NO: 409420 - DNA, 378 bp, Oryza sativa
  unsure (1)..(378): unsure at all n locations
ttgcttgctcgctcgctgcgtcgctgcactttctccacagatttttctgctgctgttgcttcgtcgcctcgcccgcggattccgtactactaccggagggtttggttggttgatttggtttggtttagccatggccggtagagggaaggtgatcggctcgggcgccgccaagaaggccatgtcgcggagctccaaggccgggctccagttcctcgtgggcaggatcgcccggtctcttgaaggccggcaagtacgccgagagggtcgtngccggcgccccggtctacctcgccgccgacctcgagcaccttgtcgctgaggctcttgagcttgccgggaacgcggtgagggacaacaagaagaccccgatagtgcccc

SEQ ID NO: 409421 - DNA, 509 bp, Oryza sativa
tcgttcgccgctctccggcctccgcccgcgcgctcccgctcccgctcccgcggcgcgcagtcgcctgtgcggccagtcgccgccggtcgtggccccgcggctcggggcgttcccgcggcggcgtggtggggcggcacggtgctcgccgcgcgccgaggccggggacgtggaggcgcttagggcgggggtgtcggtgtacaagccgtggtcctacgacgtgctcgtctccgacgccgcccgctccctcgcctgcgccatggacgagggcaagacccgcctcgagatcgagttcccgcctctgccgagcaacatctcttcttacaagggttcctcggacgagttcatcgacgccaacatccagcttgctcttgctgttgccagaaaacttaaggaactcaaggggactagatcttgtattgtgtttcctgacctaccagaaaagcgcagggcatcccagttgttcgggactgctctagactcgattgagactgcaactatcagttccctgg

SEQ ID NO: 409422 - DNA, 405 bp, Oryza sativa
ttctgaaccacatgataggcgctgcgattgttatgctccggtttctgaaggaaggcgctacacgaactaactcatgctgtggagagtgattgcatctacacaccggtggacactgcatgcgacactggctgccatggatcattgctagaggttgagattcgaaggaatgatgcacggcgcagttgagctggtggcatcagattgccctcactggaatagatcagagggggctgatcatctatatgttacaccagatgacttgggcgctgggttgcactagcacgaagaagaggcactgggccgtggcatgctgccatagcttcacagtgctatgctggttgagacctctggacagagaaaccatgtctgatagaaggacggatagatcaccattgcgtcttatgc

SEQ ID NO: 409423 - DNA, 504 bp, Oryza sativa
ttctcctcctctaatctcaagtctctgtctcgtcgtcctcgcatctccactcgccatgggcaagattaagatcggaatcaacggtttcggaaggatcgggaggctcgtggccagggtggccctccagagcgaggatgtcgagctcgtcgccgtcaacgaccccttcatcaccaccgactacatgacctacatgttcaagtacgataccgtgcacggccaatggaagcacagcgacatcaagatcaaggactccaagactctgctcttgggcgagaagccggtcaccgttttcggcatcaggaaccctgacgagattccgtgggctgaggctggtgctgagtatgtcgtggagtccaccggtgtcttcactgacaaggagaaggctgctgctcacttgaagggtggtgccaagaaggttgtcatctctgccccgagcaaagatgctccgatgtttgtctgcggtgtcaacgaggacaagtacacttcagatattgatattgtctc

SEQ ID NO: 409424 - DNA, 449 bp, Oryza sativa
tcgtttatctttctttctcttcccatcccactcccttccccacacgctctccttccttccttccttcttcgcttcttccgacgccacttcacctctccttcctccctccctcgccgccgcgggctgcttcctccctccctcccgccgcgtcccgccattcccggctgattactcgagccgccgcggggcagatccgtgccgggataggcctctcgctcgcgcttcggtcccccgtctcttaccggcggataaaccctaaccggagaggaggaggagggggaggctcatccgggggaagaagccgcacaaggagctcaagctctgcgtgcctgcgcaggagacgcccgtggacaagttcctgaccgcgagtggcacattcaaggatggcgaactgcggcttaatcaaagaggtgtgcagggtatattccaggaaactgcagatgaacctc

SEQ ID NO: 409425 - DNA, 407 bp, Oryza sativa
tattagctagcgagggatcgatcgagagcttctccttccgggcttccggccagccggcggggaatagctagaatcagaatggcggcggaggcggatgcacggaaggtgtgcgggttgccggagcgggtgcagctccatggggcgatgctggcgctgcagttcggctacgcggggttccatgtggtgtctcggtttgccctcaacatgggcatcagcaagctcgtcttccccgtctaccgcaacatcatcgccctcatcctcctcgtccccttcgcctatttcctcgagaagaaggatcggccgcagctgacgctgagcttcgtggtgcagttcttcctgctggcgctgtgcggcatcaccgccaaccagggcttctacctactgggactcgacaacacctgcccgac

SEQ ID NO: 409426 - DNA, 446 bp, Oryza sativa
tacattgtgagtggagactcgttaattgaatgtgctactattgctaatgggtgttcgaaggttggtgcagttggaataaattgcacacctccaagatttatccatggcctgatactctccattcgaaaggtcacagataagccaattctgatatatcccaacagcggagaaagatatgatgctgagaaaaaggagtgggtggaatcaactggcgtgtcagacggtgattttgtttcctacgtaaacgaatggtgcaaagatggggctgtcctcattggcggctgctgcaggacaactccaaacaccatcaaggccataagtagatcacttaaccaacgccactcttcgctgcatttacctgtggcatagagttgcacgctccttcaggtgtgctactcatgctggtacctgaacctgatgaacattatctggaggtccttactagc

SEQ ID NO: 409427 - DNA, 478 bp, Oryza sativa
cacttcgctagctccggccaccaactttgacccgtcctcctcctccgcatcccccatcccctcctccccggcggcggcggcggcgcggaggcggcggcacgggagcggctagtggtttcgtcggcggaggcggcggcggggccaagatgttcgggcgcgcgccgaagaagagcgacaacaccaagtactacgagatcctgggggtccccaagaccgcctcccaggacgacctcaagaaggcgtaccgcaaggccgccatcaagaaccaccccgacaagggcggcgaccccgagaagttcaaggagcttgcacaagcttatgaggtattgagtgacccggagaaacgtgaaatctatgaccaatatggtgaagatgccctcaaggaaggaatgggtggaggcggatcccatgttgatccatttgacatctttgcatgattctttggaccttcttttggtggtggcggcagcagcagggg

SEQ ID NO: 409428 - DNA, 507 bp, Oryza sativa
ttgattaggcgcgtccgctgccggcgtccgccgccgccgccgccgccgtcgggaagggcaagaaggcggcggccggcgaggaggatgaggatgcggaggaggaggacaagaaggtcgccgccgcgccgcaggcgcctgctgccaaggctcaggtggttggatggccaccaattcgcagctaccgcaagaacacgatggctactaaccagctgaagagcagcaaggaggatgctgaagcgaagcagggccaggggttcctgtacgtcaaggtcagcatggatggtgccccctacctcaggaaggtggacctcaagacctacaagaactacaaggacctgtcaactgcgcttgagaagatgttcattggcttcacaactggcaaggatggcttatctgagagccgcaaggatggtgaatatgtgctgacttatgaagacaaggatggagactggatgcttgctggcgatgttccatgggagatgtttgccaactcttgtcgcagactca

SEQ ID NO: 409429 - DNA, 491 bp, Oryza sativa
tcttcccgtcgaaccctctccagtctccactccactgaatcctcccacctcggctcgaaggaatggcaagcggtagtgaagctgagaagtcacctgaggttgtgctggagtggcctaagaaggacaagaagaggcttctacatgctgtttaccgtgttggagatttggatcgcaccattaaatgttacacagaatgctttggaatgaaattactgaggaaaagagatgtgcctgaagagaaatatacgaatgcatttcttgggtttggacctgaggacaccaactttgcacttgaattgacatacaattatggtgttgataagtacgacattggagcaggatttgggcatttcgctattgcaactgaggacgtgtacaaattggctgagaaaattaaatccagttgttgctgcaagatcactcgtgaacctggtcctgtcaagggaggatccactgtgattgcctttgcacaggatcctgacggttacatg

SEQ ID NO: 409430 - DNA, 499 bp, Oryza sativa
tagttgagggagagcaccaaggacacgcgactagcagaagccgagcgaccgcctcctcgatccatatcttccggtcgagttcttggtcgatctcttccctcctccacctcctcctcacaggttcttggtgtagcttgccactttcaccagcaaagtttcatgtctgatctcgacattcagatcccaactgccttcgatccctttgctgaggccaatgctggagactctggtgcggctgcaggatcaaaggactacgttcatgtacgcatccagcagcgtaatggccgtaagagcctgaccactgtccagggattgaagaaggaattcagctacaacaagatcctcaaagatctcaagaaagagttttgctgcaatggtactgttgtccaggacccagagcttggccaggtcattcaacttcagggtgatcagaggaagaacgtatcaaatctctcttgttcaggcccgcattgtgaagaaggaacacatcaagattcat

SEQ ID NO: 409431 - DNA, 508 bp, Oryza sativa
tcgtcttcctcttgtttttcttggccgaaccccccctcgacacgccgtcgccgccgaggggagagagagagaggccgccggccgccgctaccactgacccccccccctcgccggagcgccccgtcgccggtcgggtttgatcgatggcgtccaagaggatcctgaaggagttgaaggacctgcagaaggaccctcccacctcatgcagcgcaggtcctgtgggtgaggacatgttccattggcaagctactattatgggaccctcagacagcccatttgctggtggggtattcttggtgaacattcatttcccaccggattatccttttaaaccaccgaaggtctctttccgcaccaaggttttccacccgaacattaatagcaatggcagcatttgcctcgacatcctcaaggaacagtggagtcctgcacttaccatatcaaaggtcctcctgtcaatttgctcactgctgacggacccgaaccccgatgatccgttggtgccgga

SEQ ID NO: 409432 - DNA, 503 bp, Oryza sativa
tcgaagaacacacacacaaacacaaacagaaaaacacaacacattaagctagctagaagaagagagaaattaaagaagctaggagctaacgatcaggatggctgctggcatggtggcgacaatggtgctactgacgtgccttgctgcaggagggctggtcgtcggagctgaggaagacggtggcggcggcggtcttggccggctggggtcgccggactacggcgacgcgctggcgaaggccatcctgttcttcgagggacagcggtcggggcggctgccggcgaaccagcgagcgacgtggcgcggggactcggcgctcaccgatggccgtgaagaaaacgtgaacctgaccggcggctactacgacgccggcgacaacgtcaagttcgggtacccgatggcgttcacggtgaccctgctgggctggagcgccgtcgagtacggggccgccgtcgcggcggcgggggagctcggcaacctccggcggcgatccggtggggcgc

SEQ ID NO: 409433 - DNA, 495 bp, Oryza sativa
ttcatcatcagcaaccaattcgcaccgatcgatcgatcgatcgatccagcaactagatcaacagtactagctaggaagcatggcccgtgcacagttggtgttggtcgccctggtggcagctctgctcctcgccgccccgcacgccgccgtggccatcacctgcggccaggtcaactccgccgtcgggccctgcctgacctacgcccgcggcggcgccgggccgtcggcggcctgctgcagcggcgtgaggagcctcaaggcggcagcaagcacgaccgcagaccggcgcaccgcctgcaactgcctcaagaacgcggcccgcggcatcaaggggctcaacgccggcaacgccgccagcatcccctccaagtgcggcgtcagcgtcccctacaccatcagcgcttccatcgactgctccagggtgagctgagccatcgatcagagagacggatcatatatatacagcagcgcgccggttgccacctagtagattct

SEQ ID NO: 409434 - DNA, 379 bp, Oryza sativa
tttttatccattcttctccagcttccacttccgtggatgcttccacgtagcagtcacagaacgcgatcgacatgggaaggtttgccacgacctagaagacccatgcctacttcaagcgtttgcacagtaagttcaagagacaggaggcagggcacgactgactacagggcacaggattaggctgagcaaccaagataagaacaaggccaacacaccggcgtaccgctttgttgcgagatgtacacacaaagatcttacatttgagattgtatatgctaccattgaggatgatatcgtgatggctgctgcctactgccatgagcagcctcgttatggtctggaagttggtctcaccaactatgcgagagcttactgcact

SEQ ID NO: 409435 - DNA, 504 bp, Oryza sativa
ttcttcttcctcctcctcgcgctcccccgattcgaagcgtgaagagaggagcggcgcttgcgagaggagagagatggcccgtaccaagcagaccgctcgtaagtccacaggaggaaaggctcccaggaagcagcttgcaaccaaggctgctcgtaagtctgctcccaccactggaggagttaagaagccccaccgttaccgccctggaactgttgccctccgtgagattcgcaagtaccagaagagtactgagcttttgatcaggaagctgcccttccagaggcttgttagggaaattgcacaggacttcaagaccgatctgcgtttccagagccatgctgtccttgccctccaggaggctgcggaggcataccttgttggtctcttcgaggacaccaacctgtgcgctattcatgccaagcgtgtgaccatcatgcctaaggacattcagctggctaggaggattcgtggtgagagggcttaaattcccctcggcgactcctt

SEQ ID NO: 409436 - DNA, 495 bp, Oryza sativa
aagattcctctgtgtacttggctgtggcctcgaacataagtggttcaatgccaaaagatctgtttgaagatgtaatggaggagcttgagaaacagtatcaagatgacaaagcccgaattaaagaagcagtgaagtctggaaagattcctatgacgacttcatggacactagaggatttcgaaactgctgttacggaggatgatactttgaaaggaataacaaacataaacatgaagcttatttttgatgatcaagttgaaaggctcagggaaaaggaggtaaaggaagcaaagaagcgccagcgtctgggtgaaaatttctcagatcttttgtactcaatcaaggaaatatcagcttcttcaacatgggatgattctaaagcactattcgaagatagccaagagtacaaggcattggacagcgaaacatactctagagagcttttcgaagagtgcgttgtccacttgtaagaaaggttaatagagaaagagcgct

SEQ ID NO: 409437 - DNA, 497 bp, Oryza sativa
ggctcagcaaatatagctgagaagaaccaggataatgagatgtctacagatgctggtgagcctgaagaagtagcagatatatttatttatagagaagatgttgtcagcttgaagtcaaaagaggacacccgtgggttggttttggaggtagcaggagaatatgattctgaaggtagcatcactgatgatgatactgatactgaggagcatgaacacaaaagttctcataggactgaaaatggtggtgctgatggtgataatgtcagtaatggagcttgatgttgatagtcagagttcattgcctgataacaaggttagggttctatggattgatggtgtcgagaagacggaagatattgacagcgtggttgtcatggacagaagtttccttcatggagatatagtggcttctgccacagatccaactggtcagatgggacttgttgctgatgcaagcttgtggctgatttgaaggacctcacgggaaataataaggt

SEQ ID NO: 409438 - DNA, 498 bp, Oryza sativa
tatcaaatcaactgtctgctccgccaccgcctcctccaagcttctcaaagaacaatggcagtattgcgcctccgccagcacctcctggtggtaatgctaaattgcctggtatgagggggcgtggacctgcacctccttcaggtccaatgtctaggagccttcaatctggtcaggctgcatccagaaggtccaacttgaagcccctacactgggttaaagtaacaagagcaatgcagggaagtctctgggaggagtcacagaaaactgacgaagcttcaaaacctccagtgtttgacatgtcagaactagaacatcttttctcagctgtcctgccaagttcagatgggaagcgttcagataagtcaggaagtcgtgcatctggatcaaaaccagaaaagattcaccttattgaccttcgccgagctaataattgcggaatcatgctaacaaaagtcaaaatgcccttgcctgacctaatgagcgcaattcttactttag

SEQ ID NO: 409439 - DNA, 498 bp, Oryza sativa
ttcgatccagaattgggttcagttcgaaggcaacgtcttcagattccctggtggaggaacacaattccctcaaggagctgataagtacatcgatcaacttgcatcagttgttccaatcgccaatggaactgtcaggactgcattggacactggctgtggggtggctagttggggagcttacttattaaagagaaatgtcttggcgatgtcatttgcgccaagagattcacacgaggcacaagtgcagtttgctctggagaggggtgtcccagctgttatcggtgttcttgggacgataaaactcccttacccatcaagagcctttgacatggcccattgttccaggtgtttgattccatggggagcaaatggtggaatatacatagtggaagttgatagggttctaagacctggtggatactgggtgctttcagggcctccgattaattggaaagtgaactacaagggttggcagcgtacatagaatgatcttgaggc

SEQ ID NO: 409440 - DNA, 424 bp, Oryza sativa
caccgtgacaactgacaagcaaaccttgaattaagcatcgtaaccagttaacactagagagtgacaaatgaaattacaaaattgttacaacaatatacgccagccgatcatcagagcaaccaagaaagcccgggttgcttcttcatcgccactccgacaagatcacctggcctttcactaatgactcccgtatcttacctttcctggaagtcagttcaggatggattgcagagttcttccatcttttgtgttaggatttacgcctgcttcatgctgcagctgctgcagtctggtttccgcctacccagtactgcttcacagcatacagcaccttctcacgcaccatggggccgtcctcgtgatcgaccagcctcgtgttccatttcatgccgagggcgagcctgttcaccttcgtcaggatatc

SEQ ID NO: 409441 - DNA, 496 bp, Oryza sativa
tgaaaaatttctccccaatctcgcgaggctctcgtcgtcgaatcgaatcctctcgcgtcctcaagatgcagatctttgtgaagacattgaccggcaagactatcaccctcgaggtggagtcctctgacaccatcgataatgtcaaggctaagatccaagataaggagggcatccccccggaccagcagcgtctcatcttcgctggcaagcagctggaggatggcaggacccttgctgactacaacatccagaaggagtcgacccttcaccttgtcctccgcctccgtggtggcatgcagatctttgtcaagactctgaccggcaagactatcacccttgaggtggagtcttctgacaccatcgacaacgtcaaggccaagatccaggacaaagagggcatccccccagaccagcagcgtctcatcttcgccggcaagcagctggaggatggcaggacccttgctgactacaacatccagaaggagttcaccctcca

SEQ ID NO: 409442 - DNA, 503 bp, Oryza sativa
tcgttccttccttccttccggttgcttccgccgatcgacttctcgccccccaaatcgattcgccccccgcctcgatcgatcgattccgcggcagcgccccttcgatcggttggagatggccaggacttccttcaagctcgagcacccactggaaaggaggcaagcagaatctgccaggatccgtgagaagtactcagacagaattccggtgatcgttgagaaggctgacaagaccgatgttccagaaattgacaaaaagaagtaccttgtccctgctgatctcactgttggccagtttgtctatgtggttcggaagaggattaagcttagcccagaaaaggccatctttgtctttgtgaagaacacattgccgccaactgcttctttgatgtctgcaatctacgaagagaacaaggatgaggacggcttcctctacatgacttacagtggcgagaacacattcggctctgcgtaattcatcaactgttgctgctgctgtaaat

SEQ ID NO: 409443 - DNA, 375 bp, Oryza sativa
tgcttgacgccatcagcggacagcagcaaactgcgcgaggcggttgcggcctaaaaagctgaaactacctcaaataagcaagaacattgcatcttgcaactgtaaaatggctctttcagagagagaaccaatggtatatgtgtatactactggtcgcaaggcctaaacatttgggtttgattggaagcgcattctggtgtgatttgtatgtgccctatcatctggtaatgctacattggaagctcatcatgttgccggtgctactaaggatgagcctttgtgtgctctgctagatatgtacatatacaatgtggtggtatttatataccaagggaaggccccttgcaatctggaattatgcatggataatcgggg

SEQ ID NO: 409444 - DNA, 501 bp, Oryza sativa
tctttttttttttgtcggcttcaggtaaacctgggacaatgacattcacaccattgccatgggatggacgtctaaaaatcatgcacggggttgcaaaggggctatctttcttgcatgaatttagccctaaaaagtatatccatggggacttaaggccaaataatgtcctccttggatcaaacctggaggcatacatatcagattttgggctgggacggcttgcaaatattgctggaggatcacctttcacacaatcagatcatgctggtatagagaaagctcagagccagcagtccgatgcctcggtgagccctcttgtgggcaaaggatcatgctgttaagaacgggaagcactgaaaacactgaaaccatctcagaaatgggatgaatactcatatggtgtgctcttgctggaaatgatcaccggcagatcgccggttgttctttcggaaactatgcaaatggaccttgtgcaatgggtgcagttttgttttgaagaaa

SEQ ID NO: 409445 - DNA, 167 bp, Oryza sativa
ttttcttttgttatagaggctgagctagcatcgtgcgacctctcggcgagcggttagtgttcgatgtcgtcgtcggcggcggctaggtggtggtggtgagtcgagctcacatcccaaacattcgcgagtttgatggcctgccgtggtgcacgtatgagactatctca

SEQ ID NO: 409446 - DNA, 503 bp, Oryza sativa
  unsure (1)..(503): unsure at all n locations
tgcattcgcatccacgagaccactcgaacccgacccgcctcgccgccgccgccaccgaagtaatcccttaattggtcaaaatgtctcgggaggagaatgtctacatggccaagctggccgagcaggctgaaaggtatgaggagatggttgagtacatggagaaggttgcaaagactgtagatgtggaagagctcactgttgaggagcgcaacctcttgtctgttgcttacaagaatgtgattggtgcccgccgtgcctcctggcgtattgtctcatccattgaacagaaggaggagnggtcgtggcaatgaggaacatgttactctgatcaaggagtaccgtggcaagattgaagctgagctgagcaagatttgcgatggtatcctgaagttgcttgactcacaccttgtgccctcatctactgctgcagaatctaaggtgttttacctcacgagaagggtgattacacaggtaccttgcggattaagactgggccgagagat

SEQ ID NO: 409447 - DNA, 507 bp, Oryza sativa
ttttaggtggaattatgctcagcataacaggcacagaagcattgtttgctgacctttcgtattttcctgtacaagctattcagattgctttcactgtggttgtgttcccatgccttcttctgcaatatactggtcaggctgcgtttatagctgcaaacacaaaccaagtcagccatgccttctatatctcccttccagctcctatactttggccagcatttgccgttgcaacagcagctgcaatagttgctagtcaggccactatatctgcaacatattcgattatcaagcaagcacttgccctagggtgctttccccgagtgaagatcatccatacttccaagaagtatctcggccagatatacagccctgatattaactggatcctcatggttttctgcatagctgtcactgcagggttcaaaaaccaatcccagattgcaaatgcatatggtactgctgtgatcatggttatgcttgtgacaacatttctgatgatccccatca

SEQ ID NO: 409448 - DNA, 506 bp, Oryza sativa
ggaagtcgctgatctgcttatagaacttgagaaagagaggtttagtaagaagagaatagaggatgatttggaggttatgtcaaggaaagctagctctcttagagccaaggcacgtgaatcagcagtcctggaaaagcttcgtcatgaggtcaaggagtatagggggatattgaagtgtggtatctgccatgataggcagaaggaggttgtgattaccaagtgctaccatctcttctgcaatcagtgcatacagaagtcccttgggaaccgacagaggagatgtccttcatgtagcttgagttttggggctaatgacgtgaaacctatctacatatgaggttgttaatttcaagatggtatcgcaggcatctagatcaagctactttgatggtcattactttgtcatatggttagatgaccatgcgagttgaagatatgacaagtactagcttgtacaaccaaacatataagcagaatgtagtagcctaatttggctggctacatgg

SEQ ID NO: 409449 - DNA, 501 bp, Oryza sativa
tattgctcatcatcacaatcatcaacagctcagttcatccgtgccgtgttaatttagctagctagcaatcgagctcagttttcctaattaattgctagctcgatttgctcggtgatctcttcaattcgccggagcttggaatcaatcgagagattagagtgtacgtgagagctagcgggagatcgtcggcggcgatggtgaacacggcggcggtggcggcggcgaagggcagcaggggcagcgggctgccgctggcgtcgctgaaccacatcagcatcgtgtgcaggtcgttgcaggagtcgctcaccttctacaccgacgtgctcggcttcttccccgtccgtcgccccggatccttcgacttcgacggcgcatggctgtttaattatgggattggtatccatctgcttcaggctgaagatcctgacagcctgccagggaaaacagagatcaatcctaaagataatcacatctccttccagtgtgagagcatggtggcag

SEQ ID NO: 409450 - DNA, 492 bp, Oryza sativa
  unsure (1)..(492): unsure at all n locations
gtcgtcctcgcatctccactcgccatgggcaagattaagatcggaatcaacggtttcggaaggatcgggaggctcgtggccagggtggccctccagagcgaggatgtcgagctcgtcgccgtcaacgaccccttcatcaccaccgactacatgacctacatgttcaagtacgataccgtgcacggccaatggaagcacagcgacatcaagatcaaggactccaagactctgctcttgggcgagaagccggtcaccgttttcggcatcaggaaccctgacgagattccgtgggctgaggctggtgctgagtatgtcgtggagtccaccggtgtcttcactgacaaggagaaggctgctgctcacttgaagggtggcgccaagaaggttgtcatctctgccccgagcaaagcatgctccgatgtttgtctgcggtgtcaacgaggacangtacacttcagatattgatattgtctcaaatgctagctgcaccac

SEQ ID NO: 409451 - DNA, 491 bp, Oryza sativa
  unsure (1)..(491): unsure at all n locations
gtactatcagctgcagtgtcctgccaggggttcatcccttacttttcacccgttggatcaccttcatcctctaaggtttcaccggccaggtgaaacagttcttcatattgctggttctactattgatctgcggtcatgtgatacaagtttagaggtggctgagatgcgcaatgcgctatttgccgaggaggaatcgactgctttatcaacatgggctgtggcatccatttgtggatgcctcaggttggagcatgtaatgacactttttgctgcagcactgctggagaaacagattattattgtttgttctaatttgggaatgctttctgcttcagttttgtccatcatacctctgatacgcccatatcagtggcagagtctactcataccggtcttgccaaacgacatgatggactntcttgatgcacctgttccatacatagttggtgtgcagaacaagacatccgatgtacattccaggctagtgaacg

SEQ ID NO: 409452 - DNA, 477 bp, Oryza sativa
ttcgcgctcccctcgccgccgcagccgccgccgcctcgcctcctcggagatcttcgctgcccttccgtcaacatggggaagacacgtggtatgggagctgggcgcaagctcaagacccaccgcaggaaccagagatgggcagacaaggcctacaagaagagccacttgggtaatgagtggaagaaaccctttgctgggtcatctcatgccaagggcatcgttctggagaagattggtattgaggccaagcagcccaactctgccatccgtaagtgtgctcgtgtgcagcttgtgaagaatgggaagaagatcgctgcctttgtgcccaatgacggttgcctgaacttcattgaggaaaatgacgaggtgctgattgctggatttggtcgtaagggccatgctgtgggagatattcctggtgtccggttcaaggtcgccaaggtctctggtgtgcctctgcttgctctcttcaaggag

SEQ ID NO: 409453 - DNA, 488 bp, Oryza sativa
tcttcagactccacgattctctcagagagagagagagtgagagagtggggactcagcgagcggtgggcgagagggggagatcgaaaccctagctagggtttgcgcgcggcggcggcggggatgtcgacgccggcgaggaagcggctgatgcgggacttcaagcggctgcagcaggacccccccgcggggatcagcggcgcgccgcacgacaacaacatcatgctctggaacgccgtcatctttgggccggatgatacgccgtgggacggaggcacgttcaagcttaccttgcagtttacagaagattattccaacaagccgtcgactgttcggtttgtttctaggatgttccacccaaatatttatgcagatggaagcatctgcttggatattctacagaaccagtggagccctatataagatgttgctggcatattggacttaatttagtctttgctgtgtggaccaaaccccaactttcaggaaac

SEQ ID NO: 409454 - DNA, 426 bp, Oryza sativa
gtgcaagcagactcaaatctcatgacccatttcgcttccattcacatattatgatgataatcccctttttacatgagcagaatgccctagtgcatgagaggtcaacaccactacataaaagcagccaagagtaactgggacatgggaacacaaaaacatcaacggactacaagcaatcactggagatcttataatgttttaagatgacagcaaatctggagagccagaaacgcacaggtttttcacggttgcttattgcatctttctggcatggtggataccacccgttgccctgctgcatgccctagtcagctgtccagctctgctccacgatctcacgaaccttgcggttgtactctcgcttgttctcactaaacagtctggcagcttctgagtttgctggagagttggggtttggatcacaca

SEQ ID NO: 409455 - DNA, 390 bp, Oryza sativa
gtgccattgctggtgctggtgtgctctcaggctatgaccagctgcagatcctcttctttggaaagaagtacggctcgggcggtgcctaaactggcagaaaatgatgacgaacaagtgtttattcctggtcctgcactaacgggatctggtgaattttgcctttttaacattgaaaacaataataattcttgtaggggagaacactccccgacattcgttttttggtggaagcgtttatctccaaacattgtcataggcggaggcgttaatcgcaaacagtttaccatcatagggttgagtttgagttgagtctggccggctctgttatgtctggcgattttcctaccatacattacccctcggtgaaatatcgaaagattattgagttgc

SEQ ID NO: 409456 - DNA, 389 bp, Oryza sativa
gcaactcaataatctttcgatatttcaccgagggtaatgtatggtaggaaaatcgccagacataacagagccggccagactcaactcaaactcaaccctatgatggtaaactgtttgcgattaacgcctccgcctatgacaatgtttggagataaacgcttccaccaaaaaacgaatgtcggggagtgttctcccctacaagaattattattgttttcaatgttaaaaaggcaaaattcaccagatcccgttagtgcaggaccaggaataaacacttgttcgtcatcattttctgccagtttaggcaccgcccgagccgtacttctttccaaagaagaggatctgcagctggtcatagcctgagagcacaccagcaccagcaatggcac

SEQ ID NO: 409457 - DNA, 508 bp, Oryza sativa
cgcgttgtatcagtccacaaatcttgtatttactactactttttataagcctgaaaatatagtattttactacttttcaaagcagggagatgattcttttctcccccaaaactcatgattcttcagatttgatattatcttactaatttgtcacatacctattgggtacatacatagattcagagttctctgaaactgctaacattatgtctgaactcaaattgcaatttcagttctactgctgggcacaagagtggcagcatcagccgcagcgatctcccctgcatcggagaagaaagcctggctgatcctggcctgggtgagcacggtggccggcaacctgaccctcctcggctcagccgcgaacctgatcgtctgcgagcaggcgaggcgcgcgcagttcttcgggtacaaccttaccttctggagccaccttcgcttcggcgtgccgtcgacgatcatcgtcaccgccatcggccttctcatcgtcatgagctactgatgaaca

SEQ ID NO: 409458 - DNA, 512 bp, Oryza sativa
  unsure (1)..(512): unsure at all n locations
acgcgtgaggtcttcttccccactctctccctcccacgccgccgcccccgcaaaccctagcgaacgcagcggagagaggagagagcgccatggccgtggaggtggcgacgcataagatcaggtggggagagctcgaggaggacgacgagggggacctcgacttcctgctcccgccgcgcgtggtctccgggcccgacgagaatgggttcaagaaggtggtcgagtatcgcttcnacnacaangggaacatggtgaaggtcaccaggaccttccgcgtccgcaagatcgcccgcgcccgcctctccaagagcgccatcgagcgccgctcgtggcccaagttcggcgacgccgtgcaggaggacgtcggcgnncngctaccatggtgtccaccgaggagatcgtccttgagcgcccacncnccccagggagcaaagctgaagaaccaagtgcttctggtgatccactggcacgccagagtggtgcagctctcatggctggcagaacctgtggga

SEQ ID NO: 409459 - DNA, 504 bp, Oryza sativa
tcgtttccgggcacaagtttgtaggatgtcccatgccatgtggtgtccagataacaagactggagcacataaatcgtctttctagcaatgttgaatatctggcatcaagagatgcgacgatcatgggaagtaggaacggccatgctccgatcttcctctggtacaccctgaacaggaaaggctacaggggcttccagaaggaggtccagaagtgcctgaggaacgctcactacctgaaggaccgcctcaaggaagctggaatcggcgccatgctcaacgagctgagcagcaccgtggtgttcgaaaggcccaaggacgaggagttcgtccggaggtggcagctcgcctgcgagggcaacatcgctcatgtcgtggtgatgcccagtgtgaccatcgacaagctggactacttcctgaacgagctgacggagaagcgggcgacctggtaccaggacggatcatgccagcctccctgcctcgccaaagacgtaggcgaggagaact

SEQ ID NO: 409460 - DNA, 504 bp, Oryza sativa
tactaactaccttatccaatatgcattagccctggttttgaaggagagcttcaagatctactgtgcaatcaatgatggtatcatcaatcttgttgatatgttctttgatatgccaaagtatgatgctatcaaggctcttgttgtctataaacgagctggccagcaggctgaagatctttctgacttctacgattcctgcaaacaacttgagcttgccaggacattccagtttcctactctaaggcagccaccatcatcattcattgcaacaatggaagagtacatccgagaagcaccccgtccctcgattaacagcgtggagaatggtgagaggaagctagtgacctacgaccaagaagctacagaggagtctgaaaaaccagcagaagaggagaaagatgagcctgcagagtctgaacaagaacatgagcctaaacaagaaccaaagccaccagaaaccactggagatctactaaacttggatgcagaggtgagtccattggt

SEQ ID NO: 409461 - DNA, 373 bp, Oryza sativa
  unsure (1)..(373): unsure at all n locations
tgcttgacgccatcagcggacagcagcaaactgcgcgaggcggttgcggcctagaaagctgaaactacctcaaataagcaagaacattgcatcttgcaactgtaaaatggttctttcagagagagaaccaatggtatatgtgtatactactggtcgcaaggcctaaacatttgggtttgattggaagcgcattctggtgtgatttgtatgtgccctatcatctggtaatgctacattggaagctcatcatgttgttggtgttaataaggatgagcctttgtgtgctctgctagatatgtacatatacaatgtggtggtatttatatnaaaaaaaaaaaaatcatatattactacaacaatcatcttactaatc

SEQ ID NO: 409462 - DNA, 411 bp, Oryza sativa
cttttcctcctcggttcggttccgtggttcgtctagggtttagtgggttgagatggcggcgccggatgtcgagtaccgctgcttcgtcggcggcctcgcctgggccaccgacgaccgctccctcgaggccgccttctccacctacggcgagatcctcgactccaagatcatcaacgacagggagacggggaggtcacgtgggtttggcttcgtcaccttctcctccgagcagtcgatgcgcgacgccatcgagggcatgaacggcaaggagctcgacggccgcaacatcaccgtcaatgaggcccagtcccgccgctccggcggcggaggcgggggctacggcggcggcggtggcggctacggcggcggccgtggaggcggcggctacggaggaggtggcggcggcggcta

SEQ ID NO: 409463 - DNA, 504 bp, Oryza sativa
tttcagctagcttgtagcagctaaggttaggtcggatcgagatcgggatcggccgccggcgagcggcgagcggcgaggatggggcgggggaaggtgcagctgaagcggatagagaacaagatcaacaggcaggtgacgttctccaagaggaggaatggattgctgaagaaggcgcacgagatctccgtcctctgcgacgccgaggtcgccgccatcgtcttctcccccaagggcaagctctacgagtacgccactgactccaggatggacaaaatccttgaacgttatgagcgctattcatatgctgaaaaggctcttatttcagctgaatccgagagtgagggaaattggtgccatgaatacaggaaacttaaggcaaagattgagaccatacaaaaatgtcacaaacacctcatgggagaggatctagaatccctgaatctcaaagaactccaacagctagagcagcagctggagagttcattggagcacataatatcaaga

SEQ ID NO: 409464 - DNA, 453 bp, Oryza sativa
tatgttaggtgaggagattccaagagaagagatgagatcccacgagatgaacaactcttcttctcgttatgcgtcagaggaggagcgcggcagcaacagcttcctcatcgagagcgaggaggaggaggaggacgaggaagcccacccccactcctccatcctcctcaaggatgccgactccgactccgactccgacgactcctcctgcgctaccccgcgcccaagctcctacgccacccaccaatggccgcaaagctacaggcaatcaatcgacatttatagtagcgtgcagtctcccaacctgagctttttgggaactccaactctaagcaggctctccaactcattcctcaccaactcttttcgtggcaaaacccctgaaattctctctaatcttgtcaagccacttctacgcccattaatttcaagcgacgaccagcagcagcagcagca

SEQ ID NO: 409465 - DNA, 504 bp, Oryza sativa
tgatgctaaagagaagcttcagccttttgcaaatttgactagtgaagaaagctaccaaagtcgtgacttggaaaaggcctctcaacaagtagcaaagcatctgtatgatatcaaagttcaaccatcaactctgcttccaaaacagatcggtaatatgtacactgcatctctttatgctgcattggcatctgtgatctacaacaagcatgacagtctggatggccagcgaattctcatgttttctatgggagtggattgacatccactatgttttcgttgagactacatgatggtcaacatccctttagcttaatgaacattgcttctgtgcttgatgtgacgacaaagcttgagtcaagacatgtgacctcacctgagagtttattgagacattgaagctgatggagcaccgctatggagcaaaagattttgaaacaagcaaagataccagcttgttgccaccaggaacattctatcttacaaaagttgattcgatgtacagga

SEQ ID NO: 409466 - DNA, 506 bp, Oryza sativa
  unsure (1)..(506): unsure at all n locations
taccttgtcaagaccatcaagacaaacgttatcggaaccctgaacatgcttggacttgccaagagagttggagctaggattttgttgacttcgacctctgaagtttacggtgatccgcttgagcaccctcaaacagaggcctactggggaaatgttaacccaattggagtcaggagttgctatgacgagggtaagcgtgtcgcagaaacactgatgtttgactatcacaggcagcatggcattgagatccgaattgccaggattttcaacacctatggacctaggatgaacattgatgatgggcgtgttgttagtaacttcattgctcaggccgtacgtggcgagcccctgactgttcagaagccaggaacacaaactaggagcttctgctatgttgctgacatggttaatggtcttattaagctgatgaacggngacaacactggaccaattaatttgggaaacccaggtgaattcaccatgctggaactcgctgagaatgtgaa

SEQ ID NO: 409467 - DNA, 467 bp, Oryza sativa
tagagatccaataaccaaaagcaagaacaccatgagagccccatccttcttcttcctctccctcctcctcctcctcctcctcatccacatctccatccattgcaatgctgcagattcccagctaggttcagagaaggtcaccaacctcctcttctacctgcacgacaccctcagtgggaaggatccaactgctgtcccagttgctcgtgctgagaacgctgtacccaagcctgataatccggtacccttcagcacgatctatgtggtcgatgatctgctgacagaggggcctcagagagaatccacggtggttgggaatgcgcaggggatgtacatttcgacagccaagaaagggctcacgcttgttcttgggatcgatttcgagctcactgatggcccctacaaaggcagctcgttcgtcgtgtactcgcggaacccggtcatgcaggggaatggcagggagctcg

SEQ ID NO: 409468 - DNA, 378 bp, Oryza sativa
ttcaagccagctccagccacacgagcctagttcaggtagatacaatggcgtccaccgcctctttcatgctcgccgtcttgctggcggtggccgtcgcggcggcgccggcgagggcggtgcgatgcccgccgagcgacaagcaggcgctgatgagagtgaagcagtcgctgggaaacccggcgacgctgtcgacgtggtccctggcgtcggcggactgctgcgagtgggaccacgtccggtgcgacgaggccgggcgcgtgaacaacgtcttcatcgacggcgccaacgacgtccgcggccagatcccgtccgccgtggcggggctgacggcgctcagttcgctgtcgctgttccgcctcccgggcctctccggcccca

SEQ ID NO: 409469 - DNA, 487 bp, Oryza sativa
tttggatagcaagctaggctcgggggaatctcgccgtcgcatcaccgccgccgccgccgcccgccggttcgatctgagaagccgccacctcgccgcccggatcccgatggcgcggcttcactggctggaggcgatgctgccgctgggaatcatcggcggcatgctctgcatcatggggaacgcgcagtactacatccacagggccgcgcatggcaggccgaagcacatcgggaacgacaattgggacatggccatggcccgccgggacaaggtgctcctccatcaggcctcctccgagaacaactaggatattgatcaacaatatctagcctggatgttgatgaagttatttcaaatgcccagaattcctcctgttagttttcgtgtataatgggaagctgggcttaggttctggttacaacttttgaatattggaatgataatgtgtatctggaatctgtttattacacaaaggggtggcggttgg

SEQ ID NO: 409470 - DNA, 471 bp, Oryza sativa
gtagtgaagagctttcagaggcttcccaaatcctttcctgcttgtctgatatggtctactgctcggtttgcgcctgtatgcagacccaacacaaaattgaaatggacaagagagatgggaagttcggcccacagcccatggcagtgcctccaatgcagtaaatgtcgcgcatcgatcagcctattccacctcctgttgggtacacaccacaacagccagcatacggtcagccttatggtggctatcctcctgctccgcctgctcaaggttatccaccagctgcttaccctccggcaggttacccccagggtggcgcataccctccccctggctcttatcccccacctggttcctacccgcctcagggctcctaccctcctccacaaggttactacggcaagtaaaggaaatgcagaaattggagatatgtctttgtgacgaaatcggtatattgtgaacaatgtaaacatt

SEQ ID NO: 409471 - DNA, 488 bp, Oryza sativa
  unsure (1)..(488): unsure at all n locations
ttcctactggcaggtattgtctttcaggctcatctgattcaatgataagattatgggatctgggacagcagcgatgtattcattcttatgctgtgcatactgattcagtctgggcgcttgcaagcactccttcgtttagtcatgtttatagtggtggaagagatcagtcggtgtacttgacagatttaagcaatcgagagagtgtcttgctctgcacaaacgagcacccgattctacaattgtccttgcaggatgatatgatttgggttgcaacaactgattcttctgtgaatggatggaaagctgaagcgcatgaacccctaaagcttttcaaaaaggttcttcattcttagctggcaatttgtcattctccagggcaagggcttctttagaaggatcagcacctgtccctatacacnaagaaccatcttcattattctggagttccagcaataactcagcatgagatcctgaataatagagacatg

SEQ ID NO: 409472 - DNA, 472 bp, Oryza sativa
ttgggctccaacgacctcagcaagtacccgggcaagaagatgcccaactgggtcgaggtccgccatgtcgacaacttcgtcatctccggcaagggcaagctcgacggccagggccccggcgtctggagcaagaactcctgcgccaagaactacaactgcaagctcctccccaacacgctggtgctgaacacggtgaacaacggggtggtgagcgggatcacgctgctgaacgccaagttcttccacatgaacatctaccggtgcaaggacataaagatcagcggcgtgaccatcagcgccccgggggacagccccaacaccgacggcatccacatgggcgactcctccaagatcaccatcgccgccaccaccatcggcaccggcgacgactgcatctccatcggccccggcaccgacggcgtcaacatcaccggcgtcacctgcggccccggccacggcatcagcatcggca

SEQ ID NO: 409473 - DNA, 357 bp, Oryza sativa
tgttaatatttgtatcacagcttgtgtatggccttcctcacattcagctgcaacgggtatgctatgccattgatactctgcgcattgagatgtcgctgactaccgtgcataacatctatcttgggattgccggaagatctaaaccaaaacagaggagctagtgcggaaacaatcaatgccttgggaacatgcaagctcaagtcaaagaaaactcgtgatggagatggaaacgacgctggagtcggcgttgcggctgctggaacacacaaggagcgagtcatgtctgcagaagaagctgcgaggatgtattccagaatcttggatactggacagctaacagctagttatctgctcttg

SEQ ID NO: 409474 - DNA, 509 bp, Oryza sativa
gcggtgtccgcattggtactcctgcgatgacatccaggggtcttgtcgagaaggactttgagcagatcggcgagttcctccaccaggccgtgaccatctgcctcaacatccagaaggagcacggcaagctcctcaaggacttctccaagggcctggtgaacaacaaggacatcgagaacctcaagctggaggtcgagaagttcgccacctccttcgacatgcccggcttcaccctcgacagcatgaagtacaaggagtaggaaaacaaaaacacacacaaaccatggtcctaccgccgctaatcgtcgaccagctgtgctctcgtggaccgccgtcgtcgtcatcttcttcctcggcacaagctggccctgtgttacggattttgtctgcccatcgagatgattgggttcattaaacgctctcttccccacccctgtgctgcctctggtttgggtgccaacctcatccccatcggttttttttctcctcttggttctaatttctaggag

SEQ ID NO: 409475 - DNA, 465 bp, Oryza sativa
tcttgtgtacgccgatggcaccacggctctgccggagtgggagagggaggccagcatcaggcaattctacggtgtcatcttcccgtcgctgctccagctgccgagtgggataactgaattggacgacaggaagcagaggaggctgtgccttcagaagttcaggaaggtggaggagagggtctcggaggtggatttggagagggagctcgagtgcggcatctgcctcgaggtgaatgccaagattgtgctgcccgattgcgcgcactcgctgtgcatgagatgcttcgaggattggaacaccaaatcaaagtcgtgccccttctgccgcgcctgcctcaagaaggtgaatccgagcagcctgtggttgtacaccgactaccgcgatgttgtggatatggatacgttgactagggagaacattaggcgcctgttcatgttcataaagtagcttccacttgtagtgct

SEQ ID NO: 409476 - DNA, 493 bp, Oryza sativa
tcttagctttccttgcttgggctagaatgggtaacctgcatggatggggtggaccactatcacaaaattggctggatcaacaattgacactgcagaagaaaatattgtcccgtatgattgagcttggaatggtcccagttctaccatcgttctcaggaaatgtaccgtctgtgtttaaaaaattatttccatctgccaacataaccaaacttggtgactggaacactgttgatggtgatcctaggtggtgctgtacttatcttcttgatccttctgatgcattgtttattgatgtggggcaggcgtttatcaggcaacaaatgaaagaatatggcgatatcaccaacatctataattgtgacaccttcaacgagaatacaccacccacaaatgaaccggcatatatttcatcacttggttctgctttttatgaagcaatgtcaagaggtaacaaggatgctgtgtggctgatgcagggttggctgttctactc

SEQ ID NO: 409477 - DNA, 482 bp, Oryza sativa
tcgtaaacagcaaaaaaaaatcaaacaaaaagaaaaaatattccccatctgtgaaattcgcaaaaccctagcgcggcggcgatgtcgaacacgagggtgttcttcgacatgaccgtcggcggagctccggcggggcggatcgtgatggagctgtacgcgaaggacgtgccgcggacggcggagaacttccgcgcgctctgcaccggcgagaagggcgtgggcaagagcggcaagccgctgcactacaaggggagcaccttccaccgcgtgatcccggagttcatgtgccagggcggcgacttcacccgcggcaacggcacgggaggggagttcgatctacggcgagaagttcgccgacgaggtgttcaagttcaagcacgacagccccggcatcctgtccatggcgaacgccgggcccaacactaacgggtcccagttcttcatctgcaccgtgccctgcagctggctggacgggaagcacg

SEQ ID NO: 409478 - DNA, 397 bp, Oryza sativa
ttttataccacgcacccacccctcgagagggaagaaggaacccggaaagggaggaaagcatggccggagcagcagccgcctccgccgccgccgccgccgtggcgtccgggatctcggcccggccggtggccccgaggccctatccctcgcgcgcgcgcgccccacggtccgtcgtgcgggcggccatctccgtcgagaagggggagaaggcgtacacggtggagaagtccgaggagatcttcaacgccgccaaggagttgatgcctgggggtgttaattcaccagcttgtgccttcaaatcagttggtgggcagcccattgagattgattttgtgaagggctttcgaatgtgggatgtggatggaaatgaatatatcgattatgttggttcctgggg

SEQ ID NO: 409479 - DNA, 441 bp, Oryza sativa
gccgatgctgtgttcttggacttaccccagccttggcttgcaataccttctgcggggactatgctaaagcaagatggagttttatgctccttctcaccctgcattgagcaagtgcagcgggcttgcgaagctatgagatcatgtttcacagatattagaacctttgaaattcttcttcgcacctatgaagtacgagaaggtggtttgaagggtgccacaaccaatgaagagtctaatgcagtgcctcttgctcagaaaaaaagaaaacttcttgctgctgcagaaactttagatgttaagcagaattctagtgttatggttaggccttgtagcactgctagaggacacactggctacctgacatttgcgaggcttcgtgtgcatggaaactaaactgatcctacatacagggaaacttgtggactcacaccttcataatag

SEQ ID NO: 409480 - DNA, 313 bp, Oryza sativa
gtttaagacatcatccaaacaatcagctatcaatgctctcaccagtgctttcgaggatcctacgaaaagtacaatacctaagtctgtaaaagcgagccccgaggcagagaaggcaatacaggaggaaggctcaacgatcggtgaaagtgaaaacgagccagaagatgatgagaacagcacaatctacccatatgaacgtttgaccaccacatctgatgatcctgctcctgacattgatgttaccaagcgagaggtctacttatcatcagatgagttcacagagagttttgcatgacagggcatcattaaaaac

SEQ ID NO: 409481 - DNA, 423 bp, Oryza sativa
ttataattaaacaggtcaccaagacagagctggactctcttataggatttgctcctcactatttcaggcacttggcagaatcactaacttctaggagcccgacttgtttggctaaaataatgggactttatcaggttaatattaagggcttgaaaggagggcgtgaggtaaagatggatcttatggtgatggagaacattttcttccaacgaacaatatctagggtctatgacctaaagggttccgtgcgggcacgctataattctgatacatccggccacaataaagtacttttagattctaatctcatagaggcacagcatacaaatcctatatttttggggagcaaggcaaaacaaagaatggaaagagctgtctggaacgatacatcattccttgcgtcattggacgtcatggactact

SEQ ID NO: 409482 - DNA, 416 bp, Oryza sativa
tttcaaattgggtgtgttcagaatcaaattggagatacagttggttactcttgtttgtatggtttttttggtaccatgtacaatgattgctgcttgatgatgcatgatttcatcttgacaagaacttttttgcttaaacaggtgaaaatgatcatggctaccaatagacctgatgttctggaccctgcgctactgcgtcctggacgtctagacaggaagattgagattccgctaccaaatgagcaagcaagaatggaagttcttaaaatccatgctgctggtattgccaagcatggagaaattgattatgaggcagttgttaaactggctgagggcttcaatggggctgatcttccaacgtctgcactgaggcgggtatggctgcaattcgtgctgaacgggactactttgtcatg

SEQ ID NO: 409483 - DNA, 373 bp, Oryza sativa
tctttctgtcgcgctcaggctcagctccctccccgaccccgagagagatagcgtagcttcaattcgctactgctccccgcgcgtgctcctccaagctactagcagtctcccgcctccgtttacccggtccggttccggcatggacgacgccacgtcgtcctcgacgcgggcgcccgggcccaagacggaggagctggacgcggccctccacgccatggggttcgagatccagcggctctcccccgcggaggtcaccggccgcctgctcgtcacccccacctgctgccagccgctcaaggggctgcacggtagcatgttggcgcttatagcgcaggggttggcaagcatgggggcgcacatggcgtcgggctac

SEQ ID NO: 409484 - DNA, 358 bp, Oryza sativa
gcgcacgaccaaatttggtcatgaagaacaataaaattgtcccaaaccaaacacctcgactcctctgacatatacattattacaacagacttacaatatgtcacattatcgtgagatcaaaccatttcatttccagcatcgaaatgaagctttgtacttttaattattattatgtttacagtttagagtatttcttgagcgcctcccctgcatttttcacgctctccggcaccggcagattgcagagaagagtcaccctggattcagagatctgagcccccttttcctttggggatggatccaatttccacaggtttaccggccacacctgggtggagcggccgacctggagcggggc

SEQ ID NO: 409485 - DNA, 399 bp, Oryza sativa
ggactggtgactaccgccagctcttccaccctgagcagctcatcagtggcaaggaggatgcagccaacaactttgcccgtggtcactacaccattggcaaggagattgttgatctgtgccttgaccgcatcaggaagcttgccgacaactgcactggtctccagggcttccttgtgttcaacgctgttggaggaggaacgggctccggtctcggttcccttctccttgagcgtctctctgtggactatggcaagaagtccaagctcgggttcaccgtgtacccgtcccctcaggtctccacctctgtggttgagccatacaacagtgtccttttcacccactccctccttgagcacaccgatgtcgctgtcctgctcgacaatgaggccatctatgaca

SEQ ID NO: 409486 - DNA, 361 bp, Oryza sativa
tttggaggaccccaacaccttcggcaccaggatccaccgcatgctcaagctcggcctgagcatcgacgaggacgagtccgacgaggctgacgccgacatgccgccgctggaggacgacgccggcgagagcaagatggaggaggtcgactaaacgtcatggacccatggatgccattctgtcccttctagttatccctctcctagctctcttctcatagctatctgactgctgctgttcgctttctttttggtacgttggatgcatcagttttgtctttgtcttagctcttaaacaatgcgtggtaccttgtcatactgtttgcgttgcaatgctactagccgaaggatatgccagcttctt

SEQ ID NO: 409487 - DNA, 217 bp, Oryza sativa
tgtttactgcccttgctatggctgtgcacttaggagatattatactttggggccgacattgcgtgcacaagactgcgatacatgacgacctacggtagaggttgggagggtggaaccagaaagggcatttgcttacttgcaagatgatatgaacggtgcagaaagatatgtgcagggcctttgcaagtggtttattgagcattgccggggagaccgg

SEQ ID NO: 409488 - DNA, 326 bp, Oryza sativa
tgaagattgcgaataggctcaacgtgaagccaagcatgtgaagaaactaaggcacaagaatgcatcatctcttgttaattaattggagtactaccaacaaataaggccagacaatgtcagatgcacgcatcttctgttgtcgttgggccatcttttgtatgcatcctattgttaattactagtacatgatatccaagtgatcatctgcaaggctacagaaattctgtaatacgataaattaaaagaaaccaaaatggagcctgcatatgtgtaacttaattaatgtactggcgtattaatgccactgctgcatgttgtaatactcc

SEQ ID NO: 409489 - DNA, 461 bp, Oryza sativa
tttgcccgtcggagttctctgttgcggttaccatctttggtggccgcaaccatgcagggacctgggccaaggggctggatgtcggggcctattcttgcagcaacatggttgagcaggagctgccttctgggggtttgctcatttaccagagcttcactgctactgctgaaatcgccaccgggtcgccacgatctgttctgcattgctttgctgatgaaaacacggagaaagctggtaaaatggaggctctctactgggaagacgatgctgtcgaggagatagatggcacagagggtaagaagatgaggagctgctgatgagggaagcgcactgaagattaaagaatactcaaaactccaatagcgatcactctgttactttgtgaagcagccaggcagactattcatatagtactagtatatgctatgaccaatgttctttattatcttgaatatattctg

SEQ ID NO: 409490 - DNA, 415 bp, Oryza sativa
gtttaatccaatcttttcatggtatcagagcctgcttcctcgacgtcgtgattatagcgtcgtcttcatcctcgctagccggtggcgctgctccttctctcgcgcacgcggtcacagagaaactctcccgcagcaactatcctctctgaaaggcgcaagttcttgctgcgctcaggggagctcagatggctggatacatcgacggcacaaaggaggagccgccggccaccatcatcaccaagaaggacgacaaggatgtgcgggtcaccaatcccgcgcataccgagtgggtggcgcaagagcagcaggttctcagctacctgttgctctccctcttacgtgatgtcctcatccaggtggtctcaattcccactgctgttggggtttgggatgccataagggggatgtttgcatc

SEQ ID NO: 409491 - DNA, 407 bp, Oryza sativa
gtccattgtacgactggaaagctatggaagcaggtggatttgaatggtggataaaaaggattaatcgtgcccttgatttgtatgatgagttccgtatagaccatttccgggggcttgcaggtttttgggcagttccttctgagtcaaaagtagcgctggttggaagctggagggctggaccgaggaatgcattttttgatgcattattcaaagctgtcggtagaataaacataatagcagaagacctgggggtgataacagaagatgttgttgacctaaggaagtctattgaggctcctggaatggcagttcttcagtttgctttggcggtggttctgacaatccacacttgccccataaccatgaatttgatcaagtagtatacaccggaacacacgacaatgaca

SEQ ID NO: 409492 - DNA, 293 bp, Oryza sativa
gtgcctatcggaagcttgttaggagttaccttcctgttgtgaacaaagatcctggtgctgaacagaagttcatggattttggctacgcctacgaggttttgcctgaggactagaaacgaccaagctatgctaaatccggcgaatctcggtcgaggggagctggatggggaactggagattacagatacccatgtgagaagtgtgtaacagtagtcaaaggatttgccggaatggaagggaacgggaggccgtgttggcataagcactgcatgtcaccggtagactgataagga

SEQ ID NO: 409493 - DNA, 306 bp, Oryza sativa
tgttcggcgggccggcggctccagaggcgagtggatttgaatggtggataaaaaggattaatcgtgcccttgatttgtatgatgagttccgtatagaccatttccgggggcttgcaagtttttgggcaggtccttgtgcagcaaaagttccgctgattggaagctggagggctggaccgaggaatgcgttttttgatgcattattcaaaagtgtaggttgaataaacataattagcgggaagtcttttcttaagctgtaacctcaaagggtgccgcaactttttaggcatatggagcaagatgttg

SEQ ID NO: 409494 - DNA, 457 bp, Oryza sativa
gggtagtcgtcggggggaggggggcgcttgctgctccctccgccggcaccatctccagtgccggtgccgtctctccctactggatccggatccggagtcgcgcctgcactttcttcatcctggtcgagccgagccccttgggatctaccgttgctgtctgtatactacttcggatggaatccagcaagacacaatctcaaggttctgcctctgttccaaagaacccagccatgtcctcttgtcggaagaagaagtctgacgacgttacgttcctcgaagatctgaaagaccatatcgacgagttcatccacgcctccatggatgagcacaagcattgcttcaaaaacaccatccagaagatgtttgggatgtcaaaggttgtcgcaaagcgttccgctgaagcaaaagaagctgaagtcgagagcgctttgcctcttcagaccagtgtctcgcagta

SEQ ID NO: 409495 - DNA, 438 bp, Oryza sativa
tctggacgcgctctccaggcccggccagccgaagccgcctgccggccgggaggtgcggttctcgtgcccctacgccggctgcaaccggaaccgcgcgcaccgccgcttccggccgctcaagtcggccgtgtgcgcgcgcaaccacttccggcggagccactgccccaagctctacgcctgcgagcgctgcggcggcaagaagcgcttcgccgtcctcgccgacctccggagccacctccgccactgcggcgaggaggcgcagtggcgctgctcctgcggcaccaccttctcccgcaaggacaagctgttcggccatctcgctctcttcgaaggccacacgccggcgatcgccgagccgacaagggtgtggcgacagcggctgcagaggcatcgatttctatgatggaggaggaggagttgaagcgaattgtgatcgaa

SEQ ID NO: 409496 - DNA, 438 bp, Oryza sativa
gtcagcctgtcatggttatggaagcaatgaagatggagcatgttgtgaaggcgccttgtgccggatatgtggaagggctgaaggctactgccggacaacaagtttttgactctagtgtccttttcaccgtgaaggagaacaagccaaattgagaaacccaggcagagattcacgacctgtacagctcaattcacagacgcttcataagttggctgatgatgctgccggccgtccaaaagcaagcaaataataagcgacaacatcgagttcacaacacaaaagcaagcaaaaataagcaacgggttcatctgtgtgaataaattagttgacgagctcccaacccaccccctgttgttgttgtcgcaaacctgaaactgtacagtgtacattactgctgtcacatacagtgacaaaaacaattaaacctcatttgttctt

SEQ ID NO: 409497 - DNA, 450 bp, Oryza sativa
gaacgtgctcatctttgacctcggcggcggcacattcgatgtctccctcctcaccatcgaggagggcatcttcgaggtgaaggccaccgccggtgacacccaccttggaggcgaggacttcgacaaccggatggtgaaccacttcgtgcaggaattcaagaggaagaacaagaaggacatcacgggcaacccgagggcgctcaggcgtctgaggacggcgtgcgagagggcgaagaggacgctgtcctccaccgcccagaccaccatcgagatcgactccctctacgagggcatcgacttctacaccaccatcacccgcgccaggttcgaggagctcaacatggacctcttccgcaagtgcatggagcccgtggagaagtgcctccgcgacgccaagatggacaagagcaccgtccacgacgtcgtgctcgtcggaggctccacccgtat

SEQ ID NO: 409498 - DNA, 449 bp, Oryza sativa
ggacacttcaacacaccagcacattccatacagagagaacaaaaatttgactgggacagctcgatatgctagtgtaaacacccatcttggaatcgaacaaagcagaagggatgaccttgaatctcttggatatgtactcatgtacttcttaagaggaagtcttccatggcagggtctaaaagctgggaccaaaaaacagaagtacgagaaaattagcgaacggaagattgctacatcaattgaggctctctgtcgcggatacccttgtgagtttcaatcctacttccattactgccgttcactacgttttgaagatttgccagactatcaatacctgaagagattgttcagagaccttttcattcgagagggatttcagtttgattacgtttttgactggaccattcttaagtaccagcagtcacagataccagtgttccaccacgtgc

SEQ ID NO: 409499 - DNA, 456 bp, Oryza sativa
ggggttcgggcgggcgcgccgccgtgtggggggtagccatgtcgcagacgaactgggaggcggataagatgctggatgtctacatatatgactattttatgaagagaaatctgcaggcaactgcaaaggccttccaagcagaagggaaggtctcttcggatccagttgcgattgatgctcctggtggttttctttttgagtggtggtcagttttttgggatattttcatagcaaggacaaatgagaagcattcagatgttgcggcttcatatattgaaactcagcacatgaaagccagggagcaacaacagcagcagcagcagcaacctcctcaacagcgacaacagcaaccacagcatatacaaatgcaacaaatgttgctacaaagagcagcacagcagcagcagcagcagcagcaacagcagcagcagcaacagcagcaacagcagcagcagc

SEQ ID NO: 409500 - DNA, 326 bp, Oryza sativa
tttttctagtaactataaaaccctgtgagtagttttttgttaggagtgcgcactgtgggtcgcccttaggatgacaaatgtgccatgttctgctgcaggcactgggtgttggcctgttgccaatggagacgcgtaggaggtgggtccattcttggtgcaaaaaggcatgtccgtgctacattgctgcaggtactactggaactgcggggccagtctgatgttcctggagtcccctgtgggtgtgggattctgatgcactaacacatactcaggtctgcattggtttgcgtacaagatcaccgctgatgatgaagacatcttgctgc

SEQ ID NO: 409501 - DNA, 401 bp, Oryza sativa
ttttgttaccccgacaccgagcgagagagagagatcgtaccgatcgatgtacggcacgagacgaccatggcgcgtcctcggttcgtcaccacggcgctattgttggcgctggacgtcctcgccgtcgtggtgctcgtggttgtcgcaacaagtcccgtcggcttggacccgggaagatttcaaggaaccgggcgcgattactagggcccctgtcgtgccggctggctgaccaacggctccaaaagcatcccaggggcgacggtgtaggtggagtgcatgcactacggggcggggagggagagcctgaacgcggaagcgactacggactagatggggtggttcaaggtggagatcgaccaggaccaccaggaggagatctgctaggtggagcccggcaagag

SEQ ID NO: 409502 - DNA, 246 bp, Oryza sativa
tttccgatgagcttcaccatctaaagaggcggtggaaaataagaaacccactctttcgcttttaacatgttgagtgaagatgtcttaccctatcatgcgacgagagatgtactggatgaagctgatgacgaccgactacaaggtggagatggtgaacgatgggatgcaggagttcttcgtggccttccgggggcctactgaaaggatttattaagggggggtctggaaggcttgagtggcattgcc

SEQ ID NO: 409503 - DNA, 266 bp, Oryza sativa
tttctttccactccacacccaggcacccagggcgagtgcgacttgacaaacacatggctcccaccgtggagtctgtagaggtggaggaggagcatcaggcagtggggctgggggaccgcgacttcttcggtcatctctctcctttcgccatttcccggaagagcactggagatgaccatgtggcgataaagattctgggtcgtggaaactgtcactctggcctgcactgcaataagaatgattggaagcactgcatttacccactt

SEQ ID NO: 409504 - DNA, 447 bp, Oryza sativa
ttgggaatcacctcacctagctagcttgcgagtgacacgtcacccacacgcacgcacgcacgtacggcgcggacatggcgaagctcgcgctcggccaccaccgcgaggccaccgaccccggctgcctccgcgccgtcgtcgccgagctcctcctcaccttcctcttcgtcttctccggcgtcggctccgccatggccgccgccaagctgggcggcggcggcgacacgataatggggctgacggcggtggcggcggcgcacgcgctggtggtcgccgtcatggtctccgcggggctgcacgtctccggcggccacatcaactcggccgtcacgctcggcctcgccgccggcggccacatcaccctcttccgctccgcgctctacgccgtcgcccagctgctcggctcctccctcgcctgcctcctcctcgccgacctaccggcggaga

SEQ ID NO: 409505 - DNA, 438 bp, Oryza sativa
ttggtatatatacacgcagaggctgaaaggcgccaatgtcaatgatcagataatattaaacaaggtattactggtatcaactagagacaaggcttacattggcatgccagtggtgaccaatgctgctgttcatgcagtggttgaggaacagggacgggatgataaagtgatagtcttcaaatataagaagaagaagaagtaccagaggaaacttggtcacagacagccaaacacaaggttaagaattaccggcataagtggatacgaggacttccctgctgacccgatacttgagtatgttccagcttaagagcaattgtaagttctgtagttacaaacaactggtagtacattagaatacgagtgctaccttttcttgtctggaagaacagtttttgaacaaaatttgctttgttcatgtgttcgagtgctgccagt

SEQ ID NO: 409506 - DNA, 453 bp, Oryza sativa
tttcgagcgaaccctagccctagcgccgccgccgccgccgccatgaagttcaacatcgccaacccgaccaccgggtgccagaagaagctcgagatcgatgacgaccagaagctccgggcattttatgacaagaggatctcccaggaagtcagtggtgatgctcttggcgaagaattcaagggctatgtattcaagatcatgggaggctgtgacaagcaaggtttccccatgaagcagggtgtgcttacttctggacgtgtccgccttctcctccacaggggtaccccctgcttccgtggatatggcaggcgtgatggtgagcgcagaaggaagtcagtccgtggttgcattgtcagccaagatctctctgttatcaacttggtgattgtaaagaagggtgataatgaccttcctggcttgactgacactgagaagcccaggatgaggggaccc

SEQ ID NO: 409507 - DNA, 419 bp, Oryza sativa
atggacctatgatgcaatgtgccatgatctacttgaaatggatggccaaaaatacatatatgaggtgtcgaaagcgggatcagaacctgagagaaaggaggctttattggaggatcatgatcctctctgggttgagcttcgccacattcacatagctgatgctagtgagaggttgtatgataagatgaataactttgtttcaaagaataaagcagctcaacttcattcaagagatggtggtgaaatttctacaaaggatctgcagaagatcgttcaagctttgccacaatacggtgaacaagttgagaaattgaccctccatatagagattgctggaaaaatcaacaagtttatcagagagtatggtctccgtgacattgggcaggtggagcaggatctagtttttggagatgcaacag

SEQ ID NO: 409508 - DNA, 458 bp, Oryza sativa
atctggaacatcatcaaccggtgttcaccatcgtggtatacttgagggctggtttggagctcatctctggaattcacgtgccattgttcttcttgcgacgactcttttcgtgtttgctccattggtgagctttaagcgtctggattcattgagatacacctctgccctatcggttgctcttgctgtggtttttgtcgtcattactgctggaattgctatcatcaaactcttcaatggaactgtagcgatgcccaaactttttccagaactagatggtcttagttccatctggaagctcttcacagctgtccctgttcttgtcactgcctacatctgccattacaatgttcacagcattgacaatgagcttgaagacagaacacaaattaaacctattgtgcgaacatccctgttcctctgctccagtgtttacattgctacaagtttctttgcatatc

SEQ ID NO: 409509 - DNA, 450 bp, Oryza sativa
ttcctttctgagcatagggtcaagcgggagtgtgaagctaatgggcctattaaaagggtacggtttgtgaccgacaaggaaacaaataaacctagaggatatgcattcatcgagtatatgcacacccgggacatgaaaaatgcttacaagcaagcagatgggagaaaagtggacaataggagggtgctagttgatgtggagcgtggtagaactgttccaaattggcgtcccaggagattgggtggtggacttggatcaagcagaattggtggtgaaaatgctgaacagaagctctccactagggatcagcagcacgctggacgcccaagatcggaggagcctaggagagatgagcgtcgtgcagatagggaccgcgagaagtttcgtgaaaggccacgggaaagagatcgtgatgagagaactcgtgaacgaacccatgacccgactcgc

SEQ ID NO: 409510 - DNA, 451 bp, Oryza sativa
  unsure (1)..(451): unsure at all n locations
gtcgcgctcttcgtcgtcaccatgtacatcaacgactgccccgcgcatatgcaggccaccggcgacgcgatcggcggtgacgtcggggagggcgccgcctcgcaggggtgctggctggagccggagctcgggaggttcgcgttccagtcgtacaaggagaatcccctcatcgggccctcctccgcaacgctgttgaaaatgggggcactagaaaccagtaaagttaccaatgaccatgaaggctggcgcctcattacatgcatttggttgcacgctggtgttgtccacatacttgctaatatgttgagtctcctattgattggaatcagacttgagaaggaatttggtttcatgaggattggcacactatatgtcatcttggngttggtggtagcttgctgtctgctctgttatggtgtcaaatatcttgatggtgcctcaggtgcactgt

SEQ ID NO: 409511 - DNA, 455 bp, Oryza sativa
tgctaatccccctcctcttcctcgtcgccggcgagagctcttcgtcttctccaactcgaccggaagcaagcgcgcttccgatccgccatggtgctctcccacggcgtgtcgggctccgatgagtccgtccactccacgttcgcctcccgctacgtccgcacctccctccccaggttccggatgccggagcagtcgatccccaaggaggcggcgtaccagatcatcaacgacgagctgatgctggacggcaacccgcggctgaacctcgcgtcgttcgtcaccacgtggatggagcccgagtgcgacaagctcatccaggcctccgtcaacaagaactacgtcgacatggacgagtaccccgtcaccaccgaactccagaccgatgtgtgaacatgattgcacacctcttcaatgctcctctaggggactctgaaacggccgtcggagtcggcact

SEQ ID NO: 409512 - DNA, 371 bp, Oryza sativa
gctcgctcatcgccatctctctcagctctcacagctcactgcatcaatggccgcggccaccatggcgctctcctccccggtgatggcccgcgcggcgccgtcgacctcctccgcgctcttcggcgaggcgcggatcaccatgcgcaagaccgccgcgaagcccaagccggcggcgtcgtcggggagcccgtggtacggcgccgaccgcgtactctacctcggcccgctctccggcgagccgccgagctacctcaccggcgagttcccgggcgactacgggtgggacaccgcggggctctccgccgacccggagacgttcgccaagaaccgggagctggagggtgatccactcccggtgggcgatgctgggc

SEQ ID NO: 409513 - DNA, 406 bp, Oryza sativa
gcaccaaccccgtctccttcctccattcctccgccgctagaaccttctagaagctctcctcctcctcccatggcggcgacgatcgtgtccgtcaaggcgcgccagatcttcgacagcaggggcaaccccaccgtcgaggtcgatgtgtgctgctcagatggaacctttgcaagggctgcagttcccagtggtgcatcaactggtgtctatgaagctctcgaattgagggacggtggatctgattacttgggaaagggtgtttccaaggctgtcgacaatgtgaactcggttattgccccagctctgattggcaaggaccctacgtcacaggctgagcttgataacttcatggttcagcagcttgatggaaccaaaaatgagtgggggtggtgcaagcagaagcttg

SEQ ID NO: 409514 - DNA, 366 bp, Oryza sativa
tgttacagacgcccacatcacacgcggaaagccgcattaacagccagccatggcgtccacgctgaccaacgtcggcctgtctaccccggcggtggaggtgtcgaccctcgttaggccggtcaccggagctggacgcgtggtggttccccgtgttggccgcggcggtttcgcggtggtgagggcaagcgggccggcgacgccgtcggacatctcggacaagatgagggagagcatcgacaaggcgatggaagcgtgcgcggacgacaccgggagcggcgagcgcgcggcggagcgtgacgaggtggaggagctgagcgctgcggcaagccatgcttgtgacaagctcatggagacctacgacccgtt

SEQ ID NO: 409515 - DNA, 336 bp, Oryza sativa
tcctgttcaaaccccacaagcgaatcctagggtttctcgcctggccggcgcatcgccgccgggaagtctacgccgtcgtcgtgatgttggagctgaggcttgtgcaggggagcctgctgaagaaggtgctggaggcgatccgggagctggtgacggacgccaacttcgactgctcggggacggggttctcgctgcaggccatggattccagccacgtggccctcgtcgcgctgctcctccgctccgaggggttcgagcacctacccctgcaaccgcaacctcttcatgggggtgaaccttaacaacatggccaagatgcttcgctgcgcgggcaac

SEQ ID NO: 409516 - DNA, 438 bp, Oryza sativa
ctccccttccctcctccttcctaccccgccgccggtgcttgtcgccgccgccgccgtcagagagggcgaggagggcggctcgaggaggagcagcagcagcagcagcaggaggaggatggggttcatctcgttcgtcgggagggtgctcttcgcctccatcttcctcctctccgcctaccaagagtttagtgaatttgggactgatggtggaccagcagcaaaggccttgaagccaaaattcaatctatttacgcagcaagtgtccaagagcttaggaatggcagtgccacatattgatataaagactgtcattgctgctaccatgtttcttaaaggctttggtggtcttctgttcatcatcagcagctcatttggagcattcctactgctcctgtacttagcagttatacacctgttgtgtacgacttctccactatg

SEQ ID NO: 409517 - DNA, 412 bp, Oryza sativa
  unsure (1)..(412): unsure at all n locations
tttatgggcttcaatggaggatttctacgagacgagaatcgatggtgttgatggagagaccattggattatttggcgtattcgacggccatggcggagctcgagcggctgaatatgtcaagcagcaccttttcagcaatttaattaagcatccaaagttcatcagtgatatcaagtccgctatcgctgaaacgtacaaccatacagattcagaatttctgaaagccgaaagtagtcacactagggatgctggctcaactgcctcaacagctattcttgtaggcgatcgcttgctggttgctaatgttggagattctagagcagctgttttgagaggcggngatgcaattgcagtttcaagggatcacatacccgaccagtcagatgagagacaaagattgaggaccgctggg

SEQ ID NO: 409518 - DNA, 461 bp, Oryza sativa
  unsure (1)..(461): unsure at all n locations
tttggtcgcgtgggcggacgcgtgggcgactaccggagggccatctacggcgacatcacccacaaggccatcctcgtcgacgccgccgggacgctcctcgcccccaccgagcccatggcgcaggtatacagaacaattggcgaaaagtatggagtcaactactcagaggatgagatcttgatgagatacaggagggcttatgcgcagccatggggtagatcgcggctgaggtatgtggatgatggtaggcccttctggcagcatatagttagcgcttctactggatgctcagatttacagtactttgaggaactttatcagtactatacaactgcaaaggcttggcagctctgcgaccctgacgctaaatatgtttntgaagcattgagaaaggctggtgtaaaaacagctgttgtatccaactttgacacacgtcttcggccacttttacaggccctgaa

SEQ ID NO: 409519 - DNA, 394 bp, Oryza sativa
  unsure (1)..(394): unsure at all n locations
cagacaccagcaggggtaacgtaaattgagcgctcaaagtctcaaatgcaaatgcagtcatacagatatatactacactgccatcggttattctctggaaaaatatgtacatcagtggagcaacaagggttgccgctatgtacaaaaatgcaacacctcccggccttcttatttcaggtgacccagcggacgaacgactccttacaccttaactccgatcctttctgcgacctccttgaaagagtaaacatcactgccccagagccaggcatcacagcctgcatccctggctccccagagatcattcctgcggncatcaccaatatgcacagcttcttcaggcttcacacctaaaaactcgcaagccttcaagaatattgttgggtttggcttt

SEQ ID NO: 409520 - DNA, 253 bp, Oryza sativa
tctaactgattaaagacaaccaacacaaacggggtgggaaccttaagcaggcgccggctttccccgagagttggagacaggttctcgtcgatcttcgacctctgcagtttactgtgatcctcctgtgcacccttaaactgaggcctactggggaaatgttttcccaattggagtcaggagaggatcttaccagggtaagagtgtcgcataaacactgatttttgatgcatgacaggtttcatggaattgccat

SEQ ID NO: 409521 - DNA, 450 bp, Oryza sativa
gcatgattaagatcggaatcaacggtttcggaaggatcgggaggctcgtggccagggtggccctccagagcgaggatgtcgagctcgtcgccgtcaacgaccccttcatcaccaccgactacatgacctacatgttcaagtacgataccgtgcacggccaatggaagcacagcgacatcaagatcaaggactccaagactctgctcttgggcgagaagccggtcaccgttttcggcatcaggaaccctgacgagattccgtgggctgaggctggtgctgagtatgtcgtggagtccaccggtgtcttcactgacaaggagaaggctgctgctcacttgaagggtggtgccagaaggttgtcatctctgccccgagcaaagatgctccgatgtttgctgcggtgtcaacgaggacaagtacacttcagatattgatattgtctcacatgct

SEQ ID NO: 409522 - DNA, 449 bp, Oryza sativa
gtttctgcaaactgaagttagcaaggctcgcatccagctcatgcaaccaattattaaaggctctgccggagtggaatacctgcagaaggctttcacggatcgctatggacctcctgctaatgcatcagtgtctctccctataactaagcagtgggtttcggcaacgaagagcatcgtggaacaagagtggagctcacatttggagtctctccaagctttgccagcagatcatgctcagcacgttgttccggtacttcgagctggtcacggtgctccagcgccgcaggcttcttcgtctgcagctagcagatctggtctcccagaatgcaagggtgagaagatcgacaagctgacaagggttggcttgttgcaacttatcagcaatgtggagggcctgaacatgcagtcaacccctgagaccttccaaataatctgctgaggctgagggc

SEQ ID NO: 409523 - DNA, 342 bp, Oryza sativa
tttgcttgacagagtaccatgggaggaagaacttccccttctcagagacatatgtcccatgatccgcgaagaacggatacttctcgacagtgtcattggactctccagcatcttcggacactggccatttgtgatgcccaacgcttgatgcttctgctttgaaatctgcctccatgtagatatcataaagctgttgactattcttctattgtgataacggcgggagcagcgaattactaccatgtgccatgcgtactgccccatggcatatctgatgaccatatttagaacatgctctcctccacctaggttgtcaaatccaagtaagaggcttgcttctac

SEQ ID NO: 409524 - DNA, 417 bp, Oryza sativa
tctggctccctactacattgacggcttgccggactgtttttacaccaggctcttccccgaccgctacgtgcacctcttccactcctactactgactcatgtggcgctccaaggtgcctgacatgctaactagcggtgaggaggtgaacgcgggcaacatgtacatctgggagaccacgccgacctcggtggtcaagctgtaccacaggcagttccaggaggacttctcgcagatcctggcgctacgccacgacgagctcgtatccggcggccagatggtgctgacgttcctgggcaggaagaacagggacgtgctccgtggcgaagtgagctacatgtatgggcttcctgcccaagcgtcccagaccctagtccaagagggacgcgtggaggaggagaagctggacaggttcaacct

SEQ ID NO: 409525 - DNA, 379 bp, Oryza sativa
tttccacgcgtccgaaatgcccctcgcgccatgcccctcgccgcccctcccctcctccccgtggccggcgcgcgccccgcgccggggcggcctcctccgcgcccgcgcggtgcgggcggcgccccggccgccgagcaagtggtcgctgggtagctggcgcagcctgacggcgctgcagcagacggagtaccccgacaaggcggagctggatgaggtgctccggacggtggaggcgttaccgccgattgtcttcgccggcgaggcgcgcaagctggaggagcggctcgcggaggccgccgtcgggcgcgcgttcctcctccagggcggcgactgcgccgagagcttcaaggagtttaacgcgaacaacatccgggacacc

SEQ ID NO: 409526 - DNA, 450 bp, Oryza sativa
gcctcctcggccacctccgtggctccattccaagggctcaagtccaccgccggcctccccgtcagccgccgctccaccaactcgggcttcggcaacgtcagcaatggcggaaggatcaagtgcatgcaggtgtggccaattgagggcatcaagaagttcgagaccctatcgtacctgccaccactcaccgtggaggatcttttgaagcagatcgagtacctgcttcgatccaagtgggtgccttgtctcgagttcagcaaggttgggttcgtctaccgtgagaaccacaggtctcccggatactacgatggcaggtattggaccatgtggaagctgcccatgttcggctgcaccgatgccacccaggtgctcaaggagctcgaggaggccaagaaggcctaccccgatgcctttgtccgtatcatcggcttcgacatcgtcaggcaggtg

SEQ ID NO: 409527 - DNA, 421 bp, Oryza sativa
ttgtcatatctcctcccgtcctttcgaagcctctcgaatcgcatcgccgagccggatggcggtcaccgccgacgtgaagctcgagggcctccgcgccgccaccgacaagctcgaccagatcagcgagaacgagaagtccgggttcatcagcctcgtttcgcgctacctcagcggcgaggcggagcagatcgagtggagtaagatccagaccccgaccgacgaggtggtggttccctacgacacgctctcggctgctcccgaagatctcaacgagacgaagaagctgctcgacaaactcgtcgtgctcaagctcaatggaggcctcgggacgaccatgggctgcactggtcccaagtctgtcattgaagtccgcaatggctttacgtttctagaccttattgtgattcaaattgagtccctg

SEQ ID NO: 409528 - DNA, 378 bp, Oryza sativa
tttattcgctatgctcacaatggctggagctcggttgtctctcgtgttcctgtgctttgtggtggaggtggtgatctacgaactagtccgcggtgccagtgcaaggaagactgtctctgagtacgtgctcaggaagggggacttcttcgtgaacatcaccaactggggagcagccatgatgacggacgtactccctgatttcaaagggaatttggctgatgatgtacttggcctatacaccattgctgactacgtgaacgacaataatgactttggaccgattaccggtcgcatagtacacaggatagacagggggggttttgatctacacgggaaggcgtatctacacgtacatcaacgtccgatggaaccagattc

SEQ ID NO: 409529 - DNA, 383 bp, Oryza sativa
ttgtttgaaagggtggctcaaatgagtgcgattacttaatggaagagactggtgccacccgtaacatttctgataatggtgagcctgtcagtaaaaggaaagcaacatagttaaagtcattggggaataaggcggtcgagaaaaaggattatctttctgcaacaggattctacagtaaggcactggacctttaccctgatgatgcaaccttgttgtcaaatagaagcctttgctggcatcacatgggtaatggaggcaaggctttgttggatgcttatgaatgcaggaaattgcggcctgactggccaaaggcctactaccgacagggtgctgatctgatgctactgaaggactaccagagtgcttgcgaaacactttacgat

SEQ ID NO: 409530 - DNA, 406 bp, Oryza sativa
cttaatgatatagagtttatggaaactatgtgtagtgtcttgggttgggactggccttatgccatcccaatgcagcattgcacccacaccaccccaaacggcagttatagacgcgaaacaccgtgatgttcaacagtcaccaccccggttagctactttgcttcacttacaaaaaggacacccattatggttctgggtatcgaagtctctgggcaaaatgtgagaacacctgtggactcagggaaccaaaggctcttggacaaaaagtgaggcgccttggacaaaacgtgtaggagaggaccagagcgccttgcccaccttgcgaacacccatgctgttcacctagcctctgtgcttgcagatgccttcaaggacgccagagcttcccgtaatgcatcctccatct

SEQ ID NO: 409531 - DNA, 438 bp, Oryza sativa
tgtgcgacagctttgatgcttgtacatattatccctgacttgctgagcgtgaaaacaagggaattgtttctgaagaataaagctgaacagcttgatagggagatgggcttgattaggacacaggaagagactgggaggcatgttaggatgcttacccatgaaatcagaagcactcttgatagacatacgattttgaagactacacttgttgagctaggagggaccttgggcctggaagaatgtgccctatggatgccatcaagaagcggttcaagtcttcagctttctcatactctccgccaccagattactgttgggtcaactgtatcaattaatcttcctgttgtcaatcaagtgttcagtagcaacagagcaattataataccccacacatctgctttggcacggatccgacctcttgcaaggagatatgttcca

SEQ ID NO: 409532 - DNA, 361 bp, Oryza sativa
agagttgtacccaggtgcatagctgcattatgcagtcccatctgctgtacattatttgtacaaatatattccagctatcacaaggctaggcacaaaattagagacaaactaaccaggccctacttgatacaatgccgtcgatcaatttacagtagctcatatacttctctgataccgagatttcagagaagcctgacctttctcttcattaggagcatttggcaccggaccaacaaaatcagcatccccactgctcggccagactagaggaatcagcttctgctgatatgcattcgtattatcgcatatgccaagctggatgacaaacgttactgtgcagcctcttcctgttccttcgcta

SEQ ID NO: 409533 - DNA, 403 bp, Oryza sativa
tcgggctcacccagatggagagtatgcaactgcgcgtgctgcatcagcagcgggcactataatgacattgtcatcatgggctacttcaagcgttgaggaggttgcctcaactggaccagggattcgtttcttccagctttatgtttacaaagacaggagggtggtggagcagcttgttaggagagctgacagggctggattcaaggcgattgcgcttacggtggatactccgcgacttggccgtagggaggctgacatcaagaacaggtttgttctgccaccatttttgacactgaagaactttgaaggcctggagctggggaaaatggaccaggctagcgattcaggactggcttcttacgtcggcgggcaaatcgatcgcaccctgagctggaaggatgtg

SEQ ID NO: 409534 - DNA, 426 bp, Oryza sativa
  unsure (1)..(426): unsure at all n locations
tctggctcggctcgctcactcggtcagctgcacacacactgcacttcggctcactctctccactgttcttcttcctcggcgaggggggaaggaggaggcgagagctcgaggcggctaggaggaggagatggagggagattcggcgaggaggctcgcattgctggggctgtgcctgggcctgcttctgctggcgccctcccatctggcctcggccgctgcggtggaggatggcttgctcagcaatggtgactttgagacagcaccagctggtggttttgtcaaatctgcttcagttgctgaaggtgcatcatcgatccctggctggacgatcaatgggacagtcgagctcatctcagcaggccagcaccagggtggcatgattcttattgttccacagngggatcatgctgtacgtcttggaaacga

SEQ ID NO: 409535 - DNA, 510 bp, Oryza sativa
tttcttcttgctgatcatcatatatctcttgtgagcttcagcaatgggggctctgccaagggctctagtcctcggcgtttgcgccgccgtcttgctggtgaacgtgctcgccgttgccgccgacggcgacgccgcggcggcggcgtccatggtcgtcggattggccaagtgcgccgactgcaccaggaagaacatgaaagctgaggccgttttcaagggtgttcgcgtggcgatcaagtgcaagaacagcaatggcgagtacgagacgaaggccaccggcgaggtcggcaagtctggcgcgttcgccgtgcccctcgcggcggacctcctcggcgacgacagcgagctgaggcagcaatgcttcgcgcagctgcacagcgcggcgtcgaaccagccatgccccgggcaggagccgtcgtggatcgtcaacgccgccgccgacaagaagaagaccttcgtcgccgtcgccggcgacacccactttccgtcgtcggagtgcgcgttggcgtt

SEQ ID NO: 409536 - DNA, 435 bp, Oryza sativa
tgtttaagcaacacacgggattaactcatcactcacttagctaattaaatcttcgaccatgtcggacaagtgcggcaactgcgactgtgctgacaagagccagtgcgtgaagaaaggtaccagctatggcgtcgtcatagttgaagccgagaagagccacttctaggaggtcgccgccggcgaggagaacggcggctgcaagtgcggcaccagctgctcctgcaccgactgcaagtgcggcaagtgaagtcacgaagcaaccgaacactcgccgtcggcgagtcacctaccttaattagttcacaataaaaaccacccatatcagtgtggtttgtgtgtgtgctgattattgctgaattaaacccgtgtgatatcgattaattaaacagttggtcgcttcgcgactatgcgtgtatcaacctatgaatttgtgtg

SEQ ID NO: 409537 - DNA, 472 bp, Oryza sativa
ttttagttcgtcatacttgccagcgatggactatggaaggtaatgaagaaccaggaagccgtcgatcttgtgaagtcgatcaaggacccccaggcagcagcgaagcgactgacgaccgaagcgcttgcgaggaagagcaaggacgacatctcctgcatcgtcatccgattccgctgctgaacacccgcttcgcaacattgtctctgcgtttctcttcgttccgattgaatttgtgtggcggtgctgaaaaaagatggtttacctatagtatgtagctgttgtgaacagaccctagagatgagatatgttagcaaggacaaaactggagatgttcaaacttgtgggttcagtagcgagtagtgagtgtgtgcagggtggtgggcgcgcaggtgaattcgtctgtgcatacatacaccagcgtaaactgctgatcaatcgaacgggcgtgcaggttgttgccgttgggtaaaaa

SEQ ID NO: 409538 - DNA, 277 bp, Oryza sativa
tatagtggaagctggtgcgccggctggcaccgccccgccggaatcggcgggaccgaccacgccgtcgttgagctacaacaagcagagctgcaggtgagtgcaaacaaacaagaactggctaccgccacgaacgctgctgagatcacccacacgctagggctgcactcctagaccccgtcggcactggtacatccagagcacatgtgcgacctgagccgaggggtcgcatgaggggctagacatggctaaccaacaccattgccaacacggctggaag

SEQ ID NO: 409539 - DNA, 509 bp, Oryza sativa
tctgagcttgggaagctctctaatatatatacgttgttcttgggtaacaataacctttctggggaagtcccgaaagccctgtataatttgtcttctcttcagtacctaggtttggagattaataatctgggtggtacagtgccacataatattggcgatatcctccctaatctcaacttgcttggtctgaatcgaaacaagtttcagggtcagatccctatttccctaggagacatctccgggttggaaagaatagaattagggaacaacaatttctctggacaaattccttaacaagaataaacatgagaggtgaaaggggatcaccttgtcttaaagctctgaaatactttatttcctctcctggtgaaccattgaggagaatctttgaagaggaggaggaaagcaaatttgacacccaattacgccatcttgatccgaaacccaaagattgtaggactttcaacaggtaaggccagcttacagagtcaaatgcttttgaaatgtcg

SEQ ID NO: 409540 - DNA, 541 bp, Oryza sativa
tcttcagcacataatcccattctataagacatttaatggcaagaaatgggagaaattcaatagtgaaaaggtggcgtcgctcgcatacgcccggattcaaggaaggagtgctttgattgctcattttcagaattctagcctgatgaatgaagacaaatggtgtcgacctatgcttttccacaaagatggtccaaatgcaggagatcaggagccttttcctgtggggaacaatgtccggtctagggctgggagaaataggtcgctcatcagcttggacactaaagatgcaagtccatcaagctccccagaccaagaaagcaattctgtcggcaccgcgaactcaacttgccgtacgaccttggagcaaacctaatcactaactggagggcacaagaagctgtaatgataaactagggaattcccaagtttgctaagtatttatttgactatcagggagccaaagtttgtgacctgtgagtgtaatgatgaatgaaaggctctgccaggccaggcatcacctccactaaaattatgagaggga

SEQ ID NO: 409541 - DNA, 524 bp, Oryza sativa
ctacaactgacagatttgttgttattacttctggacctgatgaaagatgcatccctggaaacacaattgccgtgcaagcagacatgccatatagtggcttgtcatcttttgggacagcatttctatcaaagtttgaatgttctcagatgcctcatccactactggatcatataacctttgtggacactcctggagttttatcaggggaaaagcagcgaaaacagcgtagctatgacttcactggagttacatcatggtttgcagccaagtgtgacctaattcttctcctatttgatccacataagcttgacatcagtgatgagttcaagcgtgtaattgggtcactcaaagggcatgatgataaaatacgtatagttctgaacaaagcagaccaagttgatgcacaacaactcatgagagtctatggagcactgctatggtcgcttgggaaagttctgaacacaccagaagtcatgcgtgtgtcataggttcatttaacgacagcccattaggagacagtagct

SEQ ID NO: 409542 - DNA, 526 bp, Oryza sativa
tcggggtgatcgagggcgtcttcgagcgccgcgccgaggtggccgacccgcccgtcgccaacgtcgaccgcctcgtcctcctcttcgccctcgaccagccccagcccgagcccgctacgctcaccaggttcctcgtcgacgccgagtccaccgggatacctttcgtgctcgtcttcaacaaggtcgagcttgtggacgacaagaccatatcatactggagagataggatgaagagttggggatacgatccactatttttaagtgttgatcagaaatcaggattatccgctcttgaagaaacattggaaggacagacaactgtaattgttggtccaagcggtgttggaaagtccagtctgatcaatgctttgagaagcaaccagaacatctcagaagaagatcccatacataaactagttgagcagaatagtaaatgggtttggtgaacaacgggtcggtacccggtcgaagaaaagcggcataggaaagcacacaacacgtcatgtttcattgcttcctatagctg

SEQ ID NO: 409543 - DNA, 535 bp, Oryza sativa
tctgtcccgtgcacggagagcccatgaggctaagcagaagggacgtcactctggctatggtaagcgtaggggtacaagggaggctaggctccccaccaagatcctgtggatgaggaggatgcgtgtgctcaggcgtttgctgcgcaagtatcgtgaggccaagaagattgacaagcacatgtatcatgacatgtacatgaaggtcaagggtaacatgttcaagaacaagcgtgttcttatggaaagtatccacaagtctaaggctgagaaggcaagagagaagacactctctgaccagtttgaggctaagcgtgccaagagcaaggcaagccgtgagaggaagattgctaggagggaggagaggttggctcagggcccaagagagccagcagctcctgcagcggcagctcctgctcaaactgcagcggcacctaagaaggcaaagaagtgaacacctggcttgaagtgtggtcgtcttagtgaaaccagtggaggtgttagcttgatttgaaatacgacccgtttggcctagtat

SEQ ID NO: 409544 - DNA, 537 bp, Oryza sativa
tctttggaacgcgtacttacccacaagttaggtgcatgccatggcaccattcatggcgtgcgcctcgccaccggtactcacgctggccctgctcgcgtcgtgcggtgcccttctcgccacctccatgctcccggcgcgtgcgacggcgggcagctgcttggacgtcggcgacatggtgatgatggacaggttccgcgcttggcagggagctcacaaccgatcgtacccgagcgcagaagaggcgctgcagcggttcgatgtgtaccgccgcaacgcggagttcatcgacgccgtcaacctgcgcggcgacctcacttaccagctcgccgagaacgagttcgcagacctcaccgaggaggagttcctggccacgtacaccgggtactacgccggcgatggccccgtggacgactccgttatcacgacgggtgccggagacgtcgacgccagcttctcctaccgcgtggacgttccggccagtgtcgactggagggcccaaggcgccgttgtgcctcccagtcccaaacgtaacatgca

SEQ ID NO: 409545 - DNA, 348 bp, Oryza sativa
attaaccctaatccacaccctctcaagcggggcatgtataagcgcgacggcgtttgtcgcccccagcgcggcgggttcggccgcggcttcgggcgcagcggacgcggcgaccgctgagggcagccgggcggacgccgcggcccgcgccaggaggaggagaagagggtgcccgaaaccaagctcggccgccttcggaaggaaggccaggatttcaagatcgaggagatctacctgcactccctccccgtcaaggagcaccagatcgtggagaccctcgtgccggggcttaaggacgaggtgatgaagatcacacccgcgcagaagcagacgcccgccgggcagcgcacc

SEQ ID NO: 409546 - DNA, 398 bp, Oryza sativa
aatgattgcctttgctattcgcaattgcaacgggtgttttcaatgcaatcaccgtgatttcgctcagattcaaaaatttttcttcaaactcccaacttttctatcacatcaaatgtttgggcacatgcatagagcattaaatgtgaacgaaaaaaaacaattgcacagtttttatgtaaatcgcgagacgaatcttttgagcctaattacgccatgatttgataatgtgatgctacagtaaacatttgctaatgacgaattaattaggcttaataaattcgtctctcagtttacaggcggaatctgcaatttgttctgttattagttcacgtttgatacttcaaatgtgtgttcgtatacttaaaaaaaattggcacgcgaactaaataatactcatc

SEQ ID NO: 409547 - DNA, 167 bp, Oryza sativa
ttttgctcgaacgaaacgcgagggtttcgcatgtgcgtctacgcctagaggaaggagggatcccccgcccgtagcccagccatgccgaagaacaagggtaagggagggaagaacccccagaaggtgtagaaccaggcccaacactacaagcccgagctggtgttcaa

SEQ ID NO: 409548 - DNA, 426 bp, Oryza sativa
ttatcaactcatagcatcccgcgactactggggtgactttttggcatggtcttgggaacagccgcgcccaagaagatgattacgaagattacgtgaatgtgcacgatctgaatatgatcatccatgtttacggacttgcgagccacgtgctatttatgaaaggctgaaggatgctgcttccccagatctaatggtgggttatttagaacaatttcttggtggggatgaaaaaaggcctgacctcccccctcgccttgatgaagggctgccactgtgcttaatatttggaggcgatggaagacacatggctgccttttcacctgacaatgacagtgcgggcaccagtctcactagtgagggcgtgccctgatcaatatgggaccgccttgttgctgtagagaacgcccaactgcgttaggcttggcg

SEQ ID NO: 409549 - DNA, 310 bp, Oryza sativa
tgtaacccggcggcgccaataagctgtacgaggccaaggtgtgggagagggcgtgggagaacttcaagcagctccaggatttcaagcccctcgacgacgccaccgcctaaacgtacatagatcatcgtccggctgctgaatcatcggcttaaagcagagccatccagtgatccaattatctgctactagaacatgttactggtcttgctggaaggtgtaatatgatgaataaaacctgctgctttgccgggtcataatagacatatcacttctgtatttcctagtgcaatacacaacattttcgcagtct

SEQ ID NO: 409550 - DNA, 421 bp, Oryza sativa
catggagtcgctcatcagcaggaacaagctggtcagggcacagaccgagagggagatcctcggcctccttgatcatccgttcctccctacgttgtacacgcacttcgagaccgacaagttctactgcctcgtcatggagtattgctccggcggcaacctccattcgctccggcagaggcagctcaacaagcatttcaacgagcaagctgcaaggttctacgcatccgaggtgttgcttgcgctggagtacctgcacatgctaggcattgtgtacagggacctcaagcccgagaacgtccttgtccgggacgacggccacatcatgctcttcgacttcgacctgtcgctgcggtgctccgtgtgcccgatgctggtgaagtcgtcgtcggtgcacgcgggcgcccacggcgtcgtgaagggc

SEQ ID NO: 409551 - DNA, 474 bp, Oryza sativa
tttgttttcgatgcggcaataaaggtggtgctgcagccacccaaggcgaagaagaagataaaggcgcaaaatggagcacgcccccctttgtgatctaatcatcagtagacgacgaagaagaagaacgatgaagttgccaggctttattattgttgcgtcttgcttcagcgaaacagcattcatggtccggggatcctagtttactggcagctgcagcaaggcctctttgtcgaggcaatgagcgatccgtttgtttcattttctcctttctgccttgtgattatctcgtgtgactgacaagtcgtggcaattaggtaactttcctagatggtatttcctggtgttgagaaaaaaaattcttgttatccctggttcataagtagacatgatgtaatcgcacctcagttattcttttccttgttatttcactttaatggaaaattatggtttccctttaaaaaaaaaaacactttt

SEQ ID NO: 409552 - DNA, 464 bp, Oryza sativa
ttctccatccaatttttcaggtgattgtattctgtactactgcaatggtcaccaaacttgttgctgaagttctttcccagctgaaactgaatataagagagatccattcgagaaagtcgcaatcagcaagaactaaggtctcagatgaatttaggaaatcaaagggtctgatattagtgagttctgatgtatctgctcgtggtgttgattatcctgatgtcacccttgtcatacaggttgggctgccagctgatagagaacagtatatacatagacttggtagaactggacggaaaggcaaagatgggctaggtctcttactgttggctccctgggaaacatactttctgaataggcgtcaagatttgtctggatcacaagctggggtaccttacatttgattcgagcattcagacaggagtcaaagatgcactccggagagtggaggacaagagcaaggaatc

SEQ ID NO: 409553 - DNA, 328 bp, Oryza sativa
tttatcgcgttccaggacaccctgtacgtgcacgcccggcgccagttcttccgcaactgcgtcatctccggcaccatcgacttggtgttgggcaactccgccgccgtcttccagaactgcctcatcatcacccgccgccccatggacaaccagcagaactcggtgacggcgcacggccgcaccgaccccaacatgaagtccggcctcgtcatccagaactgccgcctcgtgcccgaccagaagcttttcccggacaggttcaagatccccttctacctcggccggccatggaaggagtactcccgcctcgtcatcatggagaggacca

SEQ ID NO: 409554 - DNA, 469 bp, Oryza sativa
tctacgtagtgggggtgtgcttgaggctattagaataagtcttgctggttatccaacaaggaggacatataccgaattcattgatcgctttggacttcttcttccagaacatatggatgaaaggtttgatgagaaatcgctgacagaaaaaatactaaggcaattacatcttgagaactttcaaaacaaaagtttttctcagggctggccagattgctgttttggactccaaacgtaccgagattctggaaaaggctgccaggatagttcagggtcgctttcgaacctttgttgcttgcaaggagtttcattctactaagaaagcttctgtttctctccaagcatattgccgagggtgtttggcacgaaatttgcttgatgctaagagacagatagtagcagctgtttcagtagaaaagtatgctcggagatggttctgtcggtgtgaatatttgcatcttcgttcttt

SEQ ID NO: 409555 - DNA, 437 bp, Oryza sativa
gtggttttgctcctaacattcaggaaaacaaggagggtcttgagctcttgaagactgcaattgaaaaggctggatacactggcaaggttgtcattggaatggatgttgctgcttcggaattctacaatgacaaggacaaaacctatgaccttaacttcaaggaggagaacaatgatggttcacaaaagatatctggtgatagcctgaagaatgtatacaagtcatttgtcagtgaataccccattgtctcgattgaggatccgtttgaccaggatgactgggaacactatgctaagatgaccgctgaaattggagagcaagtgcagattgtcggtgatgacctccttgtcaccaacccaaccagggtggcaaaggcaatccaggagaagtcatgcaatgctcttttgctgaaggttaaccaaattggatctgtcact

SEQ ID NO: 409556 - DNA, 369 bp, Oryza sativa
ttttgcctgaatcacgcaacaatggcttggagatgcagtccgtaaataacaaaggactcgttgaagaactagaaaagttgcttgatcgcttgcgaattccacaggagtttgcagcatcattaactgggggttcgtttgaagagtcacgaatgctgaaaaatgttgaggcatgtgaatggttgacaggggccattcgcagccttgaagtgccaaatctggatccatgctatgttaacatgcgagctgttagggaaaaaagagcagaactggagaaactgaagacaacttttgttcgacgcgcatcagaatttttgaggaactacttctctagcttggcggactccatgataagtgacaaaagctactttt

SEQ ID NO: 409557 - DNA, 367 bp, Oryza sativa
ttaaacccctctcactcccactaccatggatccttgcaagttccggccgtcgagctcgttcgacacgaagacgacgacgacgaacgcgggagctccggtgtggaacgacaacgaggcgctgacagtggggcccagggggccgatcctcctcgaggactaccacctgatcgagaaggtggcgcacttcgcccgggagcgcatcccggagcgcgtggtccacgcccgcggcgcctccgccaagggcttcttcgagtgcacccacgacgtcaccgacatcacctgcgccgacttgctccggtccccgggcgcccagacccccgtcatcgtccgcttctacaccgtcatccacgagcgcggcagcccggag

SEQ ID NO: 409558 - DNA, 403 bp, Oryza sativa
ttttcccgtcgacggcgacggcagcgtcggcagcgtcaggcagttcaacttcacctcagccatgccattcagccacatgaaggagaggctggagttcctggacgtggacaagtgcgagtgcaagtcgacgctggtggagggcggcggcatcggcaaggcgatcgagacggcgacgtcgcacatcaaggtggagccggcggcgaacggcgggagcgtcgtgaaggtggagtccacgtacaagctcctccccggagtggaggtgaaggacgagatcaccaaggctaaggagtccctcaccggcatcttcaagaaccgcgaggcctaccttatcgccaacccggacgcttacaactaaatcgttatcatgcctatgcccccaaaatatgtttgataatatttgaac

SEQ ID NO: 409559 - DNA, 486 bp, Oryza sativa
ttttgacgccgaggaggccggccatggcggcgccgcccaggcccataccctccatccaccggcaaccgcccaagccaaccaccacccacgtcgcccgctgcttccgcgacccgcccaaagcccccgacaccaacagcaacaccaacccgctcctctccctcctctccgccgtgcccgactgggccgacgccgtctccgagcgccgcatccgcgaccgccgcccgctctacacccacgccgactggcgggagcaccgcagctcccgccgccacctgcgccacctcctctcctccctcaccttccgcgtcatcctctccctcgcgccccccgtctccgccttcaccgccttcgccgtcggcattgtcacctacaacacccttcttcccgtctacgccctcaccgtcttcttccctccctaccaggttaccgcccccggccttgcccttctcctcgctttccgacccggggcttctacggccgtttgac

SEQ ID NO: 409560 - DNA, 362 bp, Oryza sativa
ttatggtgttagcaaagggtctggatttgttgcattttcaactcgtgaggaagcatctcaagctttaactgaaatgaatggcaaaatgatatctggaaagccattgtatgtcgcatttgcacaacgtaaagaagacaggaaggcgatgttgcaggcacaattttctcaggtgcgccctgtaccgatgacaccttccatggctccacgtcttcccatgtaccctcctatggctcctcttgggcagcaactcttctacggacaagctccacctgctatcatgcccccacagcctggatttggtttccagcaacagcttgttccaggcatgaggcctgggggtgcccatatgccaaattactttg

SEQ ID NO: 409561 - DNA, 426 bp, Oryza sativa
ttttaatcagcacggatgataagatccacgatgagcttgacactgatgtgctgggtcacggcgagcctgagagaaacgatctggttgagtactttggtgagcagctttgtggctttgcatttactgacaatggatgggtgcaatcctatggatcccggtgtgtcaagccaccaattatctatggtgatgtgagccggcccaacgccatgactgtgctctggtccaagatggcgcaaagcatgacctatggccccatgaagggaatgttgactgggaccgacacaatccttaactggtcttttggcaggaatgaccagccgaggtttgagacatgctaccagattgctgtcgccatcaagaatgaggacgaggacctttagggtggtgggtaccgggcatccaaatcgcttaggctgatttgagaga

SEQ ID NO: 409562 - DNA, 515 bp, Oryza sativa
gtgaacggcatactggagttcgcggctgagcaaacgcagctgtacgagtacctgtggcagcacgcgttcatatcggactcggcgcacgcgctcatcacgcagagctgcaagtaccccgacgaccacccgtcggcgctctgcgagtcggcgaggaaagcggcgtatagccggattggcaacatcgacatctacaacatatactcgtccacctgccacgaacagaaagtcaggccctcagcctccaagtgcatggatttggctgatccgtgctcccaatacttcgtggaggcgtacatgaaccagccccaggtacagaagacgatccatgcgaacacggagttgaagtatccctggactagatgcagggtttacaacctagaccacttcggcgactcgccaaagtcaatgctgccatacatcaaggcagtgataaccggccgcatccgcatctggatattcagcggcgacttggatgcgatggtgccggtgacggcgaccaggcagtcgatggagag

SEQ ID NO: 409563 - DNA, 404 bp, Oryza sativa
gtgcgccgccctttttttttttttttatcacgtggtccaaaacatactattccacacacacatatacatagattttttaagttctacatatataggaggcagagaagttccacacgaattttataggaatccccacatctaaaaacacacatcacagaattcctataaaattcctgcgttccaaaggaggccttgcggcacgtagccgagacgacaacgaactaacgctaattaaattactactatatatgtgtacgtcacaaatagtagttcatccatctcttcccttttaaatgcgatgcggtgcatcgatcaagcatctcgatatcgatctcgaacagaaagtagcagtagtagtactggcagtagtaattaattaggattcttgggggttagctagatag

SEQ ID NO: 409564 - DNA, 416 bp, Oryza sativa
ttgtgtttactcgtgaaatcacgtaaatatataatttctgaaggggcagaattcacgtctgttgatattctgtgatagtctccatgttttttcgttatccacttagtttacatacataacaacagatgcctaacactgttacaggagaacgttaaatgctctgtttcttcaacagtatcatgctggcacaccattcaactcttctgggatctctttgctcagcactggaaggtgccccttctcctggaggctcttcaccgtctcgtagagcgagtcgctcacaggtatgaagtggaggccaagatcctgcagcttcttgttggacatcttgtacggctgcttccgtgggttcacctcctcagagcaccttgtgggcacaggatactcggggaaaagcttgccaaggatgtggacga

SEQ ID NO: 409565 - DNA, 455 bp, Oryza sativa
atgaaagatatgaaagaactgctccaagagaaagtctatgtgatcaatgtcttaggttacatctcttacaactttgtcattggtgcctattcctactggggccctaaggctggtcaggatatctacaatatggcgagtgcagatataatgtttggtggaataacaattgtctgtggaatatttgggactctttcagggggtttcattcttgacaagatagactcaacaatatctaatgctttcaagcttctttctggtgcaacttttcttggagcaatattttgttttggtgccttttgtttcaagagcctttatggattcatacccttcttttcagtaggagagcttttggtctttgcaactcaggccccagtaaactatgtatgccttcattgggtaaaaccaagtttgcggccattatcaatggctatgtcaactgttgcaatccatatatt

SEQ ID NO: 409566 - DNA, 460 bp, Oryza sativa
ctagcaatggcgtcgcaatcactgctaccagtacaaagaaggctgatctgatttttggtgagatccaatcacagataaagaacaagaacatcactgtagatgtgaaagcaaactcagactcaaatgttgttactactgtaaccgttgatgagctaacaccaggattgaagtccatcttgagctttgctgttccggatcaaagatctggaaagtttgagcttcaatactcgcatgattatgctggtgttagtgcaagtattggtttgactgccagtcctgtagtcaatctctccagtgtttttggaaccaaggctcttgctgctggtgctgatgtctcacttgataccgccacggggaacttgaccaaatataatgctggattgagcttcagtaatgatgatcttatcgcgtcattgaacctgaacaacaagggagatagtctcactgcatcttattacca

SEQ ID NO: 409567 - DNA, 419 bp, Oryza sativa
ttacaacttcaacgcctactacgacccggagctgaagcgcgcgcggcagaggctcctcgccggccgcggcgtgctcgtgctcgacgccgacatcaacgacgcgctcctgctcgagaagctgttcgacctggtgccgttcacccacgtgctgcacctcgccgcgcaggccggcgtgcgctacgccatggaggcgccgcagacgtacgtggcgtccaacgtggccgggctcgtgaccgtcttcgaggtcgccgccaagcacgccgacccgcagccggcgatcgtctgggcgtcgtcgtcgtcggtgtacggccttaacaccgacgcacccttcttcgaggagcaccgcaccgaccggccggcgttgctgtacgcggcgaccaaaaaggccggcgaggtcatcgtgcacacgtacaaccaca

SEQ ID NO: 409568 - DNA, 453 bp, Oryza sativa
ttttgtttttttttttaccaggaacaataaaccaaagctgacattattacaaataatcaaacaaataatcaaagcatatttgtccttcagtttacagaagaaaacctgtagttgcagaatactcctgggtcgcagtacagcaattgcaggaatttgggatgacgggatgttagactttttacaaactatatatatcccagaatttttgttgagcttttttcacatgaaaaccaagcaacctacctacaaagaaatccgtggttaagatttacatttctgtactcaccagtttgaaggaacaatttgcaagggcacattggggatccctggactgatctaatggattggatggtactgagggatcccccgtttaggtggaagtttccttaatatgaacaggaccaaagctgaaggttcaatctcaaccaacaagtagtagaagaagtttaggat

SEQ ID NO: 409569 - DNA, 400 bp, Oryza sativa
gttctcaatgaagaggatgttgaaactgtcttggacaaggtgatgatgctcttcagatatttgcaggagaaagatgtttttgagaaatattacaagcaacacttggccaaacgtcttctatctgggaaaactacttctgatgaagctgagaggagtatgcttgtgaagctgaagacggaatgtggctaccagtttacgtcaaaattggaaggcatgttcaatgatctgaagacatcgcatgatactatgcaaagtttttatgctaatctctctggtgatactgatagcccaacaatatcagtccagatactcaccactgggtcttggccaacacagccatgtaccccctgcaaacttccacctgaaaatggtgatatatctgagaaaattcgggcattct

SEQ ID NO: 409570 - DNA, 453 bp, Oryza sativa
tgttagtggactctcaaggagaacagggaggcattctccaggatcttgtttcgtccccgcatcctgatcgatgtctcaaagatcgacatgtccgcaactgttcttgggttcaagatatcaatgcccataatgattgctcccagtgccatgcagaagatggctcaccctgacggatagtatgcaacagccagggcagcttcagcagcaggaactataatgacactgtcatcttgggctacttcaagtgttgaggaggtcgcctcaactggaccaggaatccgtttcttccagctatacgtgtacaaggacaggaatgtggttgagcagcttgtcagaagagcctagagagctgggttcaaggcgatcgcactgaccgtggacactccgtgactgggacgcatggaagctgccatcaagaacaggttcgttctgccaccatactcgacactgaag

SEQ ID NO: 409571 - DNA, 416 bp, Oryza sativa
taagaagctcatctcctcctcctctcgcatggcagccatggccaccaccgcgtccagcctcctcaagacctccttcgctggcgcgcgcctccccgccgccgcccgcaaccccaccgtctccgtcgcgccgcgcaccggcggcgccatctgcaactccatctcgtcgtcgtcgtccactcccccctacgacctcaacgccatcaggttcagccccatcaaggagtccatcgtgtcccgcgagatgacccggcggtacatgaccgacatgatcacctacgccgacaccgacgtcgtcgtcgtcggcgccggctccgcggggctctcctgcgcgtacgagctctccaaggacccctccgtcagcgtcgccgtcatcgagcagtcggtgtccccccgcggcggcgcgtggctcggcgggc

SEQ ID NO: 409572 - DNA, 523 bp, Oryza sativa
ttagaggttgaagcaaccagagagaaccttggatggccctatgagccattctttgtgcctgaggatgtgaagagccactggagccgccatgtgcctcaaggtgctgcttttgaggctgactggaatgctaagttcgccgagtatgagaagaagtacccagaagatgcagcgaccttgaagagcattgtctcaggggagttgcctgctggctgggctgacgctcttcctaaatacactccagagagccctgcagatgccaccaggaatctgtcacagcagtgcttaaacgcacttgctaaagttgttcctggtcttcttggaggaagtgctgatcttgcatcctccaacatgacattgcttaagatgttcggtgacttccagaaggatacgcctgaggagcgcaatgtccgatttggagtcagggagcatggaatgggcgccatttgcaacggcattgctctgcacagcccaggactcattccatactgtgctactttctttggtttcactgattacatgagag

SEQ ID NO: 409573 - DNA, 412 bp, Oryza sativa
ttgtaataactgtaccactaatccactcaggtgcaagataccctatagttcctcgcattgtagtgagaacttgagtaaactcccttcccagaaactttgccatcccaaaatctgcgatttttggaacaaatgatgcatcaagaagtatgttctctggtttaatgtcacagtgtataatgcaatcctggcaactatcatgaaggtaagctagtcctctagcaactccaagagcaatttgataccttatgctccatttcaagactgtagcgtcactgtgaaataaatgggtatcaagagagaggtttggcatgtgttcatagacaagcaatcttgtatcaccctcacaacagaaaccaattagtttaactaaattgatgtgttggatgattccaattgatcctacttcagctct

SEQ ID NO: 409574 - DNA, 460 bp, Oryza sativa
atgaaatcagcaaggttgttaagatccaggaagagcttgacattgatgtgcttgttcacggcgagcctgagagaaacgatatggttgagtactttggtgagcagctttctggttttgcatttactgccaatggatgggtgcaatcctatggatcccggtgtgtcaagccaccaattatctatggtgatgtgagccgccccaacgccatgactgtgttctggtccaagatggcgcagagcatgacctctcgccccatgaagggaatgttgactggtcccgtcacaatccttaactggtcttttgtcaggaatgaccagccgaggtttgagacatgctaccagattgctcttgccatcaagaaggaggtcgaggaccttgaggctggtggtatacaggtcatccaaatcgatgaggctgctttgagagaaggtctgcccctcccaggcggagcatgcttcta

SEQ ID NO: 409575 - DNA, 465 bp, Oryza sativa
tttggtttttttttttttttttgttttttttttttttttagatgaaacactggtgatttccactcagtttacaatacaaatacaccgacagactggcttaaaaaccaccaaattcattcaaagtaaaatgggtatgagtgatcttggccccaagagactgactaaacctaaccacagacaggggatccactggacccagatttttcaaaaacaagatggctttgatggcattcctcctcaaaatcgaagggaacttgctgcaaaggcgatcctcactttgcgctagcgagctgggtgcggatgagcttggcggccaaaaccatgttggtgagggcaggctttaccttggtgtacttgcgggtcttgagaccgcagtcagggttcacccagagaatgttagtgtcgagcaccccaagcattttgttgatgcgggccgcaatctcctccgtggacgggatcctgggg

SEQ ID NO: 409576 - DNA, 446 bp, Oryza sativa
ataaatatgggacaaaaaataaatccacttggtttcagacttggtacaacccaaaatcaccattccttttggttcgcacaaccaaaaaattattctgaaggtctacaggaagataaaaaaaatacggaattgtatcaagaactatatacaaaagaataggaaaaagggctcgaatagaaaaatagaagcagactcaagtttcgaagtaattacacataataaaaaaatggactcaggctcaagttccgaagtaattacacatatagaaattcaaaaagaaatcgatacaatccacgtcataatccatattggattccccaatttattaaagaaaaaaggagcaatcgaagaattagagaaagatctacaaaaagaagttaattctgtaaaccagagacttaatattgggatcgaaaaagtgaaagaaccttatagacaacctaaca

SEQ ID NO: 409577 - DNA, 506 bp, Oryza sativa
  unsure (1)..(506): unsure at all n locations
ttttctggtacgtaaaaaaagacgcagatgagggtgaaaagggcgatgcgccaagacagggcgacaagtggtggatccctacagttcgagtccctcccgagggtctgccagatgcgtcgaaaaaatggattctgcaccagaaagaccttgtagggcaggtgctgaaggcagccatggctatcaatgctgatgttcttacagagatggagatcccgggagagtacattgaaactctgcctaagaatggaaggtctagtcttggagactcgatatacaaaattataactgatgatcatttcgatcccaatgagctcttaagttctgtagacttgtcgacagagcacaagatcgtcgatctcaaagaccgaattgaggccttcgttgtaatttggcagaagaaaatttccaataagctttcctggggccccggtgttagcttggagaagcgagagcaagttgaagagcgggcgcaaactgtcctactcatncttaagcaccagttcctg

SEQ ID NO: 409578 - DNA, 399 bp, Oryza sativa
gttaccgtcatcagcacgtcgccggggaagcggcaggaggcactggagcacctcggcgccgacgagttcctcgtcagccgcgacgcgggccagatggcggcggcggcggccaccatggacgggatcctcaacacggtgtcggcctggcacccgatcgcgccgctgttctcgctgatgaagccgatggcgcagatggtgttcgtcggcgggccgaccaggccgctggagctgccggcgtacgccatcgtgcccggagggaagggcatcaccggcaactgcgtcggcggcatcagggactgccaggccatgctcgacttcgccggcgagcacggcatcactgccgaggtggaggtcatcaagatggactacgtcaacacggggatggagcggctggagaag

SEQ ID NO: 409579 - DNA, 431 bp, Oryza sativa
ttttacgcgtgggcaaaattgtgctggattacaggagctctggaggaatggagatggcggtggagagcggcgagaacggcggctgcggctgcaacacctgcaagtgtggcaccagctgcagcggctgctcctgctgctcctgcaactgaatctatcgtcgtcgtcgcccggctgcatgaggatttatcgtatggatgctgctactgtcgatcagagctttgatcgaggccttaatttgcttgcattagtacccagcttatatgtaggcaggccttgccttttgctctgacgcctaaataaaaccgtcgtcgtcgttgtcagtgtgtgcgtgtgtcgatcaatgttggatggatccctagctagcttggatggatcatctatcatcatggtgatctcatcatgtactcctgctccatctcctcatgcgtgcc

SEQ ID NO: 409580 - DNA, 461 bp, Oryza sativa
ttaagaggacgtcggagaagatgatgggcggattcctctcccgggtcctcctgttggcctttggctacgcctatccagcatatgagtgctacaagactgtcgaactgaataaaccagagattgagcagctcatattttggtgtcagtattggattctagtagctctgatgacggttatggagagatttggagattttacaatatcatggctaccattttactcggaagcaaagctgatgttctttatatacttgtggtaccctaagacaaagggaactacctacatttatgggactttctttaggccatatatttcacagcatgagaatgaaattgaccgtaatttgcttgagttgagagctcgagccaccgatgtagttgtcctttattttcaaaaggctgctactgtaggacagaatacattctttgacgttttgaagtatgttggtttgcaatcacca

SEQ ID NO: 409581 - DNA, 421 bp, Oryza sativa
taggaactggtttcctttctcaagttcatgagctctcaccagtttttctgcataaggactggataatggatcagtgggagaagaatttctacataacagcaatagctggatcagctaacggaagttctttagttgtgatgtccaaaggaacaccttactcccaacagtcatacaaggttagtgagtcattccccttcaagtggatcaataaaaagtggaaagaaggttttcatgtgacatctatggccaccgctggaaatcgctggggtgtagttatgtcaaggaactcaggttactctgaacaggttgtagaattggatttcctatatccaagtgaaggcatccatcggcgatgggagactggttacagaataacctcaatagcagcaacaaatgaccaggctgcttttatcttgagcat

SEQ ID NO: 409582 - DNA, 287 bp, Oryza sativa
gtcgcgccttctcctcctccttcctctcctccccattccgccgcccgccactccaccccgcccgctccttcgttcccccccgcgccgccatggcatcctccgccgcgccgttccacatggtccagatccagcgcgacgacacgacttttgatgcctatgttgttggaaaagagaatgctcctggaattgttgctctgcaagagtggtggggggttgactatgagatcaagaatcatgctgtccacatttcccaaattggtgaaggatacagagctctcattccagat

SEQ ID NO: 409583 - DNA, 458 bp, Oryza sativa
ttcttcttccccccacctctgcggcggcggcgggcggcgagatggcgaagtcgctgcggtcgaagcgggagaagcggctgcgcacgctgcggcgggagatcgcgcagcccttctacgacaagaaggaggcggccaaactcgccgcgcaggccgccgcgctcgaggcgcccgcgctgccggtccgcgcgcctccgccgccgtccaaggattccggcggctcccgcgccgcctccagctcggcatcggccatggacgttgagatggcggatgaaggaaataacaagtccaagtccttcttgaagccaattggtagcattagcaagaagaaggtacaacttcacttgaagatcaagaaagataaaagaaaagctaggaagaaggggaggtttagtaaaaagtaggtgtcaaagcttactctgttatgagaaccatcattttggttagtttggacaatgcat

SEQ ID NO: 409584 - DNA, 416 bp, Oryza sativa
tttaaagaaaggtgggagtctttaggtttctactcctaaaaattgtttctttcttatgtgcagcagtcggtgtaactaatgggggagatgaaccagccgccgccgccgccggtggccgtgccgccgccgatggtgatgcagccaatcatgcatccgcccgtcggcaccggcgccgtctttccgccgcacgagcagctccaccatctcgcctactgcgttcactccaaccctttctgggttcaggtggccgcacttgcattccttcactatcttgtgacgctgggttctactgtcatgcttgcatcaactattgttctgcaatgggtggtaccccaggggatatggctcgtgttatcaaacctttctatttatgagtggcatcaatactcttctccaaacacttgttggaccgcggc

SEQ ID NO: 409585 - DNA, 460 bp, Oryza sativa
tttaaacaaacccctctcactcccactaccatggatccttgcaagttccggccgtcgagctcgttcgacacgaagacgacgacgacgaacgcgggagctccggtgtggaacgacaacgaggcgctgacagtggggcccagggggccgatcctcctcgaggactaccacctgatcgagaaggtggcgcacttcgcccgggagcgcatcccggagcgcgtggtccacgcccgcggcgcctccgccaagggcttcttcgagtgcacccacgacgtcaccgacatcacctgcgccgacttcctccggtccccgggcgcccagacccccgtcatcgtccgcttctccaccgtcatccacgagcgcggcagcccggagacgatccgcgacccgcgcgggtttgccggtaagttttacacccgcgagggcaactgggaccttcttggcaacaactttcccgtttttt

SEQ ID NO: 409586 - DNA, 480 bp, Oryza sativa
ttgtttatgactggccacaacactgttcatcttgcaattctgttctggaagctggaagcgaagaaactacacgattgggttgcttgcatgtgatgcacacaagatgtttgatctcacacatacaaagttattcaacccaaactgcaccagctggatatgtttgtccttcatgttctacacctatatggcctccttcaactattaaagatactggctcgcgccttcactctaaactaaaggaagcaatagcccagactggattggagaagaacgtatttggaaatcattttgtgacaatgcctaaagctgatactcgcacccctcctgcttttgcttcagatcctcttaaacgtgtatccatttttggtgatagagaatcaaatggtgcaaacataatcaattctgctatagatgcacatgtgcaatctggtggaatgtattcctctgctactgtgggatctgggacacctagtcacgttg

SEQ ID NO: 409587 - DNA, 308 bp, Oryza sativa
ttttccttcccctccgccgccgcacgccgccggcatgggtatcgacctcgtcgccggcggccggaacaagaagaccaagcgcacggtgcccaagtccgacgatgtctacctcaagctcatcgtcaagctctaccgctttctggtgcggaggaccaagagccccttcaacgccgtgatcctgaggcggttcttcatgagcaagaccaaccgcccgccgctctcgctccgccgtctggtcaggttcatggagggcaaggagaaccagatcgccgtgatcggaggcaccgttaccgacgacatgagggtct

SEQ ID NO: 409588 - DNA, 481 bp, Oryza sativa
tttaatcgcagagaaaaaaaaatctcccctcgaagcgaagcgtcgaatcgccttctcaagatgcagatctttgtgaagaccctcaccggcaagaccatcaccctcgaggttgagtcctcggacaccattgacaatgtcaaggccaagatccaggacaaggagggcatccccccggaccagcagcgtctcatctttgctggcaagcagcttgaggatggccgcaccctggccgactacaacatccagaaggagtccaccctccaccttgtgctcaggctcaggggaggcatgcagatcttcgtcaagaccttgactgggcagaccatcacccttgaggtcgagtcgtctgacaccattgacaatgtcaaggccaagatccaggacaaggagggcattcccccggaccagcagtgtctcatcttcgctggcaagcagcttgaggatggccgaccctggccgactacaacatcagaaggaggct

SEQ ID NO: 409589 - DNA, 400 bp, Oryza sativa
tttgtcctccaccaagatccccttcctcctcctcgccgtcctcctcctcctttccgtcgccttcccagcggaggtgatggcaggagggcacgggcgcggcggaagcagcggcggcggcggaggggtggccggcggcgggaacctgaggccgtgggagtgctcgcccaagtgcgcgggccggtgctccaacacgcagtacaagaaggcgtgcctgacgttctgcaacaagtgctgcgccaagtgcctgtgcgtgccgcccggcacctacggcaacaagggcgcctgcccctgctacaacaactggaagaccaaggaaggcggccccaagtggccctaagaagcaagccttggttcttttcttctttttttttaccctatgaataaataccttcttctacta

SEQ ID NO: 409590 - DNA, 368 bp, Oryza sativa
ttagtgtttggacaataactgtggctgctggcaagatagggacagtaatgttactgtatgcacggataccttgcgcgtgcttgtttgcagagtgcgccggtgggagaggatgaacggtgctggtgttgggtactctacttgtgcagctactggcattgtgaggtgcgacactaaaatcggaggacgcttgcttgagcctatgcacgtgaggacactatcttgctgctcgcatgaagactactacggctgggaatgcacaccatgtttgaagggtgacggactaaataggcgagacgatattgattaatgctgggagaaactttactgttagtgcatgggctgcaactgtgacaatacatggggttact

SEQ ID NO: 409591 - DNA, 427 bp, Oryza sativa
aaataagtccagtgctccaatagatgagagtaatgcacaagatattgttacagagaaggtgctcaagaaaagaacattcagggtcccgttaaaggttgtggaaaagatggctggtgctggatcaattctttcgaaggagttgtattctgaagcaaaaactaggttagaggcgcttgataagaaggatgctgaaaggaggagaactgctgaactgaaaaataacctggagtcttacatatactctatgaaggagaagctggaagagaacacagaaattttgaccgtctcaactgaacaggagagggaatcttttgcagagaaacttaatgaggtacaagattggttgtatatggatggtgaaagatgctcaagcaaatgaattcaaggaacgccttgaccaacttaaggccatcggtgacccattctt

SEQ ID NO: 409592 - DNA, 350 bp, Oryza sativa
attaaacctcatcatcagtgtgctgctcggattctacctgggagtaaacccaagtcaccttctctgtcataggagaggtaattaactgaccggagagagagatgtcgtcggaggttgagaggaagacggtgtgcgtcaccggcggcaacgggtacgttgcttcattggtcgtcaagatgctcctggagaagggatacgctgctcagacaaccgtcagagatcccaataacccggagaaggtctcccatttcaaggacatggaaaaactcggccccctgaaggtctttcgcgccaacttggaggatgaaggcagcttcgacgaggcccgtcgcggctgccactacgccttc

SEQ ID NO: 409593 - DNA, 435 bp, Oryza sativa
gtcaacctcgtcgtgtccagcccgctctccttcagcatcgtcggcaagtacccctacggcatgacatacttccaccgccccaccggccgctgctccgacggccgcctcgtcgtcgacttcctcgcgcaagcgttcgggctgccgctgctgcagccgtacctgtcgcgcggcgaggacgtcacgcggggcgtcaacttcgccgtcggcggcgcgacggccatggatccgccgttcttcgaggagatcggcgcgtccgacaagctctggaccaacctgtcgctcagcgtccagctcggctggttcgagcagctcaagccctcactctgcagctcacccaaagattgcaaggagttcttcagcaagtcactcttcctcgtcggggagattgggggaaacgactacaactacgccttcttcagggcaagagcttggacg

SEQ ID NO: 409594 - DNA, 476 bp, Oryza sativa
tttggaatctggatcgaccatggatgttgttgctgcacaaacaaaagcaatttctgaaaggatcaaggattggactaatgtggttgttgcctatgaacctgtgtgggccattggaactggtaaagttgctacaccagatcaagcacaagaagtgcatgatggcctgaggaagtggctcgctgctaatgtcagtgcagaggttgctgaatcaacaaggatcatctatggaggttccgtaactggtgcgaactgcaaggagctggcagcaaagcctgatgttgatggttttctcgtcggtggtgcttcattgaagcctgaatttatcgacatcatcaactccgccaccgtgaagtccgcctaagatcttcaccccattcaccttcggcgtgggaagatgtctgaagaggatcatacctttttctgtgcttatgtaatgctagtagttttgtgctggagcagctacttttttttcttcc

SEQ ID NO: 409595 - DNA, 404 bp, Oryza sativa
ttcatcgccatctctctcagctctcacagctcactgcatcaatggccgcggccaccatggcgctctcctccccggtgatggcccgcgcggcgccgtcgacctcctccgcgctcttcggcgaggcgcggatcaccatgcgcaagaccgccgcgaagcccaagccggcggcgtcgtcggggagcccgtggtacggcgccgaccgcgtcctctacctcggcccgctctccggcgagccgccgagctacctcaccggcgagttcccgggcgactacgggtgggacaccgcggggctctccgccgacccggagacgttcgccaagaaccgggagctggagggggatccactcccggtgggcgatgctgggcgcgctcggctgcgtctttccggagcttctcggccggac

SEQ ID NO: 409596 - DNA, 412 bp, Oryza sativa
gatccatctgacggttagttccaagggaaagaagaaatggaggcttcacgcaaggtgttctcggccatgcttctcatggtgctgctgcttgcagccactggtgagatgggcgggccggtgatggtggcggaggctcggacgtgcgagtcgcagagccaccggttcaagggcccgtgcgcccgcaaggcgaactgcgccagcgtatgcaacacggagggcttccccgacggctactgccacggcgtccgccgccgctgcatgtgcaccaagccctgcccctgatcgatgaaccagccgctagcgcagcagcttgtgccgccacctcgcgcatgtgccatcgtgtcgatcgatcggatgctagctgccctatgaatgaataaaagtgtgtggcttatgcgtggttttctcttgg

SEQ ID NO: 409597 - DNA, 421 bp, Oryza sativa
gttccattctcgccggagcgacctcgccggcgacgccgtcgccgccaccccacctccgtgcgggtaggtagtggcggttgccgagatggccgggatggtcgccgccgcggcgccgccggcgtctctttgccgtccgattgctgtcccccgagctcctatgcgccgtcgccggctcactccccgcgtgaagacgacgccctcccttcgctgcgaagattccccgaagatcgctctactccaggtacaagccatgcgatcttcacaagagagtagttctgatgaggacgatgagatcctttttgagcttaaagagaagtgggatgcttttgagaacaagtcctctgttctcttttacggaggcggagcaatcattgctgtttggctattcttgattgttgtcaaagctgtctatttaatttca

SEQ ID NO: 409598 - DNA, 445 bp, Oryza sativa
  unsure (1)..(445): unsure at all n locations
gcggtttagggatgaataaacaatacacaccaagccaacatagagcgacgatgggaccgcttactactaacatcgtgctggccgtcgacgtggagacagctactgctcgggcgcggtgtnttgtgcgtggccgcccaaggatggcaccacggcccgaacatgacgacgcagatacaacgccccgtggttgcccgacagggccacctggtacgggcaggcctacggctcgggctccaccggcaatgggggcgcgggcggtatcatgaacgacagcctgccttcgtacagcggcatgaactgctgcggaaacgtaccaatcttgaaggacggaaagggatgcggctcatgctacgaggcgaagtgtgagcagccggaggggtgctctaagcagacggtgactgagtacatcacggacatgaactacgaggcgatcttggtgtaccag

SEQ ID NO: 409599 - DNA, 417 bp, Oryza sativa
ttttctgaagtgaaacagcaaaaaaaatcaaacaaaaagaaaaaatattccccatctgtgaaattcgcaaaaccctagcgcggcggcgatgtcgaacacgagggtgttcttcgacatgaccgccggcggagctccggcggggcggatcgtgatggagctgtacgcgaaggacgtgccgcggacggcggagaacttccgcgcgctctgcaccggcgagaagggcgtgggcaagagcggcaagccgctgcactacaaggggagcaccttccaccgcgtgatcccggagttcatgtgccagggcggcgacttcacccgcggcaacggcacgggaggggaggcgatctacggcgagaaggtcgccgacgaggtgttcaagttaagcacgacagccccggcttctgtccatggtgaacgccg

SEQ ID NO: 409600 - DNA, 404 bp, Oryza sativa
gaccccaaatgttcttattgattgattgcgatttcatagaagcagcgacccgaattaagatttaaaaccaaccccaagaaggatcgcagaaccaactccaccgaatcgatccaagaactccggctaatccaaccaaaccatgggcgaacttatctaaccaacacgacacgaactcataaaaagactaacaccaccaccaccttcttcttatttagggactggacgactcaagaccactgatcctggggaaaggcgaaggggaacagctcatatttaggagagctggccgaatttggagatgaccaccggcttggcggtgctcccgccgggggatcccacctttttgatgggcttaacgacgtccatgccctttattaccccgccgaacacgaggggcttcccct

SEQ ID NO: 409601 - DNA, 407 bp, Oryza sativa
gtttcactttgtggttctggtattttttgcattcttgctgattccctgattaaaatggagatctactcagactatgtccaggcacatcttgcacctagtggttacatgaaaatcccaactgatatttcagattatttaaagggttgtagatttcttccaaagcttaacaatgagttaccaggtgaaagaaatgccacctacaaggaaaggtttagcagcttagagaatttgatattaatcatgtttcaggatgacgctgtcttgatacctcgggaaacagcatggtttggttactatccagatggaggtttcgatcctgtcctgccccctcagaagacaaaagctgtacatggaggactggattggtctcaagaccctggatgatgaagggagaggtgaactttgtg

SEQ ID NO: 409602 - DNA, 487 bp, Oryza sativa
ttcgagtcggcggcgacaacaaatcgaaaatcgaacgggagaaattctctctgattctctctcgcgggcggcggaagcaatcgtagttagcagaggccggcgagcgagccgccaccggcgatgggcgacagccagtactccttctccctcaccaccttcagcccgtcggggaagctggtgcagatcgagcacgcgctgacggcggtcgggtccggccagacctccctcgggatcaaagctgctaatggagtagttattgccaccgagaagaagttgccttctattttagtggatgaaacatctgtgcaaaagattcagtcgttgactccaaatattggtgtcgtctacagcggcatggggccagacttccgtgttttagtgaggaaaagtcgaaagcaagcacaacagtattatcgtctgtacaaggaaactatacctgttacacagctagtccgagaaactgctgctgtcatgcaggagtttacac

SEQ ID NO: 409603 - DNA, 188 bp, Oryza sativa
ctcttttcctcctcggttcggttccgcggttcgtctagggtttagtgggttgagatggcggcgccggatgtcgagtaccgctgcttcgtcggctgactagcctgggacatcgactaccgttctccttaaggtcgtattgtccacatacggtgagatcctcgactccaagatcattaacgacagggaga

SEQ ID NO: 409604 - DNA, 426 bp, Oryza sativa
gttcattactttgcttttggagctcttgtatctgaggaactctcctacaaactcaaagagttgcccaaggtccgctgggttcttccagactcatacctggatgtcagaaataaggactacggaggagaaccttttataaatggggaagccgttccttatgaccctaagtaccacgaggagtgggtgagaaacaatgcgcgtgccaatgaaagaagccggcgcaatgataggcctagaaactttgacaggtcaaggaattttgagaggagaagggagaacatgcagaacttccagaacagagatgtgcctcctggccagggattcaacagccctcccccaccaggtcagggcccagtcccgcctcgtgatgctccttcgatgcaccatgctcagggtaatgttcctccaccttcaccaccaaatgca

SEQ ID NO: 409605 - DNA, 346 bp, Oryza sativa
ttaccccaaaaccctagccgccgccgccgccgcggcccccaaggccccgacggcgccggccgccgtctccttcccggcctcacatgccgcctgcgcgccgctcgccgcccgacgccgcgcggtcaccgccatggtcgcggcgccgccggccgtcggggccgccatgccgtcgctcgacttcgacacatccgtcttcaacaaggagaaggtctccctcgccggccacgaggagtatatcgtgaggggtgggaggaacctgttcccgctgcttcccgaggcgttcaagggcatcaagcagatcggagtgattggatggggctctcaggggcctgcacaagcccagaac

SEQ ID NO: 409606 - DNA, 497 bp, Oryza sativa
gtttcgcgctccgcacgtcgccgcagtggctgggcccgcagatcgaggtcatccgcgccgccaccaagtccatcgagcgcgaggtcaactccgtgaacgacaacccggtgatcgacgtccaccgcggcaaggcgctccacggcggcaacttccagggcacccccatcggtgtgtccatggacaacgcccgtctcgccatcgccaacatcggcaagctcatgttcgcgcagttctccgagctcgtgaacgagttctacaacaacgggctgacctccaacctggccggcagccgcaacccgagcttggactacgggttcaagggcaccgagatcgccatggccttctactgctctgagctccagtacctcgccaaccccatcaccaaccatgttcagagcgcggagcagcacaaccaggacgtgaactcgctgggtcttgtctcggccaggaagaccctggaggcggtggacattctcaagctatgaccttcacctaca

SEQ ID NO: 409607 - DNA, 411 bp, Oryza sativa
gtatctagctagggagagaaaggaagagacgagaggagagagatggccactgcttatgctcccatggcgagccagctgatgaagagcagcttggtgtgctccaagccgagggggctgtctggtgcttcgctgacaaggaggccccgcttcacagtcaaggccatccagtctgagaagccaacgtaccaggtggtgcagcccatcaatggcgaccccttcatcggcagcctggagacgccggtgacctccagcccgctggtcgcctggtacctctccaacctcccggcgtaccgcaccgccgtcagcccgctgctccgcggcatcgaggtcggcctcgcccacggctacctcctcgtcgggcccttcgcgctcaccggcccgctccgaacacgccggtgcacgggcaggccg

SEQ ID NO: 409608 - DNA, 514 bp, Oryza sativa
cattgattgaatcacgcaacaatggcttggagatgcagtccgtaaataacaaaggactcgttgaagaactagaaaagttgcttgatcgcttgcgaattccacaggagtttgcagcatcattaactgggggttcgtttgaagagtcacgaatgctgaaaaatgttgaggcatgtgaatggttgacaggggccattcgcagccttgaagtgccaaatctggatccatgctatgttaacatgcgagctgttagggaaaaaagagcagaactggagaaactgaagacaacttttgttcgacgcgcatcagaatttttgaggaactacttctctagcttgggggacttcatgataagtgacaaaagctacttttctcagcgagggcaattgaagcggcctgatcatgcagacctaagatacaaatgcagaacttatgcccgacttttgcagcacttgaagagtctggacaagagcttgttaggcccctttaggaaagcatactgtcattctcttaatta

SEQ ID NO: 409609 - DNA, 514 bp, Oryza sativa
gtaaagacaggatctggaaaaactcttgggtatctacttcctggatttatgcatattaaacgcttgcaaaacaacccaaggtctggtccaacagtgctagttttggcaccgacaagggagcttgcaactcagattttggaagaagctgtgaaatttggcagatcatcaagaatttcttccacgtgtctatatggtggtgctccaaaaggcccccagctaagagatttggatagaggggtcgatgtcgttgttgctacaccaggaaggttgaatgacatcctagaaatgcgaaggataagccttaagcaagtgtcgtaccttgttctagatgaagctgaccgtatgttggacatgggatttgaaccacaaattcggaagatagtgaaagaaattcctccttgtcggcaaaccctcatgtacactgctacttggcctaaggaagtccgaccaattgcagaggatctttttggtcaccctgtccaggtgacccatgtaagtgttgatgagcttgttg

SEQ ID NO: 409610 - DNA, 386 bp, Oryza sativa
cccgtctcctcgcctgccgccggcgccgatctccatcctgctagcagaggtggcgccggcgttctcctgctcccgccacatcatcgctaatccatcccatccggcctcggccaccccactgcttctacgagttccatacccagaccgccgccgccgccgccgccgccattggtgaagcccgtcgccatcgccgtcgccgcttccacgcaagtccgtagcagcggattcctgcagcgccccccgaaacatcccgaatccccagccatggcggccggagcagcagcagccacccgccgcagtctctccgcgctccttctctcctcccgcgctctgcaacgccgctatcgcccgctcgccgccgccgcctcctcagactacctcgcccc

SEQ ID NO: 409611 - DNA, 440 bp, Oryza sativa
ttcgccgccgaggagagtccaatcgagaagaagggaggagaggcaagcggagaggaagaagaagaagaagagaggatgggcttcgagaagacgatcctgaaagccggcaccggtcccaagcccgtcaagggccagaaggtcaccgtccactgcaccggcttcgggaaagataatgatctcgctaagaagttttggagcacaaaggacgcaggccaggagccattcagtttcaatataggccagggttcggtgatcaaaggatgggacgagggagttatgaccatgcaagtgggtgaagttgctcgtattcagtgcaccccggattatgcgtatggagctagtgggtttccggcctggggaattcgaccaaactcagtgctggtgttcgagattgaggttcttagcgcccagtaaacgcatcatgtaattccggatggatc

SEQ ID NO: 409612 - DNA, 512 bp, Oryza sativa
ttaaccactcgccatcaaagcccccagagagcgcgccatggcggcgcagcggcggtggccgacgtcgacgctggcggcggtggcagtcgccgtagtagtactactggcggcgtcggcggcgacgacggcggaggcgcagtcggcgccggcggcggcgccggggccagcggggccggtgctggaccaggcgtgcctgacggcgctgctgaacatgtcggactgcctgacgtacgtgcagaacgggagcagggcgcggcggccggacaagccgtgctgcccggagctggccgggctggtggagtccaacccggtgtgcctctgcgagctcctctccggcgccggcgactcctacggcatcgccgtcgactacttccgcgccctcgccctcccggcatctgccgtgtttccacccctcccgtcttcaactgcgcagcctttggattcaatgttccaatgggcccaacgccgtcgccttcgccggcaggcgtctcgcccttcggtgagggcccaca

SEQ ID NO: 409613 - DNA, 425 bp, Oryza sativa
  unsure (1)..(425): unsure at all n locations
ttttgttttttttttttttttggttcatcagaaaaagattttattagcaaagaacaggggataaattattccacatgccgacttgatgaatgatactaattatttccagtgttaaatggaattaagttggcgtaaaaaaaaattctagctgaaacaacaccagttgaactggcatgccaattggcggtacgctgccttattctatttacttttgaccgggatacccttcggctgttcttgggataattttctatggtttaccattcaactggactttagctagcttctctccgtttttttcggcgccatccaccttaccaggaaatgacctcccactacttgtgacaagttccttgatggttgcttggatgtccttatncgccaacagcgaatccaatgtcacatgtagccggaatctccaataa

SEQ ID NO: 409614 - DNA, 382 bp, Oryza sativa
tggttttcgaacactttcgggtctcccagaatggtatttcattgcatcccaaaagatagcaacaagcagcacaaacaccataaccaaagcgaactcaatccatggtaacataacggacgaagaacacctaacactggatggatggatagagggcttctcgactcgagagagccactggacacagataaccactccactcgatgataagatgattctgacacggataggtaaggataactggccacgatgggccccaccaatcaatggctccaggtcccgccggagtcaccgccgtagccgccggcacggatgccaccgaagacgtccacgccaccgccacgggcaccgaagaagcctccgccgccaccgaaggcgtcctcac

SEQ ID NO: 409615 - DNA, 419 bp, Oryza sativa
ttgttttgcaactcaatagtgtttcgatatttcaccgagggtaatgtatggtaggaaaatcgccagacataacagagccggccagactcaactcaaactcaaccctatgatggtaaactgtttgcgattaacgcctccgcctatgacaatgtttggagataaacgcttccaccaaaaaacgaatgtcggggagtgttctcccctacaagaattattattgttttcaatgttaaaaaggcaaaattcaccagatcccgttagtgcaggaccaggaataaacacttgttcgtcatcattttctgccagtttaggcaccgcccgagccgtacttctttccaaagaagaggatctgcagctggtcatagcctgagagcacaccagcaccagcaatggcacgtaggatgttggcaccagcaccc

SEQ ID NO: 409616 - DNA, 411 bp, Oryza sativa
tttttgttttgtttttttttgggcaaacagccacgatacggctcatttttattccaatccaacagaaccacatgcgcatgccaacagtatgaatcaaaagctgtttcgaggtgaagcacaatgcgcatcactccctggccgatacgtatccatcagcaataacagaggaatcagtagatgtacgggacgaacgccttgcgcgacgccgggtacttgtcgccgaacttgccgacgtaccaccggcggtgatccctggccctcggcccgaggttggagcaggtgtagaggaagaaggcccaggccgccggcgtccacgccaccagcgcgtagccgagccactccacggcctcgccgaagtagttggggcaggtgaccacgtcgaacagcccgccgcggggaatctggtaccct

SEQ ID NO: 409617 - DNA, 389 bp, Oryza sativa
gttgtttttttttttttggggagcaagatagcgctatattagtatatttcacttgcaaaatacaacaacggaatcagaaagctgccagccaaggccatgaacgctgcaggcgccacggcattgcagcagcaatctcacacgattacaacacggataaatacagcaagctcaaaaaggaaaaaaaaaacacggacggagaaacaacgtaatctgctgatgagcgtacgagaagccttcaggatcctgaattcctccctttcttatttcggggcacgtatcgtctcttcctggatcttgtcgcgttcgcgggtggactggttcgatcagcagatgggcaggggctcgccgttccactccttgaggcactcgagcatcgggtcgatgagctc

SEQ ID NO: 409618 - DNA, 389 bp, Oryza sativa
ttgtttttttttttttttttgttttttttttgagaagaacaatatttcttcagcatatgcctggttcagatatgataaaactgaccattgtctctgcgcttgggagaatctaagctcacaatgtcatcatgaaaaggtttatgtttgagccgctccccttgcctgagcaacagcactctgataaaggttttcgtactgggaagctggagaatcccagctgaaatcaatctgcatatccttctgcactaactgtttccaaaccataggttttctgctgtagtagctgaatgccctttccaagcaactgcttagatcctgctcatcagtcctagcaaatgtaaagccattccgcagctccacaggtatagtttcatcatcaaaatcaaaaa

SEQ ID NO: 409619 - DNA, 361 bp, Oryza sativa
tttttttttttttttttgttttttttttttttttttttttttttggagaagatcagtcctactttattcatgccatgaccatgcatccatatgggctttcacagacccatgaagaattttcttggccgaaaccgaaacatacatttttaggggttttcaaggggggggggcaaaattaaaaagatcaagcgcaacccttgcctgccgtgggtgctcccccaaaatttaaaggccattcgaaaattttttaagcccccgggggcctttttttaaaactaaaaagagggtcatcccaaaagagggtcccaaaaaaaagggcctgacaaaaagggacatggcccctagaagaggctcccactac

SEQ ID NO: 409620 - DNA, 377 bp, Oryza sativa
ggagatgagcaccacgacgcacttgatgctcttgcacaccgtctggatcaccgtcggcccgggctccgggatcgtcaggttcaggttgtcgccgaacccctccgcgtacggcggctcgccgaccaccacgatcgcgtagtcgtacttgtcgccggtgaccacgctgctgtccgggttctccgagtacaccaccgtcgtgctgggatcaacggtggccttgatcgccgacaggatcgtcgtgccagcagtgatgttgttgccgggctgtccttgccaggtgatggtccatcctccacactgtctgcccaaatcatcagcatggcttcccgcgacgagaattttaccggctttcttcgggaggggaagcaccggagagt

SEQ ID NO: 409621 - DNA, 376 bp, Oryza sativa
acgacaaaccacgaacttggatattaaagatgccacaaagaaggttcacataaacaacacaggtcacagcagcgaaagctacaagcaaaccctgcataatcgaaaagcaaatgtttttcaaaaccagacacacaaactgatagatagaagcccacacggacagatcataggatagcagcagtaatcaagcattgccaaggcaccaggcaagaaccctgaacctctctagtactggtcaccctcatcaccctcgtcaccatcgtcgaactcggagccgacctcctcgtagtccttctccagcgcggcgaggtcctcgcgggcctcggagaactccccctcctccatgccctcgccgacgtaccagtggacgaaggcg

SEQ ID NO: 409622 - DNA, 368 bp, Oryza sativa
tttgaatttgcatgagggtcctcttgctggtggctacgcatctgagtatctgatactgtgttccatatatgtctctcatgctgtatgtctgcataataaccgccaaataaaactgatatagctatgcatggcaagcagactatggttaatacaagaacaggctagagatgcagaccttggtccagtgatcagcaaacaggctaaggaacgtatctgcaaattaatacaaagaggtgctgatggtggtgcaggagtacctacctcgaagaaagaaaatatttgggggtcctaacttccgagaatgggaatttttgttggcccaacactccttgctgatgctaaaagtgaaatggaatgctacaaggagg

SEQ ID NO: 409623 - DNA, 283 bp, Oryza sativa
tttagatgccacactgaatgcccttattgctgctggttttggtgctgctgggcaaaggtgtatggcattgagcactgctgtttttgttggaggctcagagccatgggaggatgagctagtcaaacgagcacgcagtcttagcccgacttcacggacaggaaggggaaggccggcaaggaccccaacaagcccaagagggctccctccgtttttttcgtttttatggaggagttccgtaaggaggttcaaaggagaagaaccccaagaattaaacctgcgctgc

SEQ ID NO: 409624 - DNA, 333 bp, Oryza sativa
tttgtttaaaacgacggaattagaaacaatttaatctaacatacgcaaactgatattatcacaatgttagccgatgacaatggaaagagtaatctaggtacaagcggatcattgacggtggagacaagacattggctgcaccacaacacccaccagtggcgccaacaaggagcgctatccgttataggacgagagaaaaagtaaaacatcacgatgtgaagtgaaactgaataattctagtagacgatgatgatgatggataggctccttaggacgcccgccgcccttagcgtcttgctgctcccatcttgtccactggaaggctcactcgtc

SEQ ID NO: 409625 - DNA, 402 bp, Oryza sativa
ttgttttttttttttttttggtttttttttttttttttaattaactagcatatttaaatttaaaacgtaactgtttgagcaaataccacgaaatgttcaggcgctaagatacgggaataccgatacatccagcatagcaaaaatggggaagagcacagagtcagataaagctatagagaactagggctccaggagatgggggccgaatgacaaccatggggcttagtcgacctcctccattttgctctcgccggcgtcgtcctccagcggcggcatgtcggcgtcagcctcagcagactcgtcctcgtcgatgctcaggccgagcttgagcatccggtggatcctggtgcccaaggtgttggggtcctcaaggctgaagccggaggtcaggagggcagtctc

SEQ ID NO: 409626 - DNA, 406 bp, Oryza sativa
ttttatataggtggaccaggtgggggcgatggctgatgcttgagggcccttgagaatgttgccctgttaattcgcgatgaagactttccaaaggtggaccaggaggaccagtaggggcctgacatggataaaaccaaaggacgaagtgatgcaaatgcacaagttaaattaagtggtgtaaacttttatgaagatggagatgttacaagtgctgctaataatgttacaactagattgactacaaattcaaaaggccaggcgtcttcctcttcagaaatgctaactggcagacagcacttgcctcaagatgctggacctgctatttctcagacatctaacggaactttccctagtcttgaaaagaccgaagaagtttgcatagaaactgggagagaactaccaacag

SEQ ID NO: 409627 - DNA, 413 bp, Oryza sativa
tttcaccaacagcgaggtgactgagagacgctagcttgggagaataatccatggcaggctagatgtctacaattgtgatgatggtggatctcgattgtgacagatggtccaagatagtcctttctcggttggcaattggtgatcttgcaacacagtattttgcagaccgaaacatcttatcatgtgtcccaactatgtccctggccagaagaagagatctgtatgtgaagagtgtccagcgtactgtcatctggatgggaaagaaacaagaatctgttgaggatgttccctgtggtaacactgctgctatggttaggttggatcagttcatcaccaagaatgccaccctgactaatgagaaggagtcagatgcctgcccaatcagagcaatgaaagttctcagtgtcccctgt

SEQ ID NO: 409628 - DNA, 399 bp, Oryza sativa
tttttgtaattaaccatcacgggagcatggcatgcaaatatatttatatgcacacaattgcatgcatatatatcagtaggaagcactaggtacgtgctgatgattacacaaagacacatcctgatccttgctcataattaatttcttgcaaatcatatgtagcctgtagggtagggggcagcaggcaaacacatatataagaatagcttaatcgctaggtttgtttttttgagatcaatttcattttaggagaatcatatatattatcgctaggatcgataccaatgacttcaattcattcaaggttgctcccatgattcacggtgcatacggcagctgtttggccgacgacgacgacgatgatcatcttaagcattgaggtggctcagcatccatggc

SEQ ID NO: 409629 - DNA, 348 bp, Oryza sativa
tttgaactgtcttggatagtaatgacaaagatacaaaagaaaacccttcagaaaatagtaacacgataggtagtgaagaagtcttgagtcacggtaaccaggaggaccagaaggtgcctgaaatggataataccaactgcaagattaggcgagcatcaaggccatctcgtacgacgagtagaacggccgagttgcagaagaggatttacaacgtgttgcagcagcaacaggtggtaccgttcagacatcagtgaataatgtcattgatgaggtacttggtacttgcgaagttttcgaggaaaggcaagtgggcaatgaacggctcaatatattcagtggttgcccttt

SEQ ID NO: 409630 - DNA, 169 bp, Oryza sativa
ttaaaatgcagtaatgagactgtctgtcccttttccataccaattaatagacgctgctgaccggaatatcctttaatactggatggttacaagaggattcccgcatcagacaaaggtaggttctttgcctttggtcgtgtcttctctgggagggttgcaactggcatga

SEQ ID NO: 409631 - DNA, 420 bp, Oryza sativa
ttttgagcttggcttggcaacgcggagggagggacaatactgacctctgagaaagaagacattgagggaggaataaacacaatgccattggcccgttgaggaagggtgagagccaattaattgttaacaagaattgaccatatagagaggttcaatcttgttaacagcaaattttgacgttcacccttggcagacggttttgcgaattcgagaagagaaggcgcgtgcacacacaaaaaaggaatttcaggtgaaagggcatgagcacaaagatgaagaagggaatcctaagaccattccgctacatctctaacatgatggatggtaaggaggcggcacaagacatgcagattggattccccacggatgtgaaacacgtggcgcacatcggatgggatgggcctagtgtccccaacaacc

SEQ ID NO: 409632 - DNA, 412 bp, Oryza sativa
tttcctctcgtcttctccttcgagttggtggctacctccttattcaaccatgggtaaggagaagacgcacatcaacattgtggtcattggccacgtcgactccggcaagtcgaccaccacgggccatctgatctacaagcttggaggtatcgacaagcgtgtgattgagaggttcgagaaggaagccgctgagatgaacaagaggtccttcaagtacgcgtgggtgctcgacaagctcaaggccgagcgtgagagaggtatcaccatcgatattgccctgtggaagttcgagaccaccaagtactactgcacggtcatcgatgcccctggtcaccgtgacttcatcaagaacatgatcacgggtaccttccaggctgactgtgccgtgctcatcattgactccaccactggt

SEQ ID NO: 409633 - DNA, 389 bp, Oryza sativa
ttgtttttttttttttttttttatttttttttttggactcagaacatccaattttttaaccgaatagaaataaacgagttttaaacgactaacatagtgcacattgcgagcagatattaacggtccatgcaacgtgtaccatggccgtgggcaaaacttaacgaacgctaagatttttcaaatgcagccaggataaccaccacttcaacgatgctcatttcttcttggcgggagtcttggtcaccttggcaccggttgggtccttcttatccacgttcttgatgacgccaacagccaccgtttgccttatgttacgcacggcaaaacgaccaagaggagggtactcagagaaggtctccacaaccatgggcttggtgggaatcatctta

SEQ ID NO: 409634 - DNA, 395 bp, Oryza sativa
tctagaagcttcttccgagatgaaggtgatcgagaagatccaggaggcggcggcggatgggcggacggtgttctcgttcgagtacttcccgcccaagacggaggaggggctcgacaacctgttcgagcggatggatcgcatggtggcgcacggccccaacttctgcgacatcacctggggcgccgggggatccaccgccgacctcaccctcgagatcgccaaccggatgcagaacatggtgtgtgtggaaacaatgatgcacctgacatgcaccaatatgccagttgagaagattgatgatgccttaacaacaataaagtctaatgggattcaaaatgttctggctcttaggggtgatcctccacatggtcaggacaaatttgttcaagttgctg

SEQ ID NO: 409635 - DNA, 238 bp, Oryza sativa
tcatttacccagatctcatcttacgcaggcagagatggctgtcactagaattggtcttgctggccttgcggtcatggggcagaaccttgccctcaacattggagagaaagggttctcctatctctgtctacaacaggacgacttctaaggctgatgagaccgatcagctgcgccattgttagtaggagacccatctgtgtacgggatgcatggccctgcatcctttgggacctccatt

SEQ ID NO: 409636 - DNA, 334 bp, Oryza sativa
tcttgatctgaaactagaaagtgataaaactggatggtatattgataccagtggggaacaagaggatcagtgctcggacgtgagagctcgtatatgagtggtgacatcagactattgacattatgcagattgcgttgagcatgtcactctgacattagtaaatggacgagctgatgacaaaagatgtttatgccgggctcttaggaagggtattgatacggacctttgattggtgtctgatgagaacgaggaattctggcgtggaacagagccacttcaactgggtcgcttgccgtgccttccagattcagtaactgttgtgggatattctctt

SEQ ID NO: 409637 - DNA, 421 bp, Oryza sativa
tttgaaagaggccaagaaaggccaagaaagaactgataaatggattagaaaaaatggcaggagttcgatccattataggtgtgaagagaatgggtgagcttgatcagaaggccttttataatgcatgcaaaaataaaatgccaaataataagatgaaattggcacttgtttgttcaaaatgggaagatgagataacaaaaccagaatggcatcctttcaaagttatcgagactgctggacagacaaaggaaaatcattcaagcaggatttttgaggaacaaaagagaaggttaaaataccggaaataatcaaggaagatgatgggaagctgcaggctttgagggcgcaatatggggatgaggcttgcaacgttgtcgttaaggcccttggtgaaatgaatgaatacaatcccagtggcatg

SEQ ID NO: 409638 - DNA, 418 bp, Oryza sativa
ttgttttttacattactggagtttgcgaatattcatatagcctcaactctcaaatgtgcactacaatgtcgccagtagagacagacaatgtctgggagatatgaatacttgcttcactaataggcagcctcatccaactacatgtcaggggacgaattctacagataacgataccacgagcagggtccagatctcactcaggtgtttctcttcttgtgcgtcttccactgcttcagcaagtaacttgctgcctctggcataggggcactccggttctgcttgaagttccacagctcagggacaggatacatgccactgggattgtattcattcatttcaacaagggccttaacgacaacgttgcaagcctcatccccatattgcgccctcaaagcctgcagcttcccatcatcttcct

SEQ ID NO: 409639 - DNA, 359 bp, Oryza sativa
  unsure (1)..(359): unsure at all n locations
tgttaaggtctattgcactcatattgcacgtgattatgggcttccttggcagaagcaaaggcaacatgcaagcacagggagtgcctttatgattggggatggcaaactattgacaaatgcacattgcgttgagcatgacacccatgtcaaagtaaagagaaggggagatgacaaaaaatatattgccaaggttctagcaaggggtattgagtgtgaccttgcattgctgtctgttgagaatgaggaattctggcgaggaacagagccacttcaactgggtcgcttgccgtgccttcaggattcagtaactgttgtgggatatcctcttggtggagacacnatncctgtaacaaaaggcc

SEQ ID NO: 409640 - DNA, 417 bp, Oryza sativa
  unsure (1)..(417): unsure at all n locations
ttcgccgtcgcagatccgatccaggaagaggtcgccgccgccgctgccatggcgctctccgtggagaagacctcgtcggggagggagtacaaggtgaaggacctctcccaggcggacttcggccgcctcgagatcgagctcgccgaggtcgagatgccggggctcatggcgtgccgcgccgagttcggcccctcccagccgttcaagggcgcccggatctccgggtccctccacatgaccatccagaccgccgtcctcatcgagaccctcaccgcccttggcgccgaggtccgctggtgctcctgcaacatcttctccacgcaggaccacgccgccgncgncatcgccagggactccgccgccgtgttcgcctggaagggggagaccctcgaggagtactggtggtgcaccgagcgc

SEQ ID NO: 409641 - DNA, 419 bp, Oryza sativa
tttcttgctgagacagctgacaacaagctggtcgctgctgatgcaaagttgaactttgatgacaatgctgcctttaggcagaaagagatatttgccatgcgtgacacaacacaggaagatcccagagaggtggctgctgccaaagctgacttgaactacattgggcttgatggagaaattggctgcatggtgaacggtgcaggattggcaatggctacaatggacatcattaagttgcacgggggtacgcctgccaattttcttgatgttggtggaagtgcatcagagggacaggttgtggaagcatttaagattttgacttccgatgatagagtgaaggctattctagtgaacattcttggtggtatcatgaaatgtgatgtgatagcaagtggaatagtgaatgcagcaaaacagga

SEQ ID NO: 409642 - DNA, 382 bp, Oryza sativa
tgtcgttccacttctccccttccctccccgggcgctcccaccgcgaggccacgcgcgtccacgaggagcgcgtcgccgacctcctccaggccaagccgggacaccgcctcctcgacgtcggctgcggcgtcggcgggcccatgcgcgccatcgccgcccactccggctccaacgtcgtcggcatcaccatgaacgagtaccaggtgaaccgagcccgcgcgcacaaccgcaaggcctggcctcgactcccgctgggagggcgtctgcggtaacttactctccatgccgttctccgacgcctccttcgccggcgcctactccatcgaggacacctgccacgcgcccaggctgcaggacgactacggtgagggctttcgcgtgc

SEQ ID NO: 409643 - DNA, 278 bp, Oryza sativa
tttacttcccacgcgacctctggtgggccctactcgtggggctactgctacaaggaggtgaagggcgcgacgtcagacttctgcgtgccgaacgcgcgctggccgtgcgcgcccggcaaggcgtaccacgcccgcggacccatgcaaatcgcatacaactacaactatggggcggccggcgaggcgatcggcgcggacctgctgggcaacccggagctggtggcaaccgacccgacggtggcgttcaagacgctgctgtggctgcggatgacctcccg

SEQ ID NO: 409644 - DNA, 414 bp, Oryza sativa
tggcgaagccgcctgttcgatcatctaggtcccagtcattgggtgatcgtacagagaagcccttcatacacttgcagataggaagcttgctctcttcgcaggctgtgaaagctccacagatgccatacacatcacactgctttgggttggtgtaggttggtacccaatcttgcacatgctccacccacaaaaatatcttggtctgaccagagatgtccagcataaaacgcatgatcgttgcgttatctagtaaggtatatgtgaagcacacttcttcatcattgctgacaaaagtaaaatcaattaagcgttgacctgtcatctctggtatggaaccaaagtaatgtccgttccattctccactagaccagtatggatagaggagcctgagagctgcaaggatgaacctggcag

SEQ ID NO: 409645 - DNA, 421 bp, Oryza sativa
cgagcaacttctgttcgctccattgcatgtgcctccatcacaaggccgccgcaagcaccaaaacccagatgacgctgtgctcgccgccgccatctcctccgccttctaacccgcgccgcgcgcttcctcctcctcctcctccagagcaactacctcctcccccgcctctcccctctctaaaaccctagtccttctcgcccgccatggggtacgcgcagctcgtcatcggccccgccgggagcggcaagtcgacatattgctccagtttgtatcaacattgtgagactgtgggtaggacaattcatatggtcaacctcgatcctgctgcagagcacttcagctatcctgtatctacggatattagggagctcatatcattggatgatgtcatggaggaacttgggatgggaccaaatggcgg

SEQ ID NO: 409646 - DNA, 418 bp, Oryza sativa
cgatacatcgcccctcccaacatcgccggcaaactgatcacgaggcactatgcgccggagtgggagtggaagaactgggcgtggcgctcggacggagacctgttcatgaacggcgcctacttccaggcgtccaacggcgccatcaacaggaaggtgaagggctccgacatggttaagcccaagccaggctcctacgtcaggaggctcacacgcttcgccggcgcgctctcctgccggcccggcgagccgtgctgatccgccggcgagatgacgtcacgtaggcatgcagcatgagcgaccacggagatcatcatcatcaagaaaaaaaaatataatggggaaagaaaattaaacatttggacgacatagaagggtgacaaatggaagggtagccaggttaaatttcctgtccattttg

SEQ ID NO: 409647 - DNA, 417 bp, Oryza sativa
taggacggaagggggccaaccatttgggacaaattcgcacatacatttggaaagatcattgacttcagcaatgctgatgttgcagtggatcagtaccaccgtttcgaggaagatattcagcttatggcagacatggggatggatgcatatagattctcaattgcatggtctaggattttcccaaatggcactggtgaggtcaaccaggcaggcattgatcactacaacaagctaatcaacgcattactagctaaaggaattgaaccatatgtaacgctctatcactgggaccttccacaagctttggaggacaagtacactgggtggcttgacaggcagatcatcaatgattatgcggtatatgctgagacgtgcttccaggcatttggggacagggtgaagcactggatcaccttc

SEQ ID NO: 409648 - DNA, 415 bp, Oryza sativa
gctgtagaaacaagcaagattattctagccaactggctagcttgcgaatggcttccttgtcctccttaatgctcgtcacggcagtggccgcattgctggtcattggctcatgtggcactgaggtcaccttcaagatcggtgagtgctctaccacctctacactggaactcatcaccaatgtcgccatatctgaggtggagatcaaggagaagggtggcagcgactggagggggctcaaggagtcatcggctaacacctggaaaatcaaaagtgatgcaccgctcaagggccccttatccgtccgcttccttgtcaagaacggtggctatcgcgtcgtcgacgatgtaatccccgaaacctttaaggccggctccgtctacaagagtggcatccaggtccagtgatggacatgcat

SEQ ID NO: 409649 - DNA, 401 bp, Oryza sativa
cggacgcgtgggctcgccgcgcttaaaccctcgccgccttcccgctccgaacgcccctcccttcgccgccgcccccgaccatggcgcacgccctcggctgcggcgccgccaccgcccccgccggggtgggtctcctccaccaccacgagaaggctggggcgttgttcagtgccgcaggctccatcgttcgggttcagcagctcagcgggaaggggagcaaaagccaagctataagatgtgcaatgccaagtgcaagtgagcatggtggaatttcaaccgcaacagctagtagtagtgatcaaaagaaaggtggactgcgtggcaaactgaataaagttgttctagcttacagtggtggtttggatacatcagctattgttccatggctccgggagaacatg

SEQ ID NO: 409650 - DNA, 413 bp, Oryza sativa
ccggtgtcgagggcaccagggagaagctcacagatgagcagatcattgacctgatcatcacccttatatactctggatatgaaaccatgtcgacgacctcgatgatggctgtcaagtacctgtcagaccatcccaaagctcttgagcaactcaggaaagaacattttgatatcaggaaaggtaaagcgcccgaagatgccatcgactggaatgatttcaagtccatgaccttcactcgagctgttatcttcgagacattaagattagctacagttgtgaatgggctgctgaggaaaactacccaagatgttgaaatgaatgggtatgttatcccaaaaggttggagaatatatgtttacacaagggaaataaattatgatccattcctgtaccctgatcccatgacattcaat

SEQ ID NO: 409651 - DNA, 391 bp, Oryza sativa
tctaaatggatgtttaacaaaggtcaaggaaagacaatgggaagttattacactttgttgaatgctttgattgaggatggacgagtggaggaagcagaagagctgtatggaaaaatattctcacgatatttggagggtttgcctcatacctttttcatgagaatgatatctttatattacagactagaatcatatcagaagatgtttgagatctttgctgatatggaggagctgggtgttagacctgacggttcgattatcagaatgcttggtgaggtattccagaagttagggatgttggacaaatatgtaaaattaaagaagatatatccaccaccaaaatgggactatcgactcatccaaggccaacgccttcagagtaaaagtttac

SEQ ID NO: 409652 - DNA, 419 bp, Oryza sativa
tgacgaagagttagcaactgaggtggcatgggttgtggtctatctttcagcactttcagacagaggtattagcttaatagtaagaagttctgtgcctcagctgctgataggacgactgttctcatctgagaacttgcagttgctgatcccagtgcttcgtggtttgggaaatcttattgccgctgatgactacatggttgattcagtcctaactgttggaaacaatatcattgatcaagcattgtcaggtcttataaaatgtttgaagagtgataacagggttctcagaaaggagtcatcatgggcattgtcaaatatagcagcaggcagttttgagcacaagaaactgatttttgccagtgaggccacgcctgtgctgatacgccttgtcaccagcgcgcaatttgatattcgcaggg

SEQ ID NO: 409653 - DNA, 409 bp, Oryza sativa
  unsure (1)..(409): unsure at all n locations
atcaaagcttctaaactgaagcttaatctatatataaggagagttcattttgattttggtgaggaagaagtaagtagaagtgaattagtgatatcgatcagagtgtgaagaagatgtctctggtgaagctgtttgatacgctggcgttcgacgcctggaacccgttcagcatcttcgggacgacggtggcggcggacgcgtggctggcgagcgacacgtcggcgttcgccaacacgtacatcgagagccgggagacggcggaggcgtacgtgttccgggcggacctgccggcgggggtgaagaaggaggaggtgcggtggaggtngacgaggggaacgtgctggtgatcaccggcgagcgcagccgtcggcgggaggagaaggcccagcggtcgcaccacattgagcgc

SEQ ID NO: 409654 - DNA, 419 bp, Oryza sativa
tgccggggcaaaaagaatggtctgaggcggacgaagaagtggtggctcccatcacctcgtgtgccagatatagggttgtctcaatttcagagaaataggcttgtttttcaggctaagctggttcatcaaatcctcaaagctgcgatgtcaatcaatgaagaagtcctgcttcagatacctattcctccagctgtcacggatgctcttcctaagtctggcagagctagcttgggtgaagacctgtaccatgctataaccacagagtacattcccatagaggaaattttcctctctcttagtttaaaaacggagcataccgtgcttgagactatgaaccggttggagggtgcagtttttgcatggaatcaaaggatctcagaggaaaagagcaagaaatccccaggaaggcattcctggaa

SEQ ID NO: 409655 - DNA, 411 bp, Oryza sativa
tgtaccctcctctcacattttccccaaatggtaatagaggaaggggaaaaacacatttgcagccacatcatccatggcctctctccgcaccattccggtgatcttcggcatcctcttctatgtccttgccagcactgccactgccaccgacgcaccggactacgtcgtccaaggccgtgtctactgtgacacgtgccgcgccgggttcgagaccaatgtcaccgagtatatcaagggtgccaaggtcaggctggagtgcaagcactttggcaccgacaaggaccagcgtgcgattgacggcgtgactgatgagaccgggacatacaagattgagctcaaggacagccatgaggaggacatctgcgagggtgtcctcggtcacagcccccttgcaaactgctctgaaatcga

SEQ ID NO: 409656 - DNA, 323 bp, Oryza sativa
tggagcgagctgggagggtatggagagaggagaggtcatccttttgttgattactacttaaattaggaaagctgggttggtggttaatggcgacttgcatggtggtgatttgtaatataagaacacccaagatgatgaattaatgcatccacttgtacatcgatcgatcgatcttggtatttgactaagtgagtgtgactgtgaatgcacatatgcacactgcatagactttacctgaaaaaaaaaaataaaaaaaaaaaaaaaaaaaataaaaaaaaaaaatatctaaaataaaatgtctattcaattaaaaataataattg

SEQ ID NO: 409657 - DNA, 413 bp, Oryza sativa
  unsure (1)..(413): unsure at all n locations
gcaattcttgagctcaatcagcaacagcatctatctccttcttgcttagttaagtccttcgccctcccaagaagaagaagatgtcttgctgcggcggcaactgcggctgcggcagcggctgccagtgcggcggcggctgcggcggatgcaagatgttccctgatgtggaggccacagccaccaccaagaccttcgtcctcgctgctccatccaacaaggcgagctctggaggaatggagatggcggtggagagcggcgagaacggcggctgcggctgcaacacctgcaagtgtggcaccagctgcagcggctgctcctgctgctcctgcaactgaatctatcgtcgtcgtcgcccggctgcatgaggatttatcgtatggatgctgctactgtcgatcagagctntgatcgag

SEQ ID NO: 409658 - DNA, 416 bp, Oryza sativa
tttaacaccaagaacttgttggagctgagacagcagcaccaagcaagaaaccggatccaatccatccatccatccatagtttccaatggctggcaagtacatcgccgctggtcttgttggttcctttgccatctcatatgtttgtgatcattttatcgctgagaagaagatatttggaggcaccacaccacataccgtgtccgacaaggaatggtggcaagcaactgacaagaagtttcaagcctggcctcgcactgctgggccaccggttgtcatgaaccccatcagtcgccagaacttcatcgtcaaggatctcgagtcctaagattgtagtgggagcatatatgctgaaggttgcgccgtgactaaaatggcgatggctgtggctacaaactacctacctatgccgtactccc

SEQ ID NO: 409659 - DNA, 415 bp, Oryza sativa
  unsure (1)..(415): unsure at all n locations
cgacgacttctccctctccctcctcttgcactctcctcctcctcctcgtgagctccgaggttgccgacgacgacgacgacgaggtctcacccatggcgacccgcgaggtgcccctcctcctcctcctcgtcgtcgtcatggtcctcgccggcgccggcgccgcccgagggttctacctccccggcgtcgccccccgcgacttccgcaagaaggaccagctggcggtgaaggtgaaccagctgagctcgatcaagacgcagctgccctactcctactactccctccccttctgccgcccggccaccatcgtcgacagcgccgagaacctncgcgaggtcctccgcggcgaccgcatcgagaactccctctacgtgttcgagatgagggagccgaggctgtgccagatcgtctgcaa

SEQ ID NO: 409660 - DNA, 415 bp, Oryza sativa
ttaaggcctttcttttgcttttcgcattggggatgctgcaatcactgcgccaaacgaaggtcaaggatggcgaagaaactcaacagtaccacaagaaggctatggaacagcaagtgtcatacctgaccaagggattttccttgcagcatcagtttaccgtcctgtatttgagtttatgaataaaattggactgatgcttccgcagaaatattggcaacttgggaatgatgggctattggcttttgtgaacaacttcttgaaggagcacttcttgccagcaatatttgtagattaccgaaaatgtgttcaacaggctatatctagtccagccgcatttagaccgcgtgtccatgcaacctcagtgtatagtccattagtcgaaaatgggcgtcctgtactacaagggcttttggct

SEQ ID NO: 409661 - DNA, 409 bp, Oryza sativa
ccccctcaacgtggtttctttacacccgggggggacgaacgacaccgaccaccagcgcctagatgtgccgacctccgagcaatccatgcccaagggacggttatacgaaggggagcctgtaccagatagcaaatcatcagatgcccagacggaactgacagagaggatcactcatgaaatgaatggaactgcaatctaaaagggaaagaatttaacagagaagatggcgaagatactatacaggatgacttcaccctctgtaatcttagcagtcaagtcccatattataattatgatgtcgatcttattaaagatatacaattttctcacagcaacaatgttcaccgaagaacaaaacccgctattgaagttagatgcaaagaagggctatgctctgacacatgcacga

SEQ ID NO: 409662 - DNA, 267 bp, Oryza sativa
ttggaaccccgacgccatcacgtttttggtggacgacgtgccgatcaggaggtacgagaggaagagcgagctgacgttcccggaccggccgatgtgggtgtacggctccatctgggacgcgtcggactgggccaccgacgacggccggcaccgcgccgactaccgctaccagccgttcgtcgcgcgcttcgaccgcttcaccgtcgccgggtgcgccccgtcggcccccgccttgtgccgccccgttccgggcttcctgggcggcgg

SEQ ID NO: 409663 - DNA, 415 bp, Oryza sativa
gacacgacgcaccaatggcgctcgtctccgcctcctcctccaccaccgccgtcgcggcgctccccggcgccgccagggcctcctccttcctcggcggcgccggcaggagcggcaggctgctgctgaggcaggccgagtcgtcgtccgcgcgggcgtcgttcgccgtgcgcgccgcggcgcccgacaggccaatctggttccccggcagcaccccgccgccgtggctcgacggcagcctccccggcgacttcggcttcgaccccctgggtctcggatcggacccggagagtttgcggtggaacgtgcaggcggagctggtgcactgccggtgggcgatgctgggcgcggcgggcatcttcatcccggagttcctgaccaagatcggcatcctcaacacgccgtcgaggtacaccgc

SEQ ID NO: 409664 - DNA, 356 bp, Oryza sativa
gttaaagacttggatgaaaggacttgggctggcgaccataacaggttctgtgatcacacacaatgggatacatgttccaaggatacaggatcctaccagagaaaggaggatgagatttgcagactctgtaatcgatgagctatatacctacattgatggttatgatacacgcaacccggccagagcaaacccatgagaatccctcaattgaactgggtgcagagttcaagaaggtcgggtgtttccttggtcgctgtaagcaaatccccagcattgttgagcttgacaccttgactgtatggcgggatgcacggattggctctagcatcacattgaagggcaaggtgaccattaca

SEQ ID NO: 409665 - DNA, 418 bp, Oryza sativa
cgccatgcccgtcttcaagggccgcacgcccgtcgagtgctacaccgacttcatgcgcgccttccgcgaccacttcgcctccttcctcggcgacaccatcgtcgaaatccaagtcggcatgggccccgccggcgagcttcggtacccgtcctacccggagagcaacggcacctggaggttccccggcatcggcgccttccaatgcaacgacaggtacatgcgtagcagcctgaaggcggcggcggaggcgaggggcaagccggagtggggccacggcgggccgacggacgccggcggctacaacaactggccggaagacacggtgttcttccgcggcgactgcggcgggtggagcaccgagtacggcgagttcttcctgtcgtggtactcgcagatgctgctggagcacggcgagcgc

SEQ ID NO: 409666 - DNA, 417 bp, Oryza sativa
tttaaaaaaaggaaaaaaaaacaaaacacacgaagccaaataaaagcgacaatgggatcgctcaccaccaacatcgtcctcgccgtcgccgtggtggcagcgctggtcggcggcgggtcgtgcggcccgcccaaggtgccacccggcccgaacatcacgaccaactacaacgccccgtggctccccgccagggccacctggtacggccagccctacggctccggctccaccgacaatggtggcgcgtgcgggatcaagaacgtcaacctgcctccctacaacggcatgatctcctgcggcaacgtcccaatcttcaaggacggcaggggatgcggctcatgctacgaggtgaagtgtgagcagccggcggcgtgctcgaagcagccgggacggtgttcatcacggacatgaactacg

SEQ ID NO: 409667 - DNA, 345 bp, Oryza sativa
cttctcttctctggtggtgtgggtgggtgcctgtttaccctctcctgcctactatccttcaccctcctctgttcccccttctcacaagagagagagcgccagactctccccaggattcagccatgaagggggccaaatgcaagggcgccgacaagcccgacgccaagttggctgcgaagagtaaggacgcggagacgcccgccgccaagggcaggaaggggaaggcctccaaggaccccaacaagcccaagaggaatccctccgctttcttcggttttatggaggagttccgaaaggagtccaaggagaggaaccccaagaataaatcagtcgctgctgcaagaa

SEQ ID NO: 409668 - DNA, 395 bp, Oryza sativa
ttgttttttttttttttttttttttttcttttttttttttttttttttttttttttttttttttaacaaacccaaactggttttatcacaatggtagcccctgacaatggaaagaggaatctagggccaagggggtcattggcggggggaacaaaaaattgggtggaccacaacacccaccaggggggccaacaaggggggctttcccttttggggcgggggaaaaaggaaaacctcccgatgggaagggaaactgaataattttaggaaaccatgatgatgatgggtaggctccttaggaccccccccgcccttaggggtttggtgctcccattttggccactggaagggtaactcggaatcggtttaatccttttgggtggcctcgggggaat

SEQ ID NO: 409669 - DNA, 418 bp, Oryza sativa
tgatccacaaattgcaactgttggggcatgctgccttgttggtgctgtgcaacaaaaaacactattcatagccaaccttggaaactctcgggctgttcttggaaaggtcagttgcattgggcagattgttgctgaacagctctctagtgagcacattgccaatgatgcatggaaagcaaagggcctcgtgcaggtgttgagagcgataggtgatgcatacttgaaatacccacagtatagcagggaaccactcaacaaaccaatactaagtgccaatccatctattgtttcacgcgttcttcgaccaagtgaccgcttcatcatatttggctcagctgttctatgggaatatctgtccaatcaggaagctgttgagattgttaaaaaccatcaagcttctggaagtgccaaaatgcta

SEQ ID NO: 409670 - DNA, 417 bp, Oryza sativa
tctggttggcttctcctccccctctttaccttttcctcctcggttcggttccgtggttcgtctagggtttagtgggttgagatggcggcgccggatgtcgagtaccgctgcttcgtcggcggcctcgcctgggccaccgacgaccgctccctcgaggccgccttctccacctacggcgagatcctcgactccaagatcatcaacgacagggagacggggaggtcacgtgggtttggcttcgtcaccttctcctccgagcagtcgatgcgcgacgccatcgagggcatgaacggcaaggagctcgacggccgcaacatcaccgtcaatgaggcccagtcccgccgctccggcggcggaggcgggggctacggcggcggcggtggcggctacggcggcggtcgcggaggcggcggctac

SEQ ID NO: 409671 - DNA, 414 bp, Oryza sativa
tctcgagcgccgcagaggagagcagcagtgaggccgtcgctgatgagatccgcctcgcaggtcctccgccgccgccgcggctactcctccgcctccggccagccggagcggaaggtcgccatcctcggcgcggccggcggcatcgggcagccgctctccctcctcatgaagctgaacccgctcgtctcctccctctccctctacgatatcgccggcaccccgggcgtcgccgccgacgtctcccacatcaacgccccggcccaggtgaaggggttcatgggggatgaccagctcggggaggcgttggaggggtcggacatcgtgatcatcccggccggcgtgccgaggaagcccggcatgaccagggacgacctcttcaacatcaacgccggcatcgttaagaacctctgcacc

SEQ ID NO: 409672 - DNA, 379 bp, Oryza sativa
gttttgcagattttcaacatgacagagatatatgcagacatcattgtggagcatcagtacgtagagtgtacctcatcagtcatccaagcattggcattgttccgggagaagtaccctgggcatcggaaagatgaaatagatcaatgcatcaggaaagcaacagaattcatcgagaagttacagaatgatgatggatcatggtttggatcatggggtatttgcttcacgtatggaacatggcttgcaatagagggtctgtcagccgtggggcagtgttatgatgacagcacctgcattcggaaagcctgtaagttttttgtatcaaagcaactaacaaatggtggatggggggaagagtcatctctccattcaaaaccgg

SEQ ID NO: 409673 - DNA, 392 bp, Oryza sativa
tgtgtgcagtttcacaatgaccaaacacatattttggtggttcatgagagccagctggcgatctatgatgcaaagctagagtgcttgcgctcgtggtccccaagagaagcactccctgctccaatttcaagtgcaatatactcatgtgatggtctcctcatctactccggattttgtgatggtgcaattggagtcttcgaagcagagtctcttaggctgccatgcaggatagcaccttctgcatacataccaccttacatgtctagtggcggaagaggttaccccatgcgtctgctcattcgcttgccttggaggctcaccagttcgggaaaataactagcgatgttgctgatcatgcaaagtcttccaattaggtcacaactaatatcatc

SEQ ID NO: 409674 - DNA, 408 bp, Oryza sativa
  unsure (1)..(408): unsure at all n locations
tattttatttacctaccaattgacttcaagaacaagtgcaatgtaggctatgctttcatcaatatgaccaatcctcagcatatcattccattttatcagacgttcaatggcaagaagtgggaaaagtttaacagtgagaaagcggcatcacttgcttatgctagaatccaagggaaatcagctcttattgctcacttccagaactccagtttgatgaatgaggacaagcgctgccgccccatactattccattcggatggtcctaatgcaggagatcaggaaccattccctatgggtacaaacatccgagccaggtcagggagatcgcgagcttcctctgccgaagaaagccaccaggacatctcaataccctnggttaattgtgacacttttaccaatggagttgat

SEQ ID NO: 409675 - DNA, 410 bp, Oryza sativa
gtggccgcctgccaatggggagcccctatgggccgccgatgcatatggcagggcctccatattctgctggatccatgatgggaccaggtggaatgtatgggatgcccatggacagatatagcttgggcttacctgctggtcctggtccaatgggcgcgagggctggttcatattccgaggaaggatcccagaagaagcctgcaggagctgggcgtgataatgattggaaatgccctaattgcaacaacattaactttgcattccggacagtctgtaacatgagaaagtgcaatacaccaagacctgaaaaccaggggtccaaacctgatggtgcaagaggtccaaaaccaaagatgccagaaggtagttggaagtgcgagaagtgcaataacataaactatccattccgc

SEQ ID NO: 409676 - DNA, 411 bp, Oryza sativa
tgagagtgctggtggggttgttatgtgggctggaacttggagggtaggtggtgtacttgcaatgtctcgggcatttggcaaccgcttgttgaagcaatttgttgttgcagatcctgagattcaggaacaagaaatagatgatgaattggagtttctgattttagctagtgatgggctgtgggatgtggttccgaatgaggatgctgtttcactcgtgaagattgaggaggaacctgaggcagcagctcggaagctgacagagactgcattttcccgagggagtggtgacaatatcacatgcattgtcgtgaaatttcaacatgacaagatggacggtgattcctcaccaacaagcgataaaagctgattccatttgttgtttgttatacatgttgtcggtcgtttaacttc

SEQ ID NO: 409677 - DNA, 373 bp, Oryza sativa
taaaccgttacaagctgcttcagaatcacaaagtttcttttattcctggatgggattgccatggccttccaatcgaattaaaagttctaaagtcactggacaaggaaacattgaatgctctgacacctataaaattaaggcagaaggctgcaaaatttgctaaagcgacggttactacacaaatgaattctttcaagcggtttggtgtatgggcagattgggacaacccttatctaactctgtcaccagagtatgaagctgctcagctagaagttttcggccaaatggttatgaaaggatatatctaccgggggcgaaaacctgttcattggagtccgtcatcacgtacagctttagcagaagctgagttgga

SEQ ID NO: 409678 - DNA, 413 bp, Oryza sativa
cgtttttgaccctatggaccaaactgaagataactgcatgccctcagctcaagaacaggaattagcaatcaagaagaaatttggaggactaatgccaaaaaaaccaccactcatctcgaaggatcatgaacgggcctattttgattctgctgactgggctctgggaaagtctggacagcaaggcgctgcgaaacccaaaggacctcttgaggcacttaggccaaagttgcagccaacacgacaacagcagcagcgttccaggcgcttgattaacacctcatcagaaaacgaggatggagacggtgctggtgctgaggatatgaacatcaactgacctgctagggagtgttctgttgggaacctcatgattcaaagcagctcattgttcgtggatcgcagggaaggatatgatg

SEQ ID NO: 409679 - DNA, 420 bp, Oryza sativa
tgtaatattgccagaaagaaacatgaaggacttggctgaggttccagcacccattctctctggcttggagattctgcttgtgaagcgcatcgaggaagcacttgaccatgcttttgaaggtggatgccctctgagaccacactccaagctatagcatcaaccaatctgaagatggcgtttgatctggtatactttcctgctggttatgtacctattttggagattcatccataaaacaaggttcagatttccatgaaagagcaactattccacgaggtagaatctcacgccaaacgcaggcttgcagcgctgctgccaatcaatttggttgagcaacattcggaatctgtatacgagttatacaaacagatgtgagttctgccttctggtgggcctgggtcccactgatatatatagagg

SEQ ID NO: 409680 - DNA, 377 bp, Oryza sativa
tcttcccgagccgactgccgccgccgcggccatgctcctcgcgaagccccacctctcctcctcctctttcctcccatccacgcgggtgtctagccccgctccgggtcccaaccacgcaaagcccatcgccgcctctcccgcccctcgacgctgcctccgtctcgccgtcacatccgccgcggcgccggctgcttcgtcggcggaggcggcggcggcgctgagccgcgtggatgtgctctcagaggcgctccccttcatccagcgcttcaaggggaagaccgtggtggtgaagtacggcggcgcggcgatgaagtcgccggagctccaggcttcagtgatccgcgacctggtcctcctctcgtgcgtcggcctccacc

SEQ ID NO: 409681 - DNA, 427 bp, Oryza sativa
taaagaatttcagaaagctcaacggttagcggtagaaagagaagctgcttatgcacccttcatttctcaagcgggcttgccacaaagctataactcgagcgaggtgaacaatggtgctgataagttggctgagcaacgcacggcgcttctagaatcaagaaggcaagaattagtcttcttggataatgagatcgtgttcaatgaggccgtcattgaggagagggatcagggaatacaagaaattcagcaccaaattactgaagtaaatgaaatcttcaaagatcttgctgttctagtccacgatcaaggacaaatgattgatgacattgacacccatatcgagaatgctgttatagcgactacacaagcaaaaggccaactctctaaggctgctaaaactcagaagtcgaactcttcgctgatatgc

SEQ ID NO: 409682 - DNA, 419 bp, Oryza sativa
tgtttttactcatacagtctccactcacacgcatggcatttgataggctacagtggaggggaaggaggaggacgtgcggctgggggcaaacaggcactcagagaggcactcatttgggacggcgatgcacggcgccattgacaacatggactacgaggagccggcaacggcgcccatgatggagccaggggagctcaaggacctgtctgtgtacctaggcgagatcggcgagctagacgacaccttcctcttcctctacatgagcatgcttaccgtcttgtgagtctacaagtcctgctacaagtgcgccaccgtgggcatgcacagcatctgctgtgccttgggagggatgagcttggaactcgactactgcaccgacggcatttccggaggacacatcagcccagcagttacttttg

SEQ ID NO: 409683 - DNA, 487 bp, Oryza sativa
tgtttgcttacctaacatacttttacaagggggcctttgtacattgccaaagtccttcgatctcgcctcccagatctgccccgcgtcggcgaagatgaagatcaacgtgcgggggtcgacgatggtgcggccggcggaggagacgccgcgggtgaggctgtggaactctagcctggacctggtggtgccgcggttccacacgccgagcgtctacttcttccggcgcggcgaggcggcggcggcggagggcgggagctacttcgacggggagaggatgcggcgggcgctggcggaggcgctggttccgttctacccgatggcggggcggctggcgcacgacgaggacggccgcgtggagatcgactgcaacggggaaggcgtgctgttcgtcgaggccgacgcgccgggcgccaccgtcgacgacttcggcgacttcgcgcccaccatggaccttaagcgcctcattcccaccgtcgactacaccgac

SEQ ID NO: 409684 - DNA, 483 bp, Oryza sativa
tctcggacgcgtgggcagcaccacccctggggctgcttctcccacctccctctgaattgcgggcctgaggcgatggcggcgctcgccccgtccaagatgctcggcacccggctcaacttcgccggctcctcccgctacgccaccgcggcaccgaccaccggagcgcagaagatcgtctccctcttcagcaagaagcccgccccgaagcccaagcccgccgccgtcacctcctcgagccccgacatcggcgatgagctcgccaagtggtacggccctgacaggaggatcttcttgccggagggtctcctggaccgctcagaggtgccggactacctcaacggagaggtccccggagactacggctacgacccttttggcctcagcaagaagccagaggacttctccaagtaccaggcctatgagctgatccatgccaggtgggcgatgctcggcgccgctgggttcatcatccccgaggcctgc

SEQ ID NO: 409685 - DNA, 485 bp, Oryza sativa
tcttatgacccaaacgtgtctgcaacaaccatctctcttcctagtgcagcgagaagccggaagagaccggacgccatctggctgatcagtaccagcagcacataatggcggaagaatctctctatgtttggatcaaagcccatgacatagtatgtcatgcaaatccacacagcacattctaagaatgatattgggattttgagcacccatgtaggtaatgcatacgcccatgatggatagaaaagcaggtccctctgcttatagaatatcggcagctttgcaatgctcatggcgagctccgcaaatccattgaacaaatgtgtgactaatccaaggaacatagcacccaggaagatcgcaccatcttctacactgcgtcgatgcatctttgtacgcaggaagaccgtcattccgatgcttccaaggattatgagctggtacagatgtacctttcgtcagattttatttatggtcccgaagtagag

SEQ ID NO: 409686 - DNA, 483 bp, Oryza sativa
tcttttctttcagctaaacagttcagacggggatttttttgcaatgcttgcttaggcgcctgcaaagccggcagagcctgttgatctcatgcctccagtcaaacctcttgcttccactgagacattcgagatgaacatgctctctgatacgagcagcaacccatttggctcttcagactttggttgggaggatgacaccctgaccccagactacacttcagtcttcgttcctaatgctgccatgccagcatatggtgaacctgcttacctgacaggtggagcgccaaagagaatgaggaacaactatggtatcgccgtgccccagggaaatggcatgcctaatctcgcacaaaacatgcccaccttcgatcccgagatgaagtatttgccattaccttatgttgagagcagctcagatgaatcaatggacaaccttctgcaaaatgatgctacacatgacggggcatgcaacgagggcatctg

SEQ ID NO: 409687 - DNA, 477 bp, Oryza sativa
tttttcacaccacccaccaactgagagctggggaggctttgcgagcggacatggctgcatcgctccaagccgcggccaccctgatgcagccggccaagctcggcggccgggcctcctccgccgcgctgccatcgcgcccgtcttcgcacgtcgccagggcgttcggcgtcgacaccggtgccgccggcaggatcacgtgctccctgcagtccgacatccgggaggtcgccaacaagtgcgccgatgccgccaagctcgccggcttcgccctcgccacctcagctctgctcgtctcgggcgccagcgcggagggcgtgccgaggaggcttaccttcgacgagattcagagtaagacgtacatggaggtgaagggaaccggcacggcgaaccagtgcccgacggtggagggcggcgtcgactccttcgccttcaaggccggcaagtacaacatgaagaagttctgcctggagccgacgt

SEQ ID NO: 409688 - DNA, 489 bp, Oryza sativa
tcgtttctccccaatctcgcgaggctctgggcgtctttatcgaatcctctcgcgtcctcaagatgcagatctttgtgaagacattgaccggcaagactatcaccctcgaggtggagtcctctgacaccatcgataatgtcaaggctaagatccaagataaggagggcatccccccggaccagcagcgtctcatcttcgctggcaagcagctggaggatggcaggacccttgctgactacaacatccagaaggagtcgacccttcaccttgtcctccgcctccgtggtggcatgcagatctttgtcaagactctgaccggcaagactatcacccttgaggtggagtcttctgacaccatcgacaacgtcaaggccaagatccaggacaaagagggcatccccccagaccagcagcgtctcatcttcgccggcaagcagctggaggatggcaggacccttgctgactacaacatccagaaggagtccaccc

SEQ ID NO: 409689 - DNA, 419 bp, Oryza sativa
tctcgattagctatctagcttagctactgggtcattttatcatcgatcatcctacgatcaaatcagtaatcttgaatatggcggctttgaacggtaaggcggcggcggcggtgatggtggtggcgatggtggtggcggcaccagtagcgtcggcggcgatcacgtgcggtcaggtgggatcggcgatcgcgccgtgcatctcgtacgtgacggggaggagtgggctgacgcagggatgctgcaaccgcgttaaggggctaaacaacgccgcccgcaccaccgcctaccgccaggcggcctgccgctgcctcaagagcctcgccggcagcatcaagtcgctcaacctcggcaccgtcgccggcgtccccggcaagtgcggcgtcaacgttggcttccccttgaggctgtccactgagtgc

SEQ ID NO: 409690 - DNA, 458 bp, Oryza sativa
tgtgccttcccccggaccagcaacgcatgatctttttcggcaagcatcttttggaccgcaggacccttgctgactacaacatacagaaggagtcaacgctgcaccttgtgctccgtctcaagggaggcatgcaaatcttagagaagactgtgaccggcaagaccatgaccctggaggtggagtcttctgataccatcgacaatgtcatggccaagatccaggacaaggagggcattacctcggaccagcagagcctcatctttgctggcaagcagctggaggatggcaggaccctcgctgactacaacatccagaaggagtccaccctgcaccttgagctccggcttcgtggcggcatgcagatctctgtcaagaccctcacaggctagaccatcaccctggaggctgagagcgtcgacaccatcaacaacgtaaaggtcaagatccaggacaaggag

SEQ ID NO: 409691 - DNA, 380 bp, Oryza sativa
  unsure (1)..(380): unsure at all n locations
tttcatcctcttgtctccttctggcctgtgtggtggcatcggccatggtgcctgcagcgccatgcgggccgcccaaggtgccgcctggccccaacatcactgcggcctacggcaaacagtggctggaagctaggggtacctggcacggcaagccaaagggtgccggccccgacgacaacggcggcgcttgtgggtacaaggacattgacaaggctcccttcctcggcatgaactcatgtggcaatgaccctatcttcaaggatggcaagggctgcggctcctgctttgaggtcaagtgttccaagccagaggcctgctccgacaagcccgtcattatccacatcaccgacatgaacactgagcctatcggcgnctaccac

SEQ ID NO: 409692 - DNA, 373 bp, Oryza sativa
ttttaccgttgtaacaacaaatgacgcttgcggtgggaagtctgtagatgttgatatggctgacaagcctggagattcagatggcttcaaacactttgatgttcagcagtgccctccagaccatcattacctggaaaacatggcgcagggcactggtggaagaaagcgggtaaaaaaggcacagcaggaatggaacatacttgagaaaaatctaccagattatatttatgttagggtatttgaggactcgaatggacctcataagagccgtgattattggagcaagtggaacaccataccaagatggtcttttcttcttcgacttccaccttccacctgagtttccacatgttcctccgtcggcgtactatca

SEQ ID NO: 409693 - DNA, 321 bp, Oryza sativa
gtattttaaaaaaaagagaaggcgaaaccccggatgggacgctatggacgacgccgccctccaccgccgctcgccggaagaacgcgccctcctctccccggcgctctgcgaccgcctcgtcaccaccaagccctactcgtagaccaccgcgccaccgccgccgacgtcgaaggcgtatgctaacaccaagacgttcttgatctacaagtgggaacccgactcccacacaactaaaccccacctaaaagactacaaggaggagcctcccgactgcggtccgggggggctcgacctgcagctaaagatcaaaaactaacagga

SEQ ID NO: 409694 - DNA, 352 bp, Oryza sativa
ctcaatgaaagttacagcaccatcaattcgtgaggctgtttcaaaaatcctgaagcccaatcctgaacttgctgactcaatatacaagaagtgtattggtttgagcaattggtatggagtgatcccagcactgtggccaaatgcaaagtatgtgtatggtatcatgacaggatccatggagccatatctgaaaaaattaaggcattacgcagggaacttgccacttataagtgctgactatggcgcatcggaaggatgggttggctctaacatagaccctactgtgccaccagagcaggtgacatatgctgttctcccacaagttggttattttgagttcattcctttggag

SEQ ID NO: 409695 - DNA, 400 bp, Oryza sativa
gcgttcaaccttccactgatccacacacagccgcgaggagagagaaagagagaggagagagagatggcggcggagctgacggcggcgcagctgcgggcgtacgacgggatcgacccatcgaagccgatctacgtctccgtccgcggcaaggtctacgacgtcacctccggccgcggcttctacggccccggcggcgcctacgccgtcttcgccggccgcgaggccagccgcgcgctcggcaagatgtccaaggacgacgccgacgtctccggcgacctctccggcctctccgacaaggagctcggcgtcctcgccgactgggagaccaagttccaggccaagtacccccgttgttggccggctcaccgaatgaaaaaaaaaaatccccccaaatcaaccc

SEQ ID NO: 409696 - DNA, 416 bp, Oryza sativa
tcgattttacttgagctaatctgaggccatgagccaatctcaaatgacaactttgggctccactgccgtaacattgatgaatgggctagaccgcacatggagagtggggatatccacggcatcattgatcagtcgttagacgcagggtacgacctgcagtccgcgtggtagattgctgaggggtcgactatatgcttgaagcccaagggggtgctagaggccacacatctcagaagggctcaaggagattaaggacgccatcgccatcaagctgcatcgggagctggccttcagcattcaccacctcatgtacaagaggtgtctcttcatagccggcaacacgaccagcaggctgcaagacctggagcaccatgcatcaggtgatgagctgcttatgcgcccaagtgtcaaggaca

SEQ ID NO: 409697 - DNA, 359 bp, Oryza sativa
acctacccggactgaatggctggttcgacccacgcgttcgttttaactaaagagaaggccaatccacgggaggacctctaaagacaactccgccctccaccgccgaaccacggcggaacgcgccctactctacacggagctcgggtacctcctagtgcctcaatcacactaacaatctggagcacctgcgtcatcgtcgaaagactgcgcaaacaccaatacagtcttgacagacaaatgggaacccgactccccgaaaacaaaaccccacctaaaggactacaaagaggacctctacggctgcgggccgggggggctcatcctgctgctaaaaaccaataaacaacaggaccctttcc

SEQ ID NO: 409698 - DNA, 319 bp, Oryza sativa
ttgttttaatatcaatttgggtcttgtctgaacaattcactgatttcaataggagttttcaggaaacgatgacgaattacagcaaactacaacttcacacctcactaaccacgaagatatacatccaaatatccaatacacaaggaaaccgagatgagattgctcctcaagatggctcaaaatcgggctgtaacctgggagaacaacgatttgaagtcttttgttggtgtgcctgtgccttcaggctttgaagccaaatcaaatgccttgaactttgtctcttcatactgcagggcctgaacacaaacttcagcaacat

SEQ ID NO: 409699 - DNA, 489 bp, Oryza sativa
tttatttgcaccacttcgagtcgaaggccgacgccggctcgttcaagacctacccgcagcaggctggtactattcgcaagaacggtcatattgtcatcaagaaccgcccatgcaaggttgttgaggtctccacctccaagactgggaagcatggacatgcaaaatgccactttgtggccattgacatcttcaatgggaagaaacttgaaaatattgtgccctcctcccacaactgttacgtcccccacgtgaaccgtactgattatcagctgattgacatttctgaagatggatttgtcagcctcctgactgaaagtggaggcactaaggatgacctgaggctccctagtgatgaggctctgcttactcagatcaaggatggattctcccaggggaaggaacggattgttaccgggatttctgccatgggtgaggagcaaatctgcgctctgaaagatattggccccaagaacttaaataccttgttac

SEQ ID NO: 409700 - DNA, 523 bp, Oryza sativa
ctctaccaaccaagaaacaagaaacattacaccaaaaaactagctagctagccaatggcctccatgtcctccttccgacttgccgtggcggcggctgcactattggtcattggctcatgtgccacagagctcaccttcaaggttgctgagggctctagcgccactagtctggagctcgtcaccaacgtcgccatctctgaggtggaggtcaaggagaagggcggcaaggactgggtggggctcaaggagtcgggctctaacacctggacactcaaaagtgaagcaccactcaagggccccttctccgttcgcttccttgtcaagaacggtggctaccgtgtcgtcgatgatgtcatccctgaaagctttactgccggctctgaatataaaagtggcatccaactctaagtaacaggcatgcatactcttgtgttgggtcatattggaattaagaacctctaaaaattatgtcttaaagagatcactccatgttcgagcgaaccattaattaatttttctatta

SEQ ID NO: 409701 - DNA, 511 bp, Oryza sativa
ctgagtatattctttttttgaacgaacatacggagtatattctataaataaaggaaaaggcctgggagcgaagcggcagagaatggcagggaaagccggcggcctcaagggcgtcgccctcatcggcggcgccggcggcaacagcgcggtcgccggcgccctccacttcttccaggacccctccaccgggtataccgaggtgagggggagggtcaccggcctcgctccgggcctccatggcttccacatccactcctttggcgacaccaccaacggctgcaactctaccgggccccattttaatcctcacaataagtcccatggggcaccatctgatgatgaaagacatgtgggcgacctgggaaacatagtagccaacaaagatggtgttgcagatatcttcataaaggacctacagatttcactaagcgggcctgattccatattgggaagggcagttgttgttcatgctgattctgatgacctaagaaggggtggtcatgaactcaat

SEQ ID NO: 409702 - DNA, 494 bp, Oryza sativa
ttagttaagagttttcacaggaaaggacagagtcacaccaggaaggccaacaatactttctcttgaactaactggtgaggccattgaggggaccacaatggttgccagcagaagatattggggaggagaagaaggggagaccatattccgttggatattgactagttcagatggatcacaaaaacaaattgaaggggctgcaagttcatcatacaccttgaactgtaatgatattggcttttacatatctgtcttgtgtgagcctgttagaagtgatggagttcatggctctctggtgtcaacagaagagtctggtcctattttacctgggaccactaccatgcttaattgtttgagtaagttggccctatggttgaaggtggtggtttgacctttcatgctgagtatacaggaggtttcatgggagactgcatccaaaaatggttcagattacattctgatggcaacaaagagaaattgtctactgatgaatg

SEQ ID NO: 409703 - DNA, 486 bp, Oryza sativa
atgactcctgagtttctcaagatgaatcctattgggaagattcctgttctagagactcctgatggtcctgtttttgagagcaatgcgattgcacgatatgttacccgctcgaaggctgacaacccactctatgggtcttcactgattgaatatgcccacatcgagcagtggaatgacttttcggccacagaggttgatgctaatattggaaaatggctctacccacggctaggaattgctccctatgttgctgtgagtgaggaagcagctattgctgctttgaagagatcattgggtgccctcaacacacaccttggatcaaacacataccttgttggccattcggtgactcttgctgatattgtgatgacctgtaacctctacatgggctttgctcggatcatgaccaagaattttacttctgagttcccttatgttgagaggtacttctggaccatggttaattagccaaactttaagaaagtc

SEQ ID NO: 409704 - DNA, 409 bp, Oryza sativa
attagctacacaagggattaactcatcactcacttagctaattaaatcttcgaccatgtcggacaagtgcggcaactgcgactgtgctgacaagagccagtgcgtgaagaaaggtaccagctatggcgtcgtcatagttgaagccgagaagagccacttcgaggaggtcgccgccggcgaggagaacggcggctgcaagtgcggcaccagctgctcctgcaccgactgcaagtgcggcaagtgaagtcacgaagcaaccgaacactcgccgccggcgagtcacctaccttaattagttcacaataaaaccacccatatgagtgtgggttgtgtgggtgctgaatattgctgaattaaacccgtgtggtatcgattaattaagcagctggtcgcttcggcgactatgcgt

SEQ ID NO: 409705 - DNA, 519 bp, Oryza sativa
atctataaagccgcccccgtctccgcaaggtgatcgtattcaatcagtttattcgatcgccggatacccgaggaagaagaagaagaagaaaagatgagctactacggccagcaacctcccgtcggcgtcccgccgcagcaaggttacccggggaaggacggctacccgccgccggggtacccaccggccggctacccgccggcgcagggctacccaccggctgggtaccccccgcagcagggctaccctccgccgtacgcgcagccgccgccccagcagcagcagcacagcagcggcccttccttcatggagggatgcttggctgccctctgctgctgctgtctcctggacgcctgcttctgaggatagaggcgacgggtgcaagagagctgaagagatttgtttcatggagctgatcaaaccgaactgctatgagaaaatgctggtagatttcgtgttcggattattaccctgtattcgccttggttatgaacctctctgacctgatttatttgatca

SEQ ID NO: 409706 - DNA, 526 bp, Oryza sativa
ttgttttgcatccaaagaaatgaagcttaaatacgtagttgatgatatagctgcatcctctttctttaagcaccctattacaagcatattaaattgtacaagcaccttacttttaccgggcaaattgtcccattgctactttgttgttttcatacgactacttgggacagattattattacttgcctaataggacggatgttagaaatgcatatgttccaataaaataacaaaaggatgcagtagcttgtttggggttcatggtgaaatttctcgagggtttgcaagcagatggagaccattgtcgatatggagagtgaacattgttttatagattggctccttggattcatcttccagtctgaacttgaagaaatgtatcagggtagcagccatgatcttcatctgcctgtgtgcaaattctttccccaagcagatacgtggcccagcattgaaagacacaaacttgaacgggctctcttgctgataaactccattcacaagccatctttcaggccttgactcct

SEQ ID NO: 409707 - DNA, 415 bp, Oryza sativa
ttgtttcggcagaagttggtggagcggtcgcagttctgggtaaccgagttggggcttaggaatgtttattttatgtttgcaaatgcaacagtgtctttcaaccagattgcgtcttcgtaccctggtcccctgtcacttgtttctatactgtgtcctgatccccattttaagaagaggcatcacaagagaagagttctacaatcgcagttggtggattcaatcacaaataacctctgtttaggtggacgggttcttttgcaatcggatgtactcgaagtggctgcagacatgagggaaaggtttgatgaatactcggatgtgtttgagcatgttgactgtattgataaagatcttcgatgtgacaatgaaggatggcttctggacaacccaatgggcatacggacagagagagaag

SEQ ID NO: 409708 - DNA, 334 bp, Oryza sativa
ttcgttgcacagaccactcgtttcctccacaaagagggagggaacaagggaagggtgtcgccctccccccaccccgatctgcctccgccgttccgctcctccgcgcctgcgaaatttaccaacgctaactcagcaagatgggtgccggcggcaggatgaccgagaaggagcgggaggagcagcagaagctgctcggacgcgccggcaatggctcggtcgttcagaggtcgcctacggacatgccgccgttcacgctggtgcagatcaagaaggccatcccgcctcactgctttcagcgctcggtgatcaaaacctttttctacgtggaccatga

SEQ ID NO: 409709 - DNA, 498 bp, Oryza sativa
gtaccaaccaaaaggcgcgcgaacacacgagtcggcggcggcgcggcgatggggagcaacacggaggtggagaagaagaaggccccaacggcgctcgcgcccatcgcgaagcctctcgccggcaagaagctctgcaagcgaaccctcaagctcgtccggcgagcatcggaggccaagtgcctgaagcggggagtcaaggaggtggtcaagagcatccgtcgtgggaacaaagggttgtgtgtaattgctgggaatatttctcctatcgatgtgattacacatgttccaatactttgtgaggaagctaatattccttacatatatgtgccatcaaaagaggatcttgctactgccgggactactaagaggcctacctgttgcgtcctggttatgaccaagcctgccaaggggagatcaatgaagaggtgaaggagaaactgaagtcagactacgaccatgttgtagcttgagttgcagaggttacatcttcaatgttct

SEQ ID NO: 409710 - DNA, 510 bp, Oryza sativa
atccacgcgcctcctcctcctccgccgccgccgccgccaccgcagcatcagccatggccgaagtggagctcccgcagcaggaggtcaagctcttcagccgctggtccttcgaggacgtccaggtgaacgacatctcgctggcggactacctggcggtgaacccgacgaagcacgcgacgtacctgccgcacacggcggggaggtactcggcgaagaggttccggaaggcgcagtgccccatcgtggagcgcctgaccaactcgctcatgatgcacggccgcaacaacgggaagaagatcatggccgtgcgcatcgtcaagcacgccatggagatcatccaccttctcaccgacgccaaccccattcaggtcatcgtcgacgccatcatcaacagtggccctcgtgaggatgcgacccgtattgggtctgcgggtgctgtgaggaggcaggctgtggatatctctcccttgaggagggtcaaccaggcaatctacctcctcaccactggtg

SEQ ID NO: 409711 - DNA, 504 bp, Oryza sativa
gatgtgaactttatgaccagataatttattcatcagttctgctgtctacacaatgccgacatgcgtgtgcgttgccacgtgtcctcaagcttgctagacttttgacgccgcgattatatgggattaattggtagcgatcgtcggcggccagggataaggatggggagggtgaagctaccgatcaagaggatcgagaacacgacgaacaggcaggtgacgttctcgaagcggcggaacgggctgatcaagaaggcgtacgagctgtccgtgctctgcgacatcgacgtcgccctcctcatgttctccccctccggccgtctcagccacttctccggccgtcgcggggtggaggacgtgattctccggtacatgaacctctcggagcacgacaggggagaagccatccagaatcgggagtatcttatcagcatgcttcagcggctcaagcgagagagcgacatggcgacacatttagcaaacccaggtgccctgaatgagaaaatt

SEQ ID NO: 409712 - DNA, 526 bp, Oryza sativa
gtccgttctacgtcagcgacaagccggggaaccacaacttcgatctgctcaggaagctcgtcctccccgacggctccgtgctccgggcgcgcctccccggccgccccacccgcgactgcctcttctccgacccggcgcgcgacggcgagagtttgctcaagatatggaacctgaacaattgcggcggcgtggtcggggtgttcaactgccagggcgccgggtggtgcagggtggccaagaagacgcgcgtgcacgacgcggcgcccgggacgctcaccggcgccgtgcgcgccgacgacgtcgacgccatcgcgcaggtcgccggcggcgacggcggaggctgggacggggaggccgtggtgtacgcgcaccgggcgcgtgagctggtccggctgccgcgcggcgccgcgctgccggtgacgctcggggcgctcgagtacgaggtggtccacgtttgccccgttcgcgccatcggcggggtgccgggcggcgccgacgtcgcgttcgcgcccgtcgggcctcctcg

SEQ ID NO: 409713 - DNA, 485 bp, Oryza sativa
ctgacgcggaggcgctagggttttgctgctcccacaggtaaggaggcattgaaggtttggtgaggcagcgaagatggttctcaagacagagctgtgccgtttcagcggcgccaagatttacccagggaagggtatcagattcatccgtgcagactcccaggtgttcctgttttcaaactcgaagtgcaagcgctacttccacaaccgtctgaagccagccaagcttacatggacagccatgtacagaaagcagcacaagaaggatattcacgccgaggcagtcaagaagaggcgccgcaccaccaagaaaccgtactcccggtctatagttggtgctacccttgaagtcatccagaagaagagagctgagaagccagaggttcgtgatgcagcaagggaatccgctcttcgtgagatcaaggagcgcatcaagaagacaaaggacgagaagaaagcgaaaaatgcagaggtggcaaaatcgcaaa

SEQ ID NO: 409714 - DNA, 450 bp, Oryza sativa
tcgttcctctctcctccttgcagggcctgtctgtttctcaccatagtaaggaaggaaagaaggaaggaagaggaaaaaaaaggatcatcaaccatgtcgaattcggcgtcgggaatggccgtgtgtgacgaatgcaaactcaagttcctggaacttaaggcgaaaaggagcttccgcttcatcgtgttcaagatcaatgagaaggtccagcaggtggtggtggacaggttggggcatccgggtgagagctatgacgacttcactgcctgcttaccagcagatgagtgccgctacgcggtatttgattttgactttgtcactgatgaaaactgccagaagagcaagatattctttatctcctgggctcctgatacatcaagggtgaggagcaagatgctgtatgctagctccaaggatcggttcaggaaggagcctgaccgcatccaagtg

SEQ ID NO: 409715 - DNA, 512 bp, Oryza sativa
  unsure (1)..(512): unsure at all n locations
gttgttttttttaatagcaaacacaccaagcactatataaataccaccacattgtatatgtacatatctagcagagcacacaaaggctcatccttattaacaccaacaacatgatgagcttccaatgtagcattaccagatgatagggcacatacaaatcacaccagaatgcgcttccaatcaaacccaaatgtttaggccttgcgaccagtagtatacacatataccattggttctctctctgaaagaaccattttacagttgcaagatgcaatgttcttgcttatttgaggtagtttcagctttctaggccgcaaccgcctcgcgcagtttgctgctgtccgctgatggcgtcaagctgtcgtagtattcaacaaggaccttccagccacccgggcacatgaatccgtcaggggggctttggcagttcttggcaagagtacgcatntttgtgccagagatgaacaggaaatcatctttccttgatggatcgaaaaagtccattttctttt

SEQ ID NO: 409716 - DNA, 514 bp, Oryza sativa
tgtcagtaagctagctaactaactacgtggctatggcccccaccgtgatggcctcctcggccacctccgtggctccattccaagggctcaagtccaccgccggcctccccgtcagccgccgctccaccaactcgggcttcggcaacgtcagcaatggcggaaggatcaagtgcatgcaggtgtggccaattgagggcatcaagaagttcgagaccctatcgtacctgccaccactcaccgtggaggatcttttgaagcagatcgagtacctgcttcgatccaagtgggtgccttgtctcgagttcagcaaggttgggttcgtctaccgtgagaaccacaggtctcccggatactacgatgggaggtattggaccatgtggaagctgcccatgttcggctgcaccgatgccacccaagtgcctcaggagctcgaggaggccaagaaggcctaccccgatgcctttgtccgtatcatcggtttcgacaacgtcaggcaggtgcagttgattagctt

SEQ ID NO: 409717 - DNA, 444 bp, Oryza sativa
gtcacttccatctcattctcctaattgtcatcactagcttctagctagcttaattaattaattagccatggcggaggagaagcaccaccaccacctgttccaccacaagaaggacgacgagccggccaccggagtagactcctacggcgagggcgtctacacgtcggagacggtgaccaccgaggtggtcgccggcggccaggacgagtacgagaggtacaagaaggaggagaagcagcacaagcacaagcagcacctcggcgaggccggcgccctcgccgccggcgccttcgccctgtatgagaagcacgaggcgaagaatgacccggagaacgcgcacaggcacaagatcacggaggagatcgcggccacggcggcggtcggcgccggcggctacgcctttcacgagcaccacgagaggaagaaggaccacaagagcgccga

SEQ ID NO: 409718 - DNA, 504 bp, Oryza sativa
ctagttagcataagcaacacaagggattaactcatcactcacttagctaattaaatcttcgaccatgtcggacaagtgcggcaactgcgactgtgctgacaagagccagtgcgtgaagaaaggtaccagctatggcgtcgtcatagttgaagccgagaagagccacttcgaggaggtcgccgccggcgaggagaacggcggctgcaagtgcggcaccagctgctcctgcaccgactgcaagtgcggcaagtgaagtcacgaagcaaccgaacactcgccgccggcgagtcacctaccttaattagtccacaataaaaaccacccatatgagtgtggcttgcgtgtgtgctgattattgctgaattaaacccgtgtgttatcgattaattaagcagctggtcgcttcggcgactatgcgtgtgtcaacgtatgaatttgtgtgatgtgatgtacccgtgctattctcagtgaaactaatcaatcgtgtattcgtgtgggttgcct

SEQ ID NO: 409719 - DNA, 493 bp, Oryza sativa
ttttctgaacacagcaccaccccttctgctgcatctcccacctccctctgaattgtgggcctgaggcgatggcggcgctcgccccgtccaagatgctcggcacccggctcaacttcgccggctcctcccgctacgccaccgcggcaccgaccaccggagcgcagaagatcgtctccctcttcagcaagaagcccgccccgaagcccaagcccgccgccgtcacctcctcgagccccgacatcggcgatgagctcgccaagtggtacggccctgacaggaggatcttcttgccggagggtctcctggaccgctcagaggtgccggactacctcaacggagaggtccccggagactacggctacgacccttttggcctcagcaagaagccagaggacttctccaagtaccaggcctatgagctgatccatgccaggtgggcgatgctcggcgccgctgggttcatcatccccgaggcctgcaacaagtttggcgc

SEQ ID NO: 409720 - DNA, 522 bp, Oryza sativa
gtctgtatccagaaagtggagagacaattatttctgggatgggtgagctgcatttggatatctatgttgaacgcatcaggagagagtacaaggttgatgcaaaggtcggaaaacctcgtgtgaacttcagggaaactatcactcagcgtgctgaatttgattacttacacaaaaagcaatctggtggtcaaggtcaatatggacgagtttgcgggtacattgagcctcttccatcagaatctgatggtaaatttgagtttgataacatgatcattggacaagcaattccttcaaacttcataccagcaattgagaagggttttaaggaagcttgcaattctggttcgttgatagggcatcctgtggaaaatattcgaattgtgctgactgatggtgcttcacatgcagtggattccagcgaacttgcttttaagttagcttctatctatgcttttagacagtgttatgctgctgctagacctgtaatattggaaccagtgatgaaagtggaactaaaagttc

SEQ ID NO: 409721 - DNA, 502 bp, Oryza sativa
tcgtgctgctccacttccccccttttaatccaccgctttttctctcgcatcgtcctctcccccgaacccgcagccgccaatccacacgccagaagccgcgccagcttccagaagcttccccagggggaaggtcgctctcactcatgagcgtctgaccggccgtcgccatgggttgcgccggatccacacctaaaaccgatgataacagcaagaagctgaaaaagcccaagccttggaagcacaatcaagcaataacaacaacacaactcaaacagatgcgtgatgaattctgggacactgctccacattatggtgggcagaaagagatttgggatgcgcttcgagctgctgcagaagctgagttatctcttgcacaaacgatagtggacagtgccggaatcattgtatcaaattctgacatgacaatttgctacgatgaaagaggtgccaaatatgaattaccaaagtatggtctgagtgagccaacaaatttgatcaggga

SEQ ID NO: 409722 - DNA, 520 bp, Oryza sativa
  unsure (1)..(520): unsure at all n locations
tgccgccgccgccgcggcggtggccgcggtggaatcggatccgaggaacgaggtggaggaggacggcgaggagttcgcggtgtactgccggaggggaaaggggaggagaagggtggagatggaggaccggcatgtggccaaggtcgccctcggcggagaccccaaagtggccttttttggtgtattcgatggccacggcgggaagagcgcggcggagttcgtcgccgagaacatgcccaagttcatggccgaggagatgtgcaaggtggacggcggcgacagtggcgagactgaacaggcagtgaagcggtgctacctgaagacggacgaggaattcctcaagagggcggagagngggggcgcctgttgngtnaccgctttgctgcagaaaggtggcctcgttgtgtctaatgccggagattgccgtgccgtgctcagccgcgccgggaaggcagaggcgcttacctctgatcaccgggcctcgcgcgaggatgagagggaaagaattgagaatctgggt

SEQ ID NO: 409723 - DNA, 469 bp, Oryza sativa
gtagagaaacatctagagtgaataagaaagatggggttcgtccgtgccctgttcctgctggcgatggtgtgcgtggcggcgcacgcgaaggactaccccaaggaggagggcgcgaaggcggaggggccggccgccgcctcggggggcggcggcggcggcagcacccacgacgtggtgaagctgggcggcaagggcgactgcaagacggacagcaccaaggcggtcaacgaggcgtggacggcggcgtgcgctggcaccggcaagcagacgatcgtcgtccccaagggcgacttcttgacgggtcccctcaacttcaccgggccatgcaagggcgacatcgtcatccagctcgacggaaacctgcttagctccaccgacctcgccttattcaagtcgaactggatcgagatcatgcgcgtcgaaagccttgaaattagcggcaagggcaagctcgacggccagggcgccg

SEQ ID NO: 409724 - DNA, 517 bp, Oryza sativa
  unsure (1)..(517): unsure at all n locations
gtcagtaagctagctaactaactacgtggctatggcccccaccgtgatggcctcctcggccacctccgtggctccattccaagggctcaagtccaccgccggcctccccgtcagccgccgctccaccaactcgggcttcggcaacgtcagcaatggcggaaggatcaagtgcatgcaggtgtggccaattgagggcatcaagaagttcgagaccctatcgtacctgccaccactcaccgtggaggatcttttgaagcagatcgagtacctgcttcgatccaagtgggtgccttgtctcgagttcagcaaggttgggttcgtctaccgtgagaaccacaggtctcccggatactacgatggcaggtattggaccatgtggaagctgcccatgttcggctgcaccgatgccacccaggtgctcaaggagctcgaggaggccaagaaagcctaccccgatgcccttgtncgtatcatcggcttcgacaacgtcaggcaggtgcagttgattagcttcatc

SEQ ID NO: 409725 - DNA, 408 bp, Oryza sativa
tttattgcatcttgcatggcaacatacatggtctgcaattctattttcagctccatcatgaagcttgttgggacaaagaattactatgacgttaggaaggaatgcgaagggaaactttgctatgatttctcaaacttggagaagttttttggagataaagcagtcaaagaagcaattggagttggcgaccttgaatttgtctcatgcagcactactgtttatcaagcaatgctgacagactggatgagaaacttggaagttggcatcccagctctacttgaggatgggatcaatgtgcttatatatgctggagaagttgatcttatatgcaattggcttggaaactcgaggtgggtccactcgatggaatggtctggccagaaagactttgtatcatcttatgaatcg

SEQ ID NO: 409726 - DNA, 503 bp, Oryza sativa
gcagttttcaactgtgtggttgaaattcctagaggcagcaaggttaagtatgagttggataaggcaactggtctaattaaggttgatcgtgttctttactcatctgttgtttacccacacaactatggtttcattccacgcacactttgtgaggacggtgaccccatggacgtcctcgtcctgatgcaggaacaagttgtccctggatgtttcctgcgagctcgtgctattgggctcatgcctatgattgatcagggtgagaaagatgacaagatcatagctgtttgtgctgatgaccctgaataccgccacttcagggacatcaaggaaatcccccctcaccgccttcaagagatccgccgcttctttgaagactacaagaagaatgagaacaaagaagttgctgtcaatgagtttctcccaggagaagatgccatcaacgcaatcaagtactcaatggacctttacggcgcctacatcattgagagcttgaggaagtgatc

SEQ ID NO: 409727 - DNA, 496 bp, Oryza sativa
cgaggtggtgtggttcaaggcggggtcgcagatcttcagcgagggcgggctcgactacctcggcaacccgagcctgatccacgcgcagagcatcctcgccatctgggcggtccaggtggtgctcatgggcgccgtcgaggggtaccgcatcgccggcgggccgctcggcgaggtcgtcgacccgctctaccccggcggcagcttcgacccgctcggcctcgccgacgacccggaggccttcgcggagctcaaggtgaaggagatcaagaacggccgcctcgccatgttctccatgttcggcttcttcgtccaggccatcgtcaccggcaagggccccctcgagaaccttgtcgaccacctcgtcgaccccgttaacaacaacgcctgggcctacgccaccaacttcgtccccggcaagtgagcgccgccgccgccgtgctgccatggcgacgcatcgccttcagctaagctagctaggttgacgacgatgcgcgtc

SEQ ID NO: 409728 - DNA, 439 bp, Oryza sativa
tgaacaacgcactctgcagctagctatacaatctctgtttaattagctaggtagctagcgagtcataaatcaagaagccatggacttttacgggcggcgcgagcagtacggcgggtatggcgggtacggtggcggcggcgccctggcgacgccggggtacgcgccggcggcgccgtacgggatgtcgcaggtgaacatcgaggggaacgggtgtggcaggacgctgccgccgcagccgacggtgaaggtgtactgccgggcgaacccgaactacgcgatgacggcgcggaacggcgcggtggtgctggcgccggcgaaccccaaggacgagtaccagcattggatcaaggacatgaggtggagcaccagcatcaaggacgaggagggctaccctgccttcgcctcgtcaacaggccaccggccggccatcagcactccc

SEQ ID NO: 409729 - DNA, 472 bp, Oryza sativa
atcggcgcttgcgagaggagagagatggcccgtaccaagcagaccgctcgtaagtccacaggaggaaaggctcccaggaagcagcttgcaaccaaggctgctcgtaagtctgctcccaccactggaggagttaagaagccccaccgttaccgccctggaactgttgccctccgtgagattcgcaagtaccagaagagtactgagcttttgatcaggaagctgcccttccagaggcttgttagggaaattgcacaggacttcaagaccgatctgcgtttccagagccatgctgtccttgccctccaggaggctgcggaggcataccttgttggtctcttcgaggacaccaacctgtgcgctattcatgccaagcgtgtgaccatcatgcctaaggacattcagctggctaggaggattcgtggtgagagggcttaaattcccctcggcgactcctttgacaatgaagcatgcg

SEQ ID NO: 409730 - DNA, 484 bp, Oryza sativa
ttaccaggttgaattagacctaagcagagaggggtcagagcttacttctgatgtgatcacccgctcggccttcggtagcagccacgaggagggcaaagaggtctaccaagcacagaaagagctccaagaactggccttctcatcatcattagatgtgccagctctggtttttctaaggaaattaccaatcataagggggaacacacgagctcatcagctcgtcaagaaatcgaggaccatgctcatggagataatcgaaggacggcttgccaaagtcgaagctgccgaagccggctatggcagtgatcttcttggactgatgctggaggcgcgagctctggagagggaagggaacggcctggttctcaccacccaggagatcatagacgagtgcaagaccttcttcttcgcggggcaagacactacctccaaccacctcgtttggacgatgttcctgctgagcaacaacgctcattggcaagac

SEQ ID NO: 409731 - DNA, 358 bp, Oryza sativa
gttttgtggctgctatggatgggagcggattttgcgatgggcgttcccaggcaagatgccagcatgggagaagcgtcagaaacaggcaattgcaaatctggagaaaaaacacgaataggatcttgtttttttttccttcacttcaattttttgctccactggcatagtttcaatctaatatgtagggttggtttggtttgtggcctatataggccttaccaaattttgtcagtgtcaaattttggcaagttttggcatgactaattttggtaaggcaaagttgcgtttggattgaagccaaaataacctaagttcactattgaaatggcctattttcttagaaaaaaaaaaataaaaa

SEQ ID NO: 409732 - DNA, 458 bp, Oryza sativa
  unsure (1)..(458): unsure at all n locations
tcacacaccactccatttctgagctcttctagtttgagtgagagagcagcagaagggagtagtgcaagatgccgatccgcaatatcgccgtggggagccaccaggaggtgtaccacccgggtgcactcaaggcggcgttggccgagttcatctccaccctcatcttcgtcttcgccggccagggctccggcatggccttcagcaagctgaccggcggcggagcgacgacccccgccgggctgatcgcggcggcggtggcccacgccttcgccctgttcgtggcggtgtccgtcggcgccaacatctcctgcggccacgtgaacccggccgtgaccttcggcgcctttgtcggcggcaacatcaccctgttccgcggcctcctctactggatcgcccagctcctgtgctccaccgtggcgtgctttcttctccgctttccaccggngggctcgccaccg

SEQ ID NO: 409733 - DNA, 458 bp, Oryza sativa
ccgagttcggctcccccgaggagtttctcgcccaggtcgacttcttgcttggcaagcaggcctactccggcaagacagattccgagggtgggtttgagtcggacgcggtggcgacggcgaacatcctggagagctcggcgccggtggtgggagggaagcagtactacagcgtaacggtgctgacgaggacggcggacggcgactagggcggcaagcaccagctgatcacggccaccgtcaacgacggcaagctgtacatctgcaaggcgcaggccggcgacaagaggtggttcaagggcgccaggaagttcgtcgagagcgcagccagctccttcagcgtcgcatgatcgtcgaaatctctatctcagcttctctttaatccctagcgaatcaaaatcaaatcaatcgagttcgttgctcagagagatgcagtgcacgcatgtgtgtgtgcgtgtgtg

SEQ ID NO: 409734 - DNA, 514 bp, Oryza sativa
atttgtttggttcactatcaactgcgcttccatcattgacacatctggacctgcaggatgcacctataatagaacctacaacatcatcagatctcaccaatgctggtcttcagcagattaatccaaatgatattattcttggatggaagtgatatcagtgatcaggcattgaagtatctgggccttggaacatgtccactagcttccttatctctgaggggttgccgaaagttaacaaatgattgcataccactcttgtttgctggttctgttaaacagagcttacaggtgttggatctctctagaataccaggtattactgatgatggtatcatgttattagcaaggagtcgaactcctattattgaactccgaatgagagagaacccgaaaataggagatgctgctgtgatggctcttgcgtctatgctagttgatggtggaacccatggcagcagcttgcacctgctggatctttatgattgtggtgcgattacaccacttgcaatccggt

SEQ ID NO: 409735 - DNA, 525 bp, Oryza sativa
gccgatcgcacagcagctttgtgcggtcggggtggtctcggtgccgatggcgaggaagcagcatatcgccatattcaccacggcgagcctgccatggatgactggaactgccgtcaaccccctcttccgagcggcctacctcgcgaaggccggggactgggaggttacgctggtggttccatggctttcgaagggggaccagctgctggtttatcctaacaagatgaaattcagtgtgcccggggagcaagaaggctatgtgcgacggtggctcgaggagcgaattgggctgctgccgaagtttgagataaaattctatcctggaaagttctcaacggagaaaagaagcattctacctgctggggacatcacccagactgtatctgatgataaagcagaccttgcagttcttgaagagccagagcattttacatggtaccatcatggacgaaggtggaaaaacaaattcagaaaagttataggtgttggtcataccaactatttggagtatgtcaagagagagag

SEQ ID NO: 409736 - DNA, 414 bp, Oryza sativa
gccgaacgcccgctgctccaacggccgcctcgtgatcgacttcctcgctgaggcgtacgggctgccgctgctgccgccgtcggcgaacaagggcaccaacttcagccagggcgccaacttcaccgtcatgggcgccaccgccctcgacctcaaatacttcaaggacaacaatggctggagcatccctcctttcaacacctccatgaacgtccagctccagtggttcgacgaggtcaagcaaaccatctgctactgccctcaagagtgcagggagttcttctccaaggcgctgctcgtgttcggcgagttcggaggcaacgactacagcttctcgtggaaggcggagtggagcctggagaaggtgaagaccatagtgcccagcgtggtggcctacatggcggggggcatcgagcg

SEQ ID NO: 409737 - DNA, 432 bp, Oryza sativa
tcggccgccgcctcctcctcctctcgccttctcccgtcttctccttcgagttagctacctccttattcaaccatgggtaaggagaagacgcacatcaacatcgtggtcattggccacgtcgactccggcaagtcgaccaccacgggccatctgatttacaagcttggaggtatcgacaagcgtgtgatcgagaggttcgagaaggaagccgctgagatgaacaagaggtccttcaagtacgcgtgggtgctcgacaagctcaaggccgagcgtgagagaggtatcaccatcgatattgccctgtggaagttcgagaccaccaagtactactgcactgtcatcgatgcccctggtcaccgtgacttcatcaagaacatgatcacgggtacctcccaggctgactgtgccgtgctcatcattgactccaccact

SEQ ID NO: 409738 - DNA, 500 bp, Oryza sativa
tcgctttgctggagacatcaagaaaagggtatcttgctgcagtttcagcatctagttactctttcatctctttactccaacacttccttcctataatgaatccagggggtgctactatatccttgacctacatagcttccgaaaggacaattcctggatacggtggcggcatgagctcagcaaaagcagcacttgagagtgatacaagagttctagcttacgaagcaggtcgaaaaggcaagatcagagtgaataccatatcagcaggtccattgggaagtcgagcagccaaagctattggtttcatcgagaagatgatagagtattcgtacgtgaacgcaccactgcagaaggagctcttggcagatgaagtggggaacacagcagcattcttagcatcgccgttggcatctgcaatcactggatcaactatctatgttgacaatgggctcaatacaatgggacttgcacttgacagccctacactatccacatagacg

SEQ ID NO: 409739 - DNA, 503 bp, Oryza sativa
ttctttacgcgtgggtttctccccaatctcgcgaggctctcgtcgtcgaatcgaatcctttcgcgttctcaagatgcagatctttgtgaagacattgaccggcaagactatcaccctcgaggtggagtcctctgacaccatcgataatgtcaaggctaagatccaagataaggagggcatccccccggaccagcatcgtctcatcttcgctggcaagcaactggaggatggcaggacccttgctgactacaacatccataatgagtcgacccttcaccttgtcctccgcctccgtggtggcatgcatatctttgtcaagactctgaccggcaagactatcacccttgaggtggagtcttctgacaccatctacaacgttaaggccaagatccaggacaaatagggcatgcgcgcataccagcagcgtctcatcttcgcctgcaagcagctggaggatggcaggacccttgctgactaccgcatgcaggaggagtccacccttc

SEQ ID NO: 409740 - DNA, 499 bp, Oryza sativa
gagaaggatgtgataacactatctttaggtcttacttatgatcaaactgaccttgcacaagttgcccttgaacgtggcatccctgcaacagttggcagtcttggatcaaaaaggttacccttccctagtggtgcatttgatgctatccactgtggtgattgcaacataccatggcattctaatggtggaaagcttctcctagagataaataggatccttcgtccaggaggatacttcattatatcaagcaaacatggtgaccttgagagcgaagaaggaatatcagcttcaatgactgctatatgttggaatgtaatagcttacaacagtgatgatgtcagtgaagctggagtgaagatattccaacgaccaccttccaatgatgaatatgatctgagagcaaaaaaagatccaccattttgtaaggaagaccagaccaaaactcctgcaggtatactctgatcagacattgcctgcataaagctcctgtggcattgaa

SEQ ID NO: 409741 - DNA, 437 bp, Oryza sativa
ttatttttgagctcaatcagcaacaacatctatctgcttcttgcttagttaagtccttcgccctcccaagaagaagaagatgtcttgctgcggcggcaactgcggctgcggcagcggctgccagtgcggcggcggctgcggcggatgcaagatgttccctgatgtggaggccacagccaccaccaagaccttcgtcctcgctgctccatccaacaaggcgagctctggaggaatggagatggcggtggagagcggcgagaacggcggctgcggctgcaacacctgcaagtgtggcaccagctgcagcggctgctcctgctgctcctgcaactgaatctatcgtcgtcgtcgcccggctgcatgaggatttatcgtatggatgctgctactgtcgatcagagctttgatcgaggccttaatttgcttgcattagtacc

SEQ ID NO: 409742 - DNA, 453 bp, Oryza sativa
gtcattgagcagaagtaactaatcaacttcttgggaagagaaaaatacaagatttggtttcacaggtagatcccctgggcaaggttgatccagaagtggaagatttgcttttggagattgctgatgacttcattgattcggtgactgcatttgcgtgtacccttgcgaagcataggaaatcatcagtcctggaagccaaggatgtattgctgcacctagaaaaaaattggcacttatctgttcctggtttcttaagggaggacaagaatccgcaaagacatcctgtaaaggtatcagtggaccctcaacaaccagaatgtgatgcttctggtattagaagcacaggacataaattggtattaacaattcagttgccaaccataaaacaagacctccggttactgagcctttaccaatgcccacaatggggcctttgtcaaaagtggcccgttt

SEQ ID NO: 409743 - DNA, 511 bp, Oryza sativa
ctactactagccagtaagctagctaactaactacgtggctatggcccccaccgtgatggcctcctcggccacctccgtggctccattccaagggctcaagtccaccgccggcctccccgtcagccgccgctccaccaactcgggcttcggcaacgtcagcaatggcggaaggatcaagtgcatgcaggtgtggccaattgagggcatcaagaagttcgagaccctatcgtacctgccaccactcaccgtggaggatcttttgaagcagatcgagtacctgcttcgatccaagtgggtgccttgtctcgagttcagcaaggttgggttcgtctaccgtgagaaccacaggtctcccggatactacgatggcaggtattggaccatgtggaagctgcccatgttcggctgcaccgatgccacccaggtgctcaaggagctcgaggaggccaagaaggcctaccccgatgcctttgtccgtatcatcggcttcgacaacgtcaggcaggtgcag

SEQ ID NO: 409744 - DNA, 488 bp, Oryza sativa
tttaatcacactcgcctcgcctcctttcgctcgtttggtccaacaccaccaccaccaccaccgatctcgatggcgcccaaggccgagaagaagcccgcggagaagaagccggcggaggagaaggccggcgagaaggcgcccgcggccgggaagaagcccaaggccgagaagcggctgccggcgtccaagggggagaagggcggcgagggcaagaaggagcgcggcaggaagaaggccaagaagagcgtcgagacctacaagatatacatcttcaaggtgctcaagcaggtgcacccggacatcgggatctcctccaaggccatgtcaatcatgaactcgttcatcaacgacatcttcgagaagctcgccggcgaggccgccaagctcgccaggtacaacaagaagcccaccatcaccttcagggagatccagaccttcgttcgccttgttcttcccggcgagcttgccagcacgccgtcttcgagggc

SEQ ID NO: 409745 - DNA, 507 bp, Oryza sativa
tttcgtactcgcctctctccgcgccctcctccgccgccgctcgccgccgttcgtctccgccgccaccgccgccgccatgagggagtgcatctcgatccacatcgggcaggccggtatccaggtcgggaacgcgtgctgggagctctattgcctcgagcatggcatccagcctgatggacagatgcccggtgacaagaccgttgggggaggtgatgatgcttttaacaccttcttcagtgagactggtgctgggaagcatgtcccccgtgctgtcttcgtcgatcttgagcctaccgtgattgatgaggtgaggactggtgactaccgccagctcttccaccctgagcagctcatcagtggcaaggaggatgcagccaacaactttgcccgtggtcactacaccattggcaaggagattgttgatctgtgccttgaccgcatcaggaagcttgccgacaactgcactggtctccagggctttcttgtgttcaacgctgtggggaggaa

SEQ ID NO: 409746 - DNA, 431 bp, Oryza sativa
ttgcttacgcgtgggctttggcttggacaggacatgtagttcatgtcgctattccagcatccaggggagagtacgttcgatggaataatttcttagatgtattaccctatccacaggggttgggaccccttctgacgggtcagtggaatctttatgcccaaaaccccgattcgagtaatcatttatttggtaccactcaaggagcgggaactgctattctaactcttcttgggggattccatccacaaacacaaagtttgtggctgaccgatattgctcatcatcatttagctattgcatttatttttctcattgccgggcatatgtatcgaactaacttctgaattgggcacaggatcaaagatcttttataagcacatacttctcccggggggtcgattagggcgtgggccttagggccttttctacca

SEQ ID NO: 409747 - DNA, 464 bp, Oryza sativa
tcgttccatcttcgccaccatcgcgctgcccaacaactccacgacgcagaacaccgtgtggcaggccgggccagggagcaccgggaacgtcggccagcacgcgacgtccggccccaacgtgcagagcatgctgaggctcgacttcagctccggccagagcaccggtaccgcctccaactccaggctgcaccgccgtaacatccatggcatcctgaacgcggtgagctggggcatcctgatcccgatgggcgccatgatcgcgcgctacctccgcgtgttcgaggccgtcgacccggcatggttctaccttcacatcacctgccagctctccggctacatcctcggcgtcgccggctgggccctcggcctcaagctcggcagcgagttcaagggcatcacctacagtgcccaccgcaacatcggcttcgccatcttctgcctcgccacgctccaggtgttcgcgc

SEQ ID NO: 409748 - DNA, 509 bp, Oryza sativa
tgtcgccgcgcggcgtttggaggccgggggggaatcggatccgaggaacgaggtggaggaggacggcgaggagttcgcggtgtactgccggaggggaaaggggaggagaagggtggagatggaggaccggcatgtggccaaggtcgccctcggcggagaccccaaagtggccttttttggtgtattcgatggccacggcgggaagagcgcggcggagttcgtcgccgagaacatgcccaagttcatggccgaggagatgtgcaaggtggacggcggcgacagtggcgagactgaacaggcagtgaagcggtgctacctgaagacggacgaggaattccttaagagggaggagagcgggggcgcctgctgcgtcaccgctttgctgcagaaaggtggcctcgttgtgtctaatgccggagattgccgtgccgtgtttagttgtgttgggaaggtagaggtgctcacctctgatcaccgggccttgtgcgaggatgagagggaaagaattg

SEQ ID NO: 409749 - DNA, 444 bp, Oryza sativa
ctagcctccagaagcatttgttagccgcgttaaaacagctcctagggctgatgatgaggagtttgctgatacagctgaaacaggatattcggagtcaccatctcagggtgttgatggggcatcaccttcctctagtgctggcacttcttctaatgttccagtgaagcagccagcagcaccagctgctcctgctccaatgccagacctccttggtgatttgatgggtatggataactccattgttcctgttgatgaaccaacagcaccttcaggccctccactacctgttttgttgccatcaaccactggccaaggactgcagatcagcgcacaactagtgcggcgtgatggccaaatattctatgatatatcttttgataatggcactcaaactgtgctagatggattcatgattcagtttaacaaaaataccttttggcttgc

SEQ ID NO: 409750 - DNA, 487 bp, Oryza sativa
gaccggcccggactgcccgggtggatccacccacgcgttctgtttgccaaccaagggagtgaaccgatgggggacataattacctcaggcgtggaagcccgtggaacgagtcatatgaaatgctgtgtgaatggttgtgctatcattgatactcttgatggagccaatgctgagataagagaggaagtgggacaagaaaacctcttgcttttaggtgccaaggcagatcaagatgctgggctgaggaaggatagagagaatggcttgttcaaaccagacccacgttttgaagaagccaagcagcttataaggagtggtgcttttggcacctatgactatgctcccctcttggattctcttgaaggaaattctggatttggtcgtggtgattatttcctcgttggctatgatttcccaagctatattgatgcacaggccccggttgatgaagcctacaaggataagaaaaaatggatcaagatgtcta

SEQ ID NO: 409751 - DNA, 496 bp, Oryza sativa
gatggatcatgcatgattgatcgtggaatgggaattcatgggcatccacttgaaattcaggcactgttctattcagctctcctgtgcgcgcgtgaaatgttaaccccagaagatggatcagctgatttaatacgtgctctaaacaataggcttatcgcactgtcctttcatattagagagtactattgggttgacatgcagaagctgaatgagatttatcgatataaaacagaagaatattcctatgatgctgtgaacaagttcaacatatatcctgatcaggtttctccgcggcttgttgagtggatacctcctaaaggaggttacttcattgggaacctgcagccagctcacatggacttccggttcttttctctggggaatttatgggccatagtaagcagcttggcaacaactcatcaatcccatgccattttggatccgattgaatccaaatggtctgatttagtggcagagatgccattggagatatgct

SEQ ID NO: 409752 - DNA, 516 bp, Oryza sativa
cctcgccgtcgccgccgccgtcgccgccgacgccgccgcgaccacctctcgcaaggggattttgtaggggtttctgatccgaggagcgggcgatgtcggactccgaggagcaccacttcgagtcgaaggccgacgccggcgcctccaagacctacccgcagcaggctgggaccatccgcaaaaatggctacatagtcatcaagaaccgcccctgcaaggttgttgaggtttcaacctctaaaactgggaagcacggtcacgccaagtgccactttgttgcaattgacatctttactgccaagaagctcgaagatattgtgccatcttctcacaactgtgatgtcccgcatgtgaaccgtacggagtaccagctcattgatatatctgaggatggatttgtgagtctgttaactgaaaatggcaacaccaaggatgacctcaggctccctactgatgataacctgcttagtcagatcaaggatggatttggagaagggaaggacctggtggtgactg

SEQ ID NO: 409753 - DNA, 445 bp, Oryza sativa
gtggatgcgactgcgacttcgccatcatcatcgagctcctccctcgcgctccaagcccataacggcggacgacacaacgccgacgaggagcggcggaggctcacaatccaacaacaggaccaccggcaagcgcagctagaggggctcccaggtagagtactacatctaactgtcaccaataagcatggcacatggaacaccggggcgctctggcactgggctgcaccagctccagatactgaagccaccttttcttgccttatactatcccttggtgaacaagaaagcccatagatggaggatatctacaagcgtgtttatcctgggcaagatcactatcaacgttgggattaggcttctgatgatagcaagatacggcgtgcagatagaatagggtgcatttgagaagcgcacagatgaattgttgggacgatgatatttggtg

SEQ ID NO: 409754 - DNA, 504 bp, Oryza sativa
gttattcagattttcagagtgagtgctcgtgtgttgtgcgatcagtgcccactgcccagttcgatcgatccgtgttgatctttgaaagaaagatgtcgtgctgcggaggaaactgcggctgcggatccggctgccagtgcggcagcggctgcggaggatgcaagatgtacccggagatggctgaggaggtgaccactacccagactgtcatcatgggtgttgcaccttccaagggtcatgccgaggggttggaggccggcgccgccgccggagcaggagcagagaacgggtgcaagtgcggcgacaactgcacctgcaacccctgcaactgcggcaagtgaagcaagcaacctcctgacgaaaccaaggagatggaagggcctagtactgctaagctagtagtttgatccagttacaagtgatgagttattgtcactgtaactttgtgtttcctctgagtttgtgatctaagacctgagactgaagaatgcatcctagttaaat

SEQ ID NO: 409755 - DNA, 440 bp, Oryza sativa
accaaccaagaaacaagaaacattgcaccaaaaaactagctagctagccaatggcctccatgtcctccttccgacttgccgtggcggcggctgcactattggtcattggctcatgtgccacagagctcaccttcaaggttgctgagggctctagcgccactagtctggagctcgtcaccaacgtcgccatctctgaggtggaggtcaaggagaagggcggcaaggactgggtggggctcaaggagtcgggctctaacacctggacactcaaaagtgaagcaccactcaagggccccttctccgttcgcttccttgtcaagaacggtggctaccgtgtcgtcgatgatgtcatccctgaaagctttactgccggctctgaatataaaagtggcatccaactcttagtaacaggcatgcatactcttgtgttgggtcatatt

SEQ ID NO: 409756 - DNA, 507 bp, Oryza sativa
ttgcgtggcgccgccgccgcagagctcgattcagaccatggcgtggccgtccatcccggcggctctccgccacccgcatgcccacgccggcggcctccgcctgctccgctcctcgggagacccctgcccgccctgcacccttccgtttaggttatgtggagtgccattaaaaaagggccatgtgtacgctggtgctgtatctgctaccaggagtcctggcttgggcaatgcagagaatctgcgtgagagtccaagcttgtcaaggagctggggtatgaatgggcagattggcgatgatcatgatattcttatagaatgtagggatgtgcacaaatccttcggtaacaagaaggtattgaatggcattagcttcaagattagacacggagaagccgttggaataattggtccttcgggacaggaaagtcaactgttttgagggtatggctgggctactggctccagacaagggcgatgttattatttgcgggagaaaaagacatgggc

SEQ ID NO: 409757 - DNA, 427 bp, Oryza sativa
acttaacaatgtttttcaaattaataatcaataatcattacacagcgtaaacataatcgagctagattgcaaaaaatacgagcatgcaatcaaatcaactacaggtgattaaattaacgaactgcttattttgttacgacgtcgatcaatcgcctccaaacggtagccagttactgttgtaaaacacacaattaaatgagcttagagttcgtcgtggtggcggtgctcctcgtcatcatcatcttcgtcgtcgtcggtgaccttcttgatcttcttgggcgccgggttcggcgaggtcttgatggggtaggatgcttccatggcgatgccgcagagtccctccttggcggacacgtcgcgcttcattcggatgtagcccttcttaccccagtctgggccccacgagttcctgacgatccagtacttg

SEQ ID NO: 409758 - DNA, 491 bp, Oryza sativa
tcgtttaaactaaatgttgagccagataagagaccagaggtgatgggtttggttgacatcttcagagcaaaggtggttgacctttctgaccacacactaactattgaggtaactggagatcctggaaaaattgttgctgtacagaggaacctaagcaaatttggaatcaaagaaattgccagaactggcaagatagctttgcgacgtgagaaaatgggagaaagtgctcctttttggcggttctctgcagcttcctatcctgatcttgaagtggcaatgccatcaaaatctcatgtcaacactgggatgaaaacagctaaccagaattctgaagaatcttcacaaggtgatgtctatccagtggagtcatatgaaagcttcacaacaaatcaaattcttgatgctcattggggtgtcatggctgacggtgatccaacagggctttgttcacatactttgtccattttggtgaatgatttccctggagttct

SEQ ID NO: 409759 - DNA, 494 bp, Oryza sativa
ttgcttcaatccgaatcagaattccatgaaacagaaaggaggtaattcatcatcgcacgaggcaatgagcaacgaatggctggaaaatgggcagtgcccacttgcccggtcttaccgagcaatgagtggcattctgccccttgttgccaaggctttacaaccaccagccggtgtgaagctgaagtgcccacctgctgtggtcgctgtgcgtgcagcccttgcacggactgaacttgtgaagtctctccgtccccagcctctgcctgcaaagatggtagccattgcgttgctcggaatggcagcaaacatccctcttggggtgtggcgtgagcacaccaagaaattctcccctcagtggtttgcagctgtccatgccgctgttccattcattggaatgctgaggaaatctgtcaacatgcccaagactgccatggcatttcaccatagcagcctccattgttggtcagacaatcgggtcgagggcggagcgcatt

SEQ ID NO: 409760 - DNA, 452 bp, Oryza sativa
gttctatccatccatcccatcctcgatccttcattcctgcccggcggcgagcgagagagaggcggaggagatccgagatggcggggagcgggtggaggaggatcccggcggcgaggaggccgcccatgtcgcgcccggcctcggtctgcctctggatcgtgctcgtcgccgccaccctggcgctcgcccaggcgaagaaatcgaaggcggatttgactgaggtcacccacaaggtctacttcgacgtcgagattgatggcaagcccgcaggacgggttgtcatgggacttttcgggaagactgttcctaaaacggcagagaacttccgagcactttgcacaggagagaaaggaactggaaagagtggcaaagcactccacttcaagggaagtgcattccacagaattatacccagctttatgatccaaggaggtgacttcacactcggtgat

SEQ ID NO: 409761 - DNA, 429 bp, Oryza sativa
aactcctctcctctccttcccactactctcgcgaggaggaaagcgaagccaagcgagagaggcttccgccgtcgccttccccttcgccttccgatcggtcgcgaggtttcaagatggcgacgtgcacacttgcaacttcatgtgtgtccttgagcaatgctagaactcaggcctccaaggtggcggcggtcaagagcccggcatctctaagcttcttcagccaaggcatgcagtttccaagcctgaaggcctcctccaagaagcttgacgtctcggcaatggctacctacaaggttaagctcatcacaccagaagggcaagagcacgagttcgaggctccggatgacacctacatccttgatgccggcgagaccgctggagtagagcttccctactcatgccgtgctggagcatgctctacctgtgccc

SEQ ID NO: 409762 - DNA, 455 bp, Oryza sativa
tcggtcgaagcaaagcgcaccacgcacacggaaagagaggagaggtcacatcgcggcggccgcggcgaggatgttggcggtgtttgatccgacggtggccaagtgcccggagggcctccggagcccgccggtggccggcggcgccgtggcggccggcggcgcgggcgcgctgatgaagggctttgccggagcgcacgccgacgcggtcaccgtcagcctgggccccgccggcgccctcgcctactcggcggccaaccagagccccctcgtccccaggttgttcggtgctgtgaatgacatattctgcctgttccaaggacacattgagaacattgccagtctgaagcaacactatggtctgagcaagacagcaactgaggttaccatcctgattgaggcctacaggaccctcagggacaggagccctcttccagctagtcaggtcgtgagagatc

SEQ ID NO: 409763 - DNA, 318 bp, Oryza sativa
atttctcctcggaaagtcaaaggcaagaaacaccatggatgccactgccatcggcaacggcgccctgcactccaatggcgccggcgccgacaccaaagggaagccgatcaaatgcaaagcggcagtggcgcacggccccggcgaggcgctggtgatggaggaggggaggtggcgccgccggcgaggatggaggtgcgcctcaaggtgctctttacctctatctgccataccgacctcagcgcctggaaaggagagaacgagcttcagcgaaagtttcctcgcatattgggtcatgaggcagcacgggtggtggagagc

SEQ ID NO: 409764 - DNA, 456 bp, Oryza sativa
tcgtttcgcgcaggacctcaagacgggctacctgacgctgacgtcgccgcgcgccgcgttcatcaccgaggcgatcggcacggcgctgggatgcgtcgtcaaccccaccgtgttctgggtgttctacagggtgtacaagatgggcagcggtgacatgggcgacatgccctacgccaagctttaccgcggcttcgccatgctcagcgtcggcgacggcgagcaaggcctgcccaggcacagcatgctcctcttcaaggtcttcttcctgctccccctgtctctcagcgtgttccgggaggtggcgagccggacggagtggcgcaattcggcgctacattccgagcaccattggcatggccatcaccttcttcatgccgccgcgcgtgcccgtcggcatgtgtctgggccgcctggaggcgtacctgcgggagaagatggaccccggccgctggcggt

SEQ ID NO: 409765 - DNA, 501 bp, Oryza sativa
tttcgtttggaaacgcccctaacgactaactggaggggccccccccaaatcttgagatcgcacgatggatggacatacaaatggcactaatggttcctgctctaagccatgcgagccattaacagactactgcatccctgattacattctgaatcctgactctgaacaagtcctcgttgatcaggcaccatgttgccctgtagtagtattcatcaactctagaagtggcggccaactcggaagcagtttgatcaaaacgtatcctgagcttcttaataaagcgcaggtttttgatttatcagaagaggctcctgaaaaggcgcttcacagattgtattgcaactttgagaagctcaagtctaaaggctaccctactgcttttcaaattcagagcaacctaaaactaaatggtgctggtggcgatggcacaccaagtttggtgcttggtgtagtttagtgaccttaagctttttaacccaccttctattgcaactgtgcctt

SEQ ID NO: 409766 - DNA, 467 bp, Oryza sativa
atttgatccgctcaatgccctttgaaccacatgcttatgcatatggaaccttattggctgcttgtagagtttataagaacttggagtttgctgagcttgcggctggaaaactgattgaaaaggatccacagagcgcaggtgcctatgtacaacttgcaaatatctatgctggcgcaaatcagtgggatgatgtctctagagtaaggaggtggatgaaggataatgcagatgtgaaaacacctgggtatagctggatagagattaagggtgtgatgcatgagtttagatcaaatgacagattgcaccctcagctctacttgatccatgaaaaactgggccagttagcgcagaggatgaaggcaatgggttatgttccagatcttgattttgtcctgcatgatgtggatgaaactctgaaggtgcacatgctaatgaggcacagtgagaagcttgctatttcttttggt

SEQ ID NO: 409767 - DNA, 479 bp, Oryza sativa
tttttctttccgcaaaattggcactttcctggctgaaaatgttaattctggaagacagtgctcatcacccatgcaaattaatagtgattcagtattcgattttatgtggaaactgggagaacagtttccagattatttctcttagtgatggaagaattgttcagagcatcaggcaacataaggatgttgttgcctgtgttgcaatttcatctcgtggaaatgtggttgcaactggaagttatgacacaactgttatgatctggcatgcatttttcggcataccaatttatcatgttgtaatggaaaggccggttcatatcttttgtggccatgatgacatcataacatgcttatttgttagcacagaactggatattgtcatcattggtttcaaaagacggaacttgcatatttcatacactgcgtgaaggaagatatgttcgatccattcggcatccttgggcattgccttgtaaaat

SEQ ID NO: 409768 - DNA, 460 bp, Oryza sativa
ttacactctactcctctctctcacctccaccatctagctcactcacacagtctccactcacacgcattgcagaggagaggcgacaatggaggggaaggaggaggacgtgcggctgggggcgaacaggtactcggagaggcagccgatagggacggcggcgcagggcgccggggacgacaaggactacaaggagccgccgccggcgccgctgttcgagccaggggagctcaagtcgtggtctttctaccgggccgggatcgccgagttcgtcgccaccttcctcttcctctacatcaccatcctcaccgtcatgggggtctccaagtcctcctccaagtgcgccaccgtcggcatccagggcatcgcctggtccttcggaggcatgatcttcgcgctcgtctactgcaccgccggcattttcggaggacacatcaacccagcagttacttttgggctgttc

SEQ ID NO: 409769 - DNA, 469 bp, Oryza sativa
gcaagaagcaattcttgagctcaatcagcaacaacatctatctccttcttgcttagttaagtccttcgccctcccaagaagaagaagatgtcttgctgcggcggcaactgcggctgcggcagcggctgccagtgcggcggcggctgcggcggatgcaagatgttccctgatgtggaggccacagccaccaccaagaccttcgtcctcgctgctccatccaacaaggcgagctctggaggaatggagatggcggtggagagcggcgagaacggcggctgcggctgcaacacctgcaagtgtggcaccagctgcagcggctgctcctgctgctcctgcaactgaatctatcgtcgtcgtcgcccggctgcatgaggatttatcgtatggatgctgctactgtcgatcagagctttgatcgaggccttaatttgcttgcattagtacccagcttatatgtaggcaggccttg

SEQ ID NO: 409770 - DNA, 462 bp, Oryza sativa
tcggtctacgggtgggacaccgcggggctctccgccgacccggagacgttcgccaagaaccgggagctggaggtgatccactcccggtgggcgatgctgggcgcgctcggctgcgtcttcccggagctcctcgcccggaacggcgtcaagttcggcgaggccgtgtggttcaaggcgggctcgcagatcttcagcgagggcgggctcgactacctcggcaacccgagcctgatccacgcgcagagcatcctcgccatctgggcggtgcaggtggtgctcatgggcgccgtcgaggggtaccgcatcgccggcgggccgctcggcgaggtcgtcgacccgctctaccccggcggcgccttcgacccgctcggcctcgccgatgaccccgaggcgttcgcggagctcaaggtgaaggagatcaagaacggccgtctcgccatgttctccatgttcggcttcttc

SEQ ID NO: 409771 - DNA, 347 bp, Oryza sativa
  unsure (1)..(347): unsure at all n locations
gacgaagatgtcggccgcctcaacgatcttgccggcgctgtccttggtgaggcagcccatgaagccgatgtcggcgacctgcacctggccgcagctgttggggcangccggttccagtgcattccgcacccgcccgggngcacccgacacgaagcttcttccaccttggcgacgttcacccagctaagcgcccgtctgcctttcgttcttcgatggattgggcctgggcccgcagaacctggntttgccgggtgcaacggccgaacgagggccccttttgaagccagcagccgaacggcctggcgggtgaagaaactttcttgaagccagcgggcttcgggaggagc

SEQ ID NO: 409772 - DNA, 476 bp, Oryza sativa
  unsure (1)..(476): unsure at all n locations
tttttgcgcgcgtgattcgggtttcttttccttcttgtcacctgtttcttggtcggtttcccgccttctcagaggtcggtctattggatttggagcccggggcccagccttgcctcaacgtctgtgttgtcgtgttcttattggattcttgaccggattggattttggcggttccaatttttgttggtttgctccgattcttggttgatttggtcggaagatgatcaagtggggcatcggtagcagcgggacgccggcggattcgtattatgaggtccgctcggattgcacggatgacgtgcccaagagcaagttcaagatcaaggcaggaaaaacattgagtgtccggaaatggcaggctgcatttagcactgatggttgtcttgatattgcctcagtcctaagccggatacanaaaggaggtgtgcatccaacaataaggggagaggcttgggagttttacttgatgttttgat

SEQ ID NO: 409773 - DNA, 476 bp, Oryza sativa
gttaatctctgttggaagacctaaatggttggaatctgtggttgattggtatgatcaagatgaggaggcaaaacagttgctggctcaactgataatcaatctagtaggggtagaacatttcaccttgactaatggagtaatcaggttctagggaaaaatctggctgggtaagtttgttgaagcacaacatgcagtacttcttgctatgcatgccagtgggctaggaggacattctagaataacagccacctataatagaattaaaaatctattctattggccgggaatgaaaaaagatgtttaccagtatgtgtcatcctgtgacatctgtcagcaagccaaacctgaacattgtaagagtcctggtaaactacagcctttaccaattccagagcaagcttggtcaaccattagcatggatcttattgaaggtttacccaagtcagaaggctttgatacaattcttgtagtggttg

SEQ ID NO: 409774 - DNA, 475 bp, Oryza sativa
ttgaacttctcttttcgtctgccagttcttggattttggaaagaacaggtggtttgttattcagatttttaggttagaaaaaatccacaaaaaaaaaagatattcgatggcagctgctatagaaggaaatctgatgcgggcgctgggagaggctccgtcgccgcagatgcagaagatcgcgccgccgccgtttcatcccggcttgccgccggcgccggcgaacttctcctcggccggagtccacgggttccactacatgggcccggcccagctcagcccggcccagatccagcgcgtccaggcccaactccacatgcagcggcaggcccagtcggggctcggcccgcgggcccagcccatgaagcccgcttcggcggctgctccggcggcggcggcggcgcgggcgcagaagctgtaccgcggcgtgcggcagcggcactggggcaagtgggtggcggagatccggctgccgggc

SEQ ID NO: 409775 - DNA, 461 bp, Oryza sativa
cccaaccctagctagctccccctccttccccggcggcgacatcgacgatggcggcggctgcggcaggcggcggcgccccgcgggcgctctcccagcgggagcaggacatccagatgatgctcgcggcggacgtccacctcggcaccaagaactgcgacttccagatggagcgctacgtctacaagcgccgatccgacggcattttcatcattaaccttggcaaaacctgggagaagcttcagctggctgccagagtgattgttgccattgagaacccacaggacatcatcgtgcagtctgctaggccttatggtcagagggctgtcctcaagtttgcacagtacaccggagctcatgccattgctggcaggcacactcctggtacatttaccaaccaactgcaaacctcattcagtgagccacgtcttctcatccttactgaccccaggacagatcatcag

SEQ ID NO: 409776 - DNA, 146 bp, Oryza sativa
aggacattaaatccactggcttataaatcatataagtcaataaactgacttaaaagtctaggccaataagcctaagccccaaacaaagagggccaaaattccctggaaataaccacgaaatttcctacaccgtccaagggatgccc

SEQ ID NO: 409777 - DNA, 473 bp, Oryza sativa
cgaaaacaaaattctcccccgggttatcgactgcctcatctagagtttcttctttcttcgcgtgttcttggaggaggagcgaggactaggttagctgtattcggagcttcagattatccaaaaaaaaaaaaaaagaatggacggtgagcagctgatgagtggtgaattggacaattcgttcaacgcactcatggtttctggagagggtgagagtggacaggcacatcatgagggcacagggactaccttgctaggttggaaggaccttcccatggagctgctcctgcggatattatcgatggctggagacgacaggatggtaatcgtgggctctggtgtttgcaccggttggcgtgatacattagaatggggagtcacgaatctttctctttcgtggtgccaggctcacatgaatgacttagtgatgtcacttgctcagaaatttacgaagctgcaagttctttctttacggc

SEQ ID NO: 409778 - DNA, 472 bp, Oryza sativa
gtgtgttcttctgcaattaatttaccttgtctttctccatttatatcacctatgtcaagtgggctacctgctccgataaaagtagctgctacagctaaaggtccctttgttcctcctgagaacctactaagatttcagcctgagactggctggaaaggctcagcagccacaagtgcatttcgtcctgcagaaccaaggaaaatttttgagatgactctcagcgcacctggcattccagtttctgatgctgcagataaacaccgcccagcacttgacattgacttaaatgtagcagatgagcaatttcttgaggaagatatctctcagagttctgttcagacaactggttcggaatctggcaacactagaagaagcaatggtcctgtacgaagtgttggtattgaacttgatttgaacagagctgatgaagttgcagagaaccattttgtgtcgacactcccacagggtcgaa

SEQ ID NO: 409779 - DNA, 437 bp, Oryza sativa
gtgaatcagcaaaaaaaatcaaacaaaaagaaaaaatattccccatctgtgaaattcgcaaaaccctagcgcggcggcgatgtcgaacacgagggtgttcttcgacatgaccgtcggcggagctccggcggggcggatcgtgatggagctgtacgcgaaggacgtgccgcggacggcggagaacttccgcgcgctctgcaccggcgagaagggcgtgggcaagagcggcaagccgctgcactacaaggggagcaccttccaccgcgtgatcccggagttcatgtgccagggcggcgacttcacccgcggcaacggcacgggaggggagtcgatctacggcgagaagttcgccgacgaggtgttcaagttcaagcacgatagccccggcttcctgtccatggcgaacgccgggcccaacactaacgggtcccagttct

SEQ ID NO: 409780 - DNA, 468 bp, Oryza sativa
gtgagtttctctcaggccatggctgatctgaaccttgtgttcttgttcttcctcctcttgtctcctcccatcttatccgatggggtgcttcaggtgatgggaacatcgatgaataggaggagcttgcttcaggccaagggtggctgccctgtgagctttgagaaccagaactacacgaccatcaccagcaagtgcaaatcgccatggcctgccgacctctgctgcccagctctgaacgagttcgcatgcaatttcagccaatatatcaacgacgaaagcaccaactgcgcagaatcgatgtgggtctacctcaacgcccatggaagctatccagctggcctgttttcaaacgagtgcgcagtgcttgactgcaacggtaacaatagcaccattagtactaaccaaactgctaatggaagcggcacccgaggggctaaaggaatatcagagatgtactcacttgtgacg

SEQ ID NO: 409781 - DNA, 412 bp, Oryza sativa
ggaggtgctggagaagtggatggcggcgtacccgcagagccgcgtcctcgtcggcgtcgtcgcgtcgccggaggctgacagggacggctacgtgtcgcacaaggatctctactacgacgtgctgcagttcatcaacaagctgcccaactatgggggcatcatggtctggaacaggtactgggacaagaagaccggatggacggctggtaatgagcctggtctcctggatcaggttctgtgatggacggctggtaattaaccagaccttgatccattttcactttgatcactgatcacttcactggattcatgcacgagctactactagtacgtgcacaaataaagtaagtaatgtcatgtgacgtgcatgcacaaataaagatggaaatgatatgataaaagattggggtat

SEQ ID NO: 409782 - DNA, 474 bp, Oryza sativa
tttcgttaagaccctgaccggcaagaccatcaccctcgaggtcgagtcctcggacacgatcgacaatgtgaaggccaagatccaggacaaggagggcatccccccggaccagcagcgtctcatcttcgctggcaagcagctggaggacggccgcacccttgccgactacaacatccagaaggagtccaccctccaccttgtgctcaggctcaggggtggtatgcagatcttcgtcaagaccctgaccggcaagaccatcacgcttgaggtcgagtcctcggacacgatcgacaacgtgaaggccaagatccaggacaaggagggtatccccccggaccagcagcgcctcatcttcgccggcaagcagctggaggatggccgcaccttggctgactacaacatccagaaggagtccacccttcacctggttcttaggctaagggtgggatgcacatcttcgtgaagaccctgact

SEQ ID NO: 409783 - DNA, 473 bp, Oryza sativa
caaggacagagtgaagaaggttgatttgtttgagaatggcacgattgccattgtagaggctatttctcctgagctcggcaaccgtgtgcagagagttcgtgtgcagcttcctggtctaagccaggagcttctccagaagttgagggaaaagaatatcgattttgctgcacacagcaaccaggaggactctggttctcttctgttcaacctgatcggaaacttggctttcccacttatccttattggtggtctatttttgctgtcaagaagagcacaaggtggccttggtggacctaacggtcctggctttccccttggttttggtcaatctagggccaagtttcagatggaacccaacactggtgttacatttgatgatgttgctggtgtcgatgaagcaaagcaagacttcatggaagtggttgagttcttgaagaaaccagaaaggttcaccgctgctggtgctcgcatcc

SEQ ID NO: 409784 - DNA, 476 bp, Oryza sativa
ttagaggaagaattcagatatttatgggccctggaagcggaaatgtcttgctgaatttgggattattacacaatgtgtggcccctactagggtcaatgatcagtatattacaaatgtactgttaaagataaatgcaaagcttggtggcttgaactccctgcttcaaattgaaacatccccttccattcctcttgtatccaaggtcccgacaataatattgggaatggatgtttcccatggatcacctggacagtctgatataccttcaattgctgcggtcgttagttctcgtgaatggcctcttgtatcaaaatacagggcttcagtccgttctcagtcacctaagttagaaatgattgatggactatttaagccacaaggagctcaggaagatgatggcctcattcgggagttattagttgacttctataccagtactggtaaacgtaagcctgatcaagtcattatctttaggg

SEQ ID NO: 409785 - DNA, 459 bp, Oryza sativa
tgttatctcaattgatgacaattgcctcccagcgaaggacaatggtgggttgactgttgatgcagttgcacagcatatgtccaatctgaagacacctgctacacctttctttttcaacacattgtatgatccattccgcaaaggggctgactttgtccgtggatacccatttagtctgcgcgagggggttgagtgcatgctctcttgtgggctgtggcttcacaatgcagactatgacccaatgactcatgttgtgaagagaaatcaacgcaacacaacgtatgtggatgctgtgatgacagttccacttggtgcgatgatgcctgtgagcgggataaatgttgcattcaaccgtgaggtgctgggacctgtaatgttccctgctctgcggctgcgcaaggaaggaaagcacagatgggatccacttgaagacgtttggaatggcttgggtgctaaagt

SEQ ID NO: 409786 - DNA, 474 bp, Oryza sativa
gtcactgcaagcatcttgctccgatttatgagaagctagcttctgtttataagcaagatgagggtgttgttattgccaatcttgatgctgacaaacacactgccttggcagagaagtatggagtttctggtttccccacattgaaattcttcccaaagggaaacaaagctggtgaagattatgatggcggtcgcgagttggatgacttcgtcaagtttattaatgagaaatgtggaaccagccgtgattcaaagggtcagcttacttcagaggctggcattgtcgaaagcttggctcctcttgtgaaggagttccttggtgcagcaaatgataagcggaaagaagccctctccaaaatggaagaggatgttgcgaagctcactggccctgctgccaagtacggaaagatctatgtgaactctgcaagaagacatggagaagggctctgatacactaagaaggatctgagaggct

SEQ ID NO: 409787 - DNA, 436 bp, Oryza sativa
ttagtttgagatgcacagcaaggcgtccatggcctggatcctggggcttggcccgagccttggccttgtcagggtccccggcattggcctggtctacaccgagcttgccagcggtgttcctcacatcttctcgcacttcatcaccaacctcccggcgatccactcgacgctggtgttcgtctgcgtcaagtacctcccggtgtacaccgtgccaccggatgagaggttcctggtgaagcggatcggccccaagaacttccacatgttccggttgcgtggcgcggtacggttaccaggacattcacaagaaggatgactacttccagaatgatgttgttcgatagcccgaatctgttcgtgaggctggagagcatgatggacgagtacagctactcccacgagtacatcaccctgttgatgagccctcccaaatacc

SEQ ID NO: 409788 - DNA, 382 bp, Oryza sativa
gtgtattaaatatggtcccatttaattcaatggcgcatgcaggaagtttcccccctcatggctgagtcccagccaacaaaaataaagtatgtccaccccaaaaaaatcgccccatttacaacaaatgattcgattattggaaaagacacattagtaccaccacggcaacatttaagctaggataacttggtttaaacttttgtgtaccaaaaccaactaccgatagtgtaagcagctggaacgttattatctccactcgagcaaatgataactccgcatattaacctccaactgaagacctttatattccaatctgcttttcgaacttctggatttgattcaagaatatccatgtcatcatcacatggggagcaatcctgac

SEQ ID NO: 409789 - DNA, 478 bp, Oryza sativa
tggacgcgtgggcggcaactgcgatctccaaccgctcgatctctcgccggaggctccagatctgcgggaggtagtcgacctcgtcgccggcggtggggtttccgaatcgggggcgaagatgacggaggcgtgggtgcggcacaagcccgggatggcgagcgtcaaggacatgccggtgctgcaggacgggccgccgccgggcggcttcgcgcccgtgcgctacgcgcgccggatccccaccaaggggcccagcgccatcgccatcttcctcactaccttcggcgccttcgcctgggggatgtaccaggttggccaggggaacaaggtccgccgtgcactcaaagaggagaaaattgctgcccgcaccgctttagtgccagtgcttcaagctgaagaagatgaaagatttgtcaaagagtggacaaagtctcttatgtgggaggaaataattatgaaagatgtccctggatggaaggtc

SEQ ID NO: 409790 - DNA, 392 bp, Oryza sativa
tcgttactttcagcaaattaagatggctgctgccttctcctccaccgttggagctccggcgtccactccgaccaacttcctggggaagaagctgaagaagcaggtgacatcggcggtgaactaccatggcaagagctccaacatcaacaggttcaaggtgatggccaaggagctggacgagggcaagcagaccgaccaggacaggtggaagggtctcgcctacgacatctccgatgaccagcaggacatcaccagggggaagggtttcgtcgactcccttttccaggctcccacgggtgatggcacccacgaggccgtcctcagctcctgcgaggacgtcagccagggtctcagaacgtacgacttcgacaacaccatgggaggcttttaca

SEQ ID NO: 409791 - DNA, 479 bp, Oryza sativa
tttagtggtgctgcattctgccgttctgctgcacttatactaatggccttgttgctattgaggcatgctttgtctatctcagacaatgaaggagatgatgatgcttctaccatgttctcgctctttctacttcgagctgctggatttctgctgccatgctatatcatggcttggatattcagtattttgcatcgccggcgacaaagacaggaagcggctgcaattgctgcagcagaggtggcattcatcctgcaatcagcccaaggccatgcccttcagttcaccatcgctccagactcccccgccactccgcagcatgagccacggcagcagcagccgcagccgcagccgcaggaatagctagttacttcagtagcgtctctcaactactgactcgcacatgcagaagaagaggatacctcagctagtggccgctttgttgtttcctgctgcaactggcccagggacgctaagaacct

SEQ ID NO: 409792 - DNA, 478 bp, Oryza sativa
gtcgccgccgccgccgccgccgacgccgccgcgaccacctctcgcaaggggattttgtaggggtttctgatccgaggagcgggcgatgtcggactccgaggagcaccacttcgagtcgaaggccgacgccggcgcctccaagacctacccgcagcaggctgggaccatccgcaaaaatggctacatagtcatcaagaaccgcccctgcaaggttgttgaggtttcaacctctaaaactgggaagcacggtcacgccaagtgccactttgttgcaattgacatctttactgccaagaagctcgaagatattgtgccatcttctcacaactgtgatgtcccgcatgtgaaccgtacggagtaccagctcattgatatatctgaggatggatttgtgagtctgctaactgaaaatggcaacaccaaggatgacctcaggctccctactgatgataacctgcttagtcagatcaaggatgga

SEQ ID NO: 409793 - DNA, 453 bp, Oryza sativa
acaagtacattaactaaattgttttattccttgacctgacatgactcatgcacgctagtactcctcccgagttggatcgtaattaaccacgcaactaaattaaccgaagtcgtaattaatgcatgcgattatcgttgatgatcgagattaattagcctaacccctgattaattaaggggttaattaattagctttgcgggtctcgagtccgaatccgaatgggaagagcgggtcgtagtgctcgtcgccgacgttcatcggcagctgctccaccgaccggaaccacgtcctcgccagcttcccggtgaactcgtagtcgccgaacagcacgtcgctgacgccctgcccctccgtccccggcagccacgccgccaccagcgcgttgatggcgtccatgtacggctcgatcaccagcggccgcccggagaccaccaccaccacgcaccttacgcc

SEQ ID NO: 409794 - DNA, 462 bp, Oryza sativa
gtgattgtgaaggaggaggcggccatggcgagggagcaggcgctgctgtcgacggagatcgtgaaccgcggcgtggagccgtcggggccggacgccgggtcgccgacgttctcggtgcgggtgcggcggcggctgccggacttcctccagtcggtgaacctcaagtacgtgcggctcgggtaccactacctcatcagccacggcgtgtacctggccaccatcccggtcatcgtgctcgtctgcggcgccgaggtcggcagcctcagccgagacgagctgtggcgcaaggtctgtgggcgaggccacctacgacctcgccaccgtcctcgccttccttgccgtcctcgccttcaccatcttcgtctacatcatgtccaggcctaggcccgtttacctcatcgacttcgcctgctacaaaccagccgacgaactcaaggtgtcgaaggcggagttcatcgatct

SEQ ID NO: 409795 - DNA, 477 bp, Oryza sativa
ctaaattccaacccaaccgccgccgcatcgccctcgttagaacgatggccgcgtcggcgctgcaccagaccaccagcttcctcggcaccgcccctcgccgggatgagctcgtccgccgcgtcggcgactccggtggccgcatcaccatgcgccgcaccgtcaagagcgcgccccagagcatctggtatggacctgaccgtcccaagtacctgggcccgttctcggagcagacgccatcgtacctgaccggagagttcccgggagactacgggtgggacacggcggggctatcggccgacccggagacgttcgcgaggaacagggagctggaggtgatccactcgcggtgggcgatgctgggggcgctgggctgcgtcttcccggagatcctgtccaagaacggggtgaagttcggggaggcggtggggttcaaggccggcgcgcagaatttttccgagggggggcctcgctacctgg

SEQ ID NO: 409796 - DNA, 433 bp, Oryza sativa
ttgacgcgtgggcaaacccctctcactcccactaccatggatccttgcaagttccggccgtcgagctcgttcgacacgaagacgacgacgacgaacgcgggagctccggtgtggaacgacaacgaggcgctgacagtggggcccagggggccgatcctcctcgaggactaccacctgatcgagaaggtggcgcacttcgcccgggagcgcatcccggagcgcgtggtccacgcccgcggcgcctccgccaagggcttcttcgagtgcacccacgacgtcaccgacatcacctgcgccgacttcctccggtccccgggcgcccagacccccgtcatcgtccgcttctccaccgtcatccacgagcgcggcagcccggagacgatccgtgacccgcgcgggttcgccgtcaagttctacacccgcgagggcaact

SEQ ID NO: 409797 - DNA, 441 bp, Oryza sativa
ttcggtctgaccactgaggtcaagtcggttgagatgcaccacgaggctctccaggaggctcttcctggtgacaacgttgggttcaacgtgaagaacgttgccgtgaaggatctgaagcgtgggtacgtggcctctaactccaaggatgaccctgccaaggaggctgccagcttcacctcccaggtgatcatcatgaaccaccctgggcagatcggcaacggctacgccccagtgctggactgccacacctcacacattgccgtcaagtttgctgagctggtgaccaagatcgacagacgatccggcaaggagctggagaaggagcccaagttcctcaagaacggtgatgctggtatggttaagatgattcccaccaagcccatggttggggagaccttctctgagtacccttctcttggtcggtttgccggcgggacatga

SEQ ID NO: 409798 - DNA, 479 bp, Oryza sativa
tacttggacagcggccttcatatagggcattctttgatgggaagcttggcagttttttatacagtccaggtcgtttgagagatcagatgcatgaagatcgatttgctaatgagagtactgggtcaaggttttctgatttttcggcctcaagcactggtgacattagaaatgatgtgctttctcctagctctcaggatacagggtacagcagtccttctatccaccattcaaggaatgtgtcttctgaaaatcctccatcccatcggcatccgaatgcaacttctcaaattgattttaatggagtccgacgatcacagagaacaggttcttcaggaagttttggatcatttgatggtagctcagcatctaataagtcagttgattcaggtgccttacctgatgcacctacagaaaagccagtgaattctgctgtaaatcgtcagtctgttgcgccccccatggctcattcagcacaattg

SEQ ID NO: 409799 - DNA, 459 bp, Oryza sativa
cacacggacagcaacggaacacttacattaacacggattagagacaggtgaattacaatgtaattgtatctagccatgcacagtgccaaagaggcagcaccgctagaataagacgcaaacgaatcagactaacaaaataagagtcaccagacacactgacaatatgctgagtatttttgacagatccaccaataagacgaatacagcaccatcatgagaaacatattgttccacaaaatacaccctactcagattgttcttataagcaaaagattaaaacccactactaacactacgacgcatgcttcatttgtcaaaggaatcgccgaggggaatttaagccctctcaccacgaatcctcctagccagctgaatgtccttaggcatgatggtcacacgcttggcatgaatggcgcacaggttggtgtcctcgaagagaccaacaaggtatgcctccgc

SEQ ID NO: 409800 - DNA, 466 bp, Oryza sativa
agcaaaggtaccagctgcaatagtgacaggcaaaagttacatgcttcctttcgttcatcatgtgatgcagaagcttatgaattacatgggtgattttatgattcatattcagaaaaaaaatgatgattttacaccaccctacaagaatcatcagatcatgcgttttgttttctctttttcactgcgcaacaatcataatccttggacacttagatcctagtagacctcaacgtgccattgcttgttcttcttgagctgggatagcttctgctcccagctctcccctctctgctccgccactttcttgagggtgtcttgaatcccaggcatcatccccttcaaaccacagaagtagatgtgcgcgccgccatccaagagcttgaagatctcgtcgctgtactcctcgatcttgtcctggacatacatcttgccagcgttcttgtttttctgctccctgcttagcgct

SEQ ID NO: 409801 - DNA, 493 bp, Oryza sativa
tcgtttagttatgatgcctatcctagcaccaaagttgggtgagcagaagctactgattatagcacttttggggggctgcgtgcatgtaagaactaacattgcttgctttcatactcatgttaagtgctttttgttaattttctgcaagaataatttgatgtcatcttgtgcatgctgctgcaggcattcatatatagcatagcatggacgccatgggttccttatcttggtgcaagctttgtgattgtaagcattttggtcaacccttctataaggagcattgtatccaaacgagcagggccttttgagcagggaatggttcaagggtgtctcactggaataagctcaactgcaaatgtgaaatcgcctatagttttttcttctcttactgcttggttcctatcagaaactgcacctttcaccttcagaggtttcagccttgcttgtgctggattgcaatgccgatagcactcacggtgagcatttaatatga

SEQ ID NO: 409802 - DNA, 464 bp, Oryza sativa
tggacgcgtgggcggacgcgtgggcggacgcgtgggcggacgcgtgggcgccgtcgcagatccgatccaggaagagctcgccgccgccgctgccatggcgctctccgtggagaagacctcgtcggggagggagtacaaggtgaaggacctctcccaggcggacttcggccgcctcgagatcgagctcgccgaggtcgagatgccggggctcatggcgtgccgcgccgagttcggcccctcccagccgttcaagggcgcccggatctccgggtccctccacatgaccatccagaccgccgtcctcatcgagaccctcaccgcccttggcgccgaggtccgctggtgctcctgcaacatcttctccacgcaggaccacgccgccgccgccatcgccagggactccgccgccgtgttcgcctggaagggggagaccttcgaggagtactggtggtgcaccgagcgct

SEQ ID NO: 409803 - DNA, 477 bp, Oryza sativa
tacattttccccaaataataatagaggaaggggaaaaacacatttgcagccacatcatccatggcctctctccgcaccattccggtgatcttcggcatcctcttctatgtccttgccagcactgccactgccaccgacgcaccggactacgtcgtccaaggccgtgtctactgtgacacgtgccgcgccgggttcgagaccaatgtcaccgagtatatcaagggtgccaaggtcaggctggagtgcaagcactttggcaccgacaaggtcgagcgtgcgattgacggtgtgactgatgagaccgggacatacaagattgagctcaaggacagccatgaggaggacatctgcgaggttgtcctcgtccacagcccccttgcaaactgctctgaaatcgaggccgaaagggatcgtgcccgtgttttgctcaccaggaatgtcggcatctgtgacaacctgcgcttagccaacccactc

SEQ ID NO: 409804 - DNA, 379 bp, Oryza sativa
tttcggtagaatgcgatcatctggggcaaccactcattcactcagtaccctgatgttaaccacgtcactgtgaagactcccagtggagagaatcctgtcagggaacttcgtgatgatgatgagtggttaaatacggaattcatttttaccgttcagcatcgtggtgccgccctcatcaaggcgaggaagcaatccattgccctatctgctgccagctctgcttgcgatcacatttcgtgactgggttcttggcacttttgacgtaacatttgcctccatgggtgtgtcctctgatggttcgcatggtgtgcccgctgagctgatctactcgttcccagtaacatgcagtggtggccaatggacgattgttcagggtctc

SEQ ID NO: 409805 - DNA, 447 bp, Oryza sativa
ttcaggtcatgctataacatagcaactgaattgcagccaatgcacgtactaccgaccggctaccgatggagctgatgctgccggcatgggcgtccttcgtcggcgtagtgctcgccaccgtgctgcttctgaaagcggagctcgaccgtagccgacgggtgtacaacctcccgccggggccgaagccgtggtcggacatctggaacctcaacctggtgggcacgctacgggaccgctccattcacaacctctccaagaagtacgggcccctgatgtacctgaggttcgggtcgttccccgcaggcgtctgctcgtgggtggagatggccaagttattgctcaagaccgacgacgtggtgttgaccgaccggacgaagaccgtcgccggcaagcacaccacctacaactacagggacattacgtggtcgacctacggcgcgtactggc

SEQ ID NO: 409806 - DNA, 436 bp, Oryza sativa
tttgtttcggacctcaagacgggctacctgacgctgacgtcgccgcgcgccgtgttcatcagcgaggcgatcggcacggcgctgggatgcgtcgtcaaccccaccgtgttctgggtgctctacagggtgtacaagatgggcagcggcgacatgggcgacatgccctacgccaagctctaccgcggtttcgccatgctcagcgtcggcgacggcgagcaaggcctgcccaggcacagcatgctcctcttcaaggtcttcttcgtgctcgccctggcgctcatcgtgttccgggaggtggcgagccggacggagtggcgcatccggcgctaccatcccgagcaccatcggcatggccatcaccttcttcatgccgccgcgcgtgcccgtcggcatgtgcattcggcggcctggtggcgtccctgtgggagaagatgga

SEQ ID NO: 409807 - DNA, 372 bp, Oryza sativa
atcgccatcgccatggctctcatggtggttcaacctggccggcagatgactgcctttgctgctcggacgtcgccggcggcggcggcggaggcgttctggcgtgccgccatgcccggcgctcccatgccggacgccatcgtcgagctcctccaccatgagcacggcgttgctagcgccggcggcaaggccaacgcggcggcgacggtccaccgccgccgatgaacttcaactacgacgactacagggccctgcctcggagcgacgccccttccccggatgcattgaaccgcgtcgccgccgtacagaacgccgacgagaacggcgtgtcctcgtcgtcgtcgccgacgtcgccggtgctcttcctcgaggacg

SEQ ID NO: 409808 - DNA, 491 bp, Oryza sativa
ttcaaagctgatgctgacaaaatggcaaccggactaatcaagcttgctcaagaagacccatcattccacttctctagagatgaggagaccaaccagactgttattgaaggaatgggagaattgcaccttgacatcattgttgacagattaaagagagaattcagggttgaagcaaatgttggagctccgcaagtcaactaccgtgaaagtatttccaagatttcagaagtacaatacgttcacaagaaacagtctggtggatctgggcaatttgcggacattattgtgcgattcgagcctttggaggctggaagtgggtatgaattcaagagtgaaataaagggaggggcagttccaaaagaatatgtaccaggcgtgatgaagggaattgaggaaagcttgcccaatggtgtccttgctggttaccctgttgtggacctccgagcggtgcctgttgatggctcataccatgatgttgattcaagtgtcct

SEQ ID NO: 409809 - DNA, 432 bp, Oryza sativa
ttaccgaaggggagggggagcgaagctttgcgttctctaatcgcctcgtcaagatgcagatattcgttaagaccctcactggcaagaccatcaccttggaggttgagttctccgatacgattgacaatgtgaaggctaagattcaggacaaggagggcatccctccggaccagcaacgccttatcttcgctggcaagcagcttgaggatgggcgtactctcgcggattataacatccagaaggagtccaccttgcaccttgtcctccgccttcgtggaggcatgcaaatattcgtgaagaccctcaccggcaagaccattaccctggaggtcgagtcctccgacacgatcgataatgtgaaggccaagatccaggacaaggagggaatcccaccagaccagcagcggcttcatttttgctgggaagcagctc

SEQ ID NO: 409810 - DNA, 474 bp, Oryza sativa
ttggagtacctggctttgaccggtgcaaggttgaatgcaaaggaaatgattgctgccggtcttgctactcattttgttccttctgaaaaattggaagaacttgaaaaatgcctgctgaatttaaacacaggagatgagtctgctgttcgagctgctattgaagagttctcaactgatgttcaacctgatgaagatagtattttaaacaagctcccaactatcaacaaatgtttctctgctgagactatcgaggacatcataaaagcttttgaatcagaagggagcattgatggaaaccaatggatcgctacagtactgaagggcatgcgaagatcatctcctacttcactgaagatgactcttcgatcgatcagagaaggtcggaagcagagcctgccggaatgtttgaagaaggaattccgacttacaatgaacactctccgatcctgagttactggcgatgtctatgaggga

SEQ ID NO: 409811 - DNA, 472 bp, Oryza sativa
gtttcgggagaggattttagtgagggatttgaaggattttgaggtgggagaggagatggagttgccggcggatgggagcgcgctggcgaggcaggggtcgatctactcgctgacgttcgacgagttccagagcgcgctgggaagcgccgggaaggatttcgggtcgatgaacatggatgagctgctgcgcaacatctggacggcggaggagtcgcaggccatagcgccggcggcggcggctgcttcggcggcggcggtggttggggacgcgcagcagcagcagcagccgatccagaggcaagggtcgctgacgctgccacgcacgctgagccagaagacggtggacgaggtgtggcgcgacatcatgggcttgggcggcggcgacgacgaagaccccgcggcggcggcggctgcggcggcgcccgcgcagcggcagccgacgctggggggagatgacgctggaggagttcct

SEQ ID NO: 409812 - DNA, 339 bp, Oryza sativa
atccgtcatgtccaagtcgcgtcgcaccgaagcagagtagggaaggagaggagcggagtgccatcagacgtccgatcgagtgatccgatggctctcgctctctacacctatgctgctgctgccgctgccgccgcggcgcgggcgctcgcggcgagggtgaccaccacgaggggttacgccgcgtcggcggcgtcgtcggcgatgaggcgggcggcggccgctgtggaagggaagggcgctgcggggatgacgcatgcgaaggacgggtcgtcttcgtcggcggcgagggaggtgtcgtgggtgcccgaccccgtgacgggccactaccggccctccaac

SEQ ID NO: 409813 - DNA, 507 bp, Oryza sativa
cttaatggcagagaaaaaaaaatcttccctcgaagcgatgcgttgaatcgccttctcaagatgcatatctttgtgaagaccctcaccggcaagaccatcaccctcgaggttgagtcctgggacaccattgacaatgtcaaggccaagatccaggacaaggagggcattcccccggaccagcagcgtctcatctttgctggcaagcagcttgaggatggccgcaccctgggcgactacaacatccaggaggagtccaccctccaccttgtgctcaggctcaggggaggcatgcagatcttcgtcaagaccttgactggcgagaccatgacccttgaggccgagtcgtctgacaccattgacaatgtcaaggccaagatccaggacacggagggcatgcccccggaccagcagcgtctgatattggatggcaagcagcttgaggatggatcgaccctggccgactacaacatacagaaggagtctacccttcaccttgagctcaggctc

SEQ ID NO: 409814 - DNA, 501 bp, Oryza sativa
ttactagccagtaagctagctaactaactacgtggctatggcccccaccgtgatggcctcctcggccacctccgtggctccattccaagggctcaagtccaccgccggcctccccgtcagccgccgctccaccaactcgggcttcggcaacgtcagcaatggcggaaggatcaagtgcatgcaggtgtggccaattgagggcatcaagaagttcgagaccctatcgtacctgccaccactcaccgtggaggatcttttgaagcagatcgagtacctgcttcgatccaagtgggtgccttgtctcgagttcagcaaggttgggttcgtctaccgtgagaaccacaggtctcccggatactactatggcaggtattggaccatgtggaagctgcccatgttcggctgcaccgatgccacccaggtgctcaaggagctcgaggaggccaagaaggcctaccccgatgcctttgtccgtatcatcggcttcgacaacgtcaggca

SEQ ID NO: 409815 - DNA, 325 bp, Oryza sativa
gtgcaggagaagcattcgttcatccaggagagagagaggcttcaagttcttggactcctgctctgccatgtccatggctgaagggtatggccctacctgggacagagacgacgagtgcgacaacttcatacgcaggatgaacccgtcaaggatcgagatcgattatgattcatgcaccgacgccactattggcaggggagacagcgcaaatgagtatgggatactccttgaagtaatacaagatgtgactgatctgcaccttgtgataagaaaggcgtacataacctcaaatggtggacggggcatggatgtatttaatataact

SEQ ID NO: 409816 - DNA, 398 bp, Oryza sativa
tcgcgatctagaaccagctttgcgtttgcactcctctcgatctccattcgtttttgagttcctcgtttgctccgcctctctttcactcatgggcaagattaagatcggaatcaatgggttcggccgcatcggcaggctggtggccagggtggcgctgcagagcgaggatgtcgagctcgttgccgtcaacgatcccttcatcaccaccgagtacatgacatacatgttcaagtatgacaccgtccacggccagtggaagcatcatgaggtcaaggtcaaggactccaagaccctcatctttggcacgaaagaggttgcggtgttcggctgcaggaaccctgaggagatcccatgggctgcggctggtgctgaatacgttgttgagtctactggtgttt

SEQ ID NO: 409817 - DNA, 468 bp, Oryza sativa
gttcgccccccaagccaaatccacgcatcgacgcggcaggagcgggcggctgctgcgagatcggcggcgccgcagatctcgcgcccaccagcggagatgaagatcacggcgctcctcgtgctgaagccgtcgtcctccggcgggggagcatcctcgtccggcggcggcggcgggtcgggcggccccgaggcggtggtgctggcgaacgcgacggacgtgagccacttcgggttcttccagcggggcgccgcgcgggagttcatcgtcttcgtcgcgcgcaccgtcgcccagcgcacccagccaggccagcgccagtccgtccagcacgaagaatacaaggtccactcacacaacaggaatggtctttgcgcagttgcatttatggatgatcactatcctgtacgaagtgcattttctctttctgataaggtacttgacgaataccagaaggctttcggggactcttgg

SEQ ID NO: 409818 - DNA, 471 bp, Oryza sativa
  unsure (1)..(471): unsure at all n locations
tcggtcggcgactacttcccggcgctggcgtggggcgacgcgttcctctccggggtggccgcgagggcgtgcaggaacctccggcggtgggacgagctgctcgaggaggtgatcgcggagcacgaggcgaggctacacggcggagactatggcggcggcgaacagcacagggaggaggacttcgtcgacgtgctgctcgcgctgcaggaggagagccaacgccatgatgggagcttcaagctcacgagggacatcatcaagtcgttcttgcaggacatggtggcggcggggacggacacgtcgatcatcacgctggagtgggccatgtctgagctcgtcaagaacccgacggctatgcagaagctggaggacgaggtgcgcctnggagggggtgcgaccaccgccgacacgccctacctcaaggtcgtggtgaaggagacgctccngctccacccgccggtgccactgctc

SEQ ID NO: 409819 - DNA, 529 bp, Oryza sativa
tttttgaggagggcaccgccatttagttaatgagtagttgttaattatcttcactaaccttaattaccctcacgcaaagcactctctaatcctcctcggcgctcgcataatcttgtatccctcatctcagattatcatcacctcgccgtgttagaaaaaagggagtaagttcgttttatcgtcggatttggtgagagttcgccggagtagaagaagatgacggtgacgccgcagatcacggtgagcgacgggaggctggcggtgcgggggcggacggtgctgaccggcgtgccggagaacgtgacggcggcgcacgcgtccggcgccgggctcgtcgacggcgccttcgtcggcgccgacgccggcgaggccaagagccaccacgtcttcaccttcggcacgctccgggaatgccggttcatgtgcctgttcaggttcaagctgtggtggatgacgcacaggatgggctcctccggccgcgacgtcccgctcgagacccagttcatgctcatcgaggtccccgccaccg

SEQ ID NO: 409820 - DNA, 390 bp, Oryza sativa
tcgttcgcgagagcagagcaggggagggggaggggaagggcgccgacgtcctgttgttcactcctgacctgcatcacatctggagatgtctttccgcagcatagttcgtgatttcagggacagtttcgggactctatccaagcggagttttcgaggtgaaaatttcaggcttttcgggccgtcacagagggaaatccattggaccatcaagcgagctggatgacacgcccgtggtagctcagcaaagcaagtgggctggtcttcctcctgaattacttcgcgacgtgatgaaaaggctggaggaagatgatagcaattggctcctcccgcatggatgttgttgcctgcgcttcagatatggccactcgtagagacatgtgcaaagatatt

SEQ ID NO: 409821 - DNA, 360 bp, Oryza sativa
ctggtacgcctggcgggaccgtaccggaccggacatgggccggaccaacccacgcgttcgtgatagccctgacctcaagccaggacgagagggggaagaatgccgctggggcgggacgtcaggatgggatggccgagaagctcttggaggacatggtgactgtcaccaggctccaacctgatggtaagaaggatgacagagtttctggtatcgaagctcgcagagaccagctcgatatgcacatgcagtaagatgtagccacagatgtatattctatgcatccaggtgacagatccaccatggacttggctcctacttgggactaagaagggaccccatatcgcgccttgttgacacagg

SEQ ID NO: 409822 - DNA, 547 bp, Oryza sativa
gtgtgctcgtcaccggcgccgcaggacaaattggatatgctcttgaccccatgattgctaggggtgtgatgttgggtgctgaccagcctgttattctacacatgcttgacattccaccagctactgaatctcttaatggccttaagatggagctggttgatgctgcatttcctcttttgaagggaattgtcgcaacaactgatgttgtggaggcctgcactggtgtgaatgttgcggctatggttggtgggttccccaggaaggagggaatggaaaggaaggatgttatgtcaaaaaatgtctccatctacaaatcccaagcttctgctcttgaggctcatgcagcccctaactgcaaggttctggtagttgccaatccagcaaacaccaacgctctcatcttaaaagaattcgctccatccatccctgagaagaacattacttgcctcacccgtcttgaccacaacagggcacttggccagatctctgaaaaacttaatgtccaagttactgatgtgaagaatgcgatcatctgggcaaccactca

SEQ ID NO: 409823 - DNA, 516 bp, Oryza sativa
ttcagtttgtctcatatttcaagataccacgggatcaagttcttgtgatgtgtgatgatctatacttgccctttgcaaaattgcgtctactgccgaaaggtggacatggcggtcataatggggtgagaagcattatcaaccatttgaagcagaaccgtgatttcccacgtctaagaattggcattggacgaccacctgggaagatggatcctgccaattttgttctccgaccatttaacagaaaagaacaggaagagcttgatttcgctttccataggggcttggaggcagttagaataatggcacttgagggattcaacaagagcgcaacttatgtgaacaccgcacagtcctctgaaatgttgaatagatgataaagtgttcaatctattcttataacataaagattcttatgtcagatctgaatgtttcctatccagtagacacttgcacacatggtggtcattttactctcaagaaattctgagctcccaggacggaagagatatttgagct

SEQ ID NO: 409824 - DNA, 455 bp, Oryza sativa
aggtcaaagaaaaaagaaatccatgcaaatctgaccaactgacagcgaccatgcatggacagcgtcgtcgccgcaccaacactcgccgctcacgcgcgccgccgcttgacactattatactccgcgccgcgcggcgccgtcgccgtcggcggcgcgggtcagcgacgtgaacgtgaccaccggctcaagcggcagctcctccacgtcggcggcgaacgtgtcgtaccgccggaacagccccgccaccattagccgtcccaccggcaccaccatgtccttcccggggcactgcttgttcccctccgatggcgtcccggtctccggcccgttcgaccacaccacgtgctccagcagcggccgggcggcgcttccggcgccggagacgaaccggtcggggacgaactcgccggcgcggtcgaacaccttctcgtcgcgggtggcgagccgctggtacc

SEQ ID NO: 409825 - DNA, 387 bp, Oryza sativa
gttcgctcgaggaggcagctcccccccaaaaaccctagctcaggcttcggcaccgcctctcctcccctcgccttcctccccccaccaggcgcctccaagatgaagctcgtcaggttcttgatgaagctgaacaacgagacggtgacgatcgagctcaagaacggcaccaccgtccatggcaccatcactggtgttgatatcagcatgaacacgcacctgaaaactgtgaaactcacattgaaagggaaaaatcctgttacccttgatcacctcagtgtgaggggaaacaacatgcgctattacattgttcctgacagcttaaacctggagactctgctggttgaggatacaccgagggtcaaggctaagaagccaactgcagggaag

SEQ ID NO: 409826 - DNA, 438 bp, Oryza sativa
ctcgatcaggtacgacagctaagctagccatctatcgttcatggctggtggtggtgtgggagcacaggcggcggcggcggcgacgataccagaggcggcgctgaggtccggcaagccgatgccgctcgtcggcatgggcaccgcgtcgttcccgttggacgcgccccagctgccggccaccgtcagggacgccgtcctgcgagcgatcgacgccggctaccgccacttcgacacggcggcggcgtacggcaccgaggcacccctgggggaggccgtgttggaggccgagcgcgcccgcatggtcgcgtcccgggacgacctctacatcacctctaagctctggatctccgacacccaccccggccgtgtcttgccggcgctcaggaggacgctccggaacctgcagatggtttacatcgacctatacctgattcactg

SEQ ID NO: 409827 - DNA, 540 bp, Oryza sativa
gttcagtaatcagtaatgctggtttgaaatgtgttgcggacatgttctcagatgaggacaaagacactgaacaagatttggatagcccaactgagggcttctcgtttatttccgaggccatcaaagatattcaacagggaaaacttgtgattgctgttgacgatgaatcaagagaaaatgagggagatcttataatggctgcttctttggttaccccagaggccatggcgtttgttgtaagatatggcacaggaatagtgtgtgttagcatgaaagaagaggatcttgaaagatcgaaccttcctttgatggttgcaacaaaggaaaatgaggagaagctctgtactgcattcactgttacagtggatgctaaacagggaacaacaactggggtatctgcaaaggatagggcaaagacagttatgactcttgcatgccctgactctaagcctgaagactataatcggcctggtcatatttttcctctgaaatacagagaggggggtgttctgaaacgagctggacatactgaagcatctg

SEQ ID NO: 409828 - DNA, 543 bp, Oryza sativa
  unsure (1)..(543): unsure at all n locations
tcgtgcaactccaccgctcccaatctcgatcgaaacgcgagggtttcgcatctccgccgacgcctagaggaagaagggatccgccgccggtagccaagccatgccgaagaacaagggtaagggagggaagaaccgcaagaggggtaagaacgaggccgacgacgacaagcgcgagctggtgttcaaggaggacgggcaggagtacgcccaggtgacgcggatgctcggcaacggccgctgcgaggccatctgcgtcgacggcaccaagcgcctctgccacatccgcggcaagatgcacaagaaggtngtggatcgccgtcggggacatcatcctcgtcggcctccgcgactaccaggacgacaaggccgacgtcatcctcaagtacatgaacgacgaggcccgcctcctcaaggcctacggcgagctccccgacaccctcaggctcaacgagggcgtcgacgtcgacgggcccgaggacggcggcgaccacgacgactacantccagtcgaggacgaggacatcgacaggatctaagctcttt

SEQ ID NO: 409829 - DNA, 519 bp, Oryza sativa
tcgtgacgcgtgcgacagcgcgctcaccgagtacttcgccgtgtaccgcctcatcgacatgtacagcctctacacccccgtctgcaccgaggtctcgtcgtcggcggcgttcggccagcgccaggtcgccgtccacggcgccgccccaaaaatcttctccaaataccatgggtggtacatgaggccggcggggtacgatccgtgcacgtcggatcacgccgaggtgtacttcaaccgggctgacgtgcaggaggcgctgcacgccaacgtgaccaatatcggctacaactggacgcactgcagcgacgtgatcggcaagtggagagatgctcccttctcgactctccccatcatccgtaagctcgtcgccggcggcatcagggtctgggttttcagcggtgacaccgatggaaggatccccgtgacgtcgacgaggctcaccctgaacaagcttgggctgaagacggtgcaggagtggacgccgtggtacgaccatcagcaggttggaggatggacgat

SEQ ID NO: 409830 - DNA, 516 bp, Oryza sativa
tactcactcactctcctctactagctcgtcgggatctcttctactcgtccaggcctccaagaatctctctgttcttgctgcttgcttggcggtggtggtagctttcatgatggaggcgatggtggtggtggcgctggtgcttctcatgtcgtccagtctcgtcgcttcagattggtgcgtgtgcaggtcggatcagccacaggcggcgctgcagaagaccatcgactacgcgtgcggcgcgggcgcggactgcaactccatccacgagcaggggcagtgcttcaaccccaacaccgtggtggcgcactgatcctgggccgccaacagctacttccagaggaacagggccatgggcgccacctgcgacttcaccgggaccgtcaccctcaccaccagcgacccaagtgtttctggctgctccttccctgctagtgcaagtggtgctggaacatcaaccactccgaccatgggaggcacaactggaacaatgaccccaggaccttcacacctggactg

SEQ ID NO: 409831 - DNA, 426 bp, Oryza sativa
ttgggcggcctggagctcctcgggacgacggacgacaatgggctccgccgcgacgatcctgccatgactatcgctatcgtgctggttcatgctgctgtctgtagctgacccgatgtgttggttcaacgacgacgcatcagcatcggcaccagcggggtggttggtgtcgtggaccaatgggatgggttggtacaaggggatgccgcgggagttcgtggacggccacaaccagctgcgcgcgcgctacgggctgcagccgatgaggtgggataacaagctggcgaggcaggcgcggcggtggtccgacgccatgcgcggcgactgccagatccgccactccaccggcaacagcttcgccgagagcctctacatcgggaggaacggctggaacgccagggctttcgacgccgtacgatgctggggcga

SEQ ID NO: 409832 - DNA, 385 bp, Oryza sativa
tttggtttttttttttttttgggttggagtagaatgcatatgcccttgagaagggggagatgtggtgaagttcacagttacagctataccaaatcaccagacatacaataccagcttttcccaaataaataagacaataccagctttccccaaataaataaattataaagaaaaagaaaatactagcagccagccagcaccttgcatatgctggggttattttactactactcaaatcgtatgcagtatgatatgattgatagagcaagaaagggaggatgatggatggatgatcatagcctggagagcttgagctgctgcttgagcaaagggcggaggtgctcctggtaaccgtccggaacatccgtgtcgttgagggggtcct

SEQ ID NO: 409833 - DNA, 466 bp, Oryza sativa
tcgttcaaggcaattggatcaggttctgagggagctgatagctcattacaggagcagtacaataaggaattgaccctccaggaggctgagaccatagccctgtctatcttgaagcaggttatggaggaaaaggttaccccaaacaacgtcgatatcgcaaaggtttctcccaactaccacctctacacccctgctgaggttgaagctgtcattgcccggttgtgagaagattgccatcgcgtgttatttttatcagccctaagacagtctctgtatgaacttcctaaatggatatcagtccattgtttgctatggctgccatgttatgttaacgagatagtggctgctagagtttattactgcctctaatagtctggtgtgcagcccagtcatttgcttgttttcagcagtattgagaccatgtacttactatcaaaaagtgaatgctcatcctttttcaagattt

SEQ ID NO: 409834 - DNA, 494 bp, Oryza sativa
ttccggacccagatgaaggcgcagcacgagcgggcggacaactgcttcctccgtgccgagaacgacaagatccggtgcgagaacatcgccatccgcgaggccctcaagaacgtcatctgccccacctgcggcggccctcccgtcggcgaggactacttcgacgagcagaagcttcgcatggagaacgcccgcctcaaggaagagctggaccgcgtgtcgaacctgacgtcgaagtatctcggccggccgttcacgcagctgccgccggcgacgccgccgatgacggtgtcgtcgctggacctgtccgtgggcgggatgggcgggccgtcgctggacctggacctcctcagcggtggctcgtcggggatcccgttccagctgccggcgcccgtgtccgacatggagcggcccatgatggccgagatggccacgcgcgccatggacgagctgatccgtctcgcgcaggccggggaccacatctggttcaagagccc

SEQ ID NO: 409835 - DNA, 516 bp, Oryza sativa
  unsure (1)..(516): unsure at all n locations
tcagaaccttctcgaagctcccgctcccccgggcttccgctccaatggcgaaggaaccgatgcgcgtgctcgtcaccggcgccgcaggacaaattggatatgctcttgtccccatgattgctaggggtgtgatgttgggtgctgaccagcctgttattctacacatgcttgacattccaccagctactgaatctcttaatggccttaagatggagctggttgatgctgcatttcctcttttgaagggaattgtcgcaacaactgatgttgtggaggcctgcactggtgtgaatgttgcggtctatggttggctgggttccccaggaaggagggaatggaaagganggatgtctatgtcaaaaaatgtctccatctacaaattccaagcttctgctcttgaggctcatgcagcccctaactgcaagggtttggtaggtgccaattcaggaaacaccaacgctgtcatattaaaagaatgcngtacatccatccctgagaagaacattacttggctca

SEQ ID NO: 409836 - DNA, 380 bp, Oryza sativa
ttcacccaccctgtcgccgtcgcagatccggggcaggatgagctcgccgccgccgttgccatggcgctctccgtggagaagacctcgtccgggagggagtgcaaggtgaaggacctttcccaggcggtcttaggtcgcctcgagatcgagctcgccgaggtcgagatgccggggctcatggcgtgccgcgccgagttcggcccctcccagccgttcaagggcgcccggatctccgggtccctccacatgaccattcagaccggcgtcctcatcgagaccctcaccgcccttggcgccgaggtccgctggtgctcctgcaacattttcttcacgcaggaccacgccgccgccgtcatcgtcagggacttcgccgtcgtgtt

SEQ ID NO: 409837 - DNA, 527 bp, Oryza sativa
accgttgttattgcggcaccagcaaaaaagcgaggctcatttttcagtgaagtggccacggaatcggcacacagatttgcattgtctgaaattgaagatgctactgacaaatttgacagaagaattggttcgggagggtttggcatagtatactatggaaagcttacagatgggagagaaatcgcagtcaaacttctcacaaatgactcctatcaaggcatccgagaattcctgaatgaggtaacattgctttcaagaattcatcatagaaacctggtgagcttccttggttacagccagcaagatggtaaaaatatacttgtgtatgaattcatgcataacgggacgttaaaagagcacctccgtggaggccctgatgatgtaaaaataaatagctgggtcaagcgtcttgagatagcagaagatgctgcaaaaggaatagagtatctccacacaggatgctccccaactatcatccacagagacctcaagagcagtaacattcttcttgacaagaacatgagagc

SEQ ID NO: 409838 - DNA, 505 bp, Oryza sativa
ttttgtggcccctgatccggccaacttggagaaggggcttggaactattccaatgatgttcaatgttgttatcctgtctccgcatggatactttgcccaatccaatgtgttgggataccctgatactggtggtcaggttgtgtacattttggaccaagtccgcgctttggagaatgagatgcttttgaggatcaagcagcaaggccttgatatcacacctaagatcctcattgtaaccaggctgttgcctgatgctgttggtactacatgcggccagcgtgtggagaaggttattggaactgagcacactgacattcttcgtgttccattcaggagtgagaatggtatcctccgcaagtggatctcccgttttgatgtctggccattcctggaaacatacactgaggatgttgcatacgaaattatgagggaaatgcaagccaaacctgatctgatcattggcaattacagtgatggaaaccttgtcgccactctgctggctcac

SEQ ID NO: 409839 - DNA, 498 bp, Oryza sativa
ttagccagtaagctagctaactaactacgtggctatggcccccaccgtgatggcctcctcggccacctccgtggctccattccaagggctcaagtccaccgccggcctccccgtcagccgccgctccaccaactcgggcttcggcaacgtcagcaatggcggaaggatcaagtgcatgcaggtgtggccaattgagggcatcaagaagttcgagaccctatcgtacctgccaccactcaccgtggaggatcttttgaagcagatcgagtacctgcttcgatccaagtgggtgccttgtctcgagttcagcaaggttgggttcgtctaccgtgagaaccacaggtctcccggatactacgatggcaggtattggaccatgtggaagctgcccatgttcggctgcaccgatgccacccaggtgctcaaggagctcgaggaggccaagaaggcctaccccgatgcctttgtccgtatcatcggcttcgacaacgtcaggca

SEQ ID NO: 409840 - DNA, 509 bp, Oryza sativa
ttctgacttcaccccaggtggctcatctgcggggtgttgtccagaaatctggcggtttcaccactgaatgtggtccacctggggtctcaaaaagggtgccacagacgagattgaccatgtgtgtgacggcattatgactggtagcgaaaaatatggaccaccacaccttaagtgagcatgggctatctcagacatgagttcgctgcttgagaatcagaggtggtgatacatgaaaggctgatgaattcagccacaggaccaagcttggtcctatagagggtctgaagagctatcccaagcaaactgcagcaaaacttccagtacaaaacatgcacgaggcccagcaactaatggcagttgctggccttactaatgaccagactaacctcaaagccatgggtgtcaaaacagaaatgaacactcatgcgatgagacgcacggattggaccaattggaatggtccgcaaatgctgctgcacttacaattaccagaatcccattggaaatgg

SEQ ID NO: 409841 - DNA, 484 bp, Oryza sativa; identical to SEQ ID NO: 392895

SEQ ID NO: 409842 - DNA, 556 bp, Oryza sativa
ggtaaactctagccagatctcgctcgctcgccgctcgccgccgccgccgcgttccaccgagcggagagtagagggaatggcgtccgagggcgtgctcctggggatgggcaaccccctcctcgacatctccgccgtcgtcgacgacgccttcctcaccaagtatgacgtcaagctgaacaatgcaattctcgctgaggaaaagcacttgcctatgtatgatgagttggccagcaagggcaatgttgaatatattgccggaggagccacccagaactctatcagggttgctcaatggatgcttcaaactcctggtgcaacaagttacatgggttgcattggaaaggataagtttggtgaggagatgaagaagaatgcccaagctgctggtgttactgctcattactacgaggatgaggctgctcccacgggcacatgtgctgtctgtgctgttggtggtgaaagatcactggttgcaaacttatcagcagcatactgctacaaatctgagcatctgaagaaaccgagaactggcactagtggagaagcaaaatacatt

SEQ ID NO: 409843 - DNA, 453 bp, Oryza sativa
ggttggcttctcctccccctctttacctttgcctcctcggttcggttccgtggttcgtctagggtttagtgggttgagatggcggcgccggatgtcgagtaccgctgcttcgtcggcggcctcgcctgggccaccgacgaccgctccctcgaggccgccttctccacctacggcgagatcctcgactccaagatcatcaacgacagggagacggggaggtcacgtgggtttggcttcgtcaccttctcctccgagcagtcgatgcgcgacgccatcgagggcatgaacggcaaggagctcgacggccgcaacatcaccgtcaatgaggcccagtcccgccgctccggcggcggaggcgggggctacggcggcggcggtggcggctacggcggcggtcgtggaggcggcggctactgaggaggtggcggcggcggctacgggcgccgtgagggc

SEQ ID NO: 409844 - DNA, 523 bp, Oryza sativa
tcgtctgactacaccatttttgtcggggattggggtgtagatgatacagactacctactacaagagacattcagggtccattacccttcggttaagggtgcaaaagttgtaactgacataatgacaatgcgttcaaagggttatgggtttgtgaaatttggtgatcctacagagcaagctcgtgcaatgactgaaatgaatggaatgctttgctctttcagaccgatgcgtattggtccagcggtaaataagaaaacaacaggggttcaggagagagtaccaaatgctcaaggagctcagtctgagaatgatcctaacaataccaccatattcgttggtggtcttgaccccaacgtcactgaagatgtcttgaaacaagttttcgccccttatggagaagtcgtccatgttaagattcctgttgggaaaagatgtggttttggtcactatgttaacaggccttatgttgagcaagcactgggagtgctacaagggaccttgattggtggcagaatgttagact

SEQ ID NO: 409845 - DNA, 579 bp, Oryza sativa
  unsure (1)..(579): unsure at all n locations
gtttctttcaccccaggttgctcatctgctggaagttgcccagaaatatcaaactgttgccactgaaagtggtccagctggggtctcaaacagtgatgcacagaacatttgcaacatgtttgtgacggcgtcacgacagctagcgaaaaatatagaccaccacaccttaaatgagcatggtctatctaaaagatatgttcgctgcttgcagatatcagaggtggtgaatcacatgaaagacctgattgaattcagccacaagaacaagcttggtcctatagagggtctgaagagctatcccaagcaaactgcagcaaaacttccagtacaaaacatgcacgagccaaagcaactaatggcagctgctggccttcctaatgaccagactaacctcaaangccatgggtgtcaaaacagaaatgaacacccatgcgaatgagacgcacggtattggaccaattggaaatggtccgcagaatgctgctgcacttaacaattaccagaatcccattggaaatggtctgcagaatgctgctgcacttaacaattaccagaatattcctagaagtcagtcgcaaa

SEQ ID NO: 409846 - DNA, 525 bp, Oryza sativa
ttccgatcgacgcctccgcttgacggaaggaaacagaggggaagagagaggatcgtcgtcgactatgatgcggcggcggctgggctgaaagagaaacagcatctcttgaggatcgtcgtttcgttgcatgggcaactactactcgtgcggcgcctcgtccacgtccagcccgacctcaccgtccttggtcgactactactactgctatcatcggtatccaagcagttgcagtagtacaagcacagcaacaagtagcggggggaggatgccgatccgcagccaccagcagaggctgtcgtccccgacggcggtgctggggcacgagacgcctgcgctgcgggaggtgtacacggtggggcggaagctggggcaggggcagttcgggacgacgtacctgtgcacgcaggtgtcgacgggggcggagtacgcgtgcaagtcgatcgcgaagaggaagctgctgagccccgaggaccgtgaggacgtgccgcgggagatacagataatgcaccacctggcggggcacgg

SEQ ID NO: 409847 - DNA, 468 bp, Oryza sativa
tttgagagcctccacaccttcttcttcctctgggacgaggtcagcatccccaccgattaccgccacatggacggcttcggcgtcaacacctacaccttcgtcacccgcgacgccaaggccaggtacgtcaagttccactggaagcccacctgcggcgtcagctgcttgatggacgacgaggccacgctcgtcggcggcaagaaccacagccacgccacccaggacctctacgactccatcgccgccggcaacttccccgagtggaagctgttcgtccaggtgatcgacccggaggaggaggagaggttcgacttcgacccgctggatgacaccaagacatggccggaggacgaggtgccgctccggcccgtggggcgcctcgttctcaaccgcaacgtcgacaacttcttcaacgagaacgagcagctggcgttcgggccggggctggtggtgccggggatctactac

SEQ ID NO: 409848 - DNA, 456 bp, Oryza sativa
gttcctcggcgactacgggtgggacaccgcggggcgctccgccgacccggagacgtgcgccaagaaccgggagctggaggtgatccactccaggtgggcgatgctcggagcgctgggctgcgtgttcccggagctcctcgcccgcaacggcgtcaagttcggcgaggcggtgtggttcaaggcggggtcgcagatcttcagcgagggcgggctcgactacctcggcaacccgagcctgatccacgcgcagagcatcctcgccatctgggcggtccaggtggtgctcatgggcgccgtcgaggggtaccgcatcgtcggcgggccgctcggtgaggtcgtcgacccgctctaccccggtggcagcttcgacccgctcggcctcgccgacgacccggaggccttcgcggagctcatggtgaaggagatcaagaacggccgcctcgccatgttctccat

SEQ ID NO: 409849 - DNA, 264 bp, Oryza sativa
ttagaaccttgtcgaagctcccgctcgaccccccttcctctacaatggcgaaggaaccgatgcgcgtgctcgtcaccggcgccgcaagacaaagtggatatgctcttgaccccatgattgctaggggtgtgatgatgggtgctgaccagactgttattctacacatgctggacattacaccagctactggatatattaatggtcttaagatggagctggatgatgctgcatttactcttttgaagggaattgttgcaacaactg

SEQ ID NO: 409850 - DNA, 475 bp, Oryza sativa
  unsure (1)..(475): unsure at all n locations
ttcatcccagccgccgccgccgcagcttcctcctctcgccatctcccgtcctctccttcaagtcagctacctgcttaatcaaccatgggtaaggagaagacgcacatcaacattgtggtcattggccacgtcgactctggcaagtcgaccaccacgggccatctgatctacaagcttggaggtatcgacaagcgtgtgattgagaggttcgagaaggaagccgctgagatgaacaagaggtccttcaagtacgcgtgggtgctcgacaagctcaaggccgagcgtgagagaggtatcaccatcgatattgccctgtggaagttcgagaccaccaagtactactgcacggtcatcgatgcccctggtcaccgtgacttcatcaagaacatgatcacgggtacctcccaggctgactgtgccgngctcatcattgactccaccactggcggctatgaggctggtatcttcaaggatg

SEQ ID NO: 409851 - DNA, 430 bp, Oryza sativa
tccgtcaagttcgaggagtacaagctcaaggagatcaagaacgggcgattggccatgctggcttttgtgggtttctgcgtccaacagtcggcgtacccgggcaccggcccactggagaacctggccagccacctctcggacccgtggcacaacaacatcggcgacatcatcatcccgagaaccatctacccttgagcttggcacgaaccggtgcgtgcgttcgggcgtacgtgaaggctatgggtggtttttatgtgcgtgcgtactgtgtgtgattggttgattattgcgcgcgcgtgcgcacgcagtggtcggccggcaggcagctgctggttggccttgtaatgtaaagcttaagtagagggtgctctcttgtgaatccgtccatcttaatttttgtatcaaacacgaaatcaaactggtcttagtt

SEQ ID NO: 409852 - DNA, 484 bp, Oryza sativa
ggagagtcaaccagcgaatagttaagctgagagcagagcttatgaggaaccacgatagcccagaagcattggtgatccttgctagtgcttcagatcttcttcttcgagcaactgatggaatgcttgttgatggtgaagcttgtactttaccacaattagagctattggaagtaaccgccagagcagtccatctcatcgtcgaatggggagattcaggtgtatccgtcgctgatggcctctccaatctgctgaagtgccgtctatcaaccaccatccgctgtctttcgcaccccagcgcgcatgtccgtgcactcagcatgtccgtccttcgcgacatcttgaacagcggacaaataaactccagtaagctcatccaaggggaacaccggaatggcatccagagcccaacctaccagtgcttggcagcaagcatcatcaactggcaagccgatgtggagagatgcatagagtgggaagcccacag

SEQ ID NO: 409853 - DNA, 507 bp, Oryza sativa
  unsure (1)..(507): unsure at all n locations
gttcagccatcagacctgcagaggcaatccagccatggcatctatcgttcctgtactcctgcgcctgctgctcctgctgctcccgcttcccctgatccgagaccacctctggccgagccaccgccggccaacgccgcaggacgatgcgggtgagctccacccgatcttcctggtgcccggggcgagctgcagcgacctggaggcgcggctcaccgaggcgtaccggccgtcgacggcgcactgcggcgcgatgaaggggaagggatggtttgggctgtgggagaacaacacggagctgctggtccacgactacgcggactgctcactggagcagatgaccctggtctacgaccccgccgccaacgagtaccggaacctgcccggcgtcgagacccgggtgcccaacttcggctccgcatggtcgttcggctacaagaaccctgttaaccgtctacagagagcacaatgcctnggaaagctcacagactggctggaagaattgggata

SEQ ID NO: 409854 - DNA, 473 bp, Oryza sativa
tcggaccaccacaaataaaggcatacattgagacatatggatatatatacgacatcacatcacagcacaataatggcagcctcctccgtcacggggagccgccgcctctgcactctcttctacctcctcactgtcgtcgccaccgtggtcaccgcggcgtcggcgcacacggcgcacaacgccaccgccgacgaggagtactgggagaagcgcgccgaggaggcccgctcgttcaaccgcgccgcctacgtgagcgaccccgtcgccaccctgaaccgcttcaacgccgacgtgctccgcgccaccacgcgccgctcgctggccaggtacaccggcccgtgcatggcgaccaaccccatcgaccgctgctggcgctgccgcgacgactgggccaccgaccggaagcggctggcgcggtgcgtccgtgggttcggccacaggaccgtcggcggcgccgctggcaagatctacgt

SEQ ID NO: 409855 - DNA, 530 bp, Oryza sativa
ctctctctctctcgcctgctcgcggttgcctgtgcggtcgtctcgcgatttctcctcctcctcctgggatcatggcgatgtggagggcggcggcggggcatcttctcggccgcgcgctcggctccagggccgcgcacacatcagcaggcagcaagaagatcgtgggtgtgttctacaagggcggcgagtacgccgacaagaatcccaacttcgtcggctgcgtggagggcgctctcggcatccgcgaatggcttgagtccaaggggcatcactacattgtcaccgacgacaaggaggggctaaacagcgagctggagaagcacattgaggatatgcatgtcttgatcaccacccctttccacccagcctatgttagcgcagaaaggatcaagaaggcaaagaacctcgagctgcttctcacagctgggattgggtcagatcatattgatctgccagcagctgctgcagcagggttaactgtggcagaggttaccgcaggtaacactgtgtcggtggcagaagatgagctc

SEQ ID NO: 409856 - DNA, 518 bp, Oryza sativa
gcaagatgctcatctcctcctcctctcgcatggcagccatggccaccaccgcgtccagcctcctcaagacctccttcgctggcgcgcgcctccccgccgccgcccgcaaccccaccgtctccgtcgcgccgcgcaccggcggcgccatctgcaactccatctcgtcgtcgtcgtccactcccccctacgacctcaacgccatcaggttcagccccatcaaggagtccatcgtgtcccgcgagatgacccggcggtacatgaccgacatgatcacctacgccgacaccgacgtcgtcgtcgtcggcgccggctccgcggggctctcctgcgcgtacgagctctccaaggacccctccgtcagcgtcgccgtcatcgagcagtcggtgtcccccggcggcggcgcgtggctcggcgggcagctgttctccgccatggtggtgcgcaagccggcgcacctgttcctcgacgagctcggcgtcgcgtacgacgagcaggaggactacgtcgtcatcaagcac

SEQ ID NO: 409857 - DNA, 504 bp, Oryza sativa
gtcaaggccagcagcgactgggtcatgaacagcatgatgaacggcaccgacagctacggcgtcaccaccggcttcggcgccacctcccaccgccgcaccaaggagggcggcgcgctccagagggagctcatcagattcctcaatgccggcgccttcggcaccggcaccgacggccacgttctgccggcggaggcgacgcgcgcggcgatgctcgtccgcatcaacaccctcctccagggttactccggcatccgcttcgagatcctcgaggccatcaccaagctgctcaatgccaacgtcacgccgtgcctgccgctccggggcaccatcaccgcctccggtgacttggtcccactgtcctacattgccggcctcatcaccggccgccagaactccgtggccgtcgccccggatggccgcaaggtgaccgccgccgaggcattcaagattgccggcattgagcacggcttcttcgagttgcagcctaaaggaggtcttgccatg

SEQ ID NO: 409858 - DNA, 529 bp, Oryza sativa
gtactactgcacggtcatcgatgcccctggtcaccgtgacttcatcaagaacatgatcacgggtacctcccaggctgactgtgccgtgctcatcattgactccaccactggtggttttgaggctggtatctccaaggatggccagacccgtgagcacgctcttcttgctttcactcttggtgcgaagcagatgatctgctgctgcaacaagatggatgccaccactcccaagtactccaaggcccgttacgatgaaatcgtgaaggaagtctcatcctacctgaagaaggtcggctacaaccctgacaagattcccttcgttcccatctctgggtttgagggtgacaacatgattgagaggtccaccaaccttgactggtacaagggccccaccttgcttgaggctcttgaccagatcaacgagcccaagaggccatcagacaagcccctgcgtcttccccttcaggacgtgtacaagatcggtggtattggcaccgtgcctgtgggtcgtgctgagactggagtcctc

SEQ ID NO: 409859 - DNA, 540 bp, Oryza sativa
gcagggctgtgacgcgtcggtttacttgagtggcgccaactcggagcaggggatgccgcccaacgccaactcgctgcagccgcgggcgctgcagctggtggaggacatccgcgccaaggtgcacgccgcatgcgggcccaccgtctcctgcaccgacatctccgcgctggccacccgcgcggccgtcgtcctctccggcgggcccacctaccccgttcccctcggccagctcgacagcctcgccccggccccgctgcgcctcgtcaaccagctcccgggcccgggcacctccagcgtccaggctctcatcgacctgttcgggagcaggggcatgggagacgccgccacctggtggcgctctccggcggccacaccgtggggaagtcaaagtgcgccttcgtgaggcccgtggacgacgccttctcccggaagatggccgccaactgcagcgccaaccccaacacgaagcaggacctggacgtcgtcacccccatctccttcgacaacggctactacatagcgctcaccaggaagcagggg

SEQ ID NO: 409860 - DNA, 511 bp, Oryza sativa
ttgtaatcaatctcttccagtcattaggaaacacatttgccaacactatctgggaagatatgttaccttcatcaagcagtgttgatcatggtgataattcaagggctgatggactagaaaacacatcacataacttaattttcagcaagcctaaacactcggatcatattgctgtgaaggagaaatttattcatgcaaagtatgccgagcgagattatgtgcgaaagcttaatatggatgatagcctggtagctcaacagatgtgggaaaatgttagttcaaacaacaagaagggggtttacagtctgattgtggggtcaaatgccgatgtaaatttaacttatgggcagacatcatttaattcggccctaacccttggaaaagctctacttttacaagagcagccaacttcaccatcagatggaagttccagatgttctgatcgtagttcacttgaaaggatttctcccagggactctctttctcttgccagcacaagtgcacgtataga

SEQ ID NO: 409861 - DNA, 467 bp, Oryza sativa
  unsure (1)..(467): unsure at all n locations
cggacgcgtgggtgccaaaccagtctcccccaaatctcctttgcgtcctctcgattcctcagcaaccatgtcggcctactgcggcaagtacaaggacgagctcatcaagaacgctgcctacattggcactcctggcaagggtatccttgctgcagatgagtccactggcaccattggcaagcgctttgccagcatcaatgtcgagaacgttgaggagaaccgccgctctctccgcgagctgctcttcaccacccctggtgccctccagcacctaagtgctgtgatcctcttcgaggagaccctgtaccagaagaccaaggacggcaagcccttcgtcgatgtcctcaagagggtnggtgtcctccctggcatcaaggctgacaagggtaccgttgaggttgccggcaccaacaaagagaccaccacccagggccacgatgatcttggcagcgttgcgccaagtacta

SEQ ID NO: 409862 - DNA, 526 bp, Oryza sativa
  unsure (1)..(526): unsure at all n locations
gttttggtattcccatacactttgtttctcttccccgtctcgtggtcgagagaaaccgagaggagagagagggagaggagcgctgccgattttccggagggggagatctttttcttctccctgaaggttcgagatcgatctgcgacgaggaggagcggggaatcgtaactttatttccgaggaaatttcaacaaattgatgcactaatggagtccaagggtggcaaaaagaagtctagcagtagtcgttcctccctgatgtacgaagctcccctcggctacagcattgaggacctccgacctgccggcggcatcaagaagttccgctctgctgcttactccaactgcgcgaggaagccctcttgatagcccccttggctaccttgatctagtagtttagttactcctctgaattctcgttntgggctttcttacatctctctggctagctgcttcccagtgaccgggaaggtcatcagtcctgcttcctttcttnctcatctctggcatcgtccttcgaaacaatg

SEQ ID NO: 409863 - DNA, 481 bp, Oryza sativa
tttgtttcttacaatggaaattgcaccacttaaggcatatataattaaaaaaccagatcagcaaaatttgtgtgcctcggtgtacaatacagatcaacagcttacaaaatctggcatgcaaatctaagctctcaccacgctatgaaaaatatcccctttgcaactgtaagctaggaaagaatatgaccacaacaggggaagaatttgggagccattcactgtccatttgttgtttattcaagccgtttctttgaatatacggggaagcacttcgtggatgctaatgtccaggagctcaggactcctgcataatactcgtcccttttcagttgtgctagggacaaaccatatcttccgcagaattggtgactcaaattgcacaaagaaaccatcactctggtcaagcttccattttcttgatccctgtcctttccagacctgagggtacgagatggcgctcttaggtgctaccatacaagca

SEQ ID NO: 409864 - DNA, 481 bp, Oryza sativa
gtggaatattgaacggtggaacgcgtacttggccacatgttaggtgcatgccatggcaccattcatggcgtgcgcctcgccaccggtactcacgctggccctgctcgcgtcgtgcggtgcccttctcgccacctccatgctcccggcgcgtgcgacggcgggcagctgcttggacgtcggcgacatggtgatgatggacaggttccgcgcttggcagggagctcacaaccgatcgtacccgagcgcagaagaggcgctgcagcggttcgatgtgtaccgccgcaacgcggagttcatcgacgccgtcaacctgcgcggcgacctcacttaccagctcgccgagaacgagttcgcagacctcaccgaggaggagttcctggcctcgtacaccgagtactacgccggcgatggtcccgtggacgactccgttattacgacgggtgccggatacgtcgacgccagcttcttctaccgcgtggac

SEQ ID NO: 409865 - DNA, 497 bp, Oryza sativa
gtcaggcgaaggtgtccgtcgtcccgggcggggcggcgctcgtcatgaagggcctcaaggagcccgagcgggacaggaagaaggtcaagaacatcaagcacaggggggacatcagcctcgacgacgtcatcgagatcgccaggatcatgaggaacaggtccatggccatggagatggccgggaccgtcaaggagatccttgggacctgcgtcagcgttgggtgcaccgtcgacggcaaggaccccaaggatctgcagcaggagatctccgatggcgaggtcgagatcccttcggcttaaaaggcttgatatttgaggacattaccatctcgtgctactgaagtgatcatttgttccaaaatgctgcttatgtaccttacgagacgatgtgattcgacctatttttgtcatgctctagtagtgatcttgttgagacctcaatgttactattgcaacttggtaccatttggtcctctggaatggagtttcaagtacttg

SEQ ID NO: 409866 - DNA, 483 bp, Oryza sativa
attcttgaagaaggagaagaaggagaggagcagccatggcgtcgtcggtggcagcggcggcgagcacgttcctggggacgaggctggcggacccggcgccgcatagcgggaggatcgtggcgaggttcgggttcggcggcgggaagaaggcggcggctaataaggcggcgaggccgtcggcgccgacgacggacaggccgctgtggttccccggcgcggtggcgccggactacctggacgggtcgctcgtcggcgactacggcttcgacccgttcggcctcgggaagccggcggagtacctgcagttcgagctggactcgctggaccagaacctggccaagaacaacgctcgcgagatcatcggcacccggttcgagaccggcgaggtgaagtccaccccgttccagccctacaccgaggtgttcggcctccagcgcttccgcgagtgcgagctcatccacggccgctgggccatgctcgcca

SEQ ID NO: 409867 - DNA, 489 bp, Oryza sativa
cttagtggtttgcagttccatggtttccatggagtgagacatgatgagaagactctgggccaaaagtttgttgtggatgttgatgcgtggatggatttgagtgctgctggggaaactgacagcatatctgatacagttagctacacagatatttacaggattgccaaggatgttgttgaaggcccatcgcggaaccttttggaggcagtagctcatcgcatcgcgagtgccacattgctgaaattccctcaaatctcagccgtcagagtgaaagttgggaaacctcatgttgcggtacaaggaatcgtcgattatttaggcgttgagatattgaggtacagaaaagacgtaggaggcgatcgtcaggagcttcattgagcctgctctgtgctgaggatggcgttaccttactactcaacaaatgcatttttgcagccgtttgtacctcaataatttcaatggaatggtgacctcatgagctgttccctt

SEQ ID NO: 409868 - DNA, 478 bp, Oryza sativa
ttttactagaagaaggccagacttctgatgggagggccagggagagggtgcagtctgttgtccttgacatgtcaaatgtggtaaacattgacacattagggatttcggccttggaagagatacacatggagctggcatttcttagtatacagatggccattgccggcccaggatggggagcgatccataagatgaaattggcaggtgtggctgaccaggtaggaggagactggatatttttgacagtaggtgaagcggttgaagcctgtgtaactatgcaaaagggcactgctctggaatgctgaggtgtgtgtgttagtagtacttagtaggattaacaccatattaagacataagtgatgctgcttagtgctttgcatccagccattcaatattccagagtgaacaatgtctatagaagttagaaaaatgctctgcaggcagtaagcatcgaagacatgttactgcgataacaact

SEQ ID NO: 409869 - DNA, 479 bp, Oryza sativa
ttcggcggggggctcaaccggtcgtcgtcgggggggcagctgccgccgcaggagcttctcgacgatctctgcagccgcttcgtgctcaacgtgcccaaggaggatttggagtcgttcgagcggatcctgttcttgctggagcaggcgcactggttctacgaggacaactccgtcgagcacaacccctccctcaagtcgctctccttcaaggacttcactacgctcatgttcaatagctgtgctgcgctcaggccataccgcgcgcaccttgatgacatttacaaggatttcactcactataagttccgtgtccctgtctgcggcgccatcatcctcgatgacacctacgagaagtgcttgcttgtgaagggatggaagtctagcgccagctggagttctcctcgtggaaagaggagtaaagatgaagaagatcatacatgtgctgttagagaagttctagaggaaactgggtgtgatgt

SEQ ID NO: 409870 - DNA, 470 bp, Oryza sativa
caacgcagccgccacaaaacccttctccccgggcgcgcgccctccgctccttgctccgcccggctgcccgccgctcgttcgccaccgccaccgccgccgccgccgctgcgtcgatcgaagatgtatctccagtactacatcaacgagaagggggacaaggtgtacaccaccaagaaggaatctcctctcggtgttcccacgcagtctgctcacccagctcgcttctctccagatgacaagtactcacgccagagatacctgttgaagaagagattcgggttgctgccaacccaaaagccagcaccaaagtactgaaggagaaacctcggaccaccatgttccatggatcccacgaagagaatcagtcttgcctacctcgctatttacctgtatcactcaaatgatctgatgtatcgcgatgctatctacgaatcgtacttcctctcgaccatattagtatgatcatgaaa

SEQ ID NO: 409871 - DNA, 520 bp, Oryza sativa
  unsure (1)..(520): unsure at all n locations
gtgacgcggacggcgacacctgggacgagtgcataagtaaatgtacggaaatatgctacaaagatcctgttttggaagatcaccagtggagtgcatatatcgatcggtctccaggacaggatagctactccttggagtgcttcaatgcttgtgtttctggatgtggatataggtttgacataccagcggagaaagtggagcaaatcaaaccaaacaggccatccaagccaccaccaccaccacctcctgcagtagagcgggccacgaattcagaacctgctgtgaagggtgaagacgtgccttgcacatcagcataatagtaatctatgcagccccaaattttgtgtaacttttggtgcttctttccctcatactgcctccttttttttctcttttctgggctggttctttgcaccatgtgcttgaaattcgcagtccaccttaggctgggctagatgctaacaagatcttaacgataaatcccaaaatcttatttatattttcatatgctggntcatcc

SEQ ID NO: 409872 - DNA, 508 bp, Oryza sativa
cagaaaggtgatgaccattcagatttcactgcctctgggcaagcatcatggctggataaaattcagcaaactgtacagaatgttttacgaacattcaactttttcaagacccctgtggatttatctgaggcttctcgtgttcggaaggagtatgatgatgcaagctcaaagctgtccaagattcagtctaggatatccactctgacagataagctaaaacacgactttggtaaggagaaggagttctattacttttatgatcagtgctttgagagcaaggagggcaagtatgtttacaaggtatgtccattcaagaaagcttcgcaggttgaaggacatagtaccaccagcctggggcgctgggacaaatttgaagaatcctacagagtaatgcaattttcaaatggagacagatgctggaatggccctgacccgagtctaaaggttaggcttcgatgcgggctgaacaatgaacttaatggtgtcgatgagcctagtagatgcgagt

SEQ ID NO: 409873 - DNA, 538 bp, Oryza sativa
tcggttggcggcgatggatcgggttcgcgggggcgcgttactgctcgggggggtgctcacaagatccctgtttgcattttctgttgcgaaggaggagaccaagaagctcggtaccgtgatcggtattgatcttggtacaacctactcgtgtgtcggtgtgtacaagaatggtcatgtcgagattatcgccaatgaccagggtaaccgtatcacaccctcatgggttgcattcaccgatagcgagaggctcatcggtgaggctgccaagaaccaggcagctgtgaacccagagaggaccatcttcgatgtcaaacgtctcattggaagaaagtttgaagacaaggaagttcagagggacatgaaacttgtcccctacaagattgcgaacaaggacggtaagccctacattcaggtcaagatcaaggatggagagaacacgggcttcagccctgaggaggtcagtgctatgatccttggaaagatgaaggagactgctgaggcataccttggcacagaagatcaacgatgctgtcgtgac

SEQ ID NO: 409874 - DNA, 497 bp, Oryza sativa
tctttaaaaccctaaccccgccgccgccggggctctttgactcaagatcggggtgtctcaatcggtgttccggtcttttgagcgcggagatggcggaggagaccccagctgagactccagctgccctggttcttggggagcccatggatctgatgactgctctgcagcttgtgatgaagaagtcaagtgctcatgatgggcttgtgaagggtctccgtgaggctgccaaggccatcgagaagcatgctgctcagctttgtgtgcttgctgaggactgcgaccaacctgattatgtcaagttggttaaggctctgtgtgctgagcacaacgttcaccttgttaccgtgcctagtgctaagactcttggcgagtgggcagggctttgcaagattgactctgagggcaaggcaaggaaggctgtgggctgcttctgcgtcgttgtcaaggactatggtgaagagtctgagggccttaacatagtgcaggactatgccaaa

SEQ ID NO: 409875 - DNA, 450 bp, Oryza sativa
gtaaacctggtgttaccaactagagattatctttatgcaccatcatttgagaacctttgccgggctgctgacttcatccacagaaatgctttgtgtgggaagttgacatatgttcactgcaaagctggacgtggacggagcacaacagttgttctttgctacttggtgcaatacaaacaaatgactccggctgaagcttatgaacatgttcgcttgcgcaggccaagggtgctattagcttctgcacagcggcaggctgttgagcaattctaccagcttagggtgaagaaatctgggaaatccatttgcctggacagcccaataatgaaaccaccgctgttccttgccactcgcaacctcattgcatttgacgagaagacattcgtcatggtttccaaatcggacctcgaagggtatgatgcggatacctcggcccgtaacgtgggcagt

SEQ ID NO: 409876 - DNA, 518 bp, Oryza sativa
  unsure (1)..(518): unsure at all n locations
gggctgttgacttgaagtttgtagccacccaattcgggagactccacagcaaacagcggcagcatacatttagattctattcacagcaatggagaacctgggcagcttgttttatacaggcagcttggcatagatactgcagaaagaaactggaggatactttgtttgagaaggagaagaggttgcaagcggcaattgtcagtgatggttcgagttcgctcagtcttggtgcggcgctatatgcttcacgttttgctggtaatatgatgcggatcttacggagaaatgccactcgaaaggcccgtttgcaggaaagagtgcctgcaaggttattacagaagcctgcagaaccgaactttttcgctgaagatcagtaatgtccatactttgctacatgcagaaattgatgcttcagctggtaaaagttctctctcccctgctgatataccatttttcagtatatgattgaattctgtacatagatagaccatttggttccaagccttttggnttatata

SEQ ID NO: 409877 - DNA, 471 bp, Oryza sativa
tttattttgggggttggggggttgggcgaggagggggatgatgtgaacacgaaagaggggaaagattagtagtagatggccgcttattccctcgtcttcgtcttcgtcggcgtcgccgtcttcgtcctcgcgccaccagcctccgccgtgcccttcatcgtcctgcacgggatcggagaccagtgcgccaaccatggtgtcgccaagttcacccgccttctcgccgactggtccgcctcccatggctactgccttgaaatcggaagtggaacatgggactcttgggtaatgcctcttcagaaacaggctgatattgtttgcagtaaggtaaaagaaatgaaggaactctccaatggttacaatatagttggtctttcacaggggaacctgattggtcgagcagttgttgagttttgtgatgatgggccaccggtcaagaatttcatttcactcggtgggcctcatgctggt

SEQ ID NO: 409878 - DNA, 499 bp, Oryza sativa
gatagtgtttgtgtacaggcttgttgctgctgattgggcataggtgaagttgcatgaaactgcgttcaagaaagaagttataccaaagctatggtttgaatggagtgagctctgcactactgaagacttcaaactgaatcaagttgatattgatgactctgaagatgaactattggaggctaatgctattcgccaggatatcaaggctttgtatagaaggtaacaagctgtatgtggctgctgtataccatgtacataatgcaatgctgatctttctggatgatcattgctgtgaaggtgtggcagtagccccttctagtgccggcgttcccttcatgctaggatttttcgttaacctccgtcatttccctacctgttttgaaccactgtccgatttgaacatgtgccagcttggtgcacggttagcgtgctgatcctagtctcatttcttactgaaaatctccaggattaataactatggtttctgccgttcctgctt

SEQ ID NO: 409879 - DNA, 422 bp, Oryza sativa
ttctgctccgcccccctaccccgcaacccgtggctttgtgccgcgcctcgctttggtcttcatccgcctcagatctgattcgttctaggttggtctggggaagatggcgatcacggtgaggcggtcgacgatggtgcggccggcgtgggagacgccgcgggtgcggctgtggaactcgaacctcgacctcgtggtgccgcggttccacaccccaagcgtctacttctaccgccggggccccgagggaggggggcgcgccgcaggggttcttcgacggggagcggatgcggcgcgcgctggcggaggcgctcgtgccgttctacccgatggccgggcggctcgcgcgcgacgaggacgggagggtcgagatcgactgcaacgcggaaggggtgctcttcgtcgaggccgacgcgcccgacgcc

SEQ ID NO: 409880 - DNA, 471 bp, Oryza sativa
  unsure (1)..(471): unsure at all n locations
gttcccaaccagcagctgcggcggcgcgagcgcaccaagaggaggcggagcagccggagccacctccgccgccgccgccaccatgggtatctcgcgtgactccatgcacaagcgccgggccaccggtgggaagcagaaagcgtggaggaagaagcgaaagtatgagcttggtcgccagccggcaaacaccaagttgtcgagcaacaagacagtgaggagggtccgtgttcgtggaggaaatctgaagtggagggctcttcgcctggatactggtaactattcttgcggaagtgaggctgtcactcgcaagacccgtatccttgatgtggtctacaatgcgtcaaacaatgagcttgtgaggacccagacccttgtgaagagtgccattgtgcaagttgatgctgccccattcaagcagtggtatctcactcactatnggngtcgatatcggtaggaagaagaaagctcctg

SEQ ID NO: 409881 - DNA, 503 bp, Oryza sativa
tcgtttttctccgggcttttaccagatgagggggggaatctttaaagcttgacatggttacagattgaccaaaaccatgtatccggcgcaatacctaaagcatttgccaacttaagaagtgagaagcatacttacatgaataataattgattgagcgggcaaaacccgtccgaattgtccagactgaatacactttggcactctcttgacgataacaacaatttgtctggacctcttcctgcagaactagctgcggcaaaaagcttgaaaatactttaggctgacaataataacttgagcgggagttccatccctactctgtattacaacatgtccggactatttaaactgagtttttataactgcactttgcaaggtgctatgcctgatctgagtgccatacctcagctggaccatggggatcttagttggaaccagctgactggatctatcccaactaagaaacttgcttcaaatattactacacattgatctgtcacata

SEQ ID NO: 409882 - DNA, 424 bp, Oryza sativa
tcgtctgattccgatacgcactacaaagaggacggggaagatgaacgatggaggctgtacccggcgaggcagacgctgcggctgatgacgcctgcgaggtgccgtcgcctccgacgtcagggatgacagaggaggtgaaggacgcggaggaagcacctgagccggggaggcgccaaaggctgatgcgggggaggagaagaatgcggagggtgacaaagagaaggaccagggctagcagacagcaactcccggttgatcgctgaagatacctgctctatcgctgtgccacggcctcctgtaacactatgagatgcagccttttgaactttatagcatgggctattcaacactaagttcggatacatcactcgtttctgcttaagacattatttataagctttcgcagcgtaccgggggcaaatat

SEQ ID NO: 409883 - DNA, 492 bp, Oryza sativa
  unsure (1)..(492): unsure at all n locations
ctccttcccgtcgaaccctctccagtctccactccactgaatcctcccacctcggctcgaaggaatggcaagcggtagtgaagctgagaagtcacctgaggttgtgctggagtggcctaagaaggacaagaagaggcttctacatgctgtttaccgtgttggagatttggatcgcaccattaaatgttacacagaatgctttggaatgaaattactgaggaaaagagatgtgcctgaagagaaatatacgaatgcatttcttgggtttggacctgaggacaccaactttgcacttgaattgacatacaattatggtgttgataagtacgacattggagcaggatttgggcatttcgctattgcaactgaggacgtgtacaaattggctgagaaaattaaatccagttgttgctgcaagatcactcgtgaacctggtcctgtcaagggaggatccactgtgattgccttngcacaggatcctgacggttacat

SEQ ID NO: 409884 - DNA, 507 bp, Oryza sativa
cctgccggtacgcgccgcggacggaactggcgggcccacgcgtccgttgttttcggagcctgctcaactaaactctgtggggcagtgtagcagcaggccttgaccatgccgaatcagatccacgagatcaaggacttcctcctgacggcaaggaggaaggacgcgaggtcagagcggatcaagaggaccaaggacgcctgcaagttcaaggtgcgctggtgcaagtacctctacaccctatgcgtctgttgacgccaacatgggcaacaagctcaagcagccgcttaccccgggtttgactgttcaggaggtttaagcatcaaagccagaccatgctgtttgtagcagcaggattgcttgctcccgctcgcattagtagctattagatgctgaaattttatctgtcttgagtattgaatgtaacacccaaagtgtatgtgctgaaccctttttgagtcagattgcgctgatactcctttctggagatagctacaaacgtactggccc

SEQ ID NO: 409885 - DNA, 483 bp, Oryza sativa
gtcgcatcgcctcctcctcctctcgccgctcgcagcgaaaaagccagcgcctcccagcgcccacgcgatcccgacgaatcgaatcgagtccgagacgccgatctcggattcgagaccgttgatttcaaccaacacaagccctcctccggatcgatccgctcctcttcagccatggcaggaatggcacccgaaggctcccagtttgatgctaagcactatgacagcatgatgcaggaactactgcaccaaggtgacaatgaggaattcttcacttcatatgatgaagtttttgagagttttgatgacatgggcctccaagagaaccttctcagaggcatctatgcttatggttttgagaagccatcagctattcagcaaagggggattgttcccttctgcaaagggcttgatgtgattcacgaggctcaatctggcacaggaaaaactgctaccttctgttctgggatcctgcagcaacttgac

SEQ ID NO: 409886 - DNA, 471 bp, Oryza sativa
atcttagagggggtgattacagtgaaatggctaaggcctacagaccttcacatgcagatgcaacttatgacttcaaatacggtgttagagcagtgcagggtggtggaagatcatcagcaagagagaccattggaagggtggatgcaggagctcttgcaaagaaaattcttaagctcacatctggagtagagatcttggcgtttgtgtccaaggtgcatcaaggtgtactaccagaagacgccgttgactatgacactgtaacaatggaacagatagaaagcgacattgttagatgtgctgatccagaatatgcacagaagatgattgatgcaatcgataaagtacgagctagaggtgattcgattgctgctgtggtcacatgcattgcaagatatgttcctcgtgggattgctgctcctgtttttgacaaacttgagggtgaattggccaaagctatgcttctttttctgc

SEQ ID NO: 409887 - DNA, 377 bp, Oryza sativa
tagtatgcagcgcacaagccccagcaccagcaagctgctactcatcatcagcgagagctagctagctgtgtgtgccacttacactgctgctgctgctggttctagctaagctcaccgatcgtcgtcttcgtcatcgccggtgacctggtgaattagtcgagagagatggcggcggcggtgacggtggaggaggtgaggagggcgcaaagggcggaggggccggcgacggtgctggcgatcgggacggcgacgccggccaactgcgtgtaccaggccgactacccggactactactttaggatcaccaagagcgagcacaatggtcgagctcaaggagaagttccaagggatgtgggacaagtcgcagatcacgaaga

SEQ ID NO: 409888 - DNA, 313 bp, Oryza sativa
ttttggttttttttttttttggggtttttttaagcaaaacgccatataggtaaaaggtttaattaacataggagtccagcagaaaataacaataaaaagatagcttggaattaaagccgttgttccaatttaccatacgcagtatttgattacaggaatcccaaaaaactactaccggtgccgggttttaatttttaaaaagcacaggttcaaattattgcgacaaaagtttttgatacccgtaagattggacgcttgatagccaaaccacacttataaccctaaatatgcatacggaggatgtccaatcgga

SEQ ID NO: 409889 - DNA, 482 bp, Oryza sativa
gtagaagcccgaggaccggatgtcctgtttcctaaccaaggccctggcaaatgttggagctgaaatggctcatctagtccctggtcgggtgtcgactgaaatagatgctcggttggcttatgatacccaaggaattatccagagggtgcatgagcttttgaagctatacagtgatcatgatgtcttatctgaacgcctgctgttcaaaattccggctacatggcaaggtatagaggcctcgaggttgcttgaatctgaagggattcaaacacatttaacatttgtgtacagttttgcccaagcagcagctgcagcacaagccggtgcatctgttgtacagatctttgtgggacgtgttcgggattgggcaaggactcactctggcgacccagagattgatgaagctttgaagaaaggagaagatgctgggcttgctttggtgaagaaagtgtatgcctacattcacaaaaatgggtataaaa

SEQ ID NO: 409890 - DNA, 483 bp, Oryza sativa
tcgtctagaacgagcagctggcgttcgggccggggctggtggtgccggggatctactactccgacgacaagatgctgcagtgcagggtgttcgcgtacgccgacacgcagcgctacaggctggggccaaactacctgatgctgccggtgaacgcgcccaagtgcgcccaccacaacaaccactacgacggcgccatgaacttcatgcaccgggacgaggaggtggactactacccgtcgcgccacgcgccgtttcgccacgcgccgccgacgcccatcacgccgcgccccgtggtggggaggaggcagaaggcgacgatacacaagcagaacgacttcaagcagcccggggagaggtacaggtcgtgggcgccggatagacaggagaggttcatccgctcgtttgccggcgagctcgcgcaccccaaggtctcccctgagctccgcgccatctgggtcaactacctatcccagtgtgatgagt

SEQ ID NO: 409891 - DNA, 520 bp, Oryza sativa
ttcgattcaaacccgccgtttccaagcttgctctcctctcccccccaatccttccctcccgagtggcagggtgctcgacgggatggcgcagaaggaggccaatggcagcagcaacggggagcacaccacccgcccgccgccgacgccctcgccgctccggttctccaagttcttccaggcgaacctgaggatcctcgtcaccggcggagctggcttcatcggctcgcacctcgtcgacaagctcatggagaacgagaagcacgaggtcattgtcgcagacaactttttcactggttcaaaagacaacctgaagaagtggatcggacacccaagatttgagctaatccgtcatgatgtcacccagcccctgcttgtggaggttgaccaaatctatcaccttgcttgccctgcttcaccaatcttctacaagcacaaccctgtcaagaccatcaagacaaacgttaatcgaaccctgaacatgcttggacttgccaagagaagtggagctaggattttgtga

SEQ ID NO: 409892 - DNA, 485 bp, Oryza sativa
cttccccccacccctctcgccgccgcagccggggaggctacccctcccccgccgccgccaagatgcagatcttcgtgaagaccctgacggggaagaccatcacgctggaggtggagtcctcggacaccatcgacaacgtgaaggccaagatccaggacaaggaagggatccccccggaccagcagcgcctcatcttcgccggcaagcagctcgaggatggccgcaccctcgccgactacaacatccagaaggagtccaccctccacctcgtgctccgcctccgcggcggcgccaagaagcgcaagaagaagacgtacaccaagcccaagaagatcaagcacaagcacaagatggtgaagctcgccgtgctccagatctacaagggggacgacgccaccggcaaggtcaccaggcttacgaaggagtgccccaacaacgactgcggcgcgggcaccttcatggcccaccacttcgatcgccctact

SEQ ID NO: 409893 - DNA, 497 bp, Oryza sativa
gtgctctgaggcccaggcccatctacaacaagaacaaagccctcttttccctacccccgaaaaaggaaaaacccgctccactcccccctccgctccgccgcaccacgccctacgacaccaaccaaaccctcctcctagccccccggcggcgatggccggcgtcggcggcagcagcagcggcggcggcgacgtggagatgggcgggtggtcggagctcctccactcctccactaagctcctcgagcaggccgcccccaccccgcacttccctcccctccagaggaacctggaccagctggaggtgctctccaccaagctcaaggccaagacggtgcgcgccgaggcgcccgtgcagtcgctctccgccaccaggttgttggcgcgcgaggggatcaatgcggagcagctcgccagggacctcaaatccttcgaacttaagaccacatttgaggatgtttttccatctgaagcaactactggcgaggagtacctgcagc

SEQ ID NO: 409894 - DNA, 480 bp, Oryza sativa
tatgttgcgagagagagagagagagatcagttagtttgttgagtggaagcagatcaggaagatgctggagaagctgtgggacgacgtggtggccggtcctcgaccggagaccggcctcgagaagctccgcaaggccgctacaacccgcccccttgtcatcaacaaagatggcgacggcgaggcgagcggagtggcgtacaagcggacgcagtcgatgccgacgaccccgacgacgccggtgacgccgtcgtcttcgtccccgacgacggcgacgacgacgacgccgcggggcagcaacgtgtggaggagcgtgttccacccggggagcaacctcgccaccaagagcctcggcgccaacctcttcgaccgcccccagcccaacttccccaccgtctacgactggctgtacagcgacgagaccaggagcagccatcgctgaactgaataatcccattgatcggaggctggtcgatctctctg

SEQ ID NO: 409895 - DNA, 452 bp, Oryza sativa
gaagttcacagttcagttctaccacgtacaacagcagaagtgagagagggagaagaagacaagggaagaggaggagcttagctagccagccatggcgaggcgctctccttgcctcgccgtcgccatgctcctgcttggggcgttggcggtggcgagcgccttcattgatgaagcggcggctgctggccgggggctcggccatggcgcccgcttcatgagcaagcagggtcgtgtgacatacgagaagctgccggagccggagccgaagccaaagccaaagcctcatcctaaacccacgccaaaacctgagcccaagccagagccggagccaaaaccagtacctgagcctgagcctaaaccggaaccaaagcccgaaccaaaacctgagcctaagccttgaacctaaccatacccagagccaaaaccggagccgaagccagaaccaaaaccct

SEQ ID NO: 409896 - DNA, 420 bp, Oryza sativa
ctccagccgaagccgctcaccctcctccgcctccctcctcctctccccgtcgctcgccatggcagccttcgccaccgcgaccccctcgccggcgatctccgtgtccccctggagcatgtcgtcgctccgcgccgggctcccctcccccacccgcgcctccccggcggggaagctccggtcgtcgttctcgcccgcggcggcggccacggcggcgtcggtcggctgcctcagctacttctgcggcctcacccccatttcgcctctcctctccctcggggaagagacttcaagctgtgagcatcgattgtttggtattgatgcccgtggaaggatagtggcaatgagacatgggaggcgtgctcctaaacttagcagaccgccagatcagcgaaaggcacttctgcgcggtctgaccacgca

SEQ ID NO: 409897 - DNA, 426 bp, Oryza sativa
gtgatccggaaggtgctggtgtcgtacatgtacgcggcggtgtggatcttcctgtccttcacggccatcgcctacaacaagtacatcctcgaccccaagatgtacaactggcccttccccatctcgctcaccatggtgcacatggccttctgctcgtccctagccatcgcgctcgtccggctcctacgcgtcgacaagctcccgtcgagccccgccatgacgccgcagctctacacctcctcggtgctgcccatcggcgcgctctactcgctctccctctggttctccaactccgcgcacatttacctctccgtctccttcatccagatgctcaaggcgcttatgcccgtcgccgcgtactccatcggtgtgctcttcaagaaggagaacttgaagtactacgccatgcgtaacatgctctacatc

SEQ ID NO: 409898 - DNA, 445 bp, Oryza sativa
aagtcgcgtcgcaccgaagcagagtagagaaggagaggagcggagcgccatcagccgtccgatcgagtgatccgatggctctcgctctctccacctctgctgctgctgccgctgccgccgcggcgcgggcgctcgcggcgagggtgacgacgacgaggggttacgccgcgtcggcggcgtcgtcggcgatgaggcgggcggcggcggcggtggaagggaagggcgctgcggggatgacgcaggcgaaggacgggtcgtcgtcgtcggcggcgagggaggtgtcgtgggtgcccgaccccgtgacgggccactaccggccctccaactcgccggcggcgccgacgccgtcgacctccgggccgcccacctcgcccgtagctacgcccgcgcgtgatgcgcgcgaacttcccgtcgtcaaccgacgacgacgccatccatccatata

SEQ ID NO: 409899 - DNA, 512 bp, Oryza sativa
  unsure (1)..(512): unsure at all n locations
tgtcatgcaagaagagacgagacgagggagagaaggagaagagggggccggccgcgggcgtcgtcgtgttcctccccccctctctctcctctcctctcctctcgatctccatccttccttccatccattcctccccgcacccttcgcattgctctcgtcgtctcgattcggtcgaggatctccaggaaaagaggaggaagcgatatgggttgcttttcatgctgcggagcggatgatgtcggcaagaagaagaagcgcgacgatccttacgtcccgatccctgatccaggtggtaactatggacgtagcaagcccgggcccccagccccttcgcgttctccccccaccagcagaaatctgccaattgcagtaccggcaattccccttgatgaaataaagggaataaccaagaacttcagcagtgatgctctcatcggagaaggctcgtacgccagagttntctttggtgtgctgagagatggcaggagatctgcggtgaagaagcttgactc

SEQ ID NO: 409900 - DNA, 474 bp, Oryza sativa
ctcatgtgaaaatccagatattagacaggctgcagtttatggtattggcatttgcgctgagtttggtggctctgcatttaggcctcacactggtgaggccctgtccagactatacaatgtaatcaaacatcccaatgcgttggacttggataatgcgatggcatatgacaatgctgtttctgctcttgggaaaatatgtcagtttcatcgtgatggcattgatgcatctcaggttgttcctgcttggttaagttgtttgccaataaaaaatgacttaatcgaggccaagatagttcatgaacaactctgtacgatgcttgagaagtcagatagggagcttttgggtcataacaaccagtatcttccaaagattgtctctatctttgcggagatattatgtgcgggtaaggatctggcaacagaacaaacttttagtaagatggctaatgtgctaagacagcttcagactacatt

SEQ ID NO: 409901 - DNA, 419 bp, Oryza sativa
gctggcggccgtgctggcggcggcggcggcgagcgcggcggcgcgcgccgccgaggccgtgccgctgcacgacgcgctcgggctcgtcctcgcggaggacgtccgcgcgcccgaccccctccctcccttccgcgcctccatcaaggatgggtacgccgtcgtggcctccgacgggcccggggagtacccggtgattacggagtcgagggccggcgacgacgccctcggcgtggtcgtcacccccggcacggtggcgtatgtcacgaccggagggccgattccggatggtgctgacgccgtcgtgcaagtggaggacacggagcagctcgccggcgcgccggatgggtcgaagagggttaggatattggtgcggccaactcaggggcaggatatacgcaatgggggatgtgacataccaa

SEQ ID NO: 409902 - DNA, 538 bp, Oryza sativa
tgttactttaaacgagggaagactagttggacttctttaggtggaattatgctcagcataacaggcacagaagcattgtttgctgacctttcgtattttcctgtacaagctattcagattgctttcactgtggttgtgttcccatgccttcttctgcaatatactggtcaggctgcgtttatagctgcaaacacaaaccaagtcagccatgccttctatatctcccttccagctcctatactttggccagcatttgccgttgcaacagcagctgcaatagttgctagtcaggccactatatctgcaacatattcgattatcaagcaagcacttgccctagggtgctttccccgagtgaagatcatccatacttccaagaagtatctcggccagatatacagccctgatattaactggatcctcatggttttctgcatagctgtcactgcagggttcaaaaaccaatcccagattgcaaatgcatatggtactgctgtgatcatggctatgcttgtgacaacatttctgatgatcccca

SEQ ID NO: 409903 - DNA, 533 bp, Oryza sativa
  unsure (1)..(533): unsure at all n locations
tcttctctcctcctctaatctcaagtctctgtctcgtcgtcctcgcatctccactcgccatgggcaagattaagatcggaatcaacggtttcggaaggatcgggaggctcgtggccagggtggccctccagagcgaggatgtcgagctcgtcgccgtcaacgaccccttcatcaccaccgactacatgacctacatgttcaagtacgataccgtgcacggccaatggaagcacagcgacatcaagatcaaggactccaagactctgctcttgggcgagaagccggtcaccgttttcggcatcaggaaccctgacgagattccgtgggctgaggctggtgctgagtatgtcgtggagtccaccggtgtcttcactgacaaggagaaggctgctgctcacttgaagggtggtgccaagaaggttgtcatctctgccccgagcaaagatgctccgatgtttgtctgcggtgtcaacgaggacangtacacttcagatattgatattgtctcaaatgctagctgcaccacaaactgg

SEQ ID NO: 409904 - DNA, 280 bp, Oryza sativa
tcgtttagatagcgagcggctactgccgggggaggagatggccaagatctaccgggtgaagctctgggtcacctatgaggtccgcgcctagagcaaggtctggtactccctgtggaagctgatgaaggaggagaagagcaacgtgcaggtgctggccatctacgagatgttggagcgcaacgagagcacgatcatgaactatggcatgtggctgtgttaccagagcagacccggttaccacaacatgttcaaggtgtgccgcgacactacattgaatggt

SEQ ID NO: 409905 - DNA, 394 bp, Oryza sativa
gccatcttgaggagcaatctcatctcggtttccttgtgtattggatatttggatgtatatcttcgtggttagtgaggtgtgaagtcttttgttggtgtgcctgtgccttcaggctttgaagccaaatcaaatgccttgaactttgtctcttcatactgcagggcctgaacacaaacttcagcaacatcagctcttggaattgacttcgtgtctgtctggagaagttcatcgtcattgccaacaatcaactccctcactcccccgtctttgtcttgcagaccaccaggccttattattgcataagggactccactgtctgccaaatactgttctgacttgcgcttccaaaccagtatattgccattgcctaggctgttcagtggatggttaggat

SEQ ID NO: 409906 - DNA, 495 bp, Oryza sativa
gcatgctgcacagagctagcgttagcttggttagttgttcttagcattctagctagctcaatggcgaaagacattgaggcgtcggcgccggagggcggcgagttctcggcgaaggactacaccgacccgccgccggcgccgctgatcgacgtggaggagctgaccaagtggtcgctgtaccgcgcggtgatcgcggagttcatcgcgacgctcctcttcctgtacatcacggtggccaccgtgatcgggtacaagcaccagtcggacgccaccgtcaacaccaccgacgccgcctgcagcggcgtcggcatcctcggcatcgcctgggccttcggcggcatgatcttcatcctcgtctactgcaccgccggcatctcaggtgggcacatcaacccggcggtgacgttcgggctgttcctggcgaggaaggtgtcgctgatcagggcggtgctgtacatcatcgcgcagtgcctgagcgccatctgtggcgtgggg

SEQ ID NO: 409907 - DNA, 498 bp, Oryza sativa
ctctcagctctcacagctcactgcatcaatggccgcggccaccatggcgctctcctccccggtgatggcccgcgcggcgccgtcgacctcctccgcgctcttcggcgaggcgcggatcaccatgcgcaagaccgccgcgaagcccaagccggcggcgtcgtcggggagcccgtggtacggcgccgaccgcgtcctctacctcggcccgctctccggcgagccgccgagctacctcaccggcgagttcccgggcgactacgggtgggacaccgcggggctctccgccgacccggagacgttcgccaagaaccgggagctggaggtgatccactcccggtgggcgatgctgggcgcgctcggctgcgtcttcccggagctcctcgcccggaacggcgtcaagttcggcgaggccgtgtggttcaaggcgggctcgcagatcttcagcgagggcgggctcgactacctcggcaacccgagcctgatccacgcgcagagcat

SEQ ID NO: 409908 - DNA, 404 bp, Oryza sativa
  unsure (1)..(404): unsure at all n locations
atcgccggcgagagagagagagttagctagctaggatgggttctacagccgccgacatggccgcggcggccgacgaggaggcgtgcatgtacgcgctgcagctggcgtcgtcgtcgatcctgccgatgacgctcaagaacgccatcgagctgggcctgctcgagacgctgcagtccgccgccgtcgccggaggaggggggaaggcggcgctgctgacgccggcggaggtggccgacaagctgccgtccaaggcgaacccggcggcggccgacatggtggaccgcatgctccgcctgctcgcctcctacaacgtcgtcaggtgcgagatggagngagggcgccgacggcaagctctcccgccgcttcgccgtcgtgccggtgtgcaagtggctgacgcccaacga

SEQ ID NO: 409909 - DNA, 499 bp, Oryza sativa
gaagcaattcttgagctcaatcagcaacaacatctatctccttcttgcttagttaagtccttcgccctcccaagaagaagaagatgtcttgctgcggcggcaactgcggctgcggcagcggctgccagtgcggcggcggctgcggcggatgcaagatgttccctgatgtggaggccacagccaccaccaagaccttcgtcctcgctgctccatccaacaaggcgagctctggaggaatggagatggcggtggagagcggcgagaacggcggctgcggctgcaacacctgcaagtgtggcaccagctgcagcggctgctcctgctgctcctgcaactgaatctatcgtcgtcgtcgcccggctgcatgaggatttatcgtatggatgctgctactgtcgatcagagctttgatcgaggccttaatttgcttgcattagtacccagcttatatgtaggcaggccttgccttttgctctgacgcctaaataaaaccgtcgtc

SEQ ID NO: 409910 - DNA, 533 bp, Oryza sativa
actggacatactctactactactagccagtaagctagctaactaactacgtggctatggcccccaccgtgatggcctcctcggccacctccgtggctccattccaagggctcaagtccaccgccggcctccccgtcagccgccgctccaccaactcgggcttcggcaacgtcagcaatggcggaaggatcaagtgcatgcaggtgtggccaattgagggcatcaagaagttcgagaccctatcgtacctgccaccactcaccgtggaggatcttttgaagcagatcgagtacctgcttcgatccaagtgggtgccttgtctcgagttcagcaaggttgggttcgtctaccgtgagaaccacaggtctcccggatactacgatggcaggtattggaccatgtggaagctgcccatgttcggctgcaccgatgccacccaggtgctcaaggagctcgaggaggccaagaaggcctaccccgatgcctttgtccgtatcatcggcttcgacaacgtcaggcaggtgcagttgatta

SEQ ID NO: 409911 - DNA, 501 bp, Oryza sativa
tcggaaaaatatattccagatgatcaggacagtctgggtctctgatggtctgaaaggtttttacagaggaatcagtccaggtgttactggatcacttgctacaggggcaacatattttggtgttattgaatcaaccaagacatggctggagcattctaatcctaatctaagtggccattggtctcactttattgctggaggaattggagatacacttgggtcttttatctatgtgccatgtgaagtcatgaaacagcgaatgcaagtccaaggcaccaagaaatcttgggccttaactgccacaaaaggaaatatttctcaaactccaggggctccgatgtataactactataatggaatgttccatgctggttgttctatctggagagatcatggtctgaagggactttatgcaggatactggtctacacttgccagggatgtaccttttgctggtcttatggtcactttctatgaggcaatgaaagaactgactgagta

SEQ ID NO: 409912 - DNA, 460 bp, Oryza sativa
ggagcgtggttactcattcaccacaacggccgagcgggaaattgtgagggacatgaaggagaagctttcctacatcgccctggactatgaccaggaaatggagactgccaagaccagctcctccgtggagaagagctacgagcttcctgatggacaggttatcaccattggtgctgagcgtttccgctgccctgaggtcctcttccagccttccttcataggaatggaagctgcgggtatccatgagactacatacaactgcatcatgaagtgcgacgtgcatattaggaaggagctatatggcaacatcgttctcagtggtggtaccactatgttccctggcattgctgacaggatgagcaaggagatcactgccttggctcctagcagcatgaagatcaaggtggacgctcctcctgaaaggaagtacagtgtctgcattggaggatccatcttggca

SEQ ID NO: 409913 - DNA, 458 bp, Oryza sativa
aggggttctaggggcggatgggatgccgggagggctactcgagacgattaatgttgataagaagatgctagttgacagggtgaggcaagctctgtatgcgtcaaagatttgcagctacgcgcaggggatgaaccttctgcgagcaaagagtgtggagaaggggtggaatcttaacctcgcagagcttgcaaggatttggaagggcgggtgcattatccgggcgaagtttcttgataggatcaagaaggcgtatgacaggaaccctgagctggccaatctgatcgtggacagggagtttgcaagggagatggttcagcggcagaatgcatggcggcgggttgtggctcgtgctgtggaggctgggattagcactccagggatgtctggtagcctttcatactttgacacctacaggtgtagtcggctgcctgcaaatctgatccaagcacagagagact

SEQ ID NO: 409914 - DNA, 478 bp, Oryza sativa
gcattgccttgttccacctgcagccaaactgtgtaatataagcaagcttgctatagggggactaggcactctaggcttacctaatccaccccttcaggcttcagctgttcagtgcagacacagagaatgaattgggtggagtttctgaagcccgtagtcgcaatgctggtgtttgacacgctcttcgcgctgatgacagcattggtcaagaaggctttggctgatgggttaaaccacgttgtctttatcaccctacgccagtttgtagcggcagtcctgctcgctccgattgcttatttcaaagaaaggaatacaagaccaagatttacaacagagatctttgcctacatgttcatgagcgcattgcttgggggattatgtgctcagtatctgttctttctggggttgagctacactacagcaacactgactgcaacattctccaacatgacttccggtttcacctttttaattgtat

SEQ ID NO: 409915 - DNA, 521 bp, Oryza sativa
gtcgcgtcgcgtctccctcccgcgcgacggatccgagagccctaaaccctagaactccctcgccctcgcgtcggcgccatggaggacgaggagatggagaagaaggtgcagcagtacctgcagcggaaggggttccgcctcaccgagctcgcgttgcaggaggagcgcaaccgcatctccacctcctccgtctccgacgtcgcgctcgccaggtcggaaaatgatccggcaagatactatgatggttatagtaaactaagaacatgggcatacagttctctcgatcagtacaagcatgaattactccgtgtcctttacccagtgtttatccattccttcatggatctagtggcagagggacatacacaggaagctcggtcctttttccacacgttccatgaagaccatgaactgatgcattctagggatctccagaaactggaaggcattctttcttcttcacaattggaggaaatggaactggccagatctttaaggaaaaatcaattcagaattaaagt

SEQ ID NO: 409916 - DNA, 481 bp, Oryza sativa
tgaggatgtaaagaatatgctatacactgacagtgctgaggctggggaggctggtggcattggcatgggcttgcttatggctggaacagacagtgagaaggctggagagatgcttgcctatgcacatgatacacagcatgagaaaattattcggggcttgtcacttggaattgcattgacagtttatggcagggaagaggaagctgacaccttgattgaacaaatgactagagatcaagatcccatactccgttatggtggtatgtacgcattggctctagcgtacaggggaactgcaaataacaaagctatccaccagcttcttcattttgcggtgtcagatgtgagcgacgatgtccggaggactgcagtattggctcttggttttgttctgtacaatgagcctgagcagactccaagaattgtggctctgctctctgaatcaaataatccgcatgttcgttatggtgccgctttagct

SEQ ID NO: 409917 - DNA, 532 bp, Oryza sativa
tttggcctagaataacagaccaagagctacagcaaatttctggagattcaaattccaccattgtccccctgtttgagaaggttctaagcgccagtgatgcaggccgcatagggcgccttgttctaccaaaagcctgtgcggaggcatatttccctccaatttctcagccagaaggtcgtcctttgacaattcaagacgcaaaaggcaaagaatggcattttcagttcagattctggccaaataacaacagcagaatgtatgtcttggagggggttacaccatgcatacaatcattacaattacaggctggtgatacagtgacttttagtcggatagaacctggagggaaacttgttatgggcttccggaaggccacaaacactgtcagtttgccagactcacagatttcagctattgccaacggttccattcttggggatacattattttctagtacaaatgagaatttagcaatagtaagtggttatttagggattcttcagtcaataaagggggctgcagatcttcatac

SEQ ID NO: 409918 - DNA, 375 bp, Oryza sativa
gttatgaagcagagagagaagaagaggaagcagaggaggaggagtccaagaattgaagcaggagaagaggaggtggtggtttgattcaagaagaaggagaagagcaagagcaaggatgttgcgaggagggacgagcttgctggggatcgtcaacttcgtgacgttcctgatctcgatcccgatcctggggggaggaatctggctggcgtcgagggccaactccaccgactgcatccgcttcctgcagtggccgatcatcgccatcgggctcgccgttatggtggtgcccctcatggggttcgcgggggcgtgctaccgccagacgtggctgctccgcctctacctcttcgccatgttctttatcggtcgtcgcct

SEQ ID NO: 409919 - DNA, 433 bp, Oryza sativa
ggtgggttggcttctcctccccctctttaccttttcctcctcggttcggttccggggttcgcctagggtttagtgggttgagatggccgcgccggatgtcgagtaccgctgcttcgtcggcggtctctgctgggacaccgaccaccgctccctcgaggccgcacttctccacctgcgggaagatccttgactacaagatcatcaacgacagggggacagcagaggtgacgaggctaagggtatgacaccttgtgctacgagcagtgagaagcgcgaacacaattgagggcactgagactgaaggagcgtcgacggacgcaacatcaccgataatgaggtccagacccgtccatcctgtggcagaagcggtggctaccgtaccggtggtggcggatactgaggatgccgaggaggcggagcatactgaggaagt

SEQ ID NO: 409920 - DNA, 482 bp, Oryza sativa
acgcacgttgccaccacaggctacgcaaaattctctcccttcctcctccaccacctccactccgacgatcctcctcctgatcctgtgccggccggcgatggcgtaccggttgctggagctcacgctggtctccgcgagcgacctcaagaaggtcactctcttctcgcgcatgcatgtctacgccgtcgcctccatctccgggagcaacgtccccatgcccatgcacggcacccacgccgaccgcaacggcggcagcaaccccgcgtggaacaccgtgctccacttccccgtccccgcccgcttcgacacccgcggcctcgccctccacgtccagctccgcgcccggcgctccttcggcggtcaccgcgacgtcggggacgtgttcgtgcccctcgacgacctcctcgccggcgcgcacgacggcggtgagccgaggccggctagctaccaggtgcgctcgcccatgtacgtccgcgcgcacg

SEQ ID NO: 409921 - DNA, 449 bp, Oryza sativa
gtgcggcaactgcgactgtgctgacaagagccagtgcgtgaagaaaggtaccagctatggcgtcgtcatagttgaagccgagaagagccacttcgaggaggtcgccgccggcgaggagaacggcggctgcaagtgcggcaccagctgctcctgcaccgactgcaagtgcggcaagtgaagtcacgaagcaaccgaacactcgccgccggcgagtcacctaccttaattagtccacaataaaaaccacccatatgagtgtggtttgtgtgtgtgctgattattgctgaattaaacccgtgtgttatcgattaattaagcagctggtcgcttcggcgactatgcgtgtatcaacgtatgaatttgtgtgatgtgatgtacccgtgctattctcagcgaaattaatcaatcgtgtattcgtgtggcttgcctagtaaaaagggctatcatac

SEQ ID NO: 409922 - DNA, 421 bp, Oryza sativa
taaaatgtctcttctggaatggtttgctaatgaatacaagaagtttggttgctcgcttgagtttgtcactaataaatctcaagagggatctcagttttgtagaggattcggtggcattggtggtatcttgcgttaccagctagatatccggtcatttgatgagctttctgacgatgagggattgtatgaagactctgattagcaatcagccaatcacatgactgtgctggcccagggaaggacgccgcagctgcaacgagtctgattcgctctacttacgcaggaacacttcgaaagcagctatccagaaattgatgggcgtgggccagcctcatcctatgctggaagggattaaggcgaaaggattactgagtcacatcatcatgatagtaatgtgtcaagaagttatcgaacttaaaag

SEQ ID NO: 409923 - DNA, 497 bp, Oryza sativa
tcgttcatctcctcctcctctcgcatggcaggcatggtcaccaccgcgtccagcctcctcaagacctccttcgctggcgcgcgcctccccgccgccgcccgcaaccccaccgtctccgtcgcgccgcgcaccggcggcgccatctgcaactccatctcgtcgacgtcgtccactcccccctacgacctcaacgccatcaggttcagccccatcaaggagtccatcgtgtcccgcgagatgacccggcggtacatgaccgacatgatcacctacgccgacaccgacgtcgtcgtcgtcggcgccggctccgcggggctctcctgcgcgtacgagctctccaaggacccctccgtcagcgtcgccgtcatcgagcagtcggtgtcccccggcggcggcgcgtggctcggcgggcagctgttctcgccatggtggtgcgcaggccggcgcacctgttcctgacgagcttggcgttgcgtacgacgagcaggaggactacg

SEQ ID NO: 409924 - DNA, 514 bp, Oryza sativa
ttcctctcctcctcccctgcacagaccactcgtttcctccacaaagagggagggaacaagggaagggtgtcgcccgccccccaccccgatctgcctccgccgctccgctcctccgcgcctgcgaaatctaccaacgctaactcagcaagatgggtgccggcggcaggatgacggagaaggagcgggaggagcagcagaagctgctcggccgcgccggcaatggcgcggccgtgcagcggtcgccgacggacaagccgccgttcacgctggggcagatcaagaaggccatcccgcctcactgcttccagcgctcggtgatcaagtccttctcctacgtggcccatgacctcgtgatcgttgccgcgctgctctacttcgcgctggtcatgatccccgtgctgtcgagcgggatggagttcgcggcatggccgctttactggatcgtgcagggctgcgtgctcaccggcttgtgtttatcgcgcacgagtgcgggcaccctgccttttccgactac

SEQ ID NO: 409925 - DNA, 465 bp, Oryza sativa
tcgtatttctgtagtgaatttaaggaccttttcaattggagacacttcattgagtcactcaaagaagacattgatattgttgaaatgctgcccccagcatacaagcatattgagcctgtggctaaagctccaatatcttggtcaaaggtgaattattatagagatgaaattctccctcttttgaaaaaacacaaagttatttactttacgcatacagattctcgccttgccaacaatggtcttcctagttatattcagaaattaagatgccgagttaactataggtctttgaagtattcccaaacaattgaagatcttggtgctaccttggtttcacggatgcatcaggatggaagcccatatcttgctctccatctaaggtttgagaaggatatgctagcttttactggttgcagccatagcctgacatcagaagaagaggagaattgcgtaaatgcgttatga

SEQ ID NO: 409926 - DNA, 474 bp, Oryza sativa
tccattcgtccggcgagacggtggaggacacggagctgctgggctaccgcgtcccggcgcggacgcgggtgatcatcaacgtgtgggctatcggccgcgacgcggcggcgtggggcgaccgcgcggaggagttcgtgccggagcggtggctcgacagcggcggcggcgacggcggcgaggctggacatgggtgagctgtttgggctgtccatgcgaatgaagacgacgctgaatctagtcgcaaagccatggtcttccgatgtttgatgtgttcagtatgaaagctgctaggcaggctagctaccatctgtgcctattgcaacatataatttgtgtagcgagggtcatctatatttaaggggtaagtgcatgtgcacctacacgtgcttcaccgttagatttgctttgacattagtgtatactttttatattttagttaagcacaatatatattatgttctcggtataacatga

SEQ ID NO: 409927 - DNA, 398 bp, Oryza sativa
ttttggtttctgtgtaaaaatggagcaatggatcatgcaaagctaacatcagttattattggtacacatatctctactccacagaaactcccaatggaacctcttattgagcactccacaaatatggagcctgcaggtcactctgcgaggttccatctcaacttttcaaaactgtaagaacaaaaaatttaaaaggtacacgtcggtatcgtcgtgtctctctatgcctcggcgccgagttccaacatcaaggtgtggttcgcatcgttgcttccagggccactgaactggatgggaccagggctgatgtaatggttcttgagggaccactcatctcgcaatgaagcaaacttcttaaacggtgccccgtcaagttccaccatagccttcttgatcac

SEQ ID NO: 409928 - DNA, 449 bp, Oryza sativa
ccatggcccgttacgatgaactggttaaggaggtatcatgctacctgaagaaggtgggctacaaccttgacaagattcccttggttcccatttttgggtttgagggtgacaacatgattgagaggtccaccaaccttgactggtacaagggccccaccttgcttgaggctcttgaccagatcaacgagcccaagaggccatcagacaagcccctgcgtcttccccttcaggacgtgtacaagatcggtggtattggcaccgtgcctgtgggtcgtgttgagactggagtcctcaagcctggtatggtggtgacctttggtcccagcggcctgaccactgaggccaagtcggttgagatgcaccacgaggctctccaggaggctcttcctggtgacaacgtcgggttcaacgtgaagaacgtcgcggtgaaggatctgaagcgtgggtac

SEQ ID NO: 409929 - DNA, 208 bp, Oryza sativa
tgttaaggtcatgatggccaagtgaggcaccacttcccctgccgatgatggcatagtaccctgggaggaggaaaccgtgcattgccgtattagtaaggggatgcaaacactggtttcagtcgtcttccctgatgaagaaaaccgaaccgtactagttgtagttgctgaacatttttctatctctccagtctctccggtgtgccatggc

SEQ ID NO: 409930 - DNA, 375 bp, Oryza sativa
agcatcaccagtcatgcatcgttccccgtatgattgtatgcagggatacattaatgatccggacctacatgtaagggacaaagttaaggggcctcaaagatggaagcatcctggtccagcggggagatctcggggagcctttggagcaaaatttcgttccacatgtcgacggggcccggcatgcaccaggggaggcagtcgctgacaatgtttttttgccaccttttggcgatggccgcgccgggggggccgtcggcgcgcaacattatggcctttgtcacgttgagcacctcgaacctcctcgggttcccgctcgccgggggcgtcgtcgccgtcgttttcttacccgcataaccttcttttggtggaccctcc

SEQ ID NO: 409931 - DNA, 473 bp, Oryza sativa
tcattcaattgttcctacaacattgtgactgttggatgtgggcattgcacaatggtgctctccatggatcttgctccttttcaccaagcacgcactgttcaagatcaccaggtacagaacagaggatttcaaggtaataactttggaagctatgacatagcttccagaaatcagaggacatcgacagccatgtacccaatgccaaccagtcagcagcaagtgtcacctatacgtcgtatgcacaattaattttctcatgattttatttcattgatctactaaattatggggtttattttttatttctctatataagcatgcatgcaaaatgggtatatataatatagctaaaggttatatgtactgttctaggcttctaatgtataatcaaaatatataatagtcatcaagttcatgcatgacctatatatgaacctgatcacactgaattcccgtaaacattagtttttccc

SEQ ID NO: 409932 - DNA, 544 bp, Oryza sativa
ttaatcggaaaggaattcttaattggtttaaacttcggaaacgtgaaggtggagcttctattctgacaagttcagaaggtgacaagtccagtttgactaaatcaactgctccttcaacacctattggggagagtgttaattttccttccgaaccaagaatatcaaattctttggttggtgagagtgcatcggttgatctctttagcattggccatggggagttcgctactgacagccttcatggagaagaaacacctctggccagcagaaaaacaatagatcacgttgacttactgagagagcaattgaagattttgtcaggggaggttgcacttcatacaagtgtcctaaagcgccttaccgaggaagctggaaggagcccaaataatgagaagattcagatggaaatgaagaaggttaatgatgaaattaagggaaagaagcatcaatagcgtctttagaaagggagatacctcattccatctcaaataatcaagggatggctgacaagttagaacttactccgcttatgctgaactgcttg

SEQ ID NO: 409933 - DNA, 489 bp, Oryza sativa
tcggtcagtttttcacttaactggctcccaggtcaacaagatctttgccgaaaatgcgtttgatgctgttatgcactttgctgctgttgcctatgtgggtgagagtacattggaaccccttaggtactatcacaatattacatcgaacaccttattgattttggaggctatggcgtctcatggagtcaagacccttatttactctagtacatgtgccacctatggagaaccagagaagatgcctattgtagaaaccacacgtcagttaccaattaatccctatggaaaagctaagaaaatggcggaggacatcatactagatttcacgaaggggagaaaggacatggctgtgatgattttaagatatttcaatgttatcggatcagacccagagggaagaataggtgaagctcctagacctgaactacgagagcatggaaggatatccggggcatgctatgatgctgcgttaggaatcattccagggct

SEQ ID NO: 409934 - DNA, 515 bp, Oryza sativa
tcggagacacagagattgcattcactgaggatgtgagtgctcgctttgaggctcttgggtggcatacaatctgggttaagaatggaaacgatggctatgatgagattcgtgccgccattaaggaagcaaaggcggtaactgacaagccaacactaatcaaggtgaccaccacaatcggttttggatcacccaacaaggccaactcatacagcgtccacggaagtgctttgggtaccaaagaggttgaagcaaccagagagaaccttggatggccctatgagccattctttgtgcctgaggatgtgaagagccactggagccgccatgtgcctcaaggtgctgcttttgaggctgactggaatgctaagttcgccgagtatgagaagaagtacccagaagatgcagcgaccttgaagagcattgtctcagggagttgcctgctggctgggctgacgctctttctaaatacactccagagagccctgcagatgccaccaggaatctgtcacagcagt

SEQ ID NO: 409935 - DNA, 518 bp, Oryza sativa
  unsure (1)..(518): unsure at all n locations
ttggccagtttttcacttaactggctcccaggtcaacaagatctttgccgaaaatgcgtttgatgctgttatgcactttgctgctgttgcctatgtgggtgagagtacattggaaccccttaggtactatcacaatattacatcgaacaccttattgattttggaggctatggcgtctcatggagtcaagacccttatttactctagtacatgtgccacctatggagaaccagagaagatgcctattgtagaaaccacacgtcagttaccaattaatccctatggaaaagctaagaaaatggcggaggacatcatactagatttcacgaaggggagaaaggacatggctgtgatgattttaagatatttcaatgttatcggatcagacccagagggaagaataggtgatgctcctagacctgaactacgagagcatggaaggatattcngggcatgctttgatgctgcgttaggaaatattccagggcttgaggttaaggaacagatatcctacaact

SEQ ID NO: 409936 - DNA, 511 bp, Oryza sativa
  unsure (1)..(511): unsure at all n locations
gcggtcgttctggtactactttgacgacaccgtcgcacggcttgtgaaggccggctcgggggacaccgccctccttggggatggacgccgggcaacggacggtcatgttcgaggacgagtgtattttagtggacgaacaggacaacgtcattggccatgattccaagtataactgccatctcatggaaaagataaattctggtcatgtcctccacagagcgttcagtgtttttcttttcaactccaaatatgaattgttacttcagcaaaggtctgctacaaaagtgacatttccacttgtctggacaaacacttgctgtagccaccctctataccgtgagtccgagctcattgaagataaaagcctaggggtcagaaatgcagcacagcggaagctattcgatgaactgggaatacaagctgaagaactatcctgtgaccaattcattccttttgggaggatgctttacaaggctccatctgatggaaaatggngcgaacatgaactgga

SEQ ID NO: 409937 - DNA, 411 bp, Oryza sativa
gtgttgtactaactgatgaactgctctcatgcaagccagattaccataaagattgggtcataagcactgttgttagggtttctttcatgtagggaaaggaaaggtgatttcagttgcctgactgctgccagaatctgcgaagcatctacaagcgacgccgtcgttcaggcagccggcacggcaatgccggttccccttgctccatacccaaccccgcctgtgccatttacacctcccaatggggctcaaagccagctcgtgtgctctgggtgccgtaatctgctcatgtatccagccggagcaacgtcggtttgctgcgcagtttgcagtaccgcgactgctgtgcctgctcctggaaccgagatggcgcagttagtttgcggaggatgccacactctcctgatgtatata

SEQ ID NO: 409938 - DNA, 538 bp, Oryza sativa
ttatggttacccagctcacctacctagctgcatcagcaggagtgtgcttggcttcagctctagccatcgccttgctgtccatcgccctctacatcatcggcgtcgtcgcctccttcgccgtcctctgcgccaaggagttcgccgagagagcccacgaccggccgccgctcgtcggaacagttttccggcagctcaagaacttcgacagaatgttcgatgaacatgtcaactatgcaaccgcgcatcgcaccagcaggattgtgtatcccggtcactgcgaggtctttacttctgatccggccgtcgttgagcatgtcctcaagaacagcttcagtaaatacagcaagggggacttcctcactacagccatgaaggatctctttggagatggaatttttgcaacagatggggatatgtggcgtcatcagaggaagctagcgagctacgaattctcaaccaaagtgttacgtgacttcagcagtgacacattcagaaggaatgctgcacaactggcagagaagatctcatgtgcagcagc

SEQ ID NO: 409939 - DNA, 458 bp, Oryza sativa
tccgcatgggccccaagagggagctcaagtttgccctggagtctttctgggatgggaagagcagcgctgaggatttggagaaggttgcgaccgacctcagggccagcatctggaagcaaatggctgacgctgggatcaagtacatccccagcaacaccttctcgtactatgatcaggttcttgacacggctgccatgcttggtgctgtcccagagcgctactcatggactggtggagagattgggttcagcacctacttctcgatggctaggggcaatgccactgtccctgccatggagatgaccaagtggtttgacaccaactaccactttatcgtccctgaacttggtcccaacaccaagttctcctactcttcccacaaggctgtgaatgaatacaaggaggctaaggcgctcggcgttgacaccgtgccagtacttgttggaccagtttcatac

SEQ ID NO: 409940 - DNA, 504 bp, Oryza sativa
agctaccaaatcgaacctaccaactcattcccgatcgatcgatcttaaaaaaaaactaatcgtaacttttctctctctctcctatctttagaactagcaggtagcaactgcttcgagtgtagtgtggtgaacgtacgatctttcgttcgttcatcaagatgaccgtgatcgacggcgccgtcgctgccgacgccggcggcgcagccgcggcggtggtgcagccggggaacgggcagaccgtgtgcgtgaccggcgcggccgggtacatcgcgtcgtggctcgtgaagctgctgcttgagaagggctacactgtcaagggcaccgtcaggaacccagatgacccgaagaacgcgcacctgaaggcgctcgacggcgccggcgagcggctggtgctctgcaaggccgacctcctcgactacgacgccatctgccgggccgtcgccggctgccacggcgtcttccacaccgtctcctccgtcaccgacgaccccgagcagatggtgg

SEQ ID NO: 409941 - DNA, 448 bp, Oryza sativa
tcgtttcacgcgtgcgcgcgctgacgtcggcgacttgtctttgtgcaggacgcggcggatcaagaagaaggtggggtagatgatgcgccggagccgtgcgatcccggactggctccgactgcgcaccgacgacaccatcaggtacaacgcgaagcgcaggcactggcgccgcaccaagctcggtttctgagcttggcgaggagaggaggacgaggcgccaggcgccgatgacctgggacgccgaagaagaaggagcggctggggcttttaggtggggtagggttgacatccaggttttgtttgcgctggagcgacttttagtggatgctggtggatcggagcataatagttgtggtgactaaagtgcgagtttcttgaatggtaacatagatggtaaagataaatcaagtaaaaagaagtggttcaatttgaatcttaataggtctga

SEQ ID NO: 409942 - DNA, 469 bp, Oryza sativa
gaagtgttcgtgagagcagttatggggtgaccgtcatcaaggcagcaatttaccctggaaatgtgctctctattcacatgaataaaccatcaagtttcaagtacaaaagtgggatgtatatgtttgtaaaatgcccagatgtttcgccttttgaatggcatcccttctccataacttctgcacctggagatgactacttgagtgttcatatccgtacattaggtgactggacaacagaacttagaaacctatttgggaaggcttgtgaggcacaagtaagttccaagaaggctacacttgcacgacttgaaaccactatcatagcagatggtctgaaagaggagacttgctttcccaaagtctttatagatggtcctttcggcgcaccagctcaaaattacaagaaatatgacattcttttgcttatcgggcttggaattggagcaacgcctttcatcagcatactgaa

SEQ ID NO: 409943 - DNA, 373 bp, Oryza sativa
ttttgtttttttttttttttgggtttttttttttttttttttttaaaagggttaattaacataggagtcccgcagaaaataacaataaaaagatagcatggaattaaagccgttgctccaatttaccatacgcagcttttgattccaggaatcccaaaaaacttctaccggtgacaggttttaatttttaaaaagcccaggttcagatttttgcgacaaaagtttttgatacccgtaagattggacccttgatagccaaaccacacttaaaacccttaatatgcatacgggggatgtccaatcggatcttcagcccccaccagaggcagaccagtacttggaggccttgacgggaaggctttcaaaggcaccc

SEQ ID NO: 409944 - DNA, 417 bp, Oryza sativa
gtcagtggagaggagaggagaggagaggactcatccatcatcatcaatcaacgccatgacgagctcctcatctccttcccgaaaggcgctgagcaagatcgcttgcaatcggctgcagaaggagctcgccgagtggcaggtcacccctccctccgggttcaagtacagggtctccgataacctccaaaggtgggtaatcgaggtcaccggagcggcgggcacgctctacgccggcgagacataccagctgcaggtcgacttccctgagcattatcccatggaggcgcctcaggtcatttttctcaacccggcgccgatgcatccacacatttacagcaacgggcacatctgtttagatatactgtatgattcttggtcacctgcaatgactgtcagttcggtctgcatcagcatttt

SEQ ID NO: 409945 - DNA, 514 bp, Oryza sativa
agccgtcgccgccgccgctcacccgcgccttggacgagctccagccggtggacctcgccggatctccccgatgggcgtgaccttcaccgacctacacaccggcgacggactcaaagccctcgagcagcacctttccggcaagacctacgtctccggaaacgcgatcagcaaggacgacatcaaggagtccgccgccgggccattaaagcctggagctgagatcccgaacgctgctcgctggtatgataccgtcgctgcggccctcgcttcaaggttccctggcaaggtagttggagtgaatctgcctggaggaggtgcggcattgtctgctgcagcggatgcgccagctgctaaggatgctgatgaagatgatgatgacctggatctttttggtgatgatgaccgtggaagacatgaaagcagtagatgagcgtgcagcttccaggcctctttaaagagaaagaaggcggaaatcatctgtcctgttggatgtaaaccatgtgacgaccagact

SEQ ID NO: 409946 - DNA, 473 bp, Oryza sativa
gtgattgcttgttgcagaatacatgcccaatgacacactagcgaagcatcttttccattgggaggcgcaagcaatgaaatggcccatgagattaagagttgttctctatctggctgaggctttagaatattgcaccagcaaggggcgtgctctgtaccatgatcttaatgcctacagagttctctttgatgatgactgtaaccctaggctttcatgttttggcctcatgaagaacagtcgagatggtaaaagctacagtaccaatctggcgtttactcctccagagtacatgagaactggacgtatcacacctgagagtgtcatttacagctttggtaccttgcttttggatgttcttagtgggaagcatattcctcctagccatgcccttgacctgattcgagatcggaattttaacatgctgacagactcctgtttagagggtcaattttcaaatgaggaagggacagaac

SEQ ID NO: 409947 - DNA, 355 bp, Oryza sativa
tcgttacctccggccggccgccgccgagcccgaaccctagccgccgcttcccgctccggttccgccctaatccgagcccaattcctccaggtttttgagggcttttgttcctctcgttctcctctttcttttcccccaagaatcaaagagaatcggtgaggattggatccgaatcgagttcgttttggttttatccctaaaaccgagttcgatttcttcccgagtcgattcctctcgtttggagctcgatctcttcgatccaatgccatataaagcttccccttggtctgctctttcggttgcccctgtaccgagttctaccgtgcctgctagcgccaccgagacgtgctttaag

SEQ ID NO: 409948 - DNA, 338 bp, Oryza sativa
tcgtttgaaagctgattcggagtaaacgggcagcaggtttggaagatgatgtttgggaaaacaacgcaccagctgtggataaagtaaaggatttccttgctggcgctggaactgatgctcctgatgtggatgatgaggaatacatgaattctaggccatcagtcggttatgatgatatgtgggccaagacaattcttgaaacatatgaagcagaggatgatgatggaagatcatctgggggatcctctcctgagtcaactggttctgtagaaacatccatatcgtcccattgtagtggtatgaactatccgtcgttgttcagttcaaaaccatcagga

SEQ ID NO: 409949 - DNA, 526 bp, Oryza sativa
ttgtaagtttccaatggatctgcatctgaatccaaacaaaaggaaattctcaaggttgttgtaactgaagtccttggtggtggaaagttctatgtccaaacagttggtgaccatagagtggcttccattcaacaacagcttgcatctttaaaacttaaagatgcacctgttattggtgcttttaatcctgtgaagggggaaatagttcttgctcagtttagtgctgacaactcctggaatagagcaatgattgtgaatggacctcgaggagctgtatcatctcaagacgacaagtttgaagtattctacattgactatggcaaccaagaagtcgttccttacagtcgcatacggcctgctgacccatcaatttcctcttcgcctgctcttgctcagttgtgcagccttgccttcataaaagtgcccaacctagaagatgattttggccatgaagcagcagtctatctgaatgattgcttgctcaacagccaaaaacaatacagggcaatgattgaagagcgtgata

SEQ ID NO: 409950 - DNA, 436 bp, Oryza sativa
gtgtttttttaattggggggggagcactggcacagatggaggtaacctttcaattctttttattctgttttatcatgtctaggatcagagatcctggaggcacccagtaccacatgcatttctgtatatcccttttgtgcacacaagactgacatattgaggagagcagtttgaagccggggtatcacaaaaggttgttgctctagaactccagcatgcggcctcggaggatagcctcagcttttctgacttcctgcactggtccaatgatgaataccctgtctggaggtccctttgcaccaccaatatggatttcaacattgcaagatgctttcacttccattattgatgatccttttctgccaataacacgccccattttgccaggaggcacatccaagactgacaggatatccacctcaggaacataaacatc

SEQ ID NO: 409951 - DNA, 543 bp, Oryza sativa
tttatctgatgatgcacctctgttcttcttcacagacagttgtctcattctaggggaagcaatgatcccttgcattttgcttgcagtggggggcaatcttgtcgatggtcctggtgaaggaagtaacaggcttggtgtgcggacaaccgttgctattatttttgcacggctcatcttggttcctcttgctggggttggcatcattgtgttggttgataaacttggtttcattcctaaagatgacaaaatgttcaagtttgtcttgctactgcagcattctatgcccacatctgtgctgtcaggtgctgttgcaaacctgaggggctgtggaaaagaatctgctgctatcttgttctgggtgcacatctttgctgtgttctccatggcaggatggattattttgtatttgagcttactcttctagtacgtcataccctgatgctatactgcacaggaacgtccataagatcaaaatatcaccagatataccagaaaaggatagtaccatgacatgtacattagccagtaaaccatggcgacagc

SEQ ID NO: 409952 - DNA, 466 bp, Oryza sativa
ttgaagttcctgattgccttctcctatgagctttctaagaaggaaggtaaagtagggacaccggagcgccctctttctgatcttggtctgctcagttatagaggttattggactagagtgcttctagagattttaaagaaacataagagcaacatatccattaaggagcttagcgatatgacggcaataaaagcggacgacatcttgagcacgcttcagagtctggacctgatccagtaccggaaaggtcagcacgtcatctgcgctgaccccaaggttctcgaccgccacctcaaggccgccggccggggtggcctcgaggtcgatgttagcaagctgatctggacaccctacaaggaacaaggctaagctaagctctcgtgccaaacgaattagataaaaagaaaatctgaccagctcaatcctgtacatttcccacttaggatctccccctctctttctctct

SEQ ID NO: 409953 - DNA, 533 bp, Oryza sativa
ttcgtcctcaactttcttttttttctctccagatcctgtctggaacttgttcgcatattcttacccataacccatgcaacaaaaatgttcgagataatgatcatgcaaaatacacaaactccaccaaaggctaacgtgaggagatcgtgatcctgaacatgattaggatgattatctaattctcttcagaaaaatgcaaagttaagtcaggcctttaagaacaagggaggacatttaaatatgtgaagcgagaaaattattgataagcttatcaggcatccatttgtcaggtttagatacttttcaaatatctgacttttatgtttgccaggtttgcgttgttgacccttttctttttagataaaccgagtggaatacatgcattccaagggatttattcaccgtgatatcaagccagacaatttccttatcggcttaggccggaaagcgaaccaggtgtacataattgattatgggcttggtagaaatacaaggatctccagacccataacacattcctacagggagacaag

SEQ ID NO: 409954 - DNA, 515 bp, Oryza sativa
ttggacgcgtggggtacccctacacgagaggagattaagtgcatgaacccaaattacaccgagtttaaatttccgcaaatcaaagctcacccatggcacaagatctttcataaaagaatgcctgctgaagcagtcgatctcgtctccaggcttttgcagtattcaccatacctccggtccactgcttcggaagcattgatccatcccttcttcgacgaactccgtgatccaaacacccgcttaccgaacggccgtttccttcctcctctcttcaacttcaagccccatgaactgaagggtatgccaatggaattcctggtgaagcttatcccagaacatgctcgaaaacaatgcgctttcgtaggatggtgatttgtgaggtcagcatgaaaactagttcagaatttcttcaccgtcctccattagaaaacagagatgaaccctgcctgcagccatttgggaaagctggtgcatatggaagtggaactacattctttttgtccgggattctgacg

SEQ ID NO: 409955 - DNA, 512 bp, Oryza sativa
ttgtacttcgattgcgagatgttccctgcaaacgatgaccacccctcgcacgacgtagcgagggggcagaggttcgtcaaggaggtgtatgagacgctgcgagcgagtccgcagtggaacgagactgctctgatcatcacctatgatgagcatggtggattctatgaccatgtgcctacgccggttgtcggggttccacagcctgatggaattgttggccctgatccttactacttcaagtttgatcggcttggagtgcgcgtgccttctttccttatctcaccatggatcgagaagcgcactgtgatccatgaaccaaatgggccgcaggactcctcacaatatgagcactcatccatccctgcaacagtaaagaagctatttaatttacattctaacttcctgacaaagagggatgcatgggctgggacctttgagaactacttcataatccggaaaacacccagaactgattgtccagagaaactcccagaggtcacaaagtctctgca

SEQ ID NO: 409956 - DNA, 279 bp, Oryza sativa
ttcgtccttcccttcctcatgccatcctgcgtctggaccttgctgggcgtgacctcactgacagctcgatgaagattcttactgagagaggttactccttcactaccactgctgaacgggaaatcgtaagggtcattaaggagaagcttgcatatgtggcccttgactattatcaggagctgtaggctgtatagagcatttcatcttttgagaagagctattagctgtcttatggacaggctttcttccattttttatagattggttttttttctccca

SEQ ID NO: 409957 - DNA, 473 bp, Oryza sativa
tgtgaattcggaggcggacatacagctcgcgatcaagtcgctccgggcatcgagcatgtcgcatgagatggtcgaggtctcaactgtcactgacaggagggatgaaggtgcatcctccaggaagttcacaagaactgctagccagcagaggagtgtgatcatagaggactcgccgccgtctcccgccagcaatggcgacaaggagaaggaagatgaggttgcggagaagagatggagggtgtttgtgtggaagactgctgtttatctcatcactcttggcatgctcattgcacttctcatggggcttaacatgtcatggacagccatcactgcggctcttgttcttctggcgctcgattttactgatgcacaggcttgtctggagaaggtgtcatactcattgctgatcttcttctgcgggatgtttattacggtcgatggcttcaacaaaactggcataccgaacacacttt

SEQ ID NO: 409958 - DNA, 270 bp, Oryza sativa
ttgtgtttgctagctcttcctgtccccttcctagcagaacagatggcggtgctgtacgtcaccttcttgaggttgattgactaaaaaccttgaaaatactccctccgtttcacaatataagtcattctagcatttcccatattcatattgatgttaatgaatctatacatatatatatatctagattcattaacatcaatatgaatatgaaaaatgctagaatgacttacattatgaaacggaggaagtagttggcaagggaggtggatg

SEQ ID NO: 409959 - DNA, 455 bp, Oryza sativa
gccagccagccatgcagcccgactccgcctcccaccgcatcgcccgcgtcgccgcccacctcagcccgtcgccgcgcccccagatggaggagggggtgaggccggcgccatgcagggccaagggcggcgcgccggggttcaaggtggccgtgctgggcgcggcgggagggatcgggcagccgctgtcgctgctcatgaagttgaacccgctcgtctctgtgctccacctctatgatgtcgtcaacacgcccggtgtcaccgccgatgtcagccacatggacaccaccgccgtggtccgtggtttccttgggcccaaccagcttgaggcagcacttacaggaatggatcttgtcattatccctgctggtctccccaggaaaccaggaatggacaagggatgatttgtcaacaaaaacgctgggattgtttgctactttgtgaaggcgttgtcaagt

SEQ ID NO: 409960 - DNA, 431 bp, Oryza sativa
attgctgaccctccctctccaatccaagctccaacaatggctaaaccatccttgctcctccttcttcctctgctcatcttctccatcggcgcggctctcgcccgcgccgatctcatgctggacaggttcgagcagtggatgatcaggcatggccgcgcctacaccgacgccggtgagaagcagaggaggctcgaggtgtacaggaggaacgtcgagctcgttgagacgttcaactccatgagcaatggctacaagctggctgacaacaagttcgccgacctgacgaacgaggagttcagagccaagatgctggggttcagacctcatgtcacgattcctcagatttcaaatacctgctccgctgacatagcaatgcctggagagagcagcgatgatattctgccgaagagcgtagattggaggaagaaagg

SEQ ID NO: 409961 - DNA, 376 bp, Oryza sativa
ggcgtttacacgggcccgtgcggcacgcgcctagcgcacgccgtcaccgtcgtcgggtacggcaccgacgcgtcttccggcgccaagtactggaccatcaagaactcatggggccagtcatggggcgagcgcggctacatccggattctccgcgacgtcggtggccccggcctgtgtggcgtcacactcgatatcgcctacccgaccctgaccctgtgaacgaagtcaacgaacggcatgaaaagacgcgcagatatgactatatcactgtacacacaactaccctactataccgtgagtgtctgccaacgagacgtatccactatacatgtatgaattgtggaccgtgcctaaataaaatgcatgctgcgcgcgt

SEQ ID NO: 409962 - DNA, 538 bp, Oryza sativa
tccagaaatttgagaagctgaatgctgctcttcgtattagttgcctcaagggttaccctgtcagggttgtgcggtcccacaaagagaagcgttcttcatatgctcctgaagctggtgtgaggtatgatggagtttacaggattgaaaaatgttggaggaagattagtgttcagggtaaattcaaggtttgcaggtatctctttgtacgttgtgacaatgaaccagctccttggactagtgatatttatggtgaccgtccgaggccactccccaaagttgatgagctgaaaggtgcaacagacatatcagagaggaaaggaactccttcatgggactttgatgagaaagaaggctggaagtgggtgaagcctccaccaatcagcagaaagcctaacctatcaggggatcctgcaactgacaaggaaatccggagggttgcaaggcgtgcccagatgtctgtgactgaaaggctgctgaaagagtctggatgttccatttgcaagcaagtgatgaaggaaccactcactactccatgtgc

SEQ ID NO: 409963 - DNA, 438 bp, Oryza sativa
atcccaaacaagcgatatatatttcataatgaacataaatctgcttctacaatatactccatcagtaacatgagcaccaaccacaaggtttattagagacaatgccagccccatgctaggacaagcttatttcagctgttcttcctcttcatcttcttcatcatcgtcctcctcttatcgccataatttatcgccattttcgcatacgtccataagattatacctatttctttccccagttctgaaatgtccaaacatctatgtgtttacaaccacgcggcgttcttgatcggcgtgacgacggccttgacctgcaggtagttcttcaggctgtcgatgcccttctccctcccgattccgctctgcttgtatccgccgaacgggatcgcggcgtcgaagacgtcgaagcagttcacccacacggtcccgaccctgagc

SEQ ID NO: 409964 - DNA, 509 bp, Oryza sativa
cttctaagctgttgcatgaggctggactcccagatggtgttgttaacgtggtatctggttttggacctactgctggtgctgctcttgctagtcacatggatgtcgataagattgcattcactggatcgaccgatactggaaaagtcgtccttgagttggctgcaaggagcaaccttaagtcagtgacactggagctaggaggcaagtctcctttcatcatcatggatgatgctgatgttgaccatgctgttgagcttgcgcattttgcactgttctttaaccagggacaatgttgctgtgctgggtctcgtacatttgtgcatgagcgtatctatgatgagttcgtggagaaggccaaggctcgtgctctcaagcgtgtggttggtgatccattcaagaatggtgttgaacagggccctcagattgatgacgagcaatttaacaagatcttgcgctacatcaagtatggtgttgacagtggagccaaccttgtgactggtggcgacaga

SEQ ID NO: 409965 - DNA, 474 bp, Oryza sativa
ttgtatgctgcgcggattcagtggtaacttcacctacaacggcaagcagtacgacgcaacggccgcaccacacggtgcagactaccacaagtgcagagaagaagtagtgaagttactgaaggtgaatgcgccctgcgaaaccaagaactgcagcttcaatggcgtctggaacggtggtggcggtgcagggcaggatgacctctacgttgcgtccgccttctactacatagcctcccatgttgggttcatcaacagcgatggacccagtgcgaagcgaaccaatggaacgattaaggctgatgatcaaaaggattgtgaaatccgtgttataaaggcgaggatccatgtccgcgtggtgcatgtgcatgcatacatatgcactgaggtgatctacgaatactacttgctcgatgacgggttcagggtacatgcaaagaaggagataacgctggtagacacggtgaagcatgggga

SEQ ID NO: 409966 - DNA, 523 bp, Oryza sativa
tttagagagcttgcggaagcgggggtttggtgcgggcgcgcgcgtgtgaggggggagagaaggccaggaggaggcgacgccgtcgcccgagggaggcaaaaatccgatcctcctcctgccctgctcgctcgctcgctcgcctgcgctgcgcgcacttggccccgtcccgtccgttcccgctcgccaggcatagaaagatggtgctctgggtcttcggctatggctccctgatctggaaccccggattcgacttcgatgagaagatcctgggcttcgtcaagggctacaaacgcaccttcaatcttgcttgcattgaccatcggggcacgccggagcatcctgcgaggacctgcacacttgagtccgacgaggaagccatatgctgggggattgcatactgtgtcaaaggggggcttaaaaaggagcaagatgcaatgaagtactcggaaagaagagagtgtgagtatgaccagaagatctctgtggatttctacaaggaaggagattctttgaaccagctgtg

SEQ ID NO: 409967 - DNA, 473 bp, Oryza sativa
ttccgtccgttcccttcgctagccccggcgccatgggcgtgccacccacccctccgccgggggccgccgccgccgccgtcgacgcacggccgacgtgctcggcgcagaaccaagcagacggcgagccaaacttttcttgcccttttgctcttgcagagtggagcagaggacacttgcatcttgacgaattttctcaagtcgatgggttgctgtggcagcagcactgtagacgccgaggagcacctggactacagtggcggaaatgtgactttggtaactgatcaaaagaattgggacaatacaatggaagaagtagctgagcatggcaaaacagttgtgctaaaattcagtgcaatttggtgcactccgtgtaggaatgctgcccctctattcgctgaactttcactgaagtatcctgacattggtttcgtgtccgtggatgtagacgaaatgccggagctggtgacgcaata

SEQ ID NO: 409968 - DNA, 518 bp, Oryza sativa
ttgctcaccccacctcttgacccgccgccgccgccgccgccgcgcgaagggaagcaggaggaggagccgccaggatgccggcgggccacgggctgcgtgcgcggacgcgcgacctgttcgcgcggccgttcaggaagaaggggtacatcccgctcaccacctacctccgcacctacaagatcggcgagcacgtcgacgtcaaggtgaacggcgccgtgcacaaggggatgccgcacaagttctaccacggccgcaccggccgcgtctggaacgtcaccaagcgcgccatcggcgtcgagatcaacaagcaggttgggaaccgcattatcaggaagaggatccatgtccgtgtggagcatgtgcagccatccaggtgcactgaggagttccgcctgaggaagatcaagaacgaccagctcaaggcagatgccaaggctcgtggtgaggtcatcagcacgaagaggcagccgcagggtcctaagcccggcttcatggctgagggtgcaacactggagact

SEQ ID NO: 409969 - DNA, 479 bp, Oryza sativa
tcttttcttgcaccagcgccagcagcagcaccagcaggttcacctgtagaggagaagaaggtagctgaaccaactccagtaccagtaacggtaggagcagcagtggcatcatcgccagcggatgacaacaacggtgcagcaccgcaaccagagcccttcgtcgctgcgaaatactcctacggaaagaaggagctgtcggactcgatgaagcagaagatcagggcggagtacgagggattcggaggcagcccggacaagcctctgcagtccaactactttctcaacatcatgctcttgatcggagggctggccttcttgacgtctctgctcgggagctgagagcgatggtctgatgacctcctctgacgagtgttttgagttgttctgcctgtgctaagatttgcgtgtttctttttccatgttttgagtcgttatttcgtaaataaattgaggtaaaaggatgggcatgtgaatggatt

SEQ ID NO: 409970 - DNA, 393 bp, Oryza sativa
ttttcctatcgcccaaaatccgaggttggagcttttgctcgggcgattgattttggaatcggcggaggggatgtcaggaccactcgatcgatttgccaggccatgttttgaaggttttacgcataatgatgaaaagaaagagatcagatctgacgcagacaactccgaaggagagaagaagactaaaattggttctttcaagaaaaaggcgattaatgccgggaacaaattcaggcattccctgaggagaagaagcaaaaagaaaaatgaacctcggggttccattgaggacataagggatgttcaagatcttcaagctgttgatgcatttcgacaatgtttagttgatgaggaccctgtgccgcaacagcatgatgattatcacacaatgct

SEQ ID NO: 409971 - DNA, 511 bp, Oryza sativa
  unsure (1)..(511): unsure at all n locations
tcttccttcagatcgcccggaatcccgccgccgcgagcccaccgatccctcgcctcgcctcgcctctgattcaggcccccgcccccgccgatcctccacaccgcgcgcctagggtttcgactgctcatccatccgctcctgggggaaggagaggagccaccgccgcgcgattcggggcttgtatgtgtatgtagggttattagattcgtcgacctactgattctactctctcggatgacctagatttcacgtaggatcctctacttccaaccgattcgccttctgcttacttgttacatttacctctacacctctccactcttcctgctcctgcacctgcacctgctgttgctgttgaagatgagctccgagcccccagagccagagcccgccaagcgcaacatgaggatcagttactccagggactttatgatctccgttggagagaccgaccgctgcaagaagctgccccaggctttgatgcctcacctctcagtgatctgcangagat

SEQ ID NO: 409972 - DNA, 441 bp, Oryza sativa
tgttttgggttcttgacagaagtcatgtttcatgggggcaggcctttgtccctcaggggctctctcaaggcgcttgaagctgatatccaccatgccaacaccctggcgcatgctatacacagggcctatgggggtgcctgtgtgcagatgaggctgccttacagctccatggctccaatcatccttaacctcatgcagtggatggattgcagctgctccctttcatataccctccctagttacctaggtctccttgaggttcttgcgtacaaggtatatgttgatgaggatgcctctatatccaccaacattgaaaggagagcatgcctcatggaattctatgctgtaatatatccattctggcaacaactcgaggggaatttgatggagaaagactgcaaccagaaaggatggtgcaaggaggcggtctccggtggcggc

SEQ ID NO: 409973 - DNA, 539 bp, Oryza sativa
  unsure (1)..(539): unsure at all n locations
tgttcacccaccaactgagagctgagcaggcgagcgagcggacatggcagcatcgctccaagccgcggccaccctgatgcagccggccaagctcggcggccgggcctcctccgccgcgctgccatcgcgcccgtcttcgcacgtcgccagggcgttcggcgtcgacaccggtgccgccggcaggatcacgtgctccctgcagtccgacatccgggaggtcgccaacaagtgcgccgatgccgccaagctcgccggcttcgccctcgccacctcagctctgctcgtctcgggcgccagcgcggagggcgtgccgaggaggcttaccttcgacgagattcagagtaagacgtacatggaggtgaagggaaccggcacggcgaaccagtgcccgacggtggagggcggngtcgactccttcgccttcaaggccggcaagtacaacatgaagaagttctgcctggagccgacgtccttcaccgttaaggcggagggcgtggccaagaacgcgccacccgagttccagaagaccaagctcatga

SEQ ID NO: 409974 - DNA, 307 bp, Oryza sativa
tgctctaggtcgtctctctactacgtgaacgtgacggggctcagcgtggggcacgcgtgggtgaaggtccccgcgggatcgttcgcgttcgacgccgccaccggcgccggcacggtggtggactccggcacggtgatcacgcggtggacggcgccggtgtacgcggcgctgcgggaggagttccggcggcaggtggcggtgcctagcgggttacacgttgctgggcgcgttcgacacgtgcttcaacaccgacgaggtggcctgcggcggtgcccccgcggtgttctgtgcacatggtcggctgtgt

SEQ ID NO: 409975 - DNA, 458 bp, Oryza sativa
tttccccacacacaaagcgagcgactcggcggcggcggcgatggccacggtggcgatggacatctccaagccccctcccgcggcgggcggcgacgaggctgcggcggcgaaggggaggggcggcgccggaggaggaggtggggaggggctgcggcagtactacctgcagcacatccacgacctgcagctccagatccggcagaagacgcacaacctcaaccgcctcgaggcccagcgcaacgacctcaactcccgagttagaatgctcagggaagagctgcagttgcttcaagaacctggctcatatgttggtgaggtggcgaaggtcatgggcaaatcaaaggttctagtgaaggtacatccagaaggcaaatatgtggtggatatcgataaaagcattgatattacaaagatcacaccttcaacaagagttgctcttcgaaatgatagctatatgc

SEQ ID NO: 409976 - DNA, 461 bp, Oryza sativa
tctagtgtctgaaggaatcagatgacccaaacaatagattggaatggacatttactaacactactgagggatctatatgcggattcaatggcgtggagtgctggcatcctaatgaaaacaagattctttctcttcatcttggcagcatgggtcttaagggccatttccctgatgggcttgagaattgcagcagcatgacttcactggatctctcgagcaacagccttttcggaccaatcccagctgacatctcaaaacagctgccattcattacaaaccttgatctatcttataatagtttttcaggggagatttcagaatccctagctaattgtacttatctaaatattgccaatttgcaaaataacaaattaactggagcaattcccgggcagcttggtattctatctcgcctaagccagtttaatgttgccaacaattaactgtcagggccgatacct

SEQ ID NO: 409977 - DNA, 497 bp, Oryza sativa
ttgatgaaagtcttaagtggagaacagcttacaggccagaagacattcgttggcccgagatttctgttgaatcagaaacaggtaaaatgtacagagcaagttttgtagatagagaggggagaactgtcgtcattatgagacccgcaaagcagaacacatcgtcccatgaagggcaggtacggtttcttgtatatacgttggagaatgcaatcctcagcttgcctgaagatcaagagaaaatggtttggttgatagatttcacaggatggaccttggcaaatgcgacacccataaagactgccagagaatgtgcaaatatcctgcaaaatcattaccctgagaggttggctatcgggatcctgtttaatccccccaaagtatttgaggctttttggaaggttgtcaaacattttcttgacccaaaatcaatccagaagggtgaattctgtatacctgaaagacgaggagagcatgaagatcctgcacaagtacattga

SEQ ID NO: 409978 - DNA, 482 bp, Oryza sativa
tttgaacttttctttctcgccctcaattagggccgattttgtgcatgcccgccccatccaagtccattccatcttgatgggcatatcttctgctgctcgcagtggcgggtatcttgctagtgatgatggcgtcggcgaccaacgtggtgggcggtgaatggagcctaccacctaaacctgggcaccaattatcagatatggacctggatcaatgtgaggaaactaccatgcatgatgtgaacatagaagaggagatgaggcgcaagcagtatcaaaggaagcaggaagcgtacgacgaagatgaggaggaggatgctccaagagtacagtgtgctcaacagtaagaagtgtcactttctggcgcaagtgatgatactccatgtaaactaagtagtttttggtgagactgttcattttagtgtattttgtactagttaaattaaatagtgaatgtctaagttgtgccgtttgtatattagctt

SEQ ID NO: 409979 - DNA, 423 bp, Oryza sativa
acgacaaaccacgaacttggatattaaagatgccacaaagaaggttcacataaacaacacaggtcacagcagcgaaagctacaagcaaaccctgcataatcgaaaagcaaatgtttttcaaaaccagacacacaaactgatagatagaagcccacacggacagatcataggatagcagcagtaatcaagcattgccaaggcaccaggcaagaaccctgaacctttttagtactcggcacccttatcaccctcgtcaccatcgtcgaactcggagccgacctcctcgtagtccttctccagcgcggggaggtcctcgcgggcctcggagaactcccccttcttcatgcccttgccgacgtaccagtggacgaaggcgcgcttggagtacatgagggcgaacttgatgtcgatgcgggagaacac

SEQ ID NO: 409980 - DNA, 459 bp, Oryza sativa
tgtcctggtccccaaggacgtgaacgccgcggggggcactcatcaagacgaagcgcaccatccagttcgtggactggtgccccacggggttcaagtgcggcatcaactaccagccgcccagcgtcgtcccggggggagacctggccaaggtgcagagggccgtgtgcatgatctccaactccaccagcgtcgtcgaggtgttctcccgcatcgacatcaagttcgacctcatgtactccaagcgcgccttcgtccactggtacgtcggcgagggcatggaggaggtggagttctccgaggcccgcgaggacctcgccgtgctggagaaggactacgaggaggtcggctccgagttcgacgatggtgacgagggtgatgagggtgaccagtactagagaggttcagggttcttgcctggcgccttggcaatgctcgattactgctgctttcctatgatct

SEQ ID NO: 409981 - DNA, 447 bp, Oryza sativa
tattggacaagaagaccttggacggtgcaaaattggcaagggaggaaagccatcgtctgagagccgacggtttaggtgatgacatagttcctttggacaactacctggacacgcagtactttggagagatcggcatcggcactccaccacagaacttcactgtgatattcgacactggaagctccaacttgtgggttccatcagtgaaatgttatttttcgatagcatgctacttacaccacaggtacaagtcaaaagggtcgagcagttacaaaaagaatggagaatcttgcagcatttcctatgggtctggatcaattgctggtttcttcagtgaggatagcgtgctagttggggatcttgctgtgaaaaatcagatgttcattgagacaaccagggaaccgagccttactttcatcatcgggatgtttgatggaattcttggac

SEQ ID NO: 409982 - DNA, 417 bp, Oryza sativa
ccctcccccaaattccccaactccgggcgtgcggcaagccaagaaacccccaacccaactccggcgatggcgtcgcagctggtggaggagcaccggtcgggcgcggaggtccacacggggcacgagctctgcgagcggaaggcccgggagctgctggtggagctcggcctccccgacgggctcctcccgctgccgtccctggaggaggtcgggtacaaccgcgccgccgggttcgtgtggctccggcagacccaggcgggcggcgccacccacacgttcgacaccatcgggaagcaggtgtggtacgcgggcgaggtgacggcgttcgtggagcaggggcggatgcacggcgtcgccggggtgaagagcaaggagctcctcatctgggtctccatctccgagatcgttctcagcccc

SEQ ID NO: 409983 - DNA, 391 bp, Oryza sativa
ttttctttttttgtagagacactatagagtgatcttgctcagctttgtgacaagggcattgatgcacggattgcatctggcggtggcaggatgtatgttaccatggaccgctatgagaatgactgggatgtggacaaacgtgggtgggatgcccaggtgcttggcgaagcaccctacaaagtccaaaatgcagtcgaagcagcgaaaactctaagagcagagaccatggctagtgatcagtatttgcctccatttgagatcgtggatgagagtggcaaatctgttgggcctgttgtagatggtgatgcagttgtgactatcaatttccgagcagatcgtatggctatgcttgtcaaagcactagaggatgcagactgtgacaaatttgatc

SEQ ID NO: 409984 - DNA, 357 bp, Oryza sativa
tcttattgtgactgtgtatgcattggccaagaggacgattgatggtgagtggttcctcatgacctgcttcaagggcgcgcatggcggatgccttgtgacgaacgcctcatacgacgtgcacagcgggatcctctactgccagaaccacttgtggcagttgttaaagaagtccggctgctacaacaacctgatgaagcccgacttcgtcggcgaccagaacacgcgggaatccaaggacgccgtcgtggagcccgcgaaggacgacctcgggactggggaggcagacaaggaagcagaagaagcgttaccggagcaggtcgcggaagctgttgtagaggaccacggagcactcatgag

SEQ ID NO: 409985 - DNA, 409 bp, Oryza sativa
ttgtttaggagcttgagcttggagagagacaacagtggcggttcaggctcttctctctgggaggcagctgctggggaggccattgcaatcttcagtctccaggtcttcttcctccaggaaggcacccttcatggtcagggcagaggccactccccctgccaagcaaggtgctgacaggcagctgtggttcgcatccaagcagtccctgagctacctggatggcacgcttccgggagacttcgggttcgacccgctggggctatcggacccggaggggaccggtgggttcatcgagccacggtggctggcctacggcgaggtgttcaacggccggacggcgatgatgggcgtcgtcggcatggtcgccccggagctcctcggcaagctgggcctcgtccccgccgagacg

SEQ ID NO: 409986 - DNA, 523 bp, Oryza sativa
tgttccccggcctgatccaccaccaccgcctcctggacgccgatgtcggcggcggcggcggggggagcagcgccggcctggtactgacggccgaccccaagccccgcctgcggtggacggccgacctccacgaccgcttcgtcgacgccgtcgcccagctcggcgggcccgacaaagcaacacccaaaactattatgaggacaatgggtgtgaagggtctcaccctttttcacttgaaaagccaccttcagaaatacagattaggaaagcaatctggcaaagagatggcagagcaatcaaaagacgcttcttatattttgggagctcaaagtggaacaaatctatctcctacagttccaactccagatttgaaagagagtcaagaactaaaagaagcactcagagcacagatggaagtgcaacgaaaattgcatgaacatgtggaggtccagaggcatgtacagatccgaatggaagcgtaccaagactacatcgacacgctactgaagaggcatgcacatag

SEQ ID NO: 409987 - DNA, 446 bp, Oryza sativa
ttggtcttctccacctcctcctccaagccgcgcggcggctcctccgtcggattctcctcgcccgcgcggttccggcgcacggcggcggcggcggcctccaggggcacggggcggcgcgcggggctgctggtagtgcgcgcggcgagggggaagttcgagcggaccaagccgcacgtcaacatcggcaccatcggccacgtcgaccacgggaagaccacgctgacggcggcgctcaccatggtgctcgcctccgtgggcgggagcgcccccaagaagtacgacgagatcgacgcggcgcccgaggagcgcgcccggggcatcaccatcaagaccgccaccgtcgagttcgagaccgggacccgacactacgcccacgttgactgtcccggccacgccgactaccgtcaaggaccatgataccggcgccgtgcaaatggacggtgcca

SEQ ID NO: 409988 - DNA, 505 bp, Oryza sativa
ttaaaaaaggaaaaaaaaacaaaacacaccaagccaaataaaagcgacattgggatcgctcaccaccaacatcgtcctcgccgtcgccgtggtggcagcgctggtcggcggcgggtcgtgcggcccgcccaaggtgccacccggcccgaacatcacgaccaactacaacgccccgtggctccccgccagggccacctggtacggccagccctacggttccggctccaccgacaatggtggcgcgtgcgggatcaagaacgtcaacctgcctccctacaacggcatgatctcctgcggcaacgtcccaatcttcaaggacggcaggggatgcggctcatgctacgaggtgaagtgtgagcagccggcggcgtgctcgaagcagccggtgacggtgttcatcacggacatgaactacgagcccatctcggcgtaccacttcgacttctccggcaaggcgttcggcgccatggcttgcccggtgaaggagaccgagcttcgaaggccg

SEQ ID NO: 409989 - DNA, 462 bp, Oryza sativa
tgtcttgccggttaatattcgatcgatcgatcatgtggtgtacgtgggcgttggggcgggtggtgttggcggtggtgttcctggttgcgttggctgccggcgatgcagcgccgcccaaggttcaccggaaccacggcaagttcacggcggggccatggaagcaggcgcacgcgacgttctacggcgggcgcgacgggtccggcacgctggacggcgcgtgcgggtacaaggacacgtccaaggaaggctacggcgtgcagacggtggcggtgagcacgccgctgttcggcgccggcgccggctgcggcgcctgctacgaggtcaagtgcgtggacagcccctacggttgcaaggtcggcgccgcccccttggtcgtcaccgtcaccaacctctgcccccccaatcccggccagtccaacgacaacggcggctggtgcaacccgccgcgcgagcactttgacc

SEQ ID NO: 409990 - DNA, 520 bp, Oryza sativa
ttccaatagaaaaaagattcttagcgtaatactggccaaagaagatttggctgatgatgtagatctggaagctctggctaacttgaccgatggttattcaggcagtgatatgaagaatctgtgtgtaactgctgcacattgccccataagggagatccttgaaagagagaagaaggagagagcatcagcagaagcagaaaataaaccattacctccccctcgttctagcagtgatgttcgttccctaagaatgaacgatttcaaacatgcacatgagcaggtatgtgcaagtataacatctgattcgagaaatatgactgagcttattcagtggaacgatctatatggagaaggcgggtccaggaagaagacttctctaagctacttcatgtagcctatcgctagcctatgtacatacaacataagcattagcgtaaagcggtccgggagatagacaagacatagctcttctgctgttgctcatgtataggtgatacccagtcaaattagtcgttgatct

SEQ ID NO: 409991 - DNA, 422 bp, Oryza sativa
tgcaggccttcccaatccttttgatttttgtcagtttagcaacttgctcaatgatccatctataaaggagatggcagagcagattgcaagcgaccctgtgttcacccagatggcagagcagctgcagaagagtgctcatgtgaccggggaacagggtggccctgcattggatcctcagcagtacatggaaacaatgacacaagtcatgcaaaaccctcaattcatgtcaatggcagaacgtcttgggaatactcttatgcaggatcctggaatgtccagtatgctcgagagtttgactagtccttctcataaggagctgcttgaagagcggatgtcccgtattaaagaagatccctctttgaaggggattcttgatgagataagagtggtggtccatttgctatggtgaagctctggaatga

SEQ ID NO: 409992 - DNA, 447 bp, Oryza sativa
ttgagcttaaaaccctagagccgctcctcctgctcctcctcgcctaccccgaaacccaaatcccccccaaggcggacgcgcccgcaaagggtcgagcgcgctcatggctcgcgtgtacgtggggaacctggatccgcgcgtgacggcgcgggagatcgaggacgagttccgcgtgtttggggttctgaggagtgtatgggttgctagaaaaccaccaggttttgcctttattgactttgatgaccgcagggatgcagaagatgcaattcgtgatttagatggcaagaatggatggagggttgagctgtcaaccaaagctggtagtggtcgtggccgagatcgttccggtggttctgacatgaagtgctatgaatgtggcgaacctggtcattttgcacgtgaatgccgcttacggattggttctggaggccttggcagtggaagacg

SEQ ID NO: 409993 - DNA, 462 bp, Oryza sativa
  unsure (1)..(462): unsure at all n locations
agcaatgctagtcaataaagctaatttcacctttgaacgggaatggggaagcaatggagtagagaattacaggagaaggtggcagctgaggagagaatcaggagctgtcacaaagctatatacaagttgggaagctgaacgagaagagagcatatgcttccctcctacaggaagcattatgacttgttggtgctgttttacaaatctgggtgattatcggaagatcgtcatgcggtagcagctgcannttcttctgcgacttgggatccctgttgcagagcgcagatgaggttgcgatccccgtacacattgtccacgcgacatgttgatggccagaacttggcgccccgaagccacgctgcagggaacgcagcatactccctggagtacggcttagtccatgagtcgctcatcagaagttggggcgggtgaggagcactcttgaggacgttgttgttcaca

SEQ ID NO: 409994 - DNA, 523 bp, Oryza sativa
ttttatttccgttgcctttgatgagaccacaacctgggttgatgtcgacaagctgttcaaggtgttcaatggtggcaagccagtgaaattcactgctgaatccctcgcaccagaggtctcaagctcaattccgagtagccttgtgcgcaagagcccctacttaacccacccgatctttaacatgtaccatacagagcatgagcttctccgctacctgtacaagttgcaatccaaggtcctttcactgtgccacagtatgatccctcttggttcttgcactatgaaactaaatgctacagtggagatgatgcctgtcacctaccccaactttgcaaacatgcacccatttgcacctactgaccaagccgcaggatattatgaaatgtttgatgacttgggccatctgctgtgcaagatcactggctttgattctttctctttgcaaccaaatgctggtgcttcaggggagtatgccggattgatggttatccgtgctaccacagggtaagaggagacttccacc

SEQ ID NO: 409995 - DNA, 513 bp, Oryza sativa
tttctttgtcgccgacgacctcgccaccgaccccgccgtcgtatcgcgaggaagagactgggggagccccggtggcaggagcggtgggaggggatggcgatgcatacggggttcgccacctccaaggtcctcatcctcgtcggcgcagggttgacgagctcgatcgtgctgcggaatggccggctatctgacgtgttggcggagcttcaggagcttatgaaaggtgtaaaccaaggagaaggttcgagtgcctatgacatcgcccttcttcaatctcagattcgaaatttagcacaagaagttagagatttgactatatcaaggcctattaccatattgagtggcaacttcgactctggaggcagtttatccttctacatactgcctgcagctgcagttggagcaatgggttactgctatatgtggtggatgggattgtccttatcggatgtcatgtttgttaccaaacgcaacatgaccaaagctgttgagagtatgtcgaagcaattggat

SEQ ID NO: 409996 - DNA, 521 bp, Oryza sativa
ttagtaatgttcatagcttggagctgtttgatgaggtgcataaggtccagtggatgggtgcggtgtctgtgggtatactcgcacatactggaacagcagaccagccacgacttagtgaagaggacaagcagaatatgcctcttccagttcaaggccctgcctgcaactcttctgggcacctagccgggtggcacacatttaactcattgccttttgccgggaaaactgccactgttgttggagaggcagcaccggttctaccaaggggtttggagtgggctggttttgtgttgaactctaggattctttggaaagaggcggagggaaaacctgattgggtgaaggatctggatgctgtgggtgagaacggcgaggaaatcgagaacccccttattttgttgaatgatccatcctccgttgagccattggggaactgtgggaagaagatcctcttgtggtggctccgtgttgaagcgcgagctgacagcaaatttcctcaggggtgggtaattgagccacct

SEQ ID NO: 409997 - DNA, 519 bp, Oryza sativa
tgctcagcaagcaacaccatgcaggtgacctgcaggagaagaacagactttctcgaatgttggagcataagaacattttccaggaaagaattgtccaacgtcgtgaagctgagtttagtcgtcttaagaaagagagggatgaaaggactagtcaattgatatcatcaaggaagcgtgaaagggatacagtgcggaagttaatgtactatcttaacttagaagagcagcgcctccaaaggctccgtgaggaagaggaagctagaaaacgtgaagaggaagagaggagaaagagggaagagactgagaggaaggctaagctggatgcaattgcagccaagcagctgcagagagagagggaactagaagagaagaaggaaaaacagagaatggaagctctcatgggaagaggagctggagctgctgagcctgcacgcactcctgatgctgcttccgttgcacagccagctcagccggtagctgcacccgctgctgctgctgcccgtgctgcaccagctgctg

SEQ ID NO: 409998 - DNA, 513 bp, Oryza sativa
  unsure (1)..(513): unsure at all n locations
ttttctttccacacgtcagcctcttatatggagacctgtcagatgaggagaaggaggttgcaaggaagatggtagaggagatagacaaggagatttgtggattgcagtttgagatctccgagcttgcgctgtataggacggataccgaggacaaaagcttggagtcatgggaattggtggagatctgccaccttgagaggaagtgattaatctcctcccgttggtgcttctgccataagttaagtttgaggtgagtttgttcaataataaagcttgcccaaatgcaaagcgatgcctaaaatttaagttttgagttattcctactgtaaaagttacatatatacatatatatcttgggttcttcccagataatatttggcttattaattatctgatgtactgataactgagttatgtcatagacangctctgatcaactcttaatgtgtatgccacattattatcacatttagagatgcactctaaatatatagtgctgcattcgagattaat

SEQ ID NO: 409999 - DNA, 482 bp, Oryza sativa
ttgtcggacatggcgtcgcccatgctctccggcgccaccgtgccactccagggaggcggcttgtcggagttctccggcctgaggagctcgtcgtcgctgccgctgcggcggaatgccacctccgacgacttcatgaacgcggtctccttcaggacccacgcggttggcacgagcggcggggcgcggcgggcgccgacggaggcgaagctgaaggtggcgatcaacgggttcggccgcatcgggcgcaacttcctgcggtgctggcacgggcgcggcgacagctcgcccctcgacgtcatcgccatcaacgacaccggaggcgtgaagcaggcgtcgcacctcctcaagtacgactccacgctcggcatcttcgacgccgacgtcaagcccgtgggcgacaacgccatctccgtcgacggcaaggtgatcaaggtcgtctccgaccgcaacccgtccacctgccgtggggcgagctcggcatc

SEQ ID NO: 410000 - DNA, 521 bp, Oryza sativa
  unsure (1)..(521): unsure at all n locations
ttgtcttgcagaatccgcgtcctctcgccgccgccggcgtccgtcgcggcgcgcgtgcgtgcatgttccgatccatggggacggggacggggacgaagccgccggcgatgacgacggagcggtacgagttcgggccgctcgtcggcgagggcaacttcgccaaggtgtacctcggccggcacagggccaccggcgaggaggtcgccatcaaggtgatggacaaggagaagctcgtcaggctcggcgccacggagctgatcaagcgggagatcgccgtcatgcagcggctgcgccacccgaacgtcgttcgcattcacgaggtcatggccaacaagcgccgcatctgcgtcgtcatggagtacgttcgcggcggcgcgctctaccgttacttacgcaggggccccagcggcggcgccgccggcctccgggagcacgaggcgcgccggttctttcagcagctcgtcttcgccgtcgtctactgccactcccgcggngtgttccaccgtgacatcaagctggac

SEQ ID NO: 410001 - DNA, 490 bp, Oryza sativa
actgtcgacacctaagcatgggcgctcctgctcaagaactacgaccgcctcaacgttcgcaccggtcactacacaatgctgcgattcggccacttgccggtcaagcgccgcatcgccgaggacctacgctacggcgtcatcaacctagacaagccctccaacccctcctcgcacgaggtcgtcgcctggatcaagcgcctcctccgtgtcgacaagaccgggcacagcggcacgctcgaccccaaggtcaccggcaacctgatcgtctgcgtcgaccgcgccacccgtctagtcaagtcgcagcagggcgccggcaaggagtacgtctgcgtcgcgcgcttacacgccgtcgtccccgacaccgtccgcgttgcccgcgcgctcgaggcgctcaccggcgccgtgttccagcgggccccgatcatcttcggcgtcaagcgccagctcagggtgaggaccatctacgagagcatgctgctcgagcacgacg

SEQ ID NO: 410002 - DNA, 373 bp, Oryza sativa
ttttctctccacgcgtgcgatggtcgccgtcaccatggtcctcttgtccccggcgctggccggcaaggccgtcgcgaaggtgttcggcaaggggcgcatgaccatgcgcaagtcggcggccaagcccaagcccggcccgtcgggcagcccgtggtacggggtctaccgcgtgctctacctcggcccgctctccggctagccgaccagctacctgaccggcgagttccccggcgactacgggtgggacaccgcggggctctacaccgacccggagaccttcgccaagaaccgggtgctggaggtgatccactccaggtgggcgatgctcggcgcgctgggctgcgtgctcccggagctcctcgtccggaacggc

SEQ ID NO: 410003 - DNA, 417 bp, Oryza sativa
tgtcggcgagaatggattccaggatctcccgggtctgcttcctcgtcctcgcttcctccttgctgcattgcgccagatctgatggaagtgattcacagcttcttaagggcatcaacagctacagagcttccctcaaagtccctgcgctatccgagaacaagaatgctgcctgcttggctgagcagctagcacagcaattcaaagaccaaccttgcaccaacaccaccggagcaaacactgtccctggcaccgagcagcagttccccgactacccaaagtacctcgaccattgccatctcaacgcgtcggtgaccggagacggtcaggtgatgccggcctgcgttcctggacttgtacctgatgtggttctgaccatctaccccaagtcacagttcaacctgtatttgaatgacacca

SEQ ID NO: 410004 - DNA, 484 bp, Oryza sativa
tcaaagtcagtatcatcgttggggaatccaggagctttgcctccaaagctcaactatagccaatcctttgcttgtattccttatacagctgatgcatactatggtggggtcttgactggatattcttcacatgcaattgttcatccccagcaaaatggtacagctaactcccgggtgccgttgcctgttgagcctgcagcagaagagccaatatttgtaaacgcaaagcagtaccatgcaattcttaggaggagacagatacgagctaaattggaggcccaaaataagttggtgaaaggtcggaagccatacctccatgaatctcggcatcgccatgccatgaagcgagctcgtggatctggagggcgcttcctcaacacaaagcagctcgaggagcagaagcagcaacaggaggaggaggccgcatccggtggcgcgagctctggcaataggacatgccttcagaatggcaccggtagcgcgc

SEQ ID NO: 410005 - DNA, 503 bp, Oryza sativa
atttgccttcgcagttaatcaggtttagggagggtttcctcctccccttccgcctccgccccagcgccgccgtcgtccccctcctctccggcgaagagccgccgtcgccgccatcaccggagcgagccacggtagcaaccgcaaccaccacaaccatcaccatcctcgtgagccgtcaagttttcgattgaagggcagtagggcacgttatacttatggactcaactcaggaacaacaacaggattttggtgtgctactgaagcagggggcggagggaagggtatttgtttcaacatttgtgggacggaagtgtgtaatcaaagagcggttttcaaagaagtaccgacacccattgttggactcaaagttgactcttaaacgcttaaatgctgaagctcgatgcatgacaaaagcaagaaagcttggtgttcccactccagttctttatgccgtggacccacttctgcatacattaacctttgagtatgtggatggcttatct

SEQ ID NO: 410006 - DNA, 449 bp, Oryza sativa
agcactgtaagtactcgcattccacaacaaccgaagggcaacaataggactcagaacatccaagtttttaaccgaatagaaataaacgagttttaaacgactaacatagtgcacattgcgagcagatattaacggtccatgcaacgagtaccatggccgtgggcaaaacttaacgaacgctaagatatctcaaatgcagccagcataaccaccacttcaacgatgctcatttcttcttggcggcagccttggtcaccttggcaccggttgggtccttcttctccacgtttttgatgacgccaacagccaccgtttgcctcatgtcacgcacggcaaaacgaccaagaggagggtactcagagacggtcttcacaaccatggccttggagggaatcactctaaccataccagcatcaccggggttgaggaacttgggctgcttctacagc

SEQ ID NO: 410007 - DNA, 492 bp, Oryza sativa
actcgttcttcctctagttggtaggtacctggttgttcgaccatgtgtatggagaggtcgctcatcagcatggtgcggatcgggcacgtcggactgcgtaagtgtgccacgacgggacatgcgccctacaagcttggaggtctagacaagcgatggattgacagggtccagatggcaccccttgagatgaacaagcggcgcttcaagctcgcgcggcggctggagaagccaaaggacgcgcgcgagagaggtctcaccatggatattgccctgtggaagttcgagaccaccaaggggcagtgcgcggagataggtggccctggtcacggtgtgtgtacaaagcacatgagcacgggtgcctcacaagttgactgagcagtgcacactgatgggtaagggactggcgggctacaggttgatgtacagaagggacacgccgatctgcaaggaggagtgcatgaggtagcatatcgagatggacaggaacaggca

SEQ ID NO: 410008 - DNA, 478 bp, Oryza sativa
acctttcctttatgacatcctgtccttcctgttcctctggtcactctgctctcccccgcgcgcgccaccgtcgtcgccatgtcgggcaacatcgccttcggccgcttcgatgactccttcagcgcggcctccctcaaggcctacgtcgccgagttcatctccaccctcgtcttcgtcttcgccggcgtcggctccgccatcgcctacaccaagttgaccggcggcgcgccgcttgacccggccgggctggtcgccgtggcggtgtgccacgggttcgggctgttcgtggcggtggccatcggcgccaacatctccggcggccacgttaacccggtcgtcacctttggcctcgccctcggcggccagatcaccatgctcaccggcgtcttctactggatcgcccagctcctcggcgccatcgtcggcgccgtccttgttcagttctgcaccggcgtggcgacaccgacgcacgggcttg

SEQ ID NO: 410009 - DNA, 349 bp, Oryza sativa
tttttcttctagccagtaagctagctaactggctgcgtgtatttggaccccacttttgattgcctcctcggccacctgcgtggcttcattccaagggctcaagtccaccgccggcctacccgtcagccgccgctccaccaactcgggcttcggcaacgtcagcaatggcggaaggatcaagtgcatgcaggtgtggccaattgagggcatcaagaagttcgagaccctatcgtacctgccaccactcaccgtggaggatcttttgaagcagatcgagtacctgcttcgatccaagtgggtgccttgtctcgagttcagcaaggttgggttcggctaccgagagatccac

SEQ ID NO: 410010 - DNA, 522 bp, Oryza sativa
tatcgttggtcatgcgatgcatattgtgttgccaagtatggtcagaaatgggtgcggacacgtactattgttgacaacttgaaccctagattcaatgaacagtacacatgggatgtcttcgaccatggaacagtgctcaccattggtttatttgacaactgccacatatctgcagacagcaaccacagtagttcccccggccatatggacaagcccatcgggaaagtgcgaattcggctttcaactcttgagactgggagggtgtacacacacacgtatccattacttgtcctccacccatcaggagttaagaaaatgggagaactccacctggccatcaggttcacagccacatcccttctcaatgtgctcttcacatattctcgggccctcttgaccaagatgcattacgcgcaaccactgtcaatagtgcagcaggaaatgctccgccaccaagctgtgcaacttgtcgcacagcgtctagggcgcatggagccaccagttcgcagggaagttgttgag

SEQ ID NO: 410011 - DNA, 462 bp, Oryza sativa
catgaagattttctttttttagtgttttacagcaaaggcttcaaattttaagtgttctgtagcaaaatttgccaaatatctttggataaaataaggaacccgacatcacagtacaataaaaaaaaataccgattctacagcaaactgtactgcgctatcaatccgaatcctgatacagccacacataacaagagaaaaatcttattacaattgcaggaaaacgagttaggcagagagattatcaaagaacttcatgtagtcatcaaatgactctccacgccgaatcttagcaatggacccatcatcttctacccaatattcaggtgggcgcaacttcaagttgtaggttgaagccatgctcatgcagaaagctcctgcgtcatgaaccaccataccagctcccttatcaggtgttggaagtgccctgtgtttgccccgggaccctgctgattcacaaactgg

SEQ ID NO: 410012 - DNA, 524 bp, Oryza sativa
accggtccggaacggcaggcccggcccaacccaccttttcttctatgcagtgcccacagtttgctggctgggtacatttagtccccagttcgattggatccaacgatgaaagaagctattcaaagagactgtacacgctatgctcctggcattgagataatcagtgttcgcgttacaaagccgaacatacctgatagcattaggagaaattccgaacttatggaggaggagcgtacaaaggcattgattgccattgagaagcaaaaggtagcagagaaggaagcagaaacgcagaagaaaattgcactatctgaagcagagaagaatgcacaggtgagcaagatcctcatggagcagaagcttatggaaaaggacagctccaagaggcagcaacagattgataatgaaatgttccttgcccgagagaaagctcttacagatgcgaactattacaggataacgaaggaagcagaggccaacaggcttaaacttacaccggagtaccttgagctgaggttcaatga

SEQ ID NO: 410013 - DNA, 329 bp, Oryza sativa
gtggctgcccgccgccgtctcgctcctccgctcgtcgtcgctgcatgtcgccggtgacgccggcggcggcgtcgcctccctctccgtccggcgctacgacgccatcttcagcttcggcgactccttggccgacaccggcaacaaccccgtcgtcttcgactggtactccatcttcgaccccgtcacccgccctccctacggctccaccttcttcggccggcccaccggccggaactgcgacggtcggcctcgtcttgacttcgtcgccgaacgcctgggcctgccgttggtgccgccggtcttggcttacaacgggagcttccggcacg

SEQ ID NO: 410014 - DNA, 517 bp, Oryza sativa
ttttcctcgcagagatggcgcacgccttcgccggcgggacctccgccatctgccgttgcccccacgaccccggccgagccgccctcgtatcccgccctcgccaccgcctctgtgtcctcgcgtcgtccctacccacgccggccatcgagggccagggcgtcgagttgtcggtgacgactcggcgggggcgggtgctgccggtgctcaaggactgctccctccgcgtccctccgggtcagctctggatgctcctcggccccaacggctgcggcaagtccacccttctcaaggttttggcaggatttttaaatccttcttctggtacagtgtatattaacaggccatgcagctatgtcttccaaaatcccgatcaccaggttgtgatgccgacagtggaatcagatgttgcatttggtcttggtaagctcaacctttcgttagatgaggttaggtcaagagtatcacaatcactggatgctgtgggaatgttaagctactctcaaaggccaatccaaac

SEQ ID NO: 410015 - DNA, 497 bp, Oryza sativa
  unsure (1)..(497): unsure at all n locations
tataaaagtgaaaggcctgggagcgaagcgggtgagaatggcagggaaagccggcggcctcaagggcgtcgccctcatcggcggcgccggcggcaacagcgcggtcgccggcgccctccacttcttccaggacccctccaccgggtataccgaggtgagggggagggtcaccggcctcgctccgggcctccatggcttccacatccactcctttggcgacaccaccaacggctgcaactctaccgggccccattttaatcctcacaataagtcccatggggcaccatctgatgatgaaagacatgtgggcgacctgggaaacatagtagccaacaaagatggtgttgcagatatcttcataaaggacctacagatttcactaagcgggcctcattccatattgggaagggcagttgttgttcatgctgattctgatgacctaggaaggngtggtcatgaactcagtaaaacaacaggaaatgcangagcaagattgg

SEQ ID NO: 410016 - DNA, 413 bp, Oryza sativa
ttgtttccgtgctgctcctgtctctcgcagggagcgttggatgaggaggacgactgcttggtgcgcttgatggggctcgccggagaggccgctggctcgcctggcagtggcggcgggttcagtgcaaatggtaaatttagctatggttatgcgagctctcctggaaaaagatcctccatggaggacttctatgacaccagaattgatggtgtcgatggagagaccgttggactgtttggtgtctttgatggtcatggtggagctcgagcagcagaattcgtcaagcagaacctcttcaccaatttaatcaagcacccaaagttattcagtgatacccagtctgcaattgctgaaacttacactagcacggactttgaacttctgaaagctgaaaccagccacaatcgagatgc

SEQ ID NO: 410017 - DNA, 485 bp, Oryza sativa
tgttcctctctctcctctccccttcgtggcgggggcggttgctttggctgcgtgactaggaggagcaatggcgatggcctcctgcgcctacgccccagcgggcggcgttggcacccactccgcgccgggcaggatcaggccgccgcgcggcctcggcttctccaccaccaccaccaagtcgaggcccctcgtgctcaccaggcgtgggggaggcggcggcaacatctccgtggctcggctgaggtgcgcggcgtcgtcgtcgtcggcggcggcgaggccgatgtcgcagccgcggttcatccagcacaagaaggaggcgttctggttctaccgctttctctccatcgtctacgaccacgtcatcaacccgggccactggacggaggacatgcgggacgacgccctcgagcccgccgacctctacagtcgcaagctcagggtcgtcgacgtcggcggcgggacggggttcaccacgctcgggatcg

SEQ ID NO: 410018 - DNA, 466 bp, Oryza sativa
tgtccgtatcgggagggagggtgagagtacgtgcgggcgtccggaggtctcagcgcacgcccgcggccgggccgtcgcgccgatcgcgatggggtcgtggcggcgcaaggcctacggcgccctcaaggactccaccaaggtcggcctcgccaaggtcaacagcgacttcaaggagttggatattgcaattgtgaaggccaccaaccatgtagaatgccctcccaaggacaggcacgttagaaaaatattcgtggcgacctccattaaccgccctcgagcggacgttcaatactgcatctatgccttgtcaaggagattgtccaagacaaagaattggacagttgcattgaagacattgatagtggtacataggctcttgagagaaggtgatcctacattcaaagaagagttcctggcctactcatacaagggaagcgttttgcagagagcaaacttcaaggacgat

SEQ ID NO: 410019 - DNA, 523 bp, Oryza sativa
ttttcttttccactcgacaggctgcacctaccagcggactgtttactgtagctctgtggggactgcgcgtctcacccacgccaagatgctaggcgagccggggtcaactgaggaggagtgcctgctgttgcgaaagcgtgcgacaggccacgggagagcaaaagatcgtctccctgttcagcaagaagcccgccctgaagcccaagcccgtcggcgtcacctcctcgagccccgacatcggcgatgagctcgccaagtggtacggccctgacaggaggatcttcttgccggagggtctcctggaccgctcagaggtgcccgactaccttaacggagaggttcacggagactacgggtacgacccttttggcctcagcaagaagccagaggacttctccaagtaccaagcctatgagctgatccatgccaggtgggcgatgctcggcgccgctgggttcatcatacccgaggcctgcaacaagtttggcgcatactgcggccccgaggccgtctggttaaagac

SEQ ID NO: 410020 - DNA, 491 bp, Oryza sativa
ttcgtgctttccattgttgaggaagaggcatggggtatgtttgcttatgcactattgatatctgagcaacaaggaatatattcggaagctgcaattgtaaaggatgaagttattgctggtagaaaaattgataaagtaacaccaatcaactcgatcggagatactcctgtgccatctgcaattttatctccaaatgattctttagaacaagatcataacctatcaagaaatgtgtcatcgttatcatccgaggaatcaacatctggattttatgattcttttctatctgccttaaaagatctgcatcctgaattttggttgaataatgaaaagctaactttgaagagcaaatacactgttctgtgtatatatgcaaaacaattctacgatcttcggaagattttgtgtacatcagagattgcctatattttatctataagccgttgtaaagaatggaatgcacaagggtgaaagagcaaggcttttttttt

SEQ ID NO: 410021 - DNA, 484 bp, Oryza sativa
ttttctctttcctatagtgatgttgaccggaagcggtttttcttcaacaagaaaatgtattatacacgacaaaggacacaaaggagcacattcaagcggaggaagatgtttgatcgtcattcagcccaagtttctgaagaatatgcaaaggcaaacacaaagtttgctgcaagagactcgcacgcggtttctttggaagcaaacaaggggaccaattcaacagcattccagaaatcacaagagtcaagtgactgccacgtaaaacttaggatcaagtctttcaaggtgcctgaacttctaattgagatcccagaaactgcgactgttggttcactgaagaaaactgttctggaggcagtaaatgccatacttggtggtggtctgcgtgtcggtttgctccatcatgggaagaaagtcagagatgattataaaaccttaatgcatgctgggaattttcatgatgaggcactggacaacctgggtt

SEQ ID NO: 410022 - DNA, 468 bp, Oryza sativa
tttttgcgaggagcgtagccgcggtggtgtggctggcgatggcggcggtggcggcggcgcaggcgccgggtcccgctgcgacgccggcggcgggcgccacggggccgccgaacgtgacggcggtcctggagaagggagggcagtacacgacgttcatccggctgatgaaggagacgcagcaggacacgcagctgaacagccagctgaacaactccttcaacggcaacggctacaccgtgttcgcgcctaccgacaacgccttcaacaacctcaagccgggcaccctcaacagcctgacgcagcagcagcaggtggcgctcgtccagggccacgttcttccggagttctactccatggactccttccagacggtcagcaaccccgtccgcacccaggcgttcggcaccgacggtccctacaccctcaacattaccttcaccaccaacaacaacgttaacgtcttcaccg

SEQ ID NO: 410023 - DNA, 519 bp, Oryza sativa
tcgcgttcctgctcggcgtcctgctcgcaggatccctgtttgcattttctgttgcgaaggaggagaccaagaagctcggtaccgtgatcggtattgatcttggtacaacctactcgtgtgtcggtgtgtacaagaatggtcatgtcgagattatcgccaatgaccagggtaaccgtatcacaccctcatgggttgcattcaccgatagcgagaggctcatcggtgaggctgccaagaaccaggcagctgtgaacccagagaggaccatcttcgatgtcaaacgtctcattggaagaaagtttgaagacaaggaagttcagagggacatgaaacttgtcccctacaagattgtgaacaaggacggtaagccctacattcaggtcaagatcaaggatggagagaacaaggtcttcagccctgaggaggtcagtgctatgatccttggaaagatgaaggagactgctgaggcataccttggcaagaagatcaacgatgctgtcgtgactgttcctgcgtact

SEQ ID NO: 410024 - DNA, 509 bp, Oryza sativa
ttgatgactactggcatcactggcaggaggcatttgcaggctctctgataggtcttacagacgcatcattttgttatctgcaattcttcccatatccttatgacgcagacgctttctggcctcatgcatacaccttccagctagcggaggcctcgcgcaacaataacaccgcaaactcctacagcgtgagaccgaccgggttcgagactgtcaatgtcccagaagggcatggcgggattgctctgagagacaccaacctagaggccggcaggagaccgtgaaatctgagacctggactggagaaaatctaccaaataccatgacaatatcctgactttacgagttcgaattttgtccactcgacagacgatatggtaggctgtgttcatatatgtattacagttgtatctagatctgctggttcatcacttctgaattggtctcttggcttccatggcttttgctctctgctaatgggatggctagccccagaagcattggctgtaaac

SEQ ID NO: 410025 - DNA, 507 bp, Oryza sativa
tttcttatctgccttcctacctcctgtgggcttttgtttggcgtgcgctccaccacccaaaaaaaggacaggttccacataaagaccaacgagtaaaagcttgatctgtccggtgccaaccaatcaacaaacaagtttcatgtctgatctcgacgttcagattccatctgccttcgatccgtttgacgaggcaaatgctgaggactccggcgctggccctggagaagacgactacgtgcatgtgcgcatgcagcagcgcaacggcagaatgagtataactactgttgacgcctgaaagaaggagtacagttacaacaagatcctcaaggatctgattaaggacctctgctgcaatggcactgggcccaagatccagagcttggccaggtcattgagcttcaaggagatctgcagaagaatgttgccacgttcctaagttaagctgtgattgctaagaggacaacatcaagattacgggtttaagctgcctaagatgctcgatgcata

SEQ ID NO: 410026 - DNA, 386 bp, Oryza sativa
tcggtcggatctaattaatttacctcgtgggccttcttctcctccccccgatcggatcggcccggctcctcctcctccgccgccgtcaccgccgccgcagataggagaagatggccgcacttgataccttcctctttacctcggagtctgtgaacgagggccaccctgacaagctctgcgaccaagtctcagatgctgtgcttgatgcctgcctcgccgaggaccctgacagcaaggtcgcttgtgagacctgcaccaagacaaacatggtcatggtctttggtgagatcaccaccaaggctaacgttgactatgagaagattgtcagggagacatgccgtaacatcggttttgtgtcagctgatgtcggtctcgatgctgaccac

SEQ ID NO: 410027 - DNA, 520 bp, Oryza sativa
gttttgcttctcccgctgctcgcctcgcctcctcgacgatctgagatcatcgagatcgattgagtggagctaggcggcggctagggcgagatggcgctcgtattgcatgctggcagtggaaacaagaatgcattcaaggcactcattgctgccgagtactctggtgtcaaggttgagttggtgaagaactttcagatgggtgtctccaacaagacacctgagtttctcaagatgaatcctattgggaagattcctgttctagagactcctgatggtcctgtttttgagagcaatgcgattgcacgatatgttacccgctcgaaggctgacaacccactctatggggcttcactgattgaatatgcccacatcgagcagtggaatgacttttcggccacagaggttgatgcttatattggaaaatggctctacccacggctaggaattgctccctatgttgctgtgagtgaggaagcagctattgctgctttgagagaacattgggtgccctaacacacac

SEQ ID NO: 410028 - DNA, 505 bp, Oryza sativa
gccgggcgacaccaccttcaccaccatcgcggcggcgctcgagaaggtccccgaggggaacaccaagcgcgtcatcctcgacctcaagcccggcgccgagttccgggagaagctcctcctcaacatcactaagccctacatcaccttcaagtccgaccctgccaacccggcggtgatcgcctggaacgacatggctgccaccaggggcaaggacggcaagcccgtcggcaccgtcgggagcaccaccgtcgccgtcgagtccgactacttcatggcctacggcgtcgtcttcaagaacgacgcgccgctggccaagccgggtgccgagggtggcaggcggtggcgctccgcctgttcggcaccaaggcagccatctacaactgcaccatcgacggcgggcaggacaccctatacgatcacatgggactccactacatcaaggatagcctcatcatgggcagcgtcgacttcatctttggattcgggagatcactctacgagggct

SEQ ID NO: 410029 - DNA, 498 bp, Oryza sativa
ttttttcgcgtgggagaaaaccttggccctggaatagttgtgttcttctctgaaacctttttagagaggtgagtgcttgttcatcagaagcagagagacaagatgtataacgctccaatggcacaggacatgtcctactatgaacatgtgcagaggcgccatgaggagaagggttgcctctatgcatgcatcttcactgcactgtgctgcttctgctgctacgagacctgcgagtgctgcctcgactgcctctgctgctgctgcaactaggctgccatatcaagccatagcaagaacatgatcaagatgaggatggagatcgcctccatctctcttacccctgagatttcataatttatcagcccgttgtcatcatgtaaaattaataaacatgtagtagatggaaactttgtcagaatcgagcatttgtgttctgaaaaagaggactattgtaagaaacccagaatacttgtatctgaagtgctttctatgcgtgtg

SEQ ID NO: 410030 - DNA, 527 bp, Oryza sativa
tatagctgctgatcttggatgccacctagttcaaggatggcgccgccgccgctcgccggcgtggtggtggtcgccgccgcgctcctgctcctcctgccggaggccgccgagccccgcactctcctctcgctcgacgacttcggcgccgtcggcgacggcgtcgccaacgacacgcaggccttggtggacgcctggagcgccgcctgcgccaccggcgaccacaccttcctccacgtccccgccgccaagtcctacctcgtctggccggtcaccctcgccggaccttgcagggaggagatcaagctcttcatctccggcaacatcgtcgcgccggagagccccgacgagtggccggagggcggcggcggcggcggcgaatggctccacttcgtcggcgtcagcgacctgacgctgagcggcggtggcgtcatcgacggccgtggccaccggtggtgggcccggtcgtgcaaggcatagcacaacgcgaccgagaattgcactacccaggctgctccaaaggcgctgca

SEQ ID NO: 410031 - DNA, 526 bp, Oryza sativa
ttatgtactcgagcaaagaaggagagagcttggggagctgcagagatggccccctccgtgatggcgtcgccggccaccaccgtcgctcccttccaggggctcaagtccaccgccggcatgcccgtcgcccgccgctccggcaactccagcttcggcaacgtcagcaatggcggcaggatcaggtgcatgcaggtgtggccgattgagggcatcaagaagttcgagaccctctcctacctgccaccgctcaccgtggaggacctcctgaagcagatcgagtacctgctccgttccaagtgggtgccctgcctcgagttcagcaaggtcggattcgtctaccgtgagaaccacagatcccccggatactacgatggcaggtactggaccatgtggaagctgcccatgttcgggtgcactgacgccacccaggtgctcaaggagctcgaggaggccaagaaggcgtaccctgatgcattcgtccgtatcatcggcttcgacaacgtcaggcaggtgcagctcatcagct

SEQ ID NO: 410032 - DNA, 521 bp, Oryza sativa
  unsure (1)..(521): unsure at all n locations
tgatttttgcttattgctctgatctggaaatacgacttctcacccttcatggtccttatcattgccatcctgaatgacggtactatcatgacgatctcgaaggacagagttaagccttctcccttgccagacagctggaagctgaaggaaatcttcgctaccggtattgtgcttggaagctaccttgctctgatgaccgttattttcttctgggccatgcacaagacagactttttcacggacaaattcggtgtcagatcaatcaggaacagtgaacatgagatgatgtctgcactgtacctccaagtcagtattgtgagtcaggccctcatcttcgtcacccgttctcgcagctggtccttcatcgaacgccctggtcttctcttggtcactgcattcatgcttgcacaactggttgcgacattcctcgctgtctatgccaactggggctctgccaggatcaagggcattggctggngctgggctggcgttatctggctttacagcattgtgttctactt

SEQ ID NO: 410033 - DNA, 517 bp, Oryza sativa
ttagccctagccctcgccctcgcctcccggtcccgcctccccgccgcgccgccctcgtcaccgccgcgcaggaccctcggtggcggcgggccatggcgtcgctggccgtctcggcgtccgcgtcggcgtcgggggaggaggtgacgcacctcgcgcagcgggaggcggcggagatcgacgagcagctcatgggcccgctcggcttcagcgtcgaccagctcatggagcttgcggggcttagcgttgcggcggcggttgcggaggtttacaagttgggtgaacatacaagggtgctagtaatctgtggtccaggaaataatggtggcgatggtctggtagctgctcgtcatcttcatcactttgggtacaagccttctgtatgttatccaaaacgcacgcccaagcctctgtattctggcctttgtactcagcttgaatcactaacaatccctttcgttcctgttgaagacctacctgcaatttatcggaggagtttgacatcattattgatgcaatg

SEQ ID NO: 410034 - DNA, 508 bp, Oryza sativa
  unsure (1)..(508): unsure at all n locations
ttccaaagattcttatcgattgaagaaaaaaaaaagccggagaaaaggatagagagggaaagcaaccagccatggagtcgctgactctccgggcatcgccgtcaacggccgcgccgttgcgccgcgtccccgggcggcggcacgcggcggtgtccgtccgcgcctccgccggcgccggcgagccggacctctccgtgcgcgtgaacgggctgaagatgcccaacccgttcgtgatcgggtcggggcccccgggcaccaactacaccgtcatgaagcgcgcgttcgacgaggggtggggcggcgtcatcgccaaaaccgtatccttggatgctgagaaagttatcaacgtaacccctcgctatgcccggctcagggcggaccccaatggatctactaagagtcctatcatcggatggcagaacattgaacttatcagtgatcggcctctagaaactatgctgaatgaattcaagcaactgaagaaagagtatnctgacaggatactcat

SEQ ID NO: 410035 - DNA, 519 bp, Oryza sativa
ttctcttctcgccttctccctcggcgccgtccggggccgcgttctcctcctcctcgccgccgaggtcgccttcgtcgccgccgtcgccgccctcgtcctcaacctcgcccacacccacgagcgacgctccatgatcgtcggtatcctctgcgtcctcttcggcaccggcatgtacgccgcccccctctccgtcatgaaaatggtgatccagactaagagcgtggagtacatgccccttttcttgtccctggcgtcactggtcaacggcatctgctggactgcctacgccctcatccgcttcgacctctacatcacgatccccaacgggctgggagtgatgttcgcggtggcgcagctgatcctgtacgccatctactacaagtcgacgcagcagatcatcgaggcgcgcaagcgcaaggaggccgaccatgtcgccatgaccgatgtcggcgcgacttcgccagaacaacccctgctccgtgccgccggcgcgcggcaacgggcgttctagctacgccg

SEQ ID NO: 410036 - DNA, 450 bp, Oryza sativa
tcgcgttcctgctcggcgtcctgctcgcaggatccctgtttgcattttctgttgcgaaggaggagaccaagaagctcggtaccgtgatcggtattgatcttggtacaacctactcgtgtgtcggtgtgtacaagaatggtcatgtcgagattatcgccaatgaccagggtaaccgtatcacaccctcatgggttgcattcaccgatagcgagaggctcatcggtgaggctgccaagaaccaggcagctgtgaacccagagaggaccatcttcgatgtcaaacgtctcattggaagaaagtttgaagacaaggaagttcagagggacatgaaacttgtcccctacaagattgtgaacaaggacggtaagccctacattcaggtcaagatcaaggatggagagaacaaggtcttcagccctgaggaggtcagtgctatgatccctggaaaga

SEQ ID NO: 410037 - DNA, 527 bp, Oryza sativa
ttgttttgtagtcgctcgctcatcactagcaggtggcactcttcatccatcacacggatcaacgatgcacaacaacaatactctcctcctccactgtgttgtttagctgcagctgcctgcaggatcgaggagcaacaaagaatggggggcatggagaaaggtggttgcgaggtggaggctcggggcatcaaccaccacatccgcatgcccatccccattcccaagcgcgctcaccctctcatgatgatgaagatatggagcagggaggaagacgaagacgagcagtagtcgtccaccaccaccaccacccggcacgttctgcgtaacgtcttctgccgcgcccgccccggtgagcttctcgccattgtgggccccagcggcgccggcaagttcaccctcctcgagatccttgtcggccgtcttcaccccttcccgtttccgaccagcttcttctaacggtgcccccgccaccaccgtcgacctacgccgagttttcgtctacgttacccagcgcgacgttcctttcc

SEQ ID NO: 410038 - DNA, 451 bp, Oryza sativa
tgcttctactgaatgggtaaagggcaagcaaatggaggaagtagtgactataaaaaacactgagattgccaagcacttgtcacttccaccagtaaagctccattgtagcatgcttgctgaggatgcaattaaagctgccgtgaaagactatgaagcaaagaaggcaaagctagcacaaaagggtgaagagaaggctgccgaagcatgagtgccagaggttctgtcatgaagaatgttgcagtgccctgcgtactcgtagtaaagaacctgtcatgaagaagtctctgctctgcttcttgctggcgggaaatagtgtgtaacgctcacaaactctatgcagcatgtatcataaggatgaaggcaaacatttttgaataaatgtgctgtcatcttgaaagaaaaaaaaaaggtgtatgcgtgtgtatggcctagtaatgaacatatggtacgg

SEQ ID NO: 410039 - DNA, 517 bp, Oryza sativa
  unsure (1)..(517): unsure at all n locations
tgacctgctcgatccgatccaatccgctcctctccagtccagatcggaaggaagccaggaatggggcacccccacccccacccttacgcgccggcggagcttcacctcccgggcttcgtgcctctccaactgtcccaggcccaaatcctcgtgccctacctcgccacctccctcttcctcctcctcgccgtctggctcatctccgggagatgcagtcgtaggctttccgacaccgaccgctggctcatgtgctggtgggccttcaccggcctcacccacattatcatcgagggaacctttgtctttgctcctaatttcttctccaaccaaaacccttcttacttcgatgaagtttggaaagagtacagcaaaggtgactccagatatgtcgccagagaccctgctactgttacagttgaaggaattacagctgtcttggaaggccctgcttcactccttgctgtctatgccatcgcatcgggcaagtcctacagccatatcctncagttcactgtct

SEQ ID NO: 410040 - DNA, 391 bp, Oryza sativa
ttgctgatcacgcttggatagttggggctgacttccattatgctggagattttgaacctcctgaggctgttgatatatctcctaatcctggacgaacagacccgatgtatgttgtccagtccagaaagagaatagcttgattaacatcataggttctatacagattttgtgtaatgcacaacgtgatggcaatttttctactggtcactttcgaaacgtaaatatgtagacagatctggcagagtctccgcttgtctgcttgtgtgtctgcttgccttgcaataaaccacattaatacatagcagctttgtgatagttttatcaaagtatttgtagttttatgaaatttatttatttgttcagtaccgtcgtagttgaatcaagatcacct

SEQ ID NO: 410041 - DNA, 526 bp, Oryza sativa
ttcttagagcaagaagctcatctcctcctcctctcgcatggcagccatggccaccaccgcgtccagcctcctcaagacctccttcgctggcgcgcgcctccccgccgccgcccgcaaccccaccgtctccgtcgcgccgcgcaccggcggcgccatctgcaactccatctcgtcgtcgtcgtccactcccccctacgacctcaacgccatcaggttcagccccatcaaggagtccatcgtgtcccgcgagatgacccggcggtacatgaccgacatgatcacctacgccgacaccgacgtcgtcgtcgtcggcgccggctccgcggggctctcctgcgcgtacgagctctccaaggacccctccgtcagcgtcgccgtcatcgagcagtcggtgtcccccggcggcggcgcgtggctcggcgggcagctgttctccgccatggtggtgcgcaagccggcgcacctgttcctcgacgagctcggcgtcgcgtacgacgagcaggaggactacgtcgtcatcaagcac

SEQ ID NO: 410042 - DNA, 506 bp, Oryza sativa
tatttaaatcaaacaaaaagaaaaaatattcccgatctgtgaaattcgcaaaaccctagcgcggcggcgatgtcgaacacgagggtgttcttcgacatgaccgtcggcggagctccggcggggcggatcgtgatggagctgtacgcgaaggacgtgccgcggacggcggagaacttccgcgcgctctgcaccggcgagaagggcgtgggcaagagcggcaagccgctgcactacaaggggagcaccttccaccgcgtgatcccggagttcatgtgccagggcggtgacttcacccgcggcaacggcacgggaggggagtcgatctacggcgagaagttcgccgacgaggtgttcaagttcaagcacgacagccccggcatcctgtccatggcgaacgccgggcccaacactaacgggttccagttcttcatctgcaccgtgccctgcagctggctggacgggaagcacgtcgtgctcggccgcgtcgtcgagggcatggacgtcgt

SEQ ID NO: 410043 - DNA, 488 bp, Oryza sativa; identical to SEQ ID NO: 389335

SEQ ID NO: 410044 - DNA, 508 bp, Oryza sativa
tgtcctctcatctggctatggtgagcctcccaaggatccagtagcattgatggaattctacatgaagaaagctgcacaggaagaacggaaaaggccaccgaaacaatcaaaagatgaaatgccaccacctccttctcttcaagctccttcttccaagaagggacatcacatgggcgacttcattcctcaagaagaacttgaaaagtttatggcacgttgtaacgatgctgctgcacaaaaagctaccaaagaagctgcagagaaggctaagattcaggctgacaatatcggacacaaacttctgtctaagatgggatggagggaagctgagggtcttggcagtgagagaagtggacgtgcagatcccattatggctggagacgtgaagaaagaccatcttggtgttggcgctgtccaacctggtgaggtcacatatgaagatgatatctatgagcaatacaagaagcgaatgatgcttgcctaccgttataggccaaacccactgaac

SEQ ID NO: 410045 - DNA, 512 bp, Oryza sativa
tgccgagcggggaggtggtggcgtcatacgaggtgctggagcggcggctgcgggagctcgggtgggagaggtacctcaccgacccgtgcctcctgcagttccaccagcgctccaccgtgcacctcatctctgtcccccgcgacttctccaagttcaagctcgtccacatgtacgacatcgtcgtcaagacccgcaacgtcttcgaggtccgcgacgccgctgcccccgccgtctcaccggcgacctagctgctgatccgagatccatccatccatcgatcagacgacagcttatagctacagcagtccacatgagcttgcctgcctgctattataagagtgtaagtatgtatatatatactggtatgcgtgtgatcgatcaaggatcgatgtacacacaaatgatcagcatgcacagatcactagatcgagatctatagctcgatcgatttggggtttctcctgccggcgttgcagcttttggattagatgttgcgccggtgaggacattgc

SEQ ID NO: 410046 - DNA, 524 bp, Oryza sativa; identical to SEQ ID NO: 392144
  unsure (1)..(524): unsure at all n locations

SEQ ID NO: 410047 - DNA, 502 bp, Oryza sativa
tctggtgggagaaacatcagggtcactgaggaaacataacatgagtatgtcgatcttgtggctgaacatatattgaccacagcaattcgccctcaaattaatgctttccttgaaggattcacagaattagttccaagggagctcatttccctatttcatgataaagaacttgaactcttgatcagtggacttcctgaaatcgactttgatgacctgaaagcaaatgcggagtatattgggtattcgcctgcatctccggtcatcctgtggttctgggaagtagttaatggtttcagcaaggaggacatggcaagatttctacaatttgtgacaggaacatcaaaagtaccattagaaggtttcaaagcgctacaaggtatttctggtcctcagagattccagattcacaaggcttatggagctccagagaggcttccatcttgccatacttgctttaatcaactggatttaccagagtattcctcaaaggagcaactagaag

SEQ ID NO: 410048 - DNA, 317 bp, Oryza sativa
gtcattcgcgaagaatcatcatcatcaagggggagttttgaaactaactatccttgcgccccggtcttggctagtaaataccggcgttttatgatctaagttcatgcaaaggggacgattgcagacgatgaatatgctattctggggtcagcaaacattaaccaaaggtctttggctggttccagagataccgcaattgccatggtcgcataccagtctcaccacacatggactacaaaggggggttatccttgccgtcagggatactggtatagaacttccctttgggcagagcatcttgggatggttgatgacct

SEQ ID NO: 410049 - DNA, 516 bp, Oryza sativa
taacttttggtcgatggaccgtatggtgcaccggcacaagattaccgtgaatacgatgtgctacttctcatcgggctgggcatcggagccacccctttgattagcattgtgaaggacgtgcttaaccacattcaaggtgagggatcagttggaaccacggagccggagagcagcagcaaggcgaagaagaaacctttcatgacgaagagagcctacttctactgggtgacgagagaggagggctcgtttgagtggttcagaggcgtcatgaacgaggtgtctgagaaggacaaggatggagtcattgagctccataaccactgctcaagcgtgtaccaggaaggcgatgctcgttctgctctcattgtcatgctccaagaacttcagcatgcgaagaagggcgtcgatatcttgtcgggaactagtgtgaagacccatttcgcacgacctaattggcgaagcgtcttcaagagggtgcggtcaaccatgagaaccagcgcgtcggtgtgttctact

SEQ ID NO: 410050 - DNA, 515 bp, Oryza sativa
tgtggccattactcagctcacctactccagatctcgccatggcggcggcgtcgtctcggcggcagcggatggccgcggcgtgcttcgtcctcgccgcgcttgcgatgtgggcggcgcccgcggcgtgcggcgcgcgcgcggttcctcgtggggcgggggcgggggtggcggcgcagcaggcgaacgcgtcgtcgtcgtcgtcggcggcggcggacgagttcctggcgccgcacaaccaggcgcgggcggcggtcggggtggcgccgctgcggtgaagcggcgacctggcggcggcggcggcgaggacgacgtcgcagcagcagggcgggcaggggcggcggtgcgggttcgcggacatgagcgggagcccctacggcgcgaaccaggggtgggcgagctacccggcgcgccccgcggaggtggtggcgtcgtgggtggcgcatgggaggtactacgcccacgccaacaacagcttgcgcgccgtgcagcagtgctgcacctacacccaggtgtgt

SEQ ID NO: 410051 - DNA, 505 bp, Oryza sativa
tgtgaaatttcaacaaattgatgcactaatggagtccaagggtggcaaaaagaagtctagcagtagtcgttcctccctgatgtacgaagctcccctcggctacagcattgaggacctccgacctgccggcggcatcaagaagttccgctctgctgcttactccaactgcgcgaggaagccctcttgatagcccccttggctaccttgatctagtagtttagttactcctctgaattctcgttttgggctttcttacatctctctggctagctgcttcccagtgaccgggaaggtcatcagtcctgcttcctttcttcctcatctctggcatcgtccttcgaaacaatggcagtcctgtcagttgctgactctccaccggtctcggcgatcgggtttgagggatatgagaaacgcctcgagatcactttcttcgaggcgcctgtctttgctgaccccaatggcagggggttgcgtgcactgtcacgtgctcagattgactctgttc

SEQ ID NO: 410052 - DNA, 503 bp, Oryza sativa
tcaaacggccacctcactctccctctgtctatctctctcttcacatttccattccaactcaatttcctcctctcttctcctctcctcttctcacacgaagccaagaaagccaagaaatccatccatccatagcaagggagctagctcgccggcggcgatgggcaaggactgcggcaaccacggcgacgacgacatccggcaggcgtgccggcggctgctgacgatcctcttcggcctcgccctgatcgtggccatcatcgcgctcatcgtctacctcgtgctccgccccacccaccctcgcttcttcctccaggacgccacgctccgccagctcgacctctccaattcctccacctccggcgtcctctccaccgccctccaggtcaccgtcgcctcccgcaaccccaatgaccgcgtcggcgtctactacgaccgcctcgacgtctacgcctcctacaagtaccagcagatcacgctcgccgcctcgctcccgccggtgtacc

SEQ ID NO: 410053 - DNA, 527 bp, Oryza sativa
tgaactgcccaccgtttcttgcatttgaggcctgcagggagcacttgggtgtgcatccctgtgataaaaggaggagcattacagaataccgcgctctctttcctgccattgatttttcgctgatagagaatgatgaagatgtactttgggaaccaaatgtcagagaagcaaattcatctgtcgcagctaggggcatgaagttcattgactggttatggacaagggaagagaaagagatagctattgtaagccatagtggattcttatatcacaccttaagcatgtacagcagggagtgtcatccaaccataagagaagaagtgggcaagcactttgccaactgtgagctccggtcgatggtgttggtcgatacaagcatgcttgggtctgattcccccagttacaactaccctggaagtattccagctggacttgatcttcctagtgatgctgcaccttgagcaaattcaagacctgtgttagagattgttaccgtgcattggtgccttgattatttttcccagccc

SEQ ID NO: 410054 - DNA, 511 bp, Oryza sativa
tattgatccggcctacagcttgcctgataatgttgcattgcttactcttcaggaacttgaagacggaactgttcttcttcggttggctcacctatacgaggctggagagcacaaggatctttcagctctagctagcgtcgacctgaagagagtatttccagacaagaagattgtcaagattgttgagacaagcctatcagcgaaccaagaacgttcagccatggagaaaaagaggctgaagtggaaggtggaaggccctcctgctgatgaaaagatcgtccggggaggccccgtagatccttccaagctcgtcgttgatctgggccccatggagatacgcacattcctcatcaatttcgccccgcagtccggcaaacagttgatgtgaggggtgacatggccttggcaccaatgttttatttttagcttgagttcttctcatggtgatgagcaataagaaataatgtggccatggtgattggtgacccgatgcagagatgcactggtagca

SEQ ID NO: 410055 - DNA, 441 bp, Oryza sativa
ttcttgctcgtcgccaagacccccttcctgggtgattccctgccgtacagtgccctcctacgggacatagacgccgacgtcaccggacgaatcaccatgagcaaggagctggggtacgggcctgacagggtgaaggacctggggccattctcggagcagacgccgtctgacctgaggggcgagtttcgggacgactacgggtgggacacggcggggctctacggggacccggaggcgttcgcgaggcacagggccctggaggcgatccacggccggtgggggatgctcggcgcgctgggctgcatcacgccggaggcgctcagagaagggggtgcgcgtcgacttaaaggagcccgtgcggcctaaggtcagggcccagatattctccgactgaggactcgactacgttggcaaccccaacctggtgcacgcgcagagcat

SEQ ID NO: 410056 - DNA, 495 bp, Oryza sativa
tgaattggatgactgccatcgaggagatggctggcatggatgttctgtgcagtgacaagaccggaaccctcacccttaacaagttgagcgtcgacaagaacctcgttgaagtgttcactaaaggtgttgacaaggaccatgttttgttgctggctgcaagggcatctaggacagaaaaccaagatgccatcgatgctgccatggttggtatgcttgctgatcccaaggaggcaagagccggtatcagggaagtgcacttcttgcccttcaacccagttgacaagaggactgctctaacatacatcgatgccgatggtaactggcaccgtgccagcaagggtgctcctgagcagatcctgaccctgtgcaactgcaaggaggatgtaaagaggaaggtgcatgctgtgattgacaagtttgctgagcgtgggcttcgttcttttgctgttgcagacaggaagtacctgagaagtcgaggagtctgctggtgaccat

SEQ ID NO: 410057 - DNA, 509 bp, Oryza sativa
tctcattccagctttgcgcacggtgggtaacatcgtcactggggatgacatgcagactcagtgtgtcatcgatcatcaagctcttccatgtctcttgaacctcttgaccaacaatcataagaaaagcatcaagaaagaagcatgctggactatctcaaacatcactgctggcaatagggaacagattcaggctgtgatcaatgcaaacataattgctcctctagtacatctgctgcaaactgctgaatttgacatcaagaaagaggctgcgtgggcaatctcaaatgccacttctggtggaacacatgatcagattaagtaccttgttgcccagggttgcatcaagccactctgtgatctgcttgtttgcccagatcccaggatcgtgacagtttgcttggaaggtcttgagaacatcttgcaggttggagaggcagaaaagaaccttgcggcaggggatgtcaattcctatgctcagatgattgatgatgctgagggactggagaaga

SEQ ID NO: 410058 - DNA, 519 bp, Oryza sativa
tgtgaccgagcgcgccggacgccgtcgtcgttaattaatcagccatggatccctacaagcaccgcccgtcgagctcgttcaacggcccgctgtggagcaccaactccggcgcccccgtatggaacaacaacaactcgctcaccgtcggctcccgaggcccgatccttctggaggactaccacctggttgagaagctggccaacttcgacagggagcgtatcccggagcgcgtggtgcacgcccgcggcgccagcgccaagggcttcttcgaggtcacccacgacatcacccacctcacctgcgccgacttcctccgcgccccgggcgtccagaccccggtcatcgtccgcttctccaccgtcatccacgagcgcggcagcccggagaccctccgcgacccgcgtggcttcgccatcaagttctacacccgggagggcaactgggacctcgtcggcaacaacttccccgtcttcttcatccgcgacggcatgaagttcccggacatggtgcactcgctca

SEQ ID NO: 410059 - DNA, 522 bp, Oryza sativa
tgtctagagctcttgatggctccaattatgtacctggaatggttggtctaaacaacatcaaggagacagattttgtgaatgtcacaatacagtcattaatgagaattactcctttaagaaatttctttctcatccctgaaaattatcagcatagcaaatccccattggttcatcgatttggagaactaactcgcaaaatctggcatgcgaggaacttcaagggccaggttagtccacatgagtttctgcaagcagttatgaaggccagtgataagaggttccagattggtgttcagtctgatccagtggaatttatgtcatggctcttgaacacaatgcactcgaaactaaaaagtaggaagagaaacagaagcatcatacatgattgctttcagggagaacttgaagtagttaaggaatttcacaagatgcatattgtggaaaagaaagaggatggcgatgaacagaatggtgatgcaggttcagatattgttactgaaacatctagggtcccatttttga

SEQ ID NO: 410060 - DNA, 524 bp, Oryza sativa
tctttcccacatcctcctccgccgccggctgcttcccaccggctcccgatctccgaggcaagcagcgccgcacccggccgccgccgccgccgccatggcgttcgagaagatcaaggtcgccaaccccatcgtcgagatggacggtgatgagatgaccaggatattctggcagtctatcaaggacaagcttatctttccatttttggatctggacattaagtactatgacttgggagttctccaccgtgatgcaactgatgacaaggtcaccgtggaggctgcagaggctactctcaagtacaatgtggctattaagtgtgcgacgattactccagatgaggctcgggttaaggagttcaacctaaagcaaatgtggaagagccccaatggcacaattaggaatattatcaatggcactgtattcagagagccaattatatgcataaatgtcccaaggcttgttccaggatggactaagcccatttgcattggaaggcatgcttttggtgatcagtaccgagcaa

SEQ ID NO: 410061 - DNA, 481 bp, Oryza sativa
  unsure (1)..(481): unsure at all n locations
ttgtaaaaaaagataattaacttaatactacgaagggttttctcttttcattatgtttctaacaatttttttccctgttcttaaaaaaatgggagaacgaatttcttatatgagccataattgcaggctatacataatgcagagaagggagagccagctgccttgctactttcacctaggatagcatcagcaatgcctggtgtggaatccacgagtaatggaagccaatttacgtacttcctcacagctccaatgcaagccttctgccaattagctgggataacttctgacatagacagcgatacatatgctaacgcggaaatcatacttttctccgctttggaacaatatgaaggaatcctctgcacatctgttggattgaacaacgtctggggacaaattttaccagatccttttctcaggcgcctgatcgtcaggtacctttttccatatatctncacattcaatgttttgactatct

SEQ ID NO: 410062 - DNA, 444 bp, Oryza sativa
ttctagctccgccctccaatcccccgccacccaccgatgataccccgtctacaccgtgccattgcccgccgatcactgctaacctccaccgccctcctccccgccgtcgcccgccaccgcgatgcgccgctgccctccgcccccggcctcccccgtctgctccaccacgcgccgggggcgtccgatcaagcccggaaatcaggtcctcttacgctctacagggatctggtgagccaagggaaactccaacatgacatctaccaggaaaatgtagcaactcagctggacaacttacttagacgacttgagcaatacgagatggaaatggaggattaccatgcaagactctctatgtgggaaaatacccgggagaaacaaaggcgaaggcttcttgttcaagaagctgaggatacacagcgtgatggggtgctggtagatgagaaa

SEQ ID NO: 410063 - DNA, 367 bp, Oryza sativa
tagctgcggcaaagcaagtgatctctttagctcggatcatctctgcatttgcatttgcagctgctcgtcacggcaatggcatccaccaacagctggacccacgagatcgagtcgccggtggccgcgccgcgcctgttccgcgccgccgtcatggactggcacacccttgcccccaagatcgcctcccacatcgtcgccagcgcccaccccgtcgacggcgacggcagcgtcggcagcgtcaggcagttcaactttacctcagtcatgccattcagccacatgaaggagaggctggagttcctggacgtggacaagtgcgagtgcatgtcgacgctggtggagggcggcggcattggcaaggcgatcg

SEQ ID NO: 410064 - DNA, 394 bp, Oryza sativa
ggtacatggagatgccatctcaattctcaagctaggatggtaaaaaaatccacaatacagttcaacacaacagggccaacagctaacaaagaagcaagacatgattcatgcgaaacatacagttcaacacaacagctagcaaacaagcacgactaactcattacatttatataataccatgatgatacacgaaggatgcatagaaccggacggaatttctcctgtcctcaaagagatgaataaggcggtaggtgccccttctcccgtaggcatatcagtgtgttgtacaaactttcttttatgggggtgaatgtgaggcccaagtctcttagcctttgattagagaacttgaaaggttggaccatctgcttgctgtcttcacacttgttacagg

SEQ ID NO: 410065 - DNA, 457 bp, Oryza sativa
tcacaaaatcaagcagctttattgtgcatttctctagctagctgtcgatgatggctaaggctgaagggggcaaaatggtatgtgtgacaggagcaggaggcttcattgggtcgtgggtggtgaaggagctcctgatccgtggctatgccgtgagaggaactgcaagagatccatctagtcaaaagaactcccatttgcaaaaacttgaaggagccaaagagaggctcagtctgaactatgcagatgtgatggactttgatagtctttctgttgcatttaatggatgtgaaggtgtattccatgttgcctcacctgtatccgttgatccgcgacttgtgcccgttgctgttgaaggaactaagaacgtgatcaacgctgcagcagacatgggcgtacgacgcgtggtgttcacatcaaccttcggtgctgtacacatggacccaaataggagccatga

SEQ ID NO: 410066 - DNA, 440 bp, Oryza sativa
ttattcagaaaagaagtcgatgatgccattgcgaaagcaaaggagagtcctatgcctgatacttctgagctctttacgaatgtatatgtcaagggttttggtgtggagtcatttggggcagacaggaaggaattgagagctactcttccataggctgacaacgagaagatggcggcattatttcttctaatatgatatgatagcctggagaaataagcattggtgaagaagtcctcaggcatttctgccattctttgttgcaaaaatgaacctgtatagagatgcgtcaggaagaatcgcaccatatttgtttttgcttcttttccttttctgcaattcatctaaccgctgttgtcaggcttcaaattcaagctcgagactctgcctgcgtgattgctccttttccgaagaaaatgttcaagattatacatctagagtat

SEQ ID NO: 410067 - DNA, 324 bp, Oryza sativa
  unsure (1)..(324): unsure at all n locations
tatcaatcgtgtattcgtgtggttaatttcactgagaatagaaggggttcgttatatcacacaaattgatacgctgagacacgcataggcgccgaagcgaccagctgcttaattaatcgataacacacgggtttaattcagcaataatcagcacacacacaaaccacactcatatgggtggtttttattgtggactaattaaggtaggtgactcgccggcggcgagtgttcggttgcttagtgacttcacttgccgcnctttttttggttattttaggcgaacaagcacggtgttcacgaaagattactttcgcttaaaattga

SEQ ID NO: 410068 - DNA, 513 bp, Oryza sativa
tgattttggtagtgcattttcgggtatattgacggatgagcaaggaagagttcaagcattatgggcaagcttttccacccagctgaaatatggttgtagcagttcggaggatcatcaatttgttagaggtataccaatatatgcaataagtcaagtccttgagaaggtaatctctggtactcctggaccatttcgtattatcaatggagttaggaggccaataccattcatcagacttctggaggtggaactctatccaactttgctttcaaaggcaagaagttatggattgagtgatagctgggtgcaggctctagctaagaaggaccctgtgcgaagacaagttttgcgggtcaaaggttgtttggctggatccaaagcagaaaatctccttgaacagggagacatgatccttgctatcaataaggagccaattacatgcttcctagatatcgagaatgcttgccagaaattggaccaatctgttgattcagatggagtccttaacatgac

SEQ ID NO: 410069 - DNA, 426 bp, Oryza sativa
ggctgtagcactagcgtgcccatatttatattccaagcctccaaggtatacaatacatatttgatgtaccgaacaactgaaaaaggcgcttggtttggaagcgcactatttttaaatttataggataacttctgacagcctttcttctaaatgaacttttggcaaccgctctgaagccgtgtaacacaatccaacaaagcaatttgcagtcaaaatttcgggcatgtgccgttctagttagaatttaggatgtgactcactaagtaattgtgattgtttctctatgcaaacaccagccaacagtattgatttcatcatgcataatctggcatgaccttcttgaggaatttaattggttgggattcctcaggcgcaacctcatcaaagggaacatagtatctatccttgtcgtaaacatggcattta

SEQ ID NO: 410070 - DNA, 514 bp, Oryza sativa
tagcagttacggggttctttgtcataggtcatgattgtgcccacaaatcattttcgaggaataagctggtggaagatattgttggaactctagctttcttgccattgatatacccctatgaaccttggagatttaagcatgacagacatcatgccaagacaaacatgttgatagaagatactgcatggcaacccgttttttcaaaggagttcagaacaaattccttactgaggaaagcaatgatatttgcttatggtcctatcaggccatggatgtctattgctcactggtatttctttttcgaacaccttttcatataacatggacatcttctttaggaattattttccttcaacttgttcaagcaatatcattgctgttcactacgattgcttgtcaggttaatttggcactttgatctaaaaaattcagaccaaatgagcttcccagggtgaaaataagcttagcatcttgtgtagcgttcatggcaattggatggccactgattattctc

SEQ ID NO: 410071 - DNA, 546 bp, Oryza sativa
tagaggatcgagaacaagatcaaccggcaggtgacgttcgccaagcgcaggaatggcctgctcaagaaggcgtacgagctctccgtcctctgcgacgccgaggtcgccctcatcatcttctccaaccgcggcaagctctacgagttctgcagcacccagagcatgactaaaacgcttgagaagtatcagaaatgcagttacgcaggacccgaaacagctgtccaaaatagagaaagtgagcaattgaaagctagccgcaatgaatacctcaaactgaaggcaagggttgaaaatttacaacggactcaaagaaatttgctgggtgaagatcttgattcattaggcataaaagagctcgagagcctagagaagcagcttgattcatccctgaagcacgtcagaactacaaggacaaaacatctggttgaccaactgacggagcttcagagaaaggaacaaatggtttctgaagcacatagatgccttaggagaaaactgaaggaagcaaccatgttcctggcagcaaggggggagcagggctgaact

SEQ ID NO: 410072 - DNA, 387 bp, Oryza sativa
cgcatttgcagttgcagagcaagaagcagagagagaagaagaggactcaatggaggaggagtccaagaattgaagcaggagaagaggaggtggtggtttgattcaagaagaaggagaagagcaagagcaaggatgttgcgaggagggacgagcttgctggggatcgtcaacttcgtgacgttcctgatctcgatcccgatcctggggggaggaatctggctggcgtcgagggccaactccaccgactgcatccgcttcctgcagtggccgatcatcgccatcgggctcgccgttatggtggtgtccctcatggggttcgcgggggcgtgctaccgccagacgtggctgctccgcctctacctcttagccatgttcttcatcgtcgtc

SEQ ID NO: 410073 - DNA, 365 bp, Oryza sativa
ttaaaatcgcagagaaaaaaaaaatctcccctcgaagcgaagcgtcgaatcgccttctcaagatgcagatctttgtgaagaccctcaccggcaagaccatcaccctcgaggttgagtcctcggacaccattgacaatgtcaaggccaagatccaggacaaggagggcatccccccggaccagcagcgtgtcatctttgctggcaagcagcttgaggatggccgcaccctgtgcgactacaacatccagaaggagtccaccctccaccttgtgctcaggctcaggggaggcatgcagatcttcgtcaagaccttgactggcaagaccatcacccttgagggcgagtcgtctgacacccttgacaat

SEQ ID NO: 410074 - DNA, 503 bp, Oryza sativa
taaaccccactttattagcaccaaccccgtctccttcctccattcctccgccgctagaaccttctagaagctctcctcctcctcccatggcggcgacgatcgtgtccgtcaaggcgcgccagatcttcgacagcaggggcaaccccaccgtcgaggtcgatgtgtgctgctcagatggaacctttgcaagggctgcagttcccagtggtgcatcaactggtgtctatgaagctctcgaattgagggacggtggatctgattacttgggaaagggtgtttccaaggctgtcgacaatgtgaactcggttattgccccagctctgattggcaaggaccctacgtcacaggctgagcttgataacttcatggttcagcagcttgatggaaccaaaaatgagtgggggtggtgcaagcagaagcttggtgctaatggcatcctggctgtgtcactggccatttgcaagctggagctatcatcaagaagattcctctgtaccagcaca

SEQ ID NO: 410075 - DNA, 470 bp, Oryza sativa
ttatggttgcagttgctaagctcatgaatgcaacactagtaatccctactctggatcacaaatcattttggactgatccaagtgatttcaaagatatatttgatgtggaacacttcaagaaaactttagagggtgacatttcgattgtggattccttgccactagcttataaaggattgaaactttatatgagagcacccacttcttgggccaaggcttcttactacagagctttctcaaggacactgaagaaggccaaagttgtgaaattcacacatacagattcacgaattgttaacaatggtcttgccccatccatccaacgactccgttgtcgggcaaattatgaggcactaagattccacaaagaaattgaagagctgagtactgctctagtagatagactgaggaatggatccaatcattatatcgcactttacttaagtatgagaggacatgctctcatttac

SEQ ID NO: 410076 - DNA, 450 bp, Oryza sativa
cagaaatttccggcgatgaagaaggagacggcggcggtggcgaaggaggaggtgtgggaggtgcggcccggcggcatgctggtgcagaagcggagcccggagtcggagccaccgccgggcggcgcgccggtgccgacgatccgggtgaaggtgaattacaacggggtgtaccacgagatctacatcaactcgcaggcgtccttcggcgagctgaagaagctcctgtcggagaagacggggctccaccccgacgaccagaaggtggtgtacagggacaaggagagggactccaaggcgttcctcgacatcgccggcgtcaaggaccgctccaagatgctcctgctcgaggaccccaccgcccaggccaagcgcctgctcgaggagcgccgccattgcaaggccgagcgcgccgcaagtccgtctcccgcgtcgcctcgacgtcgacagctc

SEQ ID NO: 410077 - DNA, 380 bp, Oryza sativa
tgccatgtacctgttctctgtccttctatttggagccttggccacaagagaagagcttctaactgataggcttcttactgctacagtggcatggcctgctccagcagtgatttatattggtattattttgtctactttaggcgcagcactgcagagtttgacaggggctccaagattactggcagcaatagcaaatgatgacattcttccagttcttaattacttcaaggtttctgaaggggctgagcctcactcagccactttattcacagctttcatttgtatctgctgtgtggttattggcaacttggatttgattacccccaccatcacaatgttttttcttctgggctatgctgggtgtgaccctgtcatgcttt

SEQ ID NO: 410078 - DNA, 542 bp, Oryza sativa
aggggacggagagggagtgggtggattgggaggacctcatcctcgaggacaccgtgccgctcgtcggcttcgtccggatgattctgcactccggcaagtatgaaaatggtgatcgactgagccctgaacatgaaaaggcaattttggaacgattgcttccttatcacccacaatatgagaagaaaattggatgcggtattgactaccttacggtagggttacatccagaatttgagaactcaagatgtcttttcatagttaggaaggatggtgagcaagttgatttttcattctggaagtgcatcataggtctcataccgacaaaagtaccccatgtatgcagataggttcattctcagacattttcgcaggaggcatgattaccgaattagtgactcgtaaaattatttcttggaacatttctctgattttgatttggcccatttgcccttaatgccctgtgatcttgcataccggtaagcacacctgggaaggttcccgttctacgtatcttgttgggcctcatccaatttccttcttcc

SEQ ID NO: 410079 - DNA, 467 bp, Oryza sativa
tgtcctcaaggcgaacggcctccatcttctccttccagctcctcccatggcgtccctcgtcgccatcgccatcgccatggctctcatggtggttcaacctggccggcagatgactgcctttgctgctcggacgtcgccggcggcggcggcggaggcgttctggcgtgccgccatgcccggcgctcccatgccggacgccatcgtcgagctcctccaccatgagcacggcgttgctagcgccggcggcaaggccaacggcggcggcgacggtccaccgccgccgatgaacttcaactacgacgactacagggccctgcctcggagcgacgccccttccccggatgcattgaaccgcgtcgccgccgtacagaacgccgacgagaacggcgtggtctcgtcgtccgccgtcgtcgccgacggtgttctgtctcgaggacgccgtgcgcgtcggcgagagcctgccccta

SEQ ID NO: 410080 - DNA, 445 bp, Oryza sativa
ataattaattcacaacaccatatttcattgatcaggttcagaacctgcacagaaatacacactaccggtacagatctcaccttctttccaatactcgtacatccatccacgcggtccacacgaatacgtacatctatacggtacacgtacgtacatctactggaccgggtacacacacgcacacttttctgcagagacgcgcatcgtcgtcaacctagctagcttagctgaaggcgatgcgtcgccatggcagcacggcggcggcggcgctcacttgccggggacgaagttggtggcgtaggcccaggcgttgttgttgacggggtcggcgaggtggtcggcgaggttctcgagggggcccttgccggtgacgatggcctggacgaagaagccgaacatggagaacatggcgaggcggccgttcttgatctccttcaccttgagc

SEQ ID NO: 410081 - DNA, 506 bp, Oryza sativa
acaccccagcagcagcagcagcagcagctgagcttgaagcagcagagcgaggtagacatggccgccgccaccatggccctctcgtccccggcgctggccggcaaggccgccgcgaaggtgttcggcgaggggcgcatcaccatgcgcaagtcggcggcgaagcccaagcccgccgcgtcggggagcccgtggtacggcgccgaccgcgtgctctacctcggcccgctctccggcgagccgccgagctacctgaccggcgagttccccggcgactacgggtgggacaccgcggggctctccgccgacccggagacgttcgccaagaaccgggagctggaggtgatccactccaggtgggcgatgctcggcgcgctgggctgcgtgttcccggagctcctcgcccgcaacggcgtcaagttcggcgaggcggtgtggttcaaggcggggtcgcaagatcttcagcgagggcgggctcgactacctcggcacccgagcctgatccacgc

SEQ ID NO: 410082 - DNA, 388 bp, Oryza sativa
tttcttagctcctcgccgccgcattcgatccgacaaggaagggaagcgagagctcgaggtcaccctcaccggcggcgagcgatgggccactccaacgtgtggaactcccaccccatgaactacgggcccggctcccgcgtctgccgggtctgcgggaaccctcatgggctgatcaggaagtatgggctcatgtgctgcaggcagtgcttccgcagcaacgccaaggatattggcttcatcaagtaccgctgaaggccattttgcctcgccgttgagcctgagaactccgtctgaaccagagaaatggatcttttagtataatactacatttatgtggtttagctttcgttcggagtacccgttctattaaacatgtttaagttttgat

SEQ ID NO: 410083 - DNA, 320 bp, Oryza sativa
ggcgaagtgatcaactgcaattcccaagtgatcagattagacaacaggatggtgttctttggtactttccaggtgattttttcctgggaccgcatcaaggaaaacaaaataacaactggcatacttgtgaagcaccgaagtgcccccaaagactgcgattttgtggaagctctgcccaaggcaccttttgaaacaagtttcacatgatcgtggaggattcttctttgcgcccttgcacttgcacggcctagttgaccaccccctgtaaattggtttgctgaccgctaggttgctatttgcagaggcaagtgaagacacac

SEQ ID NO: 410084 - DNA, 548 bp, Oryza sativa
tgctcggcccattccaaatatagcacttagagcagaattcattaagatttctacttcacctttattatcagagttccttggctggatgcttcaaaggtgccaagaagcagagggattaacagctctggcagatgataatgctcttctcaaggtatcacagtccattaatgcagctcgataccttgagtccacattgacagaatggtgcaatgatgtattctttcttgagatggaaaatatagatggccgtagcgaatgtatcttccaagtggagataaatcaactgaaagattttagagtacaatggactgaaaagatttctaccgtcattttaagggattttgatgcccggtcaagggattatctgaaaaataaaaggcagtggcaggagaaatcagaagggttaacattatccagggcattcggagaatgtttagactacatgcaaggacggatagctaagctggaagatggtctaaatgtcctggatttgtgactgtgtgagaactgtggcatgtgagtaaccagctgctttttcttgaattttc

SEQ ID NO: 410085 - DNA, 416 bp, Oryza sativa
agctgtccgacggcgagcattctggtgaaaagagaagggcgcaggcgaataaatcggcagctactaaagacaaagcaggaagtagcagcaagaacgcaggcattggagacggtttcgagacacagctactggggggtgcacacatgtccaaagatcaagaccaagccatggatctgggagaggtggtgaaagaagctgtagatcccaaaggtaaggcatcgatgcagcagcagcagcagcaagcacatcatgggattcatcagcagagccaccagcagcatggcttccctttcccttcgtcgtctggctcgtgcttattcccttagagccaaggagctgtctcgagcactgacacatcaaatataggtcaagtgccagaaccaagcttagcctttcatcaggagcatcaccaacac

SEQ ID NO: 410086 - DNA, 429 bp, Oryza sativa
tccttttccactctctcctctccccttcgtggcggcggcggcggcggcggcggcgtgacgaggaggagcaatggcgatggcctcctgcgcctacgccccagcgggcggcgttggcacccactccgcgccgggcaggatcaggccgccgcgcggtcttggcttctccaccaccaccaccaagtcgaggcccctcgtgctcaccaggcgtgggggaggcggcggcaacatctccgtggctcggctgaggtgcgcggcgtcgtcgtcgtcggcggcggcgaggccgatgtcgcagccgcggttcatccagcacaagaaggaggcgttctggttctaccgtttgctctccatcgtttacgaccacgttattaacccgggccactggacggaggacatgcgggacgacgccctcgagcccgccgacctttacag

SEQ ID NO: 410087 - DNA, 440 bp, Oryza sativa
ccggcgctccggcatgccgctcgacgcgctggtgtgcaacgccgccatctaccggccgacggcgcggcagccgacgttcaccgccgacgggtacgagatgagcgtcggggtgaaccacctgggccacttcctcctcgcccgcctcatgctcgacgacctcaagaaatccgactacccgtcgcggcggctcatcatcctcggctccatcaccggcaacaccaacaccctcgccggcaacgtccctcccaaggccgggctaggcgacctccgggggctcgccggcgggctccgcgggcagaacgggtcggcgatgatcgacggcgcggagagcttcgacggcgccaaggcgtacaaggacagcaagatctgtaacatgctgacgatgcaggagttccaccggagatttcacgaggagaccgggatcacgttcgcgttgctgt

SEQ ID NO: 410088 - DNA, 537 bp, Oryza sativa
ttccatccgttcctccgatcagttccaacttccaacctccgatcccaacgagaaaaccaatactgacacctctgcctcgcaacgcggcgcgcggccgtgcagcgatcgatcgaccggccggagtccggcatgcaaatgggagctgcctggcgcgggcggcggcggcggtgatgggcgcggcgagctctaggctggagaaggcgctgggcgagcagttccccgagggcgagcgctacttcggcctcgagaacttcggcaacacctgctactgcaacagcgtcctgcaggcactttacttttgtgttcctttccgtgagcaattactggagtactatgcaaataataaaagcaccggagatgtcgaagacaatatgttaacgtgcttagctgacctgttctctcagatcagcaaccagaagaagaaaacaggtgttatcgctcctaagcgtttcatacaacgactggagaaacaaaatgagatttttcgcagctatatgcaccaagatgcacatgaatttctgaattttttgttaatga

SEQ ID NO: 410089 - DNA, 500 bp, Oryza sativa
tctcctcgcagcttcctcttgtttttcttggccgaaccccccctcgacacgccgtcgccgccgaggggagagagagagaggccgccggccgccgctaccactgacccccccccctcgccggagcgccccgtcgccggtcgggtttgatcgatggcgtccaagaggatcctgaaggagttgaaggacctgcagaaggaccctcccacctcatgcagcgcaggtcctgtgggtgaggacatgttccattggcaagctactattatgggaccctcagacagcccatttgctggtggggtattcttggtgaacattcatttcccaccggattatccttttaaaccaccgaaggtctctttccgcaccaaggttttccacccgaacattaatagcaatggcagcatttgcctcgacatcctcaaggaacagtggagtcctgcacttaccatatcaaaggtcctcctgtcaatttgttcactgctgacggacccgaacccgatgat

SEQ ID NO: 410090 - DNA, 453 bp, Oryza sativa
ttttgttttttttttttttttttttttttttttttttttttttttttttttttttttttgggaatccaggaaccgggtggggtttcttccccctttggtttggatacactatatatacaggtatgctaagttgctaactatggaaaaatgtttttggataaagaacactgcagcatatatgaaactacccagggacagccggggttgaaagcttaggcaacccactttggccattcagaacaattacctttcccttcgaatccacattgacaatgggggaatcgcccttctttacctccccaggtaggattttttccgggagggtgtcctccaggagcctaatgatggcccttcttagcggcctcgcaccatagcttgggttgaagccttcggcgacgatacccttcttgaacttttgggggacctggagacaatgtccttggccttgagcct

SEQ ID NO: 410091 - DNA, 408 bp, Oryza sativa
tgattgatgaagcaggttcacgtgtaaggcttcgacatgcccaggttcctgaagaagctagagagcttgacaaggagctcaagcaaatcacaaaagataagaatgaagctgtccgtagccaggacttcgaaaaggctggagagttacgtgatcgtgaaatggaattgaaggcccagataacagctctcattgacaagagcaaggagatgagcaaagcagagactgaatcaggggagacagggccactggtcaatgaagcagatatccagcacattgtatcctcgtggactggtattccagtagagaaggtatcaagtgacgagtccgataagcttcttaagatggaagagactttgcatcagcgtgtcattggtcaagatgaggctgtgaaagccataagtcgctcca

SEQ ID NO: 410092 - DNA, 448 bp, Oryza sativa
tcttgctgggaaccagtttgctggaaatgtgccatactcaatttccacaatgcctaaacttaagtatctaaaccttaatcataaccaattacaaggaaatatgacagatgtcttttccaaccttccaagtttatcaacacttgatctctccttaaattctcttactggtgatctcccacaaagtttcacttctctgtcaagcctgaaaactttgtatctgcagaacaaccaatttactggatcaatcaatgtccttgctaatcttcccctggataatttaaatgtgggaaacaaccgttttactggttggattcctaatgagctaaagaaaataaatagtcttcaaaccgatggcaattcttggagcacaggtccggcaccaccaccaccaccattcacagcacctccaccatcacgcaaccgtaaaaaaagcccaggcagacactcc

SEQ ID NO: 410093 - DNA, 430 bp, Oryza sativa
tcctttctgaacacagcaccaccccttctgctgcatctcccacctccctctgaattgtgggcctgaggcgatggcggcgctcgccccgtccaagatgctcggcacccggctcaacttcgccggctcctcccgctacgccaccgcggcaccgaccaccggagcgcagaagatcgtctccctcttcagcaagaagcccgccccgaagcccaagcccgccgccgacacctcctcgagccccgacatcggcgatgagctcgccaagtggtacggccctgacaggaggatcttcttgccggagggactcctggaccgctcagaggtgccggactacctcaacggagaggtccccggagactactgctacgacccttttggcctcagcaagaagccagaggacttctccaagtaccaggcctatgagctgatccat

SEQ ID NO: 410094 - DNA, 488 bp, Oryza sativa
taaggatttctatacctctggagaaaaatggtgagatcccagtgccttacagaccagacgttaatgtgagtaagatcaagtttgagcagttctcctttgaggaagcaaccgcaacactccatttgaatcttgacaacaaaaatgactttgacctgggactgaattctatggattatgaagtgtggctctctaatgtgagcattgcttctgctgagatgaaagaaactacaaatattaagaagcaggaggtaacaaccatgaatttaccaatcagcttcaggcccaaggattttggctctgctatgtgggatatgataaggggaaagggaactggttacaccataaaggggcacattgatgtcaatactccttttggacacatgaaaatacctatatgcaaagagggtggaactaccccgctttaagagggagacgatgatgacgacgacgattaccaggagtaaaaggtgatagggattgagaatttt

SEQ ID NO: 410095 - DNA, 479 bp, Oryza sativa
ttgtctttgtccaagcgcccttcaaacccatctcctctcccctctccctcccaattcgatgcagccgcggtagcaattcgcatcgccccgccctgctcgccgcgcggattcgctcgccgcccccgccaccgcacccccatggacgcctgcgccggatccggcaatgcctccggtggcgccggcgccggcgcgtacgcgtgctgctactactccctgctcggcatccggaagaacgcgtccgccaccgacgtgcgcgccgactaccggaggctcgccatgaagtggcacccggaccggtgcgtgagcgaccccggcgaggccaatcgggggttccagcggatccaagaggcgtactccgttctgtccgacatggggaagcgagccatgtacgacgcaggcttgttgatcccctcgacgaccaccaccaggaattctccgatttctgcaagagatgctggtgatgatggattaccggaaaa

SEQ ID NO: 410096 - DNA, 367 bp, Oryza sativa
gcttacctaggctggtggatttatgtacaggatcttttgtacgaggcaatattgttggtgcatatgctgggctattcaatagttttcaacattgcagtttgctgaagagtttatctgggttttgggatgctacaagcttgtttattccagtgattgctcctgtttgcaagaatctaacgtgcttgaaccttagctctgctccaatggtcaggagtgcttatcttattgaatttatttgtcaatgcaagaaactccaacaattgtgggtgttagaacacattggtgatgaaagattgaaaattatagcctcatcctgtatacagctccaagagttgagagtatttcctgcgaatgcaaatgccagagc

SEQ ID NO: 410097 - DNA, 339 bp, Oryza sativa
taaatatcctactgggtatcttcctggtcggatggcacctcttaagaactttttttggaattatgtcattcgcttttgttgtacttgggatttattggttctatcagtacatgaagttttggcgtgaagttctgccactgcaaaactgtattactcttgtcattacattgggcatgcttgagatgtcattgtggtattttgagtatgctgagttcaacgagactggtgttcgaccaaagggcatcacattttgggctgtaacatttgggactgttaaaagaacagtagcccgggttattattcttattgtctcaatgggatatggagttgtcaggccta

SEQ ID NO: 410098 - DNA, 502 bp, Oryza sativa
tatcgtcctcgtcctcggcatcagcagcagcaagggaagggaaggattcgccgcccgcgaggtcgtcgcctccccttccggcttccgtccaggattttccatggacggcgcggccgactccggcacggcgggcgccgcggcggcggcggccaagtggcggaccgatgcctcgcgggcgttccagtactacctggaccgctccaccccgcacgccacggggcgctggatcggcaccctcgccgacgccgtcatctacgccctccgcgtttacctcgtccagggcttctacatcgtcacctacggcctggggatctacctgctcaacctcctcatcggcttcctctcccccatgggcgaccccgaggcccacggccgtgtcttcttcgacggggccgtccttcccaccctggggttcgacgagttcaagcccttcatcaggcgcctccccgagttcaagttctggtatgcaatcacaaaggctttcttatagcttttgtgagac

SEQ ID NO: 410099 - DNA, 504 bp, Oryza sativa
tacaccccagcagcagcagcagcagcagctgagcttgaagcagcagagcgaggtagacatggccgccgccaccatggccctctcgtccccggcgctggccggcaaggccgccgtgaaggtgttcggcgaggggcgcatcaccatgcgcaagtcggcggcgaagcccaagcccgccgcgtcggggagcccgtggtacggcgccgaccgcgtgctctacctcggcccgctctccggcgagccgccgagctacctgaccggcgagttccccggcgactacgggtgggacaccgcggggctctccgccgacccggagacgttcgccaagaaccgggagctggaggtgatccactccaggtgggcgatgctcggcgcgctgggctgcgtgttcccggagctcctcgcccgcaacggcgtcaagttcggcgaggcggtgtggttcaaggccgggtcgcagatcttcagcgagggcgggctcgactacctcggcaacccgagcctgatcca

SEQ ID NO: 410100 - DNA, 406 bp, Oryza sativa
tcaaccgccgccgcatcgccctcgttagaacgatggccgcgtcggcgctgcaccagaccaccagcttcctcggcaccgcccctcgccgggatgagctcgtccgccgcgtcggcgactccggtggccgcatcaccatgcgccgcaccgtcaagagcgcgccccagagcatctggtatggacctgaccgtcccaagtacctgggcccgttctcggagcagacgccatcgtacctgaccggagagttcccgggagactacgggtgggacacggcggggctattggccgacccggagacgttcgcgaggaacagggagctggaggtgatccactcgcggtgggcgatgctgggggcgctgggctgcgtcttcccggagatcctgtccaagaacggggtgaagttcgggga

SEQ ID NO: 410101 - DNA, 475 bp, Oryza sativa
taggttgtggatgcgctttgtgacgttgtttcagcctgaccgaccaaggcttcagctgctatcgttctgcaggccgagaaggacttgcagccctggattgctcgagatgatgagcaaggtcagaagatgtggagagtcaaccagcgaatagttaagctgatagcagagcttatgaggaaccacgatagcccagaagcattggtgatccttgctagtgcttcagatcttcttcttcgagcaactgatggaatgcttgttgatggtgaagcttgtactttaccacaattagagctattggaagtaaccgccagagcagtccatctcatcgtcgaatggggagattcaggtgtatccgtcgctgatggcctctccaatctgctgaagtgccgtctatcaaccaccatccgctgtctttcgcaccccagcgcgcatgtccctgcactcagcatgtccgtccttcgcgacatcttgaaca

SEQ ID NO: 410102 - DNA, 52 bp, Oryza sativa
tgggcaatgcacctgtataaatttgtcacgtgcataagaaatttcacgatcc

SEQ ID NO: 410103 - DNA, 413 bp, Oryza sativa
tcaaaggtggagactgcgattcacttccactcccttccccactgccttcctcctctcactctcactccccctgcgaccgccgccgagaggccatggcggagcaagctccactggcgccgatgcctcgagtcaagctcggcacccggggcctagaggtgtccaagctggggttcgggtgcatggggctcacgggcgcgtacaactcgccgctcgacgacgacgccggcgccgccgtcatcgcgcacgccttccgccgtggcgtcaccttcttcgacacctccgacgtctaccgccccctcgccaacgagatcctcctcggcaaggcgctgaagcagctgccgcgggagcaggtgcaggtggccaccaagttcgggattcggcggggcgcccaccgcgtgcgcgccgtgtgcggc

SEQ ID NO: 410104 - DNA, 491 bp, Oryza sativa
tgggaaagtctggacagcaaggcgctgcgaaacccaaaggacctcttgaggcacttaggccaaagttgcagccaacacgacaacagcagcagcgttccaggcgcttgattaacacctcatcagaaaacgaggatggagacggtgctggtgctgaggatatgaacatcaactgacctgctcagggagtgttctgttgggaacctcatgattcaaagcagctcattgttcgtggatcgcagggaaggatatgatgtctttgatgtttccatagatatgaaaagaaatgttgtatttttcaaagaccgatgttaattcatcgcacagcttacctatatctgtgccaaatttcagcatagactaaaccattgtttgcatactgggttgcactccagtcgtgctacggcctattttgcaatggatattttaaacaagtttgtattggacaaaacagtggcaaatctacagtgttctagatgggatcatcctatgct

SEQ ID NO: 410105 - DNA, 468 bp, Oryza sativa
taacaaccttgcactgatccacacacagccgcgaggagagagaaagagagaggagagagagatggcggcggagctgacggcggcgcagctgcgggcgtacgacgggagcgacccatcgaagccgatctacgtctccgtacgcgggaaggtctacgacgtcacctccggccgcggattttacggccccggcggcgcctacgccgtcttcgccggccgcgaggccagccgcgcgctcggcaagatgtccaaggacgacgccgacgtctgcggcgacctctccggcctctgcgacaaggagctcggcgtcctcgccgactgggagaccaagtttcagggcaagtaccccgtcgtggcccgccttaccgaatgaaaaaaaaaaatccccccaaatcaacccttagattattgtatcctcttgtgctctacagcttaattccatccgtaattccatgtgtgacttattattac

SEQ ID NO: 410106 - DNA, 385 bp, Oryza sativa
ttggacgcgtggggccgacatacactgctattacccaacatgcaaagaatggtaaacctgccctggtgtttgtgcctacacggaagcatgcaaggttgactgcattggacttgtgtgcatactcgagtgctgagggtggcggaacacctttccttcttggttcagaagatgagatggatgctttcactggtggtatcagtgatgaaacacttaaatatactctgaaatgtggtgtaggctacttgcatgaaggtttaagtgatctggaacaggaagttgtaacgcagctgtttctcggtgggaggatccaagtgtgtgttgcgagtagcaactgtgtgctggggaagatcattgcctgcccatttggtggttgtgaagggaaccc

SEQ ID NO: 410107 - DNA, 454 bp, Oryza sativa
ttttgtttttttatttattgtgttaaattgatttttatagcattagtaagcttattgttacaaattattaacatgaagatctcaaaatatagaacataagggagtaaacaaaactgaacaaccaaacaactacagtactgtacatgcctggaatcctacatgaggcgactgatctaggagaatgctgataagcatagatactgggcaagggaagggagcctgggcagtcagactcgcgggaagcgagaaggttctctccttccaaggaacttaggaatctcaatcatgctgccttgtgcagaggatgggcgtcgaccattgtctacttgcgtctgttggccacactttgtggtgcgaccttctggttcatcttgaccttccgagccagtggcaatcaaggttatgctcacttggccattgagcgatgggtctatgacagcaccaaatatgagat

SEQ ID NO: 410108 - DNA, 511 bp, Oryza sativa
tcgcaagcaaccagcgaaccctagctacagagagattcgcatcaaggaagaagacgagagaggctcatttgaattagagatagagatgaagcccaggcccttcaaggaggagttcaccttggaggagagggccaaggagtcggccgccatgatcgcctcctaccccgacaggatccctgtcattgttgagaaattttcgaggagtaatcttccagaaatggagaagcgcaagtacctggttccatgtaacatgccagttgggcagtttattttcatacttcgttccaggctacatttgtctccagggacagcgttgtttgtgtttgtcaacaacactttgccccagactgctcagctgatgggcagtgtgtatgagtcatacaaagatgagggcgatggcttcctctacttgtgctacagcagcgagaagacatttcggtgaccaacttcttcctggagatctgcttttacctcgggcatcaataatatatgcatgtatatatattactat

SEQ ID NO: 410109 - DNA, 457 bp, Oryza sativa
gcgagcggacatggcagcatcgctccaagccgcggccaccctgatgcagccggccaagctcggcggccgggcctcctccgccgcgctgccatcgcgcccgtcttcgcacgtcgccagggcgttcggcgtcgacaccggtgccgccggcaggatcacgtgctccctgcagtccgacatccgggaggtcgccaacaagtgcgccgatgccgccaagctcgccggcttcgccctcgccacctcagctctgctcgtctcgggcgccagcgcggagggcgtgccgaggaggcttaccttcgacgagattcagagtaagacgtacatggaggtgaagggaaccggcacggcgaaccagtgcccgacggtggagggcggcgtcgactccttcgccttcaaggccggcaagtacaacatgaagaagttctgcctggagccgacgttcttcaccgttaaggcggag

SEQ ID NO: 410110 - DNA, 471 bp, Oryza sativa
taattaaccaaagctaattaagctagctcaagctctaatccacatttagctagaatggcgccgtccaagtccacagccgccgccggcgtcctcctcgtcctgctcgtcgcggcggcgggcggcggcgcagaggcggcggcgacgacgtgcgtggcgtcgctgctggagctgagcccgtgcctgccgttcttcaaggacaaggcggcgacggcggcgccggaggggtgctgcgcggggctgtcgtccatcgtgaagggggaggcggcgtgcctgtgccacatcgtgaaccacaccctggagcgcgccatcggcgtcgacatccccgtcgaccgtgccttggtccctcttcgtgacgtctgccttctcttgccgccgtgggaccatatctcacctgcgccaaccagaaaggtggtgtgccgtcccttaactattgcccggctccatcggctgtgttttttcagaaatgatcaa

SEQ ID NO: 410111 - DNA, 386 bp, Oryza sativa
ccgtcacgccggagacccagcaggaccagatccgggcgctcaagcgcttcaacgtcggcgaggactgccccgtcttcgacggcctctacagcttctgccagacctacgccgggggatccgtcggcggcgccgtcaagctcaaccacggccatgacatcgccatcaactgggccggcggcctccaccacgccaagaagtgcgaggcctccggcttctgctacgtcaacgacatcgtcctcgccatcctcgagctcctcaaataccaccagcgtgttctctatgtggatatcgatatccaccatggggatggtgtggagggaggcgttctacacgacggacagggtgatgacggtctcgttccacaagtttggggattattttccggg

SEQ ID NO: 410112 - DNA, 426 bp, Oryza sativa
tgttttctccgccaccgagcgcatctcggcgtcggcggcttggggggagagtcagagatgcatctgagcgagaacgaggggatcgagggcgtgcggttcgcggtgacgggcggccagggcttcgtcggctccgcactgtgcctcgagctgctccgccgcggcgcccgggaggtccggtccctcgacctccgggccttcttcccctggtccgaccagctgctcggcgccggcgtccgcttcttccaaggggatgttagaaagaaggaagatgtggggaaggctttgcgcggtgtggactgtgttttccatctcgctttgtatggcatgtcagggaaggaaatggtacaggctgggcgagccgacccaggtcaatataaatggtacatgcaatgtgctggacgcttgccaccagcattgcgttagaag

SEQ ID NO: 410113 - DNA, 487 bp, Oryza sativa
tgggcgccgccgttgatgtcgcagcagcagaaggcgccggctcccacttacccgccgtaccggcaggtgagggcgtgtaccccgcacagacgcgccgtctcgtgcgtgaggttctccccatgcgggcgcctcctcgcgacggcgttcctcgacggcacggtcgcgctgctctccccgtggtcgctcgccgccatcgccaccctgcgggggcacgccgacggcgtgtccgacatctcctggtccacggactcgttctacctctgctgcgcctacgacgaccgcacccttcgcatctgggacgtgcgccccgtcctcgtcggcctcaacccctgcagcggcggcggcggctggtggttcccattccgtcgaccccaactgcgaccgttgcattcgcgtgctcaagggccacaccaacttttggtttagcgccaactttaacccgcagacgaacagcactgtcgcggtcggggggttcgactgcaccgtg

SEQ ID NO: 410114 - DNA, 448 bp, Oryza sativa
tggccggtacaacttcgacggctacatggagctcatggagatggcccgcaagaccggcctcaaggtccaggccgtcatgtccttccaccagtgcggcggcaacgtcggcgactccgtcaacatcccgctcccgaggtgggtggtggaggagatggagaaggacaacgacctcgcctacaccgaccaatggggacgccgcaacttcgagtacatctccctcggctgcgacgccatgcccgtcttcaagggccgcacgcccgtcgagtgctacaccgacttcatgcgcgccttgcgcgaccacttcgcctgcttgctgggcgacaccatcgtcgaaatccaagtcggcatgggccccgccggcgagcttcggtacccgtcctacccggagagcaacggcacctggaggttccccggcattggcgcctttcaatgcaacgacaggtacatg

SEQ ID NO: 410115 - DNA, 531 bp, Oryza sativa
ggactcttggttttctgttatgtatattctttggtcttgcacttgcactggtgtcaagtggcattctccctgcattcacggaggatattgctcggtctgtaaatgttgtgcatgttgttgacactacaacggtgaatagtggtaatacagaaccatcatcatatgttactctgttctccaatacacctggaaagttgacaaaggaattagtagaccttagagatgaagaattttcttgtgggaggaatagggctattgattttgttacatttaccatgaaatatggctgtttgagttacgaagggaccaatactggatggagcaaatcagaagtgccagtgctcagtttgaaaagtgattctgttaccaatgatgctcgacaaacaataatatcagttgatactaagtcatctacgcgttggtcactggcaatcaataaacaagaaattgatgacttcacagttcatgtggattcggagaacttggttccactgggtaataagaacgagatcgatgggtgcatacaatcca

SEQ ID NO: 410116 - DNA, 527 bp, Oryza sativa
ttgaggagagagagagagagaggaggaggaggaggagagcggcggcggcgatggcggggaaggggttgaacgcgacgggggagttcttccggcggcgggacgactggaggaggcacccgatggtggggaaccagctgcgccacgccacgccggggctcggcatcgccatcgtcgccttcgggatctacctcgtcggcgaggccgcctacaaccgcctctaccgcccctccggcgaccaccaccaccactagatcgcgtcggcggccacgcgcggagacccgcgccgcctccccgaggtgaagtggttggagcaatctttaccaagcaccaatgttgttgatcttttccagtttgagttcataaggtctgccatgaggcccatgaccatcatgtaatttgcaaccagggagacatgaatcatgtacttttatatcaatgttctgggcttataatccagcatttgaaaatggaagtgacactaataattctgaagtttaaaaacttaattttcttctctcttttatatt

SEQ ID NO: 410117 - DNA, 326 bp, Oryza sativa
tggagaaggaggcggccaagactgctgacatgaaggagaaaggcgccgacccctacgatctcaagcaacaggagaatgttttagccgagtcaaggatgatggtcccagactgccataagcgacttgaaactgcactggcagacttgaaagcaactctggctgaattgaaggaatcaaatgaacaaggtgctgagattggagaggctgagagtacaatcacagaagttgaagctgtcgtcaagccaacagaagattgaattcgttttttatgaaatccctgcaaacctctgttctgttgggggcatagtagctcaactagtattatg

SEQ ID NO: 410118 - DNA, 369 bp, Oryza sativa
tattgtcacttccatctcattctcctaattgtcatcactagcttctagctagcttaattaattaattagccatggcggaggagaagcaccaccaccacctgttccaccacaagaaggacgacgagccggccaccggagtagactcctacggcgagggcgtctacacgtcggagacggtgaccaccgaggtggtcgccggcggccaggacgagtaccagaggtacaagaaggaggagaagcagcacaagcacaagcagcacctctgggaggccggggccctcgccgccggcgccttcgccctgtatgagaagcacgaggcgaagaaggacccggagaacgcgcacaggcacaagatcacggaggagatcg

SEQ ID NO: 410119 - DNA, 460 bp, Oryza sativa
tgcaagtcttactgtcctttttgcgtccgtgtgaagaagttgttcgagcagcttggagcaactttcaaggccattgagttggatggggagagtgatggatctgagctgcagtcggcacttgctgaatggactggacaaaggactgttccaaatgtcttcatcaatgggaagcatattggtggctgtgatgatactttggcattgaacaatgaagggaagctggtgcctctgctgaccgaggctggagcaattgccagttctgcaaagacgacaatcaccgcatagttcttcgtgggacactgggactagccttcgttgacctctttatactgcatccattctattagataataaaggtggatgtttgtttggcaagaccattacttgttgccgtctagtatcgtgtgatagctatcctgtgccccggtgaaactccttggacatcaataatatcgtcttt

SEQ ID NO: 410120 - DNA, 524 bp, Oryza sativa
ttcaggaagctgtccctcaccagggccctcttctacatggtgatgcagtgcctcggcgccatctgtggcgccggcgtcgtcaagggcttccagaagggcctgtacgagaccaccggcggcggcgccaacgtcgtcgcgcccggctacaccaagggcgacggcctcggcgccgagatcgtcggcacctttatcctcgtctacaccgtcttctccgccaccgacgccaagaggaacgccagggactcccacgttccgatccttgccccactgccaatcgggtttgcggtgttcttggttcacctggccaccatccccatcaccggcaccggcatcaacccagcgaggagccttggcgctgccatcatctacaacaggggccatgcctgggatgaccattggatcttctgggttggccccttcattggcgctgcccttgctgccatctaccaccaggtggtcatcagggcaattccattcaagagcaggtcggaacctgcatcaactattatcactgtcaagatgcc

SEQ ID NO: 410121 - DNA, 478 bp, Oryza sativa
tctttatcgcagaatgagctgttatatgctgaagttgagtacatgcagaaaagggaagttgagctgcagaatgacaacatgtacctgaggagcaaggttgttgagaatgagaggggacagcagccactgaacatgatgggggcagcatcaacaagtgaatacgatcatatggttaataacccatatgattccaggaactttcttcaagtgaacatcatgcagcagcctcagcattacgcccatcagctgcagccaactacccttcaactcgggcagcagccggccttcaattagttttggtgtagacaccgtacgtacacacgtacgttagatgaaatctgaaggcgtcgatacccgcggctacgtaacagcgtgatcaacctgaagaaatcgatgcagtaattctatgtgttcgtcagatcatcataaccagtattgtcattaggcgttgtgaaaaaaaaatgtgttagcatgcatt

SEQ ID NO: 410122 - DNA, 525 bp, Oryza sativa
tatcggtgcacttgttaaggatgatgatactgaagttatcagttttctgttgcaaactgaaataattcctctgtgtttgcgtaccatggaaatgggaagcgagctgtcaaaaactgtggccaccttcattgttcagaagattctcatacatgatgttggattgcgctacatttgtgccactgctgagcgtttctttgctgtaggcagtgttttagcaaacatggtggtttcacttgctgagcagtctttcacaaggttgctgaagcacattatccgatgttaccttaggctgtcagacaattccagggcatgtgctgcactacaaacttgcctccctgacatgctgaaggatggcacgttcaataactgttttagggatgatcctacaacaaggcgctggctccagcaattgctttttaatgtgacaggcgcaggccatgggagctgctcctcagccatgcctggattacatgatggggatataaatcattctgatcgctgcaattgacaacatatataacctta

SEQ ID NO: 410123 - DNA, 449 bp, Oryza sativa
ctcacttctagatggggtgacctcgatgtcaatcagcatgtgaacaatgttaaatatattgggtggatccttgagagtgctccaatttcagtactggagaagcatgagcttgcaagcatgaccctggattacaggaaggagtgtggccgagacagcgtgctgcaatcacttaccaccgtgtcaggggaatgcaccagcattggcgccgacaagcaggcttctgccatccagtgcgaccatcttgtgaaggctgacattgtgaaggcacacacagagtggcgaccaaagcgatcgcatgcagcagctgagaacgcgtaaacaaacaaaccgacgaaaatctgtggtagggagaatatcaaacttcccttgcctctgttgccctgaagctgatcttgaagtgtgagttgtattctgtaaaaaattagtagtttccatagtgtgaggttgga

SEQ ID NO: 410124 - DNA, 467 bp, Oryza sativa
gtcaaaccctagccaaatccacgatcggggctagctcgtcggcggcggcgatggggaacccggagaagctgatgacccagatcttcgacctcaagttcacctccaagtcgctgcagcggcaggcgcgcaagtgcgagaaggaggagaaggagcagaagctcaaggtgaagaaggcgatcgagaaggggaacatggacggcgcgcggatctacgccgagaacgccatccgcaagcgcaccgagcacatgaactacctccgcctcgcctcccgcctcgacgccgtcgtcgcgcgcctcgacacccaggcgaagatgcaggtcatcggcaagtccatggccaacatcgtcaagtcgctcgactccgcgctcgccacggggaacctgcagaagatgtccgagaccatggacaacttcgagcgccagttcgtcaacatggaggtccaggccgagttcatggagggcgccatg

SEQ ID NO: 410125 - DNA, 547 bp, Oryza sativa
  unsure (1)..(547): unsure at all n locations
ttaaagcgcccatcagaaaccctagcaggagcgccgccgtcgccgccgccgcccgccgtcgtcatcctccctctcgccctttcaggtccccagcccgccgcgccgcggatcgagtcgccgtgtgaagaaggccagcgtcaccatggcggacgaggagcaggtggagaggaaggaggaggtctccgagcttactccttttgacccaaccaagaaaaagaagaagaagaaggttgtgatccaagatccatctgatgaggtggataagttggcagagaacactgagagcttgacagtcgctgagactggtgagccaagctttacaggcatgaaaaagaagaagaagaagcatgtggagcatgatacatctcttactgaagctggagatggtgaagatgctatagatgatcaaatcggagaggatgaagaaggagaagggattgtgctnggaggtgcaactcgatacccttgggaaggcactgacagagattatacatatgaagagctgcttggcagagtatttaatatcctgcgtgagaataatcctgat

SEQ ID NO: 410126 - DNA, 477 bp, Oryza sativa
gtgggttggcttctcctccccctctttaccttttcctcctcggttcggttccgtggttcgtctagggtttagtgggttgagatggcggcgccggatgtcgagtaccgctgcttcgtcggcggcctcgcctgggccaccgacgaccgctccctcgaggccgccttctccacctacggcgagatcctcgactccaagatcatcaacgacagggagacggggaggtcacgtgggtttggcttcgtcaccttctcctccgagcagtcgatgcgcgacgccatcgagggcatgaacggcaaggagctcgacggccgcaacatcaccgtcaatgaggcccagtcccgccgctccggcggcggaggcgggggctacggcggcggcggtggcggctacggcggcggtcgtggaggcggcggctactgaggaggtggcggcggcggctactggcgccgtgagggcggctaccgtggcggcggcggc

SEQ ID NO: 410127 - DNA, 567 bp, Oryza sativa
  unsure (1)..(567): unsure at all n locations
gcagatgtgtaactactcttcgatggatggtgtcctgtactgcaagacgcactttgagcagctcttcaaagagacggggagcttctcaaagaaattctcgcaaggtggtaaatcttcagagaagagcgaccagggaagagctcctagcaagctatcttcagcattctctggaactcaagataaatgtgcagcctgccaaaaaactgtgtacccattggagaagctaactctggagggtgagtcttaccacaagagttgcttcaagtgctcgcatgggggctgcatcctgacgacgtcttcctacgcggcgctcaacgggatcctctactgcaagatccatttctcgcagctgttcaaggagaagggcagctacaaccacttgatccagaccgcacaatcgaagcagaaagagtccgaggaggctgcaccggtggcggccacagaggccagcgagaaagacaggatgtgccctcacangacgcgacatagagcatagattanggggataaccagacccggtatatatatatatatatatatatatatatatatatatatatatatata

SEQ ID NO: 410128 - DNA, 353 bp, Oryza sativa
tttatttacagccaaaagggtcatgaggaaattgggtttgtgctctccccaaaatcctccatatatagtgcacaggaggcatcattctgttctatacatatctctcccttgcttgctttgctcctggatatatagctagcttctttctttcttcctctctccctgtgtggcacgcgcctccaatcgatctcttcggcgagtagacgcattgagatcggggggaaatgttggtccagttttacatcggagcatgtttgctatgtcaactgcaactattgcaacactattcttgtggtgaatgtgccaaacaattgttcctacaacattgcgtctgttagatgtgggcattgcac

SEQ ID NO: 410129 - DNA, 567 bp, Oryza sativa
gctcgtgccgccgccgccgtcgccgtcactctcctcaggtaaggaggaggaagatgtcgcacaggaagttcgagcacccgaggcatggatccctcggcttcctcccgaggaagcgctcctcccgccaccgcggcaaggtgaagtccttccccaaggatgacgtatcaaagccctgccacctttccttcgttggctacaaggctggaatgacacacattgtgcgtgaggtcgagaagcctggctccaagctccacaagaaggaaacctgcgaggctgttaccatcatcgagacccctccgcttgtcattgttggactcgtggcctatgtcaagacacctcgtggacttcgctctctcaactctgtctgggcccagcaccttagcgaggaggtgcggagaaggttctacaagaactggtgcaaaagcaagaagaaggctttcactaagtatgcccttaagtatgacagtgatgctggcaagaaagaaatccagatgcaacttgagaagatgaagaagtacgcatctattggtcgtgttattgcccacactcagatcagaaagatgaagg

SEQ ID NO: 410130 - DNA, 514 bp, Oryza sativa
tttttgattcgatagatatggatttgtggcaagaagatcaattgctgaagctcctgttgacgtaaatgtcactacaaacagttcctttgtcttggcgcaagagcgaacatatagaaaagaccccttgaatggattcaggaaatatactggcggttggaatattagcgaagtgcactatatggcttcagttggatacacagcttttccactgttcatcattgccttggtgtggtttgtgctgttttttctggttatgcttggaatttgctgcaagcattgctgttgtccacatcgcaactacacatactctcgggtagcatatgccctatctctgatacttctaatattgatcacttgtgctgcaattgctggatgtgtcatgctgtatgatggtcaaggaaagttccataaaagcacaacgactaccttgaattttgttcgtagccaggccaattttactgtcgaaaaccttattaacttatccgatagtttatctgctgcaaaaaggttgaca

SEQ ID NO: 410131 - DNA, 485 bp, Oryza sativa
atatgaacacttccacgcaacaagaaagcgaagaaattgttttgaatttcgaagaaacaactgatagtaggtttgatacagtttttgcactacgctgttactgcacatgggagcagaacatattctcgtagagatatacaaacatcacacagaggaagcagcagcaagcactctagagagtcagcccccaaaacttccccggacaaatgcagctgcttaattactccgttccagcgatcttcttcttcaaggtctcgatgtcggtcgccaactctttcctgctctccttgaagaggaggtagcggtagacgaaccagccggtgtagccgaggccgacgagctccaggatcttggggagcagcggcacggagttgatggcgccgacgacgacggtggtgagccagagggcgacgacggcgccgccgctgtagaggaggaacgtcggcttgtcctcgatcgcctcccactttgccttgaggtcggcg

SEQ ID NO: 410132 - DNA, 512 bp, Oryza sativa
  unsure (1)..(512): unsure at all n locations
atcataatcacagcgtcataccaggctacaattcaaggctttgaatccaagggattttcaaaagaacaaagtgaagacttgctcgcaaagagtgttgagattgcacgtgaagcgcgtgacatgtttctgaaggaacattcagatcgtcccatacaacatcctatcctggttgcagcttccattggaagttatggggcctatcttgctgacggctctgagtacagtggggattatggcgaagctggcacgttagaattcctgaaagattttcataagcgaaggctggaggttcttgcggaagcaggtcctgatttgatcgcctttgaaacaattcccaacaaattggaagctcaggcttacgttgaacttcttgacgaatgtaacatcagtatccctgcatggttctcatttaattcaaaagatggagttcacattgtgagtggagactcgttaattgatgtgctactattgctatgngtgttcgaggttggtgcagttggataaantgcaca

SEQ ID NO: 410133 - DNA, 488 bp, Oryza sativa
  unsure (1)..(488): unsure at all n locations
aatggatcacatggataccgatgaaccaaatgcagtacgtggaacaattgggcatatcgcaccagaatatctttcaactggaattatctctgagaaaactgatgtatttggttatgggattatgcttttggagcttattacaggacaacgtgcctttgaccttgctcgtctagccaatgatgatgacgtcatgctactggactgggtaaaaggattactcaaggagaaacggctggagatgttggttgatccagatctacagagcaactacattgatgttgaggtagaatcactaatccaggttgctcttctttgcacacaaggctcccccacagaacgccctaagatggcggaggtggtgaggatgcttgaaggtgatggccttgccgagagatgggaggagtggcagagatagaagtagtaccgcaggaggtagagcttgttgggaatagtcacacatngtttatttagagagagtctgacctaac

SEQ ID NO: 410134 - DNA, 384 bp, Oryza sativa
tgtcctatgcattgaccaattgttgttgtagctagcgggtcgttcagttttgattagttctgaaagtgtccaagttataccgtgtaaccctttggagtttgccaggcaattcaatgtctggagtttgtatgtgccattgagcagacaattatgatccgaattaagctctgcaccttaatttttccaaaaaaaaaaaaaaaaaaaaaaaaaaaaaaaaaaaaaaaaaaaaaaaaaaaaaaaaaaaaaaaaaataaaaaaaaaaaaaaaaaaaaaaaaaaaaaaaatattgaaaaaaaaaaaaaaaaggggggggcctttttaggggaccaaagtttctttcccggggatggcaaattataattttctttatggggcccccaaaat

SEQ ID NO: 410135 - DNA, 561 bp, Oryza sativa
  unsure (1)..(561): unsure at all n locations
attctcttccacccccgaaaccactccaaaaccaaaccaaatctcgcggcgcatggcggcggcggcggtggcggcgaacggcggcggcgacggcgcgcaggcgtccaacgcgcccgcccccaccaggctcgcgtcggtctacagcgaggtgcagaccagccgcctcaagcacgcgctccccctcccctccgtcctccgctcccccttcgccctcgccgacggccccgccagctccgccgccggcaaccccggtgagatcgcgaagctgttccccaacctgttcggccagccgtccgtgtcgctggtgccgtcgccggagccggcgtccaccaggccgctcaaggtcggcgtcgtgctctccggcggtcaggcgcccggcggccacaatgtcatctgcggcatcttcgattacctgcaggaatatgcaaaggatccgtcatgtatggattcaagggaggtccagctggagtcatgaagtgcangtacgttgagctcactgcggattatgtgtacccctacagaacccgggtggatttgatatgatctgcagtggtagggaca

SEQ ID NO: 410136 - DNA, 499 bp, Oryza sativa
ggagaggtgtatgcttgggggagaggagagcatgggaggcttggatttggagatgataaaagtagtcacatggttccccaaaaggttgagcttcttgctggagaggatattattcaggtatcatgtggaggaacccattcagttgcgctaactcgtgatggacgaatgttttcttacggtagaggtgaccatggccgtctgggctacggcaggaaggtcacgacgggccacccgatggaagtccccatcgacctgccgccgccgggaaccagcggcggcgactccggcgggcaatggcaggcgaggtacgtcgcctgcggcgggaggcacacgctggccatcgcgacatggacggaggcagacgagtaatcgatcgcctcttggttttttaaagccaaatcccggagctggtacagataatactaccgagtacttttcgtgcaataagaacaggctaatgttaaaatgatctctgagatgtatgagctgagtgatgaat

SEQ ID NO: 410137 - DNA, 504 bp, Oryza sativa
tggaaggaagagctggaaagccaggtatcttctactgtcgaagagcatgaagaactgaagagcaagtacaatattacgctggaggaaaagcagttgttgaatgagaagtatgaatctgcaaagaaagagcttggggaagcaatagctaaattagaggagcaaatgaatgttgacaagtcagaaaaagaattgcacatctcaaaattggagaggcagatcacattgtctgaactaaaatacatggaggagatccaaaccatgcaagtggaaacaactgaaaaggatgaggcgcttacaaccaaaatgcaagagcatgcaaacttggtccatgaaaaagatgcgttggaacaacaattactggaagttaggaaggaactaaatgatgcttaccataccatagcaaatcaggaagagcaagtttcagtgagggagataaagtgggatgcatataagaagttctcagaggatcaacttgaagctgagcagcagcatgttgcagagctg

SEQ ID NO: 410138 - DNA, 482 bp, Oryza sativa
gcgcttaggcgcacgcacgcacgcacatctctcgagcccctcaccctccccttcttcctcctccttccgccgcattgctcgtcgccggcggcgaccaaccctacccctctctctccctctcgagcggcggcggaggcggtttccggtagtggcggcggcggcggggacaggaagaagccatgtgcgatttggtggcgagaacggggcggcaccagcagcgctacgagcatgggcgtcgactcgtggccgggtgcataccttttagatataaagataacaatgatgaaacttctgatgatggacacaagaaacttgtggaagttctcatgatcaactcccagagtggatctggtctcctatttcctaagggaggatgggagaatgatgaaactgttgaagaggcagctgctcgtgaagctattgaagacgctggagttcgaggagatttagtgcaattattgggcttctacgacttcaagagc

SEQ ID NO: 410139 - DNA, 414 bp, Oryza sativa
aaccccctactcttcctcctacacctacctctgctgcttcccagccagatccgcctcctgctcctcccctgctccctcccagatctcacactgcatctcgcgagcgcgccgacgcgggacagctcgccaccccgcccagatccaccgtgtcgccggagccggagagaccgagcggcggtcggcggggaggaggatggccgtggggaaggagggcggcggcggcgctggcggtgaggggggcatgtcggattcggtgatccggaaggtgctggagccgctacatgcacgcggcggtgtggatcttactctcctttacggccatcggacacaacaagtacatcctggaccgcaagatgtacaactggaccttgaccatctcgatcaccatggtgcacacggccgtctgctcggccc

SEQ ID NO: 410140 - DNA, 472 bp, Oryza sativa
ggaaatagtacacccgaaaaaggtaatttagaagacagtgaaacagattcgcttgctgaatcacctcagggtggaaaaggattctctagaagagcaccagttaggtaccataataatgaacatactccacagaatgtaaggcccggtggttcagtaagcgaccagcaaactgaagtactttgctccaatagcaatggtagcacagccaaaaacagacattttggtcctgcaattaatcagaaactgaaggcacatttcaaggaagatccataccctagtcgtgcaacaaaagaaaatctggcacaagagttaggccttacatttaatcaggtcactaaatggttttccagtactcgtcattacgcaagagtggcagtcacaaaaaaggagaacaacattgaaaatcatacggctgaggataataacaatacccacacctgtgatagcatacaactgaaaagatccaatgata

SEQ ID NO: 410141 - DNA, 323 bp, Oryza sativa
tccacgtgaaagaattgagatggcgcagggccattcactttaccggccatctcttcttggtcaacctaaaggagatgccaaagcttaggcagttcttcctttttttttggtgctagatatcctgtaagctctgtgtgctattatgcttgctgctgctgctgttgttgtaacactagtgagttccagcaagggaccaagatctcagttgattgcttcaagacttgttgagcttgttatgtagtttgatttgttaaacgcctgaaatgtgtacatagacgttgttttgtgtgatccaataataaaatatgcaaaaggtaatgttc

SEQ ID NO: 410142 - DNA, 513 bp, Oryza sativa
  unsure (1)..(513): unsure at all n locations
ttcgtactcgcctctctccgcgccctcctccgccgccgctcgccgccgttcgtctccgccgccaccgccgccgccatgagggagtgcatctcgatccacatcgggcaggccggtatccaggtcgggaacgcgtgctgggagctctattgcctcgagcatggcatccagcctgatggacagatgcccggtgacaagaccgttgggggaggtgatgatgcttttaacaccttcttcagtgagactggtgctgggaagcatgtcccccgtgctgtcttcgtcgatcttgagcctaccgtgattgatgaggtgaggactggtgactaccgccagctcttccaccctgagcagctcatcagtggcaaggaggatgcagccaacaactntgcccgtggtcactacaccattggcaaggagattgttgatctgtgccttgaccgcatcaggaagcttgccgacaactgcactggtcttcagggctttcttgtgttcaacgctgttggaggaggaacgggc

SEQ ID NO: 410143 - DNA, 516 bp, Oryza sativa
ttcctcgtcgtcgtcttcctcctctttcctcctcctccccgtctctccctctccgcttctctctcccaccaaccccccgcccccacccatggcgctcgcatccggcacgtcctgcgccctccccggcgccgcgcgcccccacctcgccgtgtccccctctccgcccgcctcctcgatccgtttctgcagaggcggctcccgcggaggcagggccgtcgtctccctccgcgcctccgtgcctccagcagcagcggcagcaacaacatctggtagcattgcacctgcaatttcattgactgaaaaggctttgaagcatctgaataaaatgagggctgaacggaatgaagatctctgtttgagaattggagttaggcaaggtggatgttctggcatgtcttacaccatggagtttgaagatcgatccaatgccagccctgatgattcagttgtagaatatgatggctttgcaatagtctgcgacccgaagagccttcttttcatgtttggaatggagct

SEQ ID NO: 410144 - DNA, 495 bp, Oryza sativa
ttcgagtgggatcgtgaggcccacttatcggtagcacccggtggcggcaactcgccggagaccgaaccgctcgccggagacccccccccccccctgggcgccgtgaagccacggcgccgccagagctcgcttctaggagtcactgggttctacaccactcagtccaatcaaaccaaggcgaggggagtgccgctccgcggtggaaactcagagatcgagggaggaggaagatggccggttggtcgtcgccgccgtcgcatatcacgcgccggcggtcacgtggacaggccatggcggcgccgcccattctgctgtttgctcggctgcctggtcactgaccacctgaaactgcacctgatggtcattcaggcagtagcttcttatgatctccatgctcttcaccagcgtagaaatcgccggcttgttgtcgtggaacatattcccaccaagaaggatggaaataacctgcatattaacagtgcatcttcaccatat

SEQ ID NO: 410145 - DNA, 447 bp, Oryza sativa
agacaatgtactgtaggaccatgtcatgaatttgacagctcttcaccttgccgttgctgttgttgttgataggctttaccaaattcctgccaatgagttcattgaggctgtcttctgcaacttcatcggcagtcttcccatgctcttcagtaatgaatccttcagcaatccatcttcttatcaaatgcttcctgctaatattgcggccctttggaaatgtgctcaagtacagcaagcatgtcttaagatcagatggcagatttttgtaacagtggttaattatttgcgccactccttcagtgtttactagcaatcagccctgctactactacaatggccaagggcagacccccacataccctcatgataatgctaccattaatgggtctaatgggacacagatcatttgcagatattatctgaagaaacaaattgtaggagctctct

SEQ ID NO: 410146 - DNA, 501 bp, Oryza sativa
gcagcagcagcagcagctgagcttgaagcagcagagcgaggtagacatggccgccgccaccatggccctctcgtccccggcgctggccggcaaggccgccgcgaaggtgttcggcgaggggcgcatcaccatgcgcaagtcggcggcgaagcccaagcccgccgcgtcggggagcccgtggtacggcgccgaccgcgtgctctacctcggcccgctctccggcgagccgccgagctacctgaccggcgagttccccggcgactacgggtgggacaccgcggggctctccgccgacccggagacgttcgccaagaaccgggagctggagggtgatccactccaggtgggcgatgctcggcgcgctgggctgcgtgttcccggagctcctcgcccgcaacggcgtcaagttcggcgaggcggtgtggttcaaggcggggtcgcagatcttcagcgagggcgggcttgactacctcggcaacccgagcctggatcacgcgcaga

SEQ ID NO: 410147 - DNA, 519 bp, Oryza sativa
ctccgctcccggtgcgccgccggcgagccgcagccgccgcccccctctccgcgccggcggcctcctccgccctctctgccgccagtccccggccgatcccatcgccagtcggcgggcggtctccccgcgggtggggtgggggcgggacggacgatgaagccggtggtggggatcgtggtgtcgaacaagatgcagaagtcggtggtggtggccgtcgaccgcctcttccaccacaagatgtacaaccgctacgtcaagcgcacctccaagttcatggcgcacgatgagaccgaggactgcaacatcggcgaccgggataagcttgatccttctaggcccttgagcaaaaggaagcactgggttgttgccgagattcttcgtagagctaaggtgtattcttcatcagctgctgcagcagcagtttctgctcaacctggtgccacagttcaacaggcagaagctgctagcaaatcataaacatagactcctcttctggaataaatggacactatttcggga

SEQ ID NO: 410148 - DNA, 534 bp, Oryza sativa
cggatcgtggccgtggctgaagaaagcaactcaaccagctgccctcccaaatttctctcctcttgccgacgactcggaaaaaaaccgcggacaccgcgtccgctcgacggagggaaggggatgagctcctcgtcggcgtcggctgtgccgccggaggacgacgtctgctcggtctgccacgaccgcttccggatcccctgccaggccaactgctcccattggttctgcggagagtgcattatccgtgtttggaatcatggaccttctgtacagccttgcaagtgtcccatttgccgtcgccttattaatcttctggtaccagcaaatgtatcaatagataatgatgatgatccgcaaattcagcatgttctaggagaggttcagcattacaaccgcatatttggtggaacaccccgcaacctgactcagaggttgcaagacctaccctttttcatcagaagactgttcagggaactactggatcctcagaggaccctcccacttgtcttcagggcgaggatggtcatgatggta

SEQ ID NO: 410149 - DNA, 486 bp, Oryza sativa
gtatggtcaggatgccaccaatgttggtgatgaaggtggttttgctcctaacattcaggaaaacaaggagggtcttgagctcttgaagactgcaattgaaaaggctggatacactggcaaggttgtcattggaatggatgttgctgcttcggaattctacaatgacaaggacaaaacctatgaccttaacttcaaggaggagaacaatgatggttcacaaaagatatctggtgatagcctgaagaatgtatacaagtcatttgtcagtgaataccccattgtctcgattgaggatccgtttgaccaggatgactgggaacactatgctaagatgaccgctgaaattggagagcaagtgcagattgtcggtgatgacctccttgtcaccaacccaaccagggtggcataggcaatccaagagaagtcatgcaatgctcttctgctgaaggttaaccaaaatggatctgtcactgagagtattgaggc

SEQ ID NO: 410150 - DNA, 385 bp, Oryza sativa
ttgctttgccttcgacccgctcggcctcgccgatgaccccgaggcgttcgcggagctcaaggtgaaggagatcaataacggccgtcttgccatgtgctccatgttggggttcttcgtccaggccatcgtcaccggcaagggccccctcgagaacctcgccgaccacctcgccgaccccgccaacaacaacgcctgggcgtacgccaccaacttcgtccccggcaagtgaagtgggggaccgtagcttagcagtggttaattgtggttggatggatttgtggccagcgagttcgttgtctttgggttggggaagatgggtctagtgcgacgagatgatgatcgagttggtgtttgcgtacacctagaagatgtacatcatgatgat

SEQ ID NO: 410151 - DNA, 468 bp, Oryza sativa
gtcccatatcccccgccccaagatgaaggtctgcatgcttggtgatgcccagcatgtcgaggaggctgagaagattgggcttgactacatggatgttgaggctcttaagaaaatgaacaagaacaagaagctggttaagaagcttgccaagaagtaccatgctttcttagcatcagaggccatcatcaagcagattcctcgtctccttggtcctggtctcaacaaggcaggcaagttccctacattggttactcaccaggagtctcttgaatccaaggtcaacgagacgaaagctacagtcaagttccagctgaagaaggttctgtgcatgggtgttgctgtgggtaacttgtcaatggaggagaagcagattcagcaaaacattcaaatgagcgtcaactttctcgtgtcccttttgaaaaagaactggcagaatgtgaggtgcctttacattaagagcaccatggg

SEQ ID NO: 410152 - DNA, 443 bp, Oryza sativa
gtccctccctgcagagatggcaagttgtttacaccgatgatgaggatgacatgatgcttgtcggggatgatccttgggatgaattttgtagcatggtgaaacggatttatatttactcctacgaggaggccaagctgctggcttcaaagtctaagctgtcagtcataggtgacaccatcaaattgagcagtatgaactcatcacatgaatccgtcgacctggacaatcatgcctcagttactaacagggactgctaaccattgactttgccctaattctgatatgatcatttgaggaaattccaatgtttcttcattactgcttactgtgctgaagacgcaacgcccttttgtcttgaattgtggcggtatttgaactgcaagtgccaggaagttcccaagactggcaagactcgctggaagaggcattctggcatatgcatg

SEQ ID NO: 410153 - DNA, 489 bp, Oryza sativa
gttcgacgagggcaacgccgacgacaaccccttctgcaatgggggaggtggtggtggcggcggcggcagcaggcagcagtacgggttccgccccacggagcccgccggcttcggcgccggcaggggggacgccaccgtcgatgtcccgctcgacaccatgggcgactccaagagcaaggcaagggagctctcatcgtgggaaacagatctgaagcggcgggaggcggatatcaaaaggagggaggaagcgctgaggaatgctggagtgccaatggaggataagaactggccaccattcttcccgatcattcaccatgacattgccaatgagataccggctaatttgcagaaattgcagtatctcgcgttcgcaagctggcttggtatcgtgctttgcctctcatggaacttcatcgctgtcatagtctggtggatcacggagggagatctcaagctgtttttccttgcactatctatgccttgcttgga

SEQ ID NO: 410154 - DNA, 433 bp, Oryza sativa
gcgggcggcctcgtcctcgtcgggacgacggcagacaatggccgccgccgcgatgatcctcccattactattgctattgtgttggtttctgctgctgtctgtgggcgacgcgatgtgttggttcaacgacgacgcatcagcatcggcaccagcggggtggttggtgtcgtggaccaatgggatgggttggtacaaggggatgccgcgggagttcgtggacggccacaaccagctgcgcgcgcgctacgggctgcagccgatgaggtgggataacaagctggcgaggcaggcgcggcggtggtccgacgccatgcgcggcgactgccagatccggcactccaccggcaacagcttcgtcgagagcctctacattgggaggaacggctgggacggcagggctttcgacgcccgtcgatgctggggcgacgaggag

SEQ ID NO: 410155 - DNA, 546 bp, Oryza sativa
gaaagggtagaatctgcggtgactgacttgaaaaaggaatttggagagcaacatgtgtggggaattgtctgtgatgttagggaaggaaaggatgtaaaggcactagttgattttgcacgtgacaagatgaagtatattgatatttggatcaacaatgctggatcaaatgcatatagttacaaaccgttggtcgagacctccgacgaggctctcatggaagtgatcacaactaacactcttggattaatgatatgttgtcgtgaggcaataaatatgatgagaaaccaacctcgaggtggccacatatttaacatcgatggtgctggttctgatggaaggccaaccccaaggtttgctgcatatggtgcaacgaagagaagtgtggtgcaccttacaaaatctctgcaggccgagttgcagatgaatgaagtgaacaatgttatggtgcacaatttgccgcctggcatggatacaacagatctttttatgcctggtgccacaacaaagcaggccaaattttcatcaatatattagcttgacctgcta

SEQ ID NO: 410156 - DNA, 542 bp, Oryza sativa
tgcggatcaggctgccgtataccaggaagatcatcgacgccatccactccggtgagctcctcaccgccaactacaagaagacggaggtgtttggcctggagatccccactgaaatcgacggcgtcccgtctgaaatcctcgacccgatcaacacctggacggacaagggcgcgtacaaggagacgctcctgaagctggctggcctgttcaagaagaacttcgaggtgttcgccaactacaagatcgggggagacagcagcctgacagacaagatcctcgctgctggaccaaacttttgagttactgaagaataaaaaatatgcagataaagaacgcgatgaagctagtcagttggttacaataaagaagtgggtctatgcgtgtttgccaatgatgatgacgaaaatgttggatcgatgtgcagctaccggtagagtttagctagcttcctataagtttcatgcgtgtctgttaggttctgtcagtttgtctagcttgatggtgtgtatgcagtatgctcaattccccctcccctggacaca

SEQ ID NO: 410157 - DNA, 454 bp, Oryza sativa
gtggtgatggccttgtgagagagattgaatttcgccgacctgttgttgtgagcattctttcggagagaagggtgcatgctcccaggggactgaagggaggaagaaatggggcccgtggtgcaaactatctcgtcaagaaagatggtcgtagagtttaccttggagggaagaacactgttatggttaatgctggtgagattcttcagattctcactcctggtggtggtggttttggctctccttgatggctattcttgtggacgatcatctacctcgcttctgggtactgtcatttctacttctttagtcctacttttatccacaaataaaacatgcagaaggcagaaacttgcacaaatattgcctgatacagatccaaactgctattgttgcttctgggacattggagctgaataaggaagcatgttgcttgttttaaaaaaaaaaaataaaa

SEQ ID NO: 410158 - DNA, 428 bp, Oryza sativa
atccgttcttaggaacagatgagatacagaaagtgctcttgcttgaaactcctgagggaatttcttctgcattgaggccattctgggaaaaggcaatagaaggaagggcccgtgtggttcaagcacagcctgatatgcttgaacttgtacctcctgcaacttcaaaaggcaatggggtgaagattcttttggaccacctttgcattagtccggatgaggtaatggctatcggggatggagaaaatgacatagaaatgctacagctagcatcattgggtgttgcgcttgcaaatgggtctgagaaaaccaaagcagtggcaaatataattggtgccactaatgatgaagatggagtcgcacaggctatttacgactatgctttctaacagctgctaactctaaggcgtattgggataggattatctact

SEQ ID NO: 410159 - DNA, 375 bp, Oryza sativa
gtgatccacacacagcaaaagaaccaccaccgtttccccttcccgagaagaagagagcagcatccatggcgcccaaggcggagaagaagccggcggcgaagaagcccgcggaggaggagcccgcggcggagaaggccgagaaggccccggccgggaagaagcccaaggcggagaagcggctccccgccggcaagggcgagaagggctccggcgaggggaagaaggaccgcgccgggaggaagaaggcgaagaagagcgtcgagacctacaagatctacatcttcaaggtgctcaagcaggtccaccccgacatcggcatctcctcgaaggccatgtccatcatgaactccttcatcaacgacatcttcgagaagc

SEQ ID NO: 410160 - DNA, 500 bp, Oryza sativa
tggaattggagggcagaggccgccattttaatcagtggaaataaaatccacgcattttatatatttaatttaacccccaattttaacttagcagcacactagctagctagctgctaagttaactatttgatcaggttacagttgctggcctgacagttaattaatctcttgctggttgattagttgctatcagctacacgctctcgctagctgccactgtactaatacatactcccatctattcgcctgagaaaatatcgaaaagtagcagcaaagaggagcaggcaagatggtgatgaaccctgacgccgtccgcaatgtcgttggaatcatcggtaacttgatatcgttcgggttgttcttgtcgccattgccgacgttcgtgacgatcgtgaagaagaaggacgtggaggagttcgtgccggatccgtacctggcgacgttcctcaactgcgcgctgtgggtgttctacggcctacccttcatccaccccaacagca

SEQ ID NO: 410161 - DNA, 456 bp, Oryza sativa
aagagttctaaaattttaatcccttctcaaattccaagggagtacaccaagcactataagcttgctacttgctacaatgtatacacacacaaacacaaccctagctagctacccagtatatacatactgtacttggacacagcttaattaatttaattgaattgattaattagaccttgaccaagggcgagccggtgaggaactcggtgaaggcgagggcgacaaggccgagcatggcgaaacggccgttccagagctcggggtcggcgcttatcacgccgccgttcctcgcctccgggctttcgccggggagcagcggcaccagcgacgccccggagagcacggtggcggtggcggaaaaccacgcgagcccgtccccgctgccggcctgctccaggagcccgttcgcccgggacgccttcacggtgagcgccgacacgaaccccaccattgcca

SEQ ID NO: 410162 - DNA, 326 bp, Oryza sativa
gccgccgctggtggcgcgccatggcgcgccgcggtacgcttcccgcctcgccggcgtgttgcgctcgtcgtcagggcccaggccgagccggaggtggagccgacgaaggaggagacggctacgtcgtcgtcaccgactccgagccccgcggcggcggcgcccagggcgaagccggcggcgagcacggggctgtgggacgtgctggcgttcagcgggccggcgccggagcggatcaacgggcggctggcgatggtggggttcgtgtcggcgctcgccgtggaggcgtctcggggcggcgggctcctggagcatgcccggagcgggga

SEQ ID NO: 410163 - DNA, 423 bp, Oryza sativa
atcttcctttcccacatcctcctccgccgccggctgcttcccaccggctcccgatctccgaggcaagcagcgccgcacccggccgccgccgccgccgccatggcgttcgagaagatcaaggtcgccaaccccatcgtcgagatggacggtgatgagatgaccaggatattctggcagtctatcaaggacaagcttatctttccatttttggatctggacattaagtactatgacttgggagttctccaccgtgatgcaactgatgacaaggtcaccgtggaggctgcagaggctactctcaagtacaatgtggctattaagtgtgcgacgattactccagatgaggctcgggttaaggagttcaacctaaagcaaatgtggaagagccccaatggcacaatttaggatattatcaatggcact

SEQ ID NO: 410164 - DNA, 463 bp, Oryza sativa
ttcccggcgagcgtgagatcgaagcaagctgctacacagatctcacgacatggccgaggcggcgtcggcggcggcggcggcgacgacggagcaggcgaatgggagcagcggcggcgagcagaagacgcggcactcggaggtcggccacaagagcctcctcaagagcgacgatctctaccagtacatcctggagacgagcgtgtacccgcgcgagcacgagtgcatgaaggagctccgcgaggtcactgccaaccacccatggaacctgatgacgacgtcggcggacgaggggcaattcctgaacctgctgctgaagctcatcggcgccaagaagaccatggagatcggcgtctacaccggctactccctcctcgccaccgccctcgccatccccgacgacggcacgatcttggcgatggacatcaaccgggagaactacgagctggggcttccgtcgatcgag

SEQ ID NO: 410165 - DNA, 529 bp, Oryza sativa
tgcgatgttttctcgaatactcctctaaaccccacctaaaaccctagctctgctgcctaagcgcgcgcgcctcgccgatggactcctcggcgcgatcgggcggcggaggcaccggcgggtacaccagcactcgcgtgtggatggtcgcgggcgtcgccatcgccggcgccatcgtcttcgtggaggccgcgcggcgcaggcgccggtggttgcgggacaggtccgaggttccccccgatttcggcgccttctgctaccgcttcgagatcgccccggcgccgtagcctccgcctcccgccgcgcgccagctactctcgggcctaacattcgcggacagcgacaacttcgagatcgagggctatgtggctgggtttgggaatccggactggaagaggactcacaaggcaggcacgcgcacggcggtttctgtcacgatgctgcagaagcaggggggcacctacgttggtagcacacgcatggatgagcttggatttggggttctggaggaaatttacacagggaacaccaa

SEQ ID NO: 410166 - DNA, 546 bp, Oryza sativa
taacgcaaaagcctagtcgtctcatactcttcttgttcagttcttctcctcccaaatctttctgctataaaaggcattcgggtctctctttctccgaatcccagctgcacacttgcatcttctctcctctctctctctcttcttcttcttcttcttcttcttcttctccatatctcctactcctcctcgtgaagatcgatcgaccatcggcaatttcattcggtaatagttaagctaagatcaaatcaagatcggcgaaaccatggagatggtgctgcagaggagccaccacccggtgcccgggcaggagcagcaggaggcggcggcggagctgtcttcggctgagctccggcgagggccatggaccgtcgacgaggacctcaccctcatcaattacatctctgatcacggcgagggccgctggaacgcactcgcgcgtgccgcccgtctgaagaggactgggaagagctgcccgctccggtggctgaactatctcccggcggatgtgaagcgcggcaacttcactgcagaggagcagctgctcat

SEQ ID NO: 410167 - DNA, 459 bp, Oryza sativa
  unsure (1)..(459): unsure at all n locations
atatactctactactactagccagtaagctaggtaactaactacgtggctatggcccccaccgtgatggcctactcgggcacctccgtggctccattccaagggctcaagtccaccgccggtctccccgtcagccgccgctccaccaactcgggcttcggcaacgtcagcaatggcggaaggatcaagtgcatgcaggtgtggccaattgagggcatcaagaagttcgagaccctatcgtacctgccaccactcaccgtggaggatcttttgaagcagatcgagtacctgcttcgatccaagtgggtgccttgtctcgagttcagcaaggttgggttcgtctaccgtgagaaccacaggtctcccggatactacgatggcaggtattggaccatgtggaagctgcccattgttcgctgcaccgatgccacccangtgctcaaggagcttgaggaggcca

SEQ ID NO: 410168 - DNA, 369 bp, Oryza sativa
gtagattactccattggtcttgagagtcgagtcatgcttgagacacggcttcgggttcttgtgggtaaataacttggcacgtttgctggctctactatgggaaagcccaagatggaattgtatgaaaaggaccggaagaagggtgctggggctttaatgactcctgccaagacatacaatcctgcggctgatctggtacttggacaatccactgaggaaacaccattgaagcctgaaggcgcttcaaagaagaggaaacatcacgaggcggtgcctgctggtgcggggaaaccattcaagaggatggtgaccaagagggtcagaagatatagaagaagaagacgtccaaacatagcgaggattctactg

SEQ ID NO: 410169 - DNA, 533 bp, Oryza sativa
acactattgaagagctatcacggcagtgcagcacgcgcgcaagcgcgggtgactctatatcgggcgccctcttttttttttttttgtttgtgattttaatgtttgttttatttattgtatctggtgtacagtgaagcaagctttacttttacggatcatacattcatcgcaaattaacagctctaagccagaacacaataaatgcttgcaacgacgagatgacagacgagcgggataagcatgatgacgaccaatgctgcaccaccgaacacgctcagagaccaccactgccgcacaggacaaggtggagggggtacctcaaactgaaggcataaaatgcaagagttccagaattgagggcccgcctgccggacaagatgacgcaccattacgcactgtggttgcccaaggggacactggatcttggactgtgaaaaatctgacgtgaaggacgactaaagcaagaaagcgatcgtcttgccactgacggtcatgaggaagatctacatgccttcactaaggcgcaagacaag

SEQ ID NO: 410170 - DNA, 340 bp, Oryza sativa
aacggcagggccgacccacgcgacccatcggttgcttctagacgcatccgcgggcgatggcgatccgcctgaggatgctccacttaggccattcgctatgggtcgcgccattgctcacgatgtgatgcgtcttgcaccccatcactatggcgttaccgaaagggatggacgatgacggatgggaacgtcagcggatgaagtcagaacggaagaaggatgagaacacggctgctgaatggaaccacacatatggcatgcgtgctgtgagagcccgtggacaccggatttcaaacctcagaggactgcaggctctacgataattcagcggagtaccgagaat

SEQ ID NO: 410171 - DNA, 528 bp, Oryza sativa
gccgctgccaccaccacgccaccggagcacagcgacgcgccgccgcggcttcatcgtctccgctacagcgaaatggcgacggttccggagcctttgatctgggagattgtgaagaagaacaactgcttcctcgtgaagcagtttggaaacagcaatgccaaggtgcagttcaccaaggagcccaacaacctgtacaatgtccactcctacaagcactctggcttggcaaacaagaagaccgtgacgatccagccatcaggtggaaaggacgcggctgtggtcctctccacgaccaagaccaagaagcagaatgccccagctaagctctaccacaagtctgtgatgcgcatggagttccgcatgatggctaaggctgtcaagaaccaggttagtgacaactactacaggccagatctgaccaagccggctcttgcaaggcttagctcagtgtaccgcagcctccaggttgccaagtctggtgtgaagaagaagaacaggcagccagccaagctgtaaatcgcttgaagc

SEQ ID NO: 410172 - DNA, 543 bp, Oryza sativa
caacctccctcctcctcctccacctcgtcgtcgtctccgccgcgctgtctcctcctctatataccctcacccacactcgcacgcgcaaacccaacccccgcatatgcttaactccccaacccaaaccctcctcctcccccatgggcgcgtgcttctcatcccacactgcgaccgccgccgccgatggcgggagcgggaagcggcagcagcggaagggggatcacaaggggaagctccccgatggcggcggcggcgagaaggagaaggaggcggcgcgggtggagttcgggtacgagagggacttcgaggggaggtaccaggtcgggaggctgctcggccacggccagttcggctacaccttcgccgccaccgaccgggcctccggtgaccgcgtcgccgtcaagcgcatcgacaaggccaagatggttcgccctgttgctgtggaggatgtaaagagagaagtgaagattcttaaagaacttaaaggccatgagaatattgttcacttctacaatgcgtttgaagatgactcatatgtatata

SEQ ID NO: 410173 - DNA, 488 bp, Oryza sativa
  unsure (1)..(488): unsure at all n locations
atcgaccgaaggggagggggagcgaagctttgcgttctctaatcgcctcgtcaagatgcagatattcgttaagaccctcactggcaagaccatcaccttggaggttgagttctccgatacgattgacaatgtgaaggctaagattcaggacaaggagggcatccctccggaccagcaacgccttatcttcgctggcaagcagcttgaggatgggcgtactctcgcggattataacatccagaaggagtccaccttgcaccttgtcctccgccttcgtggaggcatgcaaatattcgtgaagaccctcaccggcaagaccattaccctggaggtcgagtcctccgacacgatcgataatgtgaaggccaagatccaggacaaggagggaatcccaccagaccagcagcgtctcatctttgctgggaagcagctcgaggatggccgcaccttngcagactacaacatccaaaaggaatccaccctgcacc

SEQ ID NO: 410174 - DNA, 530 bp, Oryza sativa
  unsure (1)..(530): unsure at all n locations
gtcttcccaaacccattcacttctggtgacgggaaacctcagcatgccgactttggtcatttctatggatccagccatttctcagcacctgatgcttcttgcaccccatcactatctcgctaccgagatggcttgatgatatctgatatggacctcaacttatgtcgccagatcaaagacaagtggggcttccgcatgactgcccgttatgacacgtatgcttccttgctttcagagtacttgaagccagattttaaacctcaagtcattgttgaccccttgatcaataagagtgcgtaatggtgagaaacttggtgccaaaggagagcactcaattctggaacttacacatttagagcattcagtttgagggaactcttcaaaatctgccattggggaatcgatttcttttttcaattttcgtatgtaaagaaaaatttgatacatgtttacctcaaatgccttttacttgggagtggaaacatngatactcattttgctctctgctgtaaatttgcagggtatgtatg

SEQ ID NO: 410175 - DNA, 503 bp, Oryza sativa
gagagaagcaccggcggtcaataattaaaaaaaaaagaaaaaaatggctttcagaaaccatgacgctgccatggtcctcttcttcttcctcctcatggtgactacctacgccaacgcgcacggacacagcaagaagcccgaggagatcactcagggcgtttacggggcggcggcggcggtggcggccggccccggcggcacgttcgacatcaccaacctcggcgccgtcggcaacggcagggcggacagcaccggcgcggtgatggcggcgtggaggtcggcgtgcgccggcgccgggaagcagacgatcctgatcccaagggagatttcatgacgggggcgatggagctcaggggcccctgcaatggcgccgtgaccatccagctcgacggcaacctgctgggctccaacgacctcagcaagtacccgggcaagaagatgcccaactgggtcgaggtccgccatgtcgacaacttcgtcatctccgggcagggcaagctcga

SEQ ID NO: 410176 - DNA, 513 bp, Oryza sativa
cccgatccccccaacacccaaaccctaaccctcgaagcgacgcaacccaccggcggcgatggggcagggcactcccggcgggatggggaagcagggcggcctccccggcgatcgcaagccgggcgacggcggcgccggcgacaagaaggaccgcaagttcgagccccccgccgcgccgtcccgcgtcggccggaagcagcggaagcagaaggggcccgaggcggcggcgcgcctgcccgccgtggcgccgctctccaagtgccgcctccgcttgctcaagctggagcgggtcaaggactacctcctcatggaggaggagttcgtcgtcagccaggagcggctgcgacccagcgaggacaagacggaggaggaccgatccaaggtcgatgacctccggggcacccccatgagcgttggctcgcttgaggagatcatcgatgagagccacgccatcgtctcgtcgtacgtcgggccggaatactatgttggcatattatcattcgtcgacaagga

SEQ ID NO: 410177 - DNA, 263 bp, Oryza sativa
gtcgcctatactcccccatcgccgagagagctctagggtttccgctgccgaatttttttttaattcggggggagagatttgaagaggccgcaccatggtgttctaccaggatctgcttaccggtgacgagctcctgtcggattcgttcccctacagagagatcgagaacggcatcctctgggaagtcgatggcaagtgggtcgttcaaggagctattgatgtggacattggtgccaacccatctgctgagggtggtggtgatg

SEQ ID NO: 410178 - DNA, 366 bp, Oryza sativa
gtactactaggcagtaagctagctaactaactacgtgggtatggcccccaccgtgatggactcctaggacacctctgtggctccattccaagggctcacgtgcaccgtcggcctcaccgttagacgccgatccaccaactcgggcttcggtaacgtcagacaatggcggaaggatcaagtgcatgcaggtgtggacaattgagggcatgaagaagttcgtgaccctatcgtacctgtcaccaattaccggggaggatcttttgaagcagatcgagtacctgcttcgatccaagtgggtgcctagcttcgagtttaacaagagcgtgttcgtataccgggagaaccacacgtctgcctgatactact

SEQ ID NO: 410179 - DNA, 524 bp, Oryza sativa
gaagatttctgcaggcaattggacaaggattgtgagtttctggagcaagagagaattatggattacagtcttctggttggcgttcacttcaaagaccgatgcaaagacagcagcagtcctgacaacgagacaactcaaactgctcttgaagatgaggaaagaagaaaagcaccagtcaagctagggatcagcatgccctcaagggtggagaatgttgtgaagaatcctgaaagtgaatcccagctcattggcgaacctacaggggaattccaggacgttatcctgttctttggaatcattgacatcctacaagactatgatatcagcaagaagcttgagcatgcctacaaatccatgcaatatgatcccaactccatatcggctgttgatccaaagcaatactgcaaaaggttcagggatttcatttacagggcttttagtgaagacctacagtaaatacttcattaacaaaagggaacactcttaattcttaactgaagaaagcataacgaccagctgatgga

SEQ ID NO: 410180 - DNA, 492 bp, Oryza sativa
gttcgccgccgcagcctcctcctctcgtcttctccttcgagttgttagctacctccttattcaaccatgggtaaggagaagacgcacatcaacattgtggtcattggccacgtcgactccggcaagtcgaccaccacgggccatctgatctacaagcttggaggtatcgacaagcgtgtgattgagaggttcgagaaggaagccgctgagatgaacaagaggtccttcaagtacgcgtgggtgctcgacaagctcaaggccgagcgtgagagaggtatcaccatcgatattgccctgtggaagttcgagaccaccaagtactactgcacggtcatcgatgcccctggtcaccgtgacttcatcaagaacatgatcacgggtacctcccaggctgactgtgccgtgctcatcattgactccaccactggcggttttgaggctggtatctccaaggatggccagacccgtgagcacgcttttcttggtttcact

SEQ ID NO: 410181 - DNA, 498 bp, Oryza sativa
gtggcaatggaaggaggtgctattaagctatttgattcccggtcatatgacaaaggtccctttgacactttcttggttggtggagatacagctgaagtttctgacatcaaatttagcaatgatggcaagtccatgcttttgacaacaaccaacaaccatatatatgttctggatgcatatggaggggataagaggtgtggctttagtctggagtcatctcccaatgtagcaactgaagctgcttttactccagatggccaatatgtaatttcaggatctggtgatggtaccttgcatgcttggaacatcaatacaatacaagagattgcttgttggaacagtcacatcggtcctatcactgctttgaagtgggcttcccgtcgagcaatgtttgcaactgcgtcaactgccctaactttctggattcccaacaatttcagttcgaattaggtgcctagcaaaaggatggaacgtgtgatatgctgattcaacaaacac

SEQ ID NO: 410182 - DNA, 437 bp, Oryza sativa
ggccaacccatcttgcattgctcttcttccaagtcgaattcctgcagctcgaatcgaggttgagaatcgaatcgatcgattaaaattcacatgaatcttatcatgccacggcgggcatgtccttgagccaggcgtcaagcggtttgccgatggagtaaaacgaggattgcggtctccctgggctactcatgataaacaccgtgggcagcactgaacacgtactaagattttgcaggaaacagctcatagatatacatgactggaatagatccggataccggatgaccagattcaccggtagttgcggtaaagtgggctgtacatgcagctctctgcatacttaaccaggtcctttggccgaggcgcctgcttgccaaaccaagttcatatgcctttgctgcaacgttggctgcaatgtgggcaaaatctttctgatg

SEQ ID NO: 410183 - DNA, 463 bp, Oryza sativa
gtcgggcaagaagatcgccgtgctggggttcgcgttcaagaaggacaccggcgacacgagggagacgccggcgatcgacgtgtgccacggcctgctcggcgacaaggcgcagatcagcatctacgacccgcaggtgacggaggaccagatccagcgggacctcgccatgggcaagttcgactgggaccacccgatgcacctgcagccgacgagccccacggcgttcaagcaggtgagcgtggtgtgggacgcgtacgaggccaccaagaacgcccatggcctctgcatcctcaccgagtgggacgagttcaagacgctcgactaccagaagatctacgacaacatgcagaagccggcgttcgtcttcgacggccgcaacgtcgtcgacccggagaagctcaaggagatcggcttcattgtctacttcatcggcaagccgctcgacgcctggcttaaggacatg

SEQ ID NO: 410184 - DNA, 268 bp, Oryza sativa
gtcgtaaatggctcctccgctgcaccgaggagcgttcagcaacggcttccagctctgcgtcggcatcggcgccgtcactgcccgcctcaccaacttcttcacgcagaagatcaggcaaggctggggatggcgcgtctcgctcgccgtcgccgccgtccccggcgggttgctcaccctcggcgcgctcttcctcccggagacgcccaacagcctactgcagcaaggcagagacaagcgcagagtcagggtgcttctcaccaggatccga

SEQ ID NO: 410185 - DNA, 389 bp, Oryza sativa
cggacgcgtgggcggacgcgtgggcagcggcaaagcaagtgatctctttagctcggatcatctctgcatttgcatttgcagctgctcgtcacggcaatggcatccaccaacagctggacccacgagatcgagtcgccggtggccgcgccgcgcctgttccgcgccgccgtcatggactggcacacccttgcccccaagatcgcctcccacatcgtcgccagcgcccaccccgtcgacggcgacggcagcgtcggcagcgtcaggcagttcaacttcacctcagccatgccattcagccacatgaaggagaggctggagttcctggacgtggacaagtgccagtgcaagtcgacgcttgtggagggcggcggcatcggcaaggcgatcga

SEQ ID NO: 410186 - DNA, 472 bp, Oryza sativa
tctttttgttactgatggtgagcgaatttgggggcttggagatcttggctgccagggaatggggatccctgttggtaagcttgccctttacactgctctaggaggagtgcgtccatctgcttgtttgccaatcacattggatgttggtacaaataacgaggcgctgctgaatgatgagttctacattggcttaagacaaaagagggccactgctcaggagtatgctgattttcttcatgaattcatgactgccgtgaaacaaaactatggggagaaagtactcattcagtttgaggattttgcaaaccataatgcatttgaactccttgcaaaatatggaacaactcaccttggattcaatgatgatattcagggaacagcttccgtggtcctttctgggcttgttgcagcactaaaattagttggtggttcattgtcggagcacaattacctgttcctgggagctggagag

SEQ ID NO: 410187 - DNA, 508 bp, Oryza sativa
ggataagaaccccaagaataaatctgtcgctgctgtaggaaaagcagccggtgataggtggaaatccctgaccgaagcggacaaggctccctatgtagccaaggccaacaagctcaaggccgagtacaacaaggccattgctgcctacaacaagggcgagagcactgccaagaaggcacccgccaaggaggaagaggaggacgacgaggaggaatctgacaagtccaagtccgaggtcaatgatgaggatgacgacgagggcagcgaagaggatgaagacgatgacgagtgagccttccagtggacaagatgggagcagcaagacgctaagggcggcgggcgtcctaaggagcctatccatcatcatcatcgtctactagaattattcagtttcacttcacatcgtgatgttttactttttctctcgtcctataacggatagcgctccttgttggcgccacttgtgggtgtgtggtgcagccaatgtcttgtctccaccgtcaatgat

SEQ ID NO: 410188 - DNA, 509 bp, Oryza sativa
  unsure (1)..(509): unsure at all n locations
gccgtgcaccgcctctcacaatgtcgaccgccgccgccgccgccgctgcccagagctggtgcttcgccactgtcaccccgcgctcccgcgccacagtcgtcgccagcctcgcctccccatcaccgtcctcctcctcctcctcctccaacagcagcaacctcccggcccccttccgcccccgcctcatccgcaacacccccgtcttcgccgcccccgtcgcccccgccgcgatggacgccgccgtcgaccgcctcaaggatgggttcgccaagttcaagaccgagttctatgacaagaagccggagctcttcgagccgctcaaggccggccaggcacccaagtacatggtgttctcgtgcgccgactctcgcgtgtgcccgtcggtgaccatgggcctggagcccggcgaggccttcaccgtccgcaacatcgccaacatggtcccagcttactgcangatcaagcacgctggcgtcgggtcggccatcgagtacgccgtctgcgccctc

SEQ ID NO: 410189 - DNA, 336 bp, Oryza sativa
ttcaagacacgccctactcggagttcaaccacaggttccaagagctcggtttggagaagggttggggtgactgcgcaaagcgtgtgcttgacaccatccacttgcttcttgaccttcttgaggcccctgatccggccaacttggagaagttccttggaactattccaatgatgttcaatggttgtatcctggcttcgcatggatactttgcccaatccaatgtgttgggataccctgatactggtggtcagggtgtgtacattttggaccaagttcgcgctttggagaatgagatgcttttgaggatcaagcagcaagggcttgatattacaccta

SEQ ID NO: 410190 - DNA, 368 bp, Oryza sativa
ctccactctcccctgcccccgtcgccgtcgccaccgccgccgccatgtccgggaggaagaagacacgggagcccaaggaggagaacgtcaccctcggcccgaccgtgcgcgagggcgagtacgtcttcggcgtcgcccacatcttcgcctccttcaacgacaccttcatccatgtcaccgatctgtccgggagggagacgctcgtccccatcactggtggcaagaagggtaaaggtgatcgggacgaatcttccccttatgctgctatgcttgcttcacaggatggtgctcaaagatgcaaggagcttggaataactggtttgcatattaagcttcgtgctactggtggtaacaagacaaaaacccct

SEQ ID NO: 410191 - DNA, 475 bp, Oryza sativa
  unsure (1)..(475): unsure at all n locations
tcgttctgctccgcccccctaccccgcaacccgttgctttgtgccgcgcctcgctttggtcttcatccgcctcagatctgattcgttctaggttggtctggggaagatggcgatcacggtgaggcggtcgacgatggtgcggccggcgtgggagacgccgcgggtgcggctgtggaactcgaacctcgacctcgtggtgccgcggttccacaccccaagcgtctacttctaccgccggggccccgagggagggggcgcgccggaggggttcttcgacggggagcggatgcggcgcgcgctggcggaggcgctcgtgccgttctacccgatggccgggcggctcgcgcgcgacgaggacgggagggtcgagatcgactgcaacggggaaggggtgctcttcgtcgaggccgacgcgcccgacgccttcgtngatgactaccgcgacttcgcgcccaccatggagctcagcgcctta

SEQ ID NO: 410192 - DNA, 384 bp, Oryza sativa
ttaggccagggatgagctccactgtttgctgaatgaggatgagctacgtgatgctgtgctgatggcgtttgcaaacaaacacgaacttaataatgccatgaacggtggtgagagacaccagcaagcttggagtggactccttgagccagagggactgggacatgcagaggacatgagctacctatggtgaggggttgtatgaggggcttgactggatttgcaacaacattgacgacaaggctgggagcattttgaccgggcttaaatgaaaggaagacatgggggatatcagtgagtgaacgctgtctttgtacgtgtggaaactatatagtgatgacagataatgatgtggatggattgggaagatatagctgtttatgacac

SEQ ID NO: 410193 - DNA, 363 bp, Oryza sativa
tgtagctatgaactgccagattcacatccacttcttgaaggagtaagttcataaaacattatagaattctgtactttccttatcaccaactgagaatatattgatgcttattttcttacaatacacagttcaaccaaagagaaccagatgatccttgcccatacctactctctatatggaccccaggtgaaacagctcaatcaactgatgcacctaagtcggtctgcaattcacaagagaatggtgaactatgtgcaagcaatacatgctttagttgcaacaagtttagaaaagcgcaagcccaaaaagttcgagggacactgctgataccatgccgaacagcaatgagaggaagcttttcac

SEQ ID NO: 410194 - DNA, 451 bp, Oryza sativa
  unsure (1)..(451): unsure at all n locations
ggaggggtgcaggtgttgctgtacctatattctcgatcaggtcaaatgaggaccttggtgttggagaattccttgatcttaaacttcttgttgactgggcagtcaactcaggctttcatcttgttcagcttcttcctatcaatgatacttcagttcacgggatgtggtgggattcatacccatacaggtattgggctgatgcagtgtgcttttgctttgagtaagaagaatagtatctgaacagaaataatgccctacatgttggtttacagctcgctctctgtgtttgcattgcaccccttgtacctgagagtacaagcactntcagatgcaattccaggggatattaaggtgtacctttgttataccttcatatgaactcattgtacccgttatctatgttaacttttaatttcaatatttactgattttggtaggtcttgtatgattt

SEQ ID NO: 410195 - DNA, 470 bp, Oryza sativa
tcgtgaagaaaacccaacccgcgcgaagcacaagcacagaagcaaaagcgaacgacgaggagagacgcgaccaccgccgcgggtcactccccatcccaatctcatccagattggatttgagcggatagaggagggatggatgggaatttcgggagcgaggagcggattctgtggccggcgtcggttcttgccggcatcgccatgtgcgccgcggtatatgacataactcaaaaggttagctctcattgcttcaagggttatgacaatataagcccaatgaaaaaggttgaatggaataataggggtttctctacattccatgcattggttgcagctgttgtttctttttacctggttgtgatatctgacctcttccatagcaacataataattgatagaaactcatggctatctgatgccatgtttggggtctcgattggttactttttgacagatttggggatgattct

SEQ ID NO: 410196 - DNA, 492 bp, Oryza sativa
tgtatctatccatccatcccatcctcgatccttcattcctgcccggcggcgagcgagagagaggcggaggagatccgagatggcggggagcgggtggaggaggatcccggcggcgaggaggccgcccatgtcgcgcccggcctcggtctgcctctggatcgtgctcgtcgccgccaccctggcgctcgcccaggcgaagaaatcgaaggcggatttgactgaggtcacccacaaggtctacttcgacgtcgagattgatggcaagcccgcaggacgggttgtcatgggacttttcgggaagactgttcctaaaacggcagagaacttccgagcactttgcacaggagagaaaggaactggaaagagtggcaaagcactccacttcaagggaagtgcattccacagaattatacccagctttatgatccaaggaggtgacttcacacttggtgatggaaggggtgttgaatctatctatgggacgaagttcgc

SEQ ID NO: 410197 - DNA, 236 bp, Oryza sativa
gcagaaacaaacccctctcactcccactaccatggatccttgcaagttccggccgtcgagctcgttcgacacgaagacgacgacgacgaacgcgggagctccggtgtggaacgacaacgaggcgcttacagtgggggccaaggggccgatccttctcgaggactaccacctggtcgagaagggggggcacttcggccgggagcgcatccccgagcgggggggccacgcccgggggg

SEQ ID NO: 410198 - DNA, 278 bp, Oryza sativa
gtaggaggagcttgagcttggagagagacaacaatggcggctcaggctcttctctctgggaggcagctgctggggaggccattgcaatcttcagtctccaggtcttcttcctccaggaaggcacccttcatggtcagggcagaggccactccccctgccaagcaaggggctgacaggcagctgtggttcgcatccaagcagtccctgaactacctggatggcacccttccgggagacttcgggttcgacccgctggggctatcggacccggaggggac

SEQ ID NO: 410199 - DNA, 440 bp, Oryza sativa
tattatcagtgatcctctacaatcatcgactttcagcaaattaagatggctgctgccttctcctccaccgttggagctccggcgtccactccgaccaacttcctggggaagaagctgaagaagcaggtgacatcggcggtgaactaccatggcaagagctccaacatcaacaggttcaaggtgatggccaaggagctggacgagggcaagcagaccgaccaggacaggtggaagggtctcgcctacgacatctccgatgaccagcaggacatcaccagggggaagggtttcgtcgactcccttttccaggctcccacgggtgatggcacccacgaggccgtcctcagctcctacgagtacctcagccagggtctcagaacgtacgacttcgacaacaccatgggaggcttctacatcgcccctgcttttatggacaagct

SEQ ID NO: 410200 - DNA, 477 bp, Oryza sativa
tcttgctttgctcctggatatatagctagcttctttctttcttcctctctccctgtgtggcacgcgcctccaatcgatctcttcggtgagtagacgcatcgagatcggggggaaatgtcggtccagattacatcggagcatgtttgctatggcaactgcaactattgcaacactatccttgtggtgaatgtgccaaacaattgttcctacaacattgtgactgttagatgtgggcattgcacaatggagctctccatggatcttgctccttttcaccaagcacgcactgttcaagatcaccaggtacagaacagaggatttcaaggtaataactttggaagctatgacataggtgtcagaaatcagaggacatcgacagccatgtacccaatgccaaccagtcagcagcaagtgtcacctatacgtccccctgagaaaagacagcgtgtcccatctgcatacaacagattcatcaag

SEQ ID NO: 410201 - DNA, 486 bp, Oryza sativa
ttcttcctcctccccccacccgccttgtcgccgatccgatccgcctccgcctccgcctcgcggcccggcctgcctgcctcgccgccggtggtcccgatccgaggttgctcttgctgggcatcaaacatgggtctggtgaaggatggcgccgccgatttggaggaggggaccctggagatcggcatggagtacaggactgtttctggtgtggcaggacctctggttatcttggataaagtaaagggcccaaagtaccaggaaattgtaaacatccgattgggagatggcaccactcgccgtggccaagttctggaagttgacggtgaaaaggctgttgtgcaggtctttgaaggcacttcaggaatagacaacaaatataccactgtgcagttcacaggagaggttctgaaaactcctgtctcacttgatatgcttgggcgcatttttaatggatctggaaaaaccattgataatggcccacctatt

SEQ ID NO: 410202 - DNA, 382 bp, Oryza sativa
tttgtgacgccgtgccgggcgcccgtgtcgagcccgctcgcccacgggcaccaccaaggccagggcgtaatggcgttcggtggtcagaacccgcggccgtctaccagtcgcggtacgcagtgcctctacgttcgcctcaacacgcttcacttcatgctcagccacgtgcacgcgctcgacaagtcgctctccttcttctcccgcggcaggtgctcgtcgtcgccgtcgtccgccgccaccgcccgcctcctcgcgccgtgctcccacttcgaccgcgcgcgcgccgtggcgcagtccgcggtcgggcacgtcgccgaggtcgccgcgtaccgacttatctttctcgacttgcaccactcgttctacgacgggctttacgtgg

SEQ ID NO: 410203 - DNA, 395 bp, Oryza sativa
tcgtattaattatgctgccactgatgctgaaggtgatcatactttgattgctggtgatgacctcatccagtcagatgtgatactggggtcaaagaaaattgaggcccctgtattatttcggggaattggacatgcggttaatccatctaacagcttggtcctgaaagtcttatccgcctctccgtcagcatactcagcaaacccaaagtctaagttggcttcccctccatctctcacagggtcggctatatcactggtttctgttatgcaggcaagaaacaatgctcgggtcttgatatctggatcacttcatctgtttagcaacaggttcctaaaatcttggtgtcaaaaggccggtagcaagataaggcatgaaaaagctggaaatgaacaat

SEQ ID NO: 410204 - DNA, 386 bp, Oryza sativa
tcgtgtttgcccgaaggagcacttcgccgcattattttgactgcatcaggtggtgctttcagggactggccagttgacaagttgaaagaagtaaaagttgctgatgctttaaagcacccgaactggaatatggggaagaagattactgtagattctgctacattattcaacaagggtttagaagttattgaagcacattatttatttggtgctgaataccatgacattgaaattgtgatccacccacaatctatcatacactctatgattgaaacccaggattcatctgtgttggctcaactgggatggccagatatgcggataccaatctttatacaccatgtctttggtcagacagaatctattgctcaaaggttacctggccc

SEQ ID NO: 410205 - DNA, 513 bp, Oryza sativa
tctgtcggcgacgctggagaggcggtcctgcgacgatggtccacgtcagcttctaccgcaactatggtaagacattcaagaagccacgtcgcccttacgagaaggagcgtgttgatgcagagctgaagctagtgggtgagtacggactgaggtgcaagcgtgagctgtggcgtgttcagtatgctttgagccgtatccgtaacaatgcaaggcacctgctcacacttgatgagaagaatccacgccgcatcttcgagggtgaggcactgcttcgccgcatgaaccgttatgggctccttgctgatgggcagaacaagcttgattatgtccttgccctcactgttgagaactttctcgcaaggcgtcttcagactcttgtcttaaggctggcatggccaagtccatccaccatgctcgggtcctgatcaggcaacgccacatcagggtcggtaggcaaattgtcaacatcccgtcgttcatggtgagggttgagtctgagaagcacatttgact

SEQ ID NO: 410206 - DNA, 432 bp, Oryza sativa
tcggtcgctgtcacgcgcttcgtgctcgccgccttccaccttcgtgctaccccccgccatggcttcctccctcgccggatccgccctctccttcgccacccccgtcaaggcagtcaagactaattcgatatctttcaccagcgcaaggaagggaaatgcatttctccgcctgcagccagtgcctatgagatttgctgtttgctgtgccgcaaaaaaggagacagtggagaaggtttgtgacattgttaagaagcaactcgctgttcctgagggcactgaagtttctggtgcatccaagttctcagatcttggtgctgattcactggacacggttgagattgtgatgggtctcgaggaggagttccacatcagcgtcgaagagtcaagtgcgcagtcaattgcaacggttgaagaagccgctgcactcatcga

SEQ ID NO: 410207 - DNA, 426 bp, Oryza sativa
tcgtggacgcgtgggcgagcccgccggaggccaaaacgccttctgcggcagcatccaccaattcgccatggcctccgagaccgagcccgacgccgtggtgttcgaggctccggcgcacttccgcatctacaagagcggcaagatggaccgccttcaccgaccaccctgcctgcccgctggcgtcgacgaggccaccggcgtcgcctccaaggacgtcgtcatcgacgccggcaccggcctctccgtgcgcctctacctccccaagatccaagagccatccaagaagctccccgtcctcgtcttcttccacggaggcggcttcctcatcgagtcggccgactcctccacgtaccacaactacgtcaaccccttcgccgccgcggccggcgtcgacgtggtgtccgtcgactaccgtcttgccccgga

SEQ ID NO: 410208 - DNA, 416 bp, Oryza sativa
tcgtggacaccagcgtcgacgggaccggccgcattggcgtgcagctctcgccctacttccgtgtcactcgcgtccaccccaacaacctggccgaggccaccgtcctcgccttgcgcgagttcaccgcattgagcgccacggtgctcgacggcctcaggcagacgttcctcaacttctcgcagacggcggagaaggtgtctggtccagttgcaatcattgcggttggcgcagaggtggccaggtcaagcgccgagggcttgtttcagtttgcggctgtgataaacctcaaccttgctgcaataaacttgttgccattgccagcattagacggtgggacgttggcgttgatccttctcgaggcggcccgtggtgggcagaagatcccccgtgaaatcgaacagaggatcatgtcgtca

SEQ ID NO: 410209 - DNA, 464 bp, Oryza sativa
tgtagcaccggcggtcaataattaaaaaaaaaaagaaaaaaatggctttcagaaaccatgacgctgccatggtcctcttcttcttcctcctcatggtgactacctacgccaacgcgcacggacacagcaagaagcccgaggagatcactcagggcgtttacggggcggcggcggcggtggcggccggccccggcggcacgttcgacatcaccaacctcggcgccgtcggcaacggcagggcggacagcaccggcgcggtgatggcggcgtggaggtcggcgtgcgccggcgccgggaagcagacgatcctgatccccaagggagatttcatgacgggggcgatggagctcaggggcccctgcaatggcgccgtgaccatccagctcgacggcaacctgctgggctccaacgacctcagcaagtacccgggcaagaagatgcccaatgggtcgaggtcccgcatg

SEQ ID NO: 410210 - DNA, 407 bp, Oryza sativa
tttatataacatgcggaaggtcctgctcgctctgctcactcagctctgccccgcgcgcgccaccagcgcgctcatgtcgagcaacatcgacttatgacgattacaagactacttcactgcggactgccttaagggctaccatgacgagttcatttccaccctcggattggcctaaggcggcgtacgttgccacatcccctacaccaagatgaccggctacacgccttttgaccactacggtctggtagacatggagaggtgccacgacctctggctgacatcggggggggacataggagcccacatctgccgtggtcacgaaaaccatgacggcaacttgggccttgccctctgtggtcagaccaacatgcttaacggagtattctactggaacggccagctactgg

SEQ ID NO: 410211 - DNA, 495 bp, Oryza sativa
tactttcgtgctcctcttcctcatggcgatctcgaaggcttggatctcgctgctgctcgcgctcgccgtcgtgctgtcggcgccggcggcgagggcggaggaggcgcccgcggctgaggaggaggcgccggcggcggaggccgtgctgacgcttgacgcggacggcttctatgaggcggtcgccaagcacccgttcatggtcgtcgagttctacgccccgtggtgtggacactgcaagaagctcgctccagagtatgagaaagctgcacaagagctaagcaagcacgatccaccgattgttcttgctaaggttgatgccaacgacgagaagaacaagccacttgctaccaagtatgagatccagggtttcccgaccctcaagatattcaggaaccagggcaagaacattcaggaatacaagggcccaagggaggctgagggtattgttgaatacttgaagaagcaggttggtcctgcttccaggagatcaagtca

SEQ ID NO: 410212 - DNA, 494 bp, Oryza sativa
gtccaacgcacagcgcgactcgccgtccgtcagcggtggtcgcggcggccggctacaagatgatggcgtgcagggccctcgcgctcctcccgctcccggcgccctcccgtctcccccgcccgcgcgccgcctcgctcgcgcggctcgacgccgcccgccgccgcgcctctgcctccttattggtccggtgctgcgccaaccccgccggtcccggaggccaggaggatccgccgcaggacgccgtgctcaaggccatctcccaggtagcgaactctaaaggacgggttgcacagacaacaaatgttgtcatgggtggtactgcgacagatgatgcaactgatgaatggcttgttctggataagcaggtaaatacatatcctacagttagaggatttactgcaattggtactggaggagatgattttgtccaggccatggtggttgcagttgaatcagtactggaaggacaaattccaaaggctcagattttccat

SEQ ID NO: 410213 - DNA, 485 bp, Oryza sativa
tttctttctggatctgtgaaggtggagaaattaatgaacattgaacgctactcccatgtcatgcacatcagttccacggttaggctcttcttctatactgcgaaacaacgggtctgcactcattatgtacctcggcaatgttgcgtcattattatttccttcagcattccagtctgcattggtagttcagacaaatgtctttttatgctaagaaaatctaggatcttaactcattatgcataacactatcagatgtattacctattgcgacaaaatggatatgtggtttctaagcaatttattggcttgttttataaacagccaacaatttctgcaattttgacgcttctatgtttcaaatgtgtcttgtctaatagacatgaaagtgcaaagcttttagtagcaccacaagtgactgatcttactgctatcttttctagggttggtacgatacattgtgtaatgagcaatggttacaataatga

SEQ ID NO: 410214 - DNA, 511 bp, Oryza sativa
ttctgtagcgctacgtctacaagcgccgctccgatggtatctacatcatcaacctcggcaagacatgggagaagctgcagctcgcggcgagggtgattgttgccattgagaacccccaggacatcattgtccagtcggcccgcccctacggccagcgcgccgtcctcaagttcgcgcagtacactggcgcgcacgccattgctggaaggcatacgcctggtacatttaccaatcagctccagacctccttcagcgagccccgtctgctcatcctcaccgacccaaggaccgatcaccagccaatcaaggagtctgctctgggaaacatcccgaccattgccttctgtgacaccgattccccaatgcggtatgtcgatatcggcatcccggccaacaacaaggggaggaacagcattgggtgcctgttctggctcttggctaggatggttctgcagatgaggggtactatcctcccttgccacaagtgggatgttatggatgatctgttttt

SEQ ID NO: 410215 - DNA, 465 bp, Oryza sativa
ctcctggctatggtgcaggagcaggagtggctcgccgccggcgaggacgacaggatcaccgacacggaaatcaaggcccttatcctgaatctattcgtggcgggcacagacacaacatcaaccatagttgagtggacaatggcagagctgattcgacacccagatatcctcaagcaggcccaagaggagctagatgttgttgtgggtcgtgataggctcctctcagagtcggatctatcacatctcaccttcttccatgctatcatcaaggagacattccgccttcatccatcaaccccgctctcgctgccacgcatggcatctgaggagtgtgagatcgcaggctaccgtatccccaagggtgcagagttgctggtcaatgtgtgggggatcgcccgtgacccagccatatggcctgacccactagagtacaagccctctcggtttcttcccggtgggacgcac

SEQ ID NO: 410216 - DNA, 481 bp, Oryza sativa
gtcggctcctcctcctcctcgtcctcagcctcatgtcatggtgcttcccttccctgcgcaaggccatgtcatgcctctgatggagctctctcaccggctcgtcggcctcggcttcgaggtcgaattcgtgcacaccgacttcaaccgcgaccgcgtcatcaacgccatggcgaacgagacgggggcgatccctgatgggatccacatggtgtccttcccggacggcatggaccctgccggtgaccgtgccaacatcgccaagctgggtgacggcttgccggccgccatgctcggcggcatcgaggagatgatcagatcggaggggatcagtggggtgatcgccgatgtgtccatggcctgggtgacggagctggccgccacggtgggtgtccacgtcgccttgttctcgacttactccgccgccgttgtggcgcacaggctgcaagtccccaagctgatccaggatggcgtcctgcacgaa

SEQ ID NO: 410217 - DNA, 489 bp, Oryza sativa
aaaagggagctagtacaaagcctcaatacacactggagtaaaaccagcaacggcatctgcgctccacatctcgcgatgtgcagcggtctgagataaacagtttctatgtgatggaacttaaaagtctcttttattcaaaaacacgggagcgggcaatcgctcactatctgtccctctgggtattgcttagttttagttgaggcatgagtaagcgagcgtcttctcctccgacagctcctgggcagtcgcgtccatcttcttccttgagaactcgtcgatcgggagaccctgaacaatcgtccattcgccaccactgcatgttactgggaacgagtagatcagaccagcaggcacaccatacgaaccatcagagtacacacccatggagacaaatgttccctcaggagtgccaagaacccagtcacgaatgtgatcgcatgcagagctggcagcagatagggcactggattgcttcctcgccttgatgat

SEQ ID NO: 410218 - DNA, 504 bp, Oryza sativa
tgtcgcctctcctcctcctccctaacccctacgcttccagaaccttctcgaagctcccgctcccccccccttccgctccaatggcgaaggaaccgatgcgcgtgctcgtcaccggcgccgcaggacaaattggatatgctcttgtccccatgattgctaggggtgtgatgttgggtgctgaccagcctgttattctacacatgcttgacattccaccagctactgaatctcttaatggccttaagatggagctggttgatgctgcatttcctcttttgaagggaattgtcgcaacaactgatgttgtggaggcctgcactggtgtgaatgttgcggttatggttggtgggttccccaggaaggagggaatggaaaggaaggatgttatgtcaaaaaatgtctccatctacaaatcccaagcttctgctcttgaggctcatgcagcccctaactgcaaggttctggtagttccaatccagcaacaccaacgctctcatttaaaag

SEQ ID NO: 410219 - DNA, 505 bp, Oryza sativa
atccactcacgcacacactcctcatcccagagcaagaagctcatctcctcctcctctcgcatggcagccatggccaccaccgcgtccagcctcctcaagacctccttcgctggcgcgcgcctccccgccgccgcccgcaaccccaccgtctccgtcgcgccgcgcaccggcggcgccatctgcaactccatctcgtcgtcgtcgtccactcccccctacgacctcaacgccatcaggttcagccccatcaaggagtccatcgtgtcccgcgagatgacccggcggtacatgaccgacatgatcacctacgccgacaccgacgtcgtcgtcgtcggcgccggctccgcggggctctcctgcgcgtacgagctctccaaggacccctccgtcagcgtcgccgtcatcgagcagtcggtgtcccccggcggcggcgcgtggctcggcgggcagctgttctccgccatggtggtgcgcaagccggcgcacctgttcctcgacgagctcg

SEQ ID NO: 410220 - DNA, 473 bp, Oryza sativa
gaaaaatttctccccaatctcgcgaggctctcgtcgtcgaatcgaatcctctcgcgtcctcaagatgcagatctttgtgaagacattgaccggcaagactatcaccctcgaggtggagtcctctgacaccatcgataatgtcaaggctaagatccaagataaggagggcatccccccggaccagcagcgtctcatcttcgctggcaagcagctggaggatggcaggacccttgctgactacaacatccagaaggagtcgacccttcaccttgtcctccgcctccgtggtggcatgcagatctttgtcaagactctgaccggcaagactatcacccttgaggtggagtcttctgacaccatcgacaacgtcaaggccaagatccaagacaaagagggcatccccccagaccagcagcgtctcatcttcgcccgcaagcagctggaggatggcaggacccttgctgactacaaca

SEQ ID NO: 410221 - DNA, 509 bp, Oryza sativa
tgttcaaccagctgctgtccctcatcatcaacaccttctactccaacaaggagatcttcctccgcgagctcatctccaactcctccgatgcattggataagattaggttcgagagcctcacggacaagagcaagctcgatgcgcagccggagctgttcatccacattgtccccgacaaggctagcaacaccctgtcgatcatcgacagtggtgtcggcatgaccaagtcggacctcgtcaacaacctcggtaccatcgccaggtcggggaccaaggagttcatggaggcgctcgctgctggtgctgatgtgtccatgattgggcagtttggtgccgggttctactccgcctaccttgttgctgaagggtttgttgtgaccaccaatcacaacgacgacgagcagtatgtgggggagtcacagggccgtgggtccttcacttgtacacgtgatacctctggtgagcagcttggacggggtactaagatcaccctctacctcaaggatgat

SEQ ID NO: 410222 - DNA, 356 bp, Oryza sativa
aaggttaagatcaccatcaacttttgaaaaaacaactttgcataagcatctactacatccagcagcatgaaacataatgttcaaggtatcagactttggaagatacttaaatactaggccaaacggttcgtatttcaaaattcagctaacacctccactggtttcactaagacgaccacacttcaagccaggtgttcacttctttgccttcttaggtgccgctgcagtttgagcaggagctgccgctggaagagctgctggctctcttgggccctgagccaaccctttctcccttctaacaatctttctctcacggatttgcttgctcttggcacgcttagcctcaaactggtcag

SEQ ID NO: 410223 - DNA, 400 bp, Oryza sativa
tcttctctccaccacacactcccacccaggtaaggagagggaggaggaagggaacctcgaaggcggcggcggcggcggcggagacggtttccctcaagctgcagaagcgtgctcgccgacagcgtgctcaagtgcggcaagggcaaggtctggctcgaccccaatgaggtcaacgagatctccatggccaactcccgtcagaacatccgtaagttggtcaaggatggattcatcatcaagaagccccagaagattcactccaggtcccgtgcacggagagcccatgaggctaagcagaagggacgtcactctggctatggtaagcgtaggggtacaagggaggctaggctccccacccagatcctgtggatgaggaggatgcatgcgctcaagccattgc

SEQ ID NO: 410224 - DNA, 260 bp, Oryza sativa
aaaataagcaaaaaattccctcgatcgaacacacacacccccacaattaagggacatacatacatgcactggtgaaactgcaactgcaggggcggggcggggctaccacaagggtccacatggtaccttggttggcaccattctcgaacgggtcgttgggcttacttgccggggacaaatttgggggggtatgcccaggcgttgttggcaacgggggcgggaacagggtccaaaaaagttctcaaaggggcccttgccgg

SEQ ID NO: 410225 - DNA, 482 bp, Oryza sativa
  unsure (1)..(482): unsure at all n locations
taaaaaccaacccaaccgccgccgcatcgccctcgttagaacgatggccgcgtcggcgctgcaccagaccaccagcttcctcggcaccgcccctcgccgggatgagctcgtccgccgcgtcggcgactccggtggccgcatcaccatgcgccgcaccgtcaagagcgcgccccagagcatctggtatggacctgaccgtcccaagtacctgggcccgttctcggagcagacgccatcgtacctgaccggagagttcccgggagactacgggtgggacacggcggggctatcggccgacccggagacgttcgcgaggaacagggagctggaggtgatccactcgcggtgggcgatgctgggggcgctgggctgcgtcttcccggagatcctgtccaagaacggngtgaagttcggggaggccgtgtggttcaaggccggcgcgcagatcttcttcagggggggctcgactacctggggaaccc

SEQ ID NO: 410226 - DNA, 447 bp, Oryza sativa
tcgggtggaacgcgtacttacccacaagttaggtgcatgccatggcaccattcatggcgtgcgcctcgccaccggtactcacgctggccctgctcgcgtcgtgcggtgcccttctcgccacctccatgctcccggcgcgtgcgacggcgggcagctgcttggacgtcggcgacatggtgatgatggacaggttccgcgcttggcagggagctcacaaccgatcgtacccgagcgcagaagaggcgctgcagcggttcgatgtgtaccgccgcaacgcggagttcatcgacgccgtcaacctgcgcggcgacctcacttaccagctcgccgagaacgagttcgcagacctcaccgaggaggagttcctggccacgtacaccgggtactacgccggcgatggccccgtggacgactccgttatcacgacgggtgccggagacgtcgacg

SEQ ID NO: 410227 - DNA, 417 bp, Oryza sativa
  unsure (1)..(417): unsure at all n locations
tttctgagctctatgcgttgtgccggtacatgtcttctggaagagtacctggaaattcagaacctgctggactaattgaagacaaagagggtgaagacaataaagagagctcaaaaacagatgagtctgaactcagattggcacaacttcaacaccagctcccaactaatgaacctggagcgctgatgcatcttgtacaagaatctactgctgctgatgcanacgacgctgatgccaaagaatgcaggagtttattcaaaaacctgaagttttacctaagtcgtgaggtgcctagggaatctctcttatttatcattccagcatttggtggtaccgtttcatgggaaggagaaggagctccttttgatgagacagatgaagacatcactcatcagattgttgatagaccgacccaaa

SEQ ID NO: 410228 - DNA, 472 bp, Oryza sativa
ttcttttctcgcctccttcccctttcccccctgacgtctctgctcttctccggcgcaccaatccgccccctcgcgattcgaccagatcggtgcgagggcatatcatggcatctaagcggatcctcaaggaactaaaggacctgcagaaagatcctccaacatcatgcagcgcaggtcctgctggtgaggatatgttccattggcaggctaccattatgggtcctccatatagtccctatgctggtggagttttcttagtgaatattcatttccccccggactaccccttcaagcctccaaaggtatcttttaagacaaaggtcttccatccaaacattaatagcaatggaagcatatgccttgacattcttaaagaggcatggagccctgctttgacaatttctaaggtgttgttttcgatctgctcgttgctcacttgaccccaacccggacgaccctcttgtccctgaga

SEQ ID NO: 410229 - DNA, 472 bp, Oryza sativa
ggaagtaagaatcaagagccattttaatgtgcacatgagtagccaaaattccctactattgcccccagataggttaaaatatacatccgggccataattccaccaatatttttttgttcataccacaggattccctttcgttcaaaggtctacgatttccacatacctagagaattcaggccaacagtttgccacttccagggaacctgttcataagggacagacagtacacagtaacctactcttgcattagccacggtatgctcatactgatgggaagaacttgttcaggttgaacggcagggaatagaactcctcgcttcttgtgtcaatcctgtatgatcggaatttatcccaccaatggtggcctcgatcttttctgacagaactatcatgcctgtgaatcgtgttgtccagcaaatatgcaacaaagccagcaacgaaagcctttgacgagaatatgacattcacg

SEQ ID NO: 410230 - DNA, 429 bp, Oryza sativa
tcgttggtcttctccacctcctcctccaagccgcgcctcggctcctccgtcggattctcctcgcccgcgcggttccggcgcacggcggcggcggcggcctccaggggcacggggcggcgcgcggggctgctggtagtgcgcgcggcgagggggaagttcgagcggaccaagccgcacgtcaacatcggcaccatcggccacgtcgaccacgggaagaccacgctgacggcggcgctcaccatggtgctcgcctccgtgggcgggagcgcccccaagaagtacgacgagatcgacgcggcgcccgaggagcgcgcccgcggcatcaccatcaacaccgccaccgtcgagtacgagaccgagacccgccactacgcccacgttgactgccccggccacgccgactaccggaagaacatgattaccggcgcc

SEQ ID NO: 410231 - DNA, 400 bp, Oryza sativa
tcgtccatatcacatcctctccttcctcttcctctgctcactcagctctcccccgcgcgcgccaccgtcgtcgccatgtcgggcaacatcgccttcggccgcttcgatgactccttcagcgcggcctccctcaaggcctacgtcgccgagttcatctccaccctcgtcttcgtcttcgccggcgtcggctccgccatcgcctacaccaagttgaccggcggcgcgccgcttgacccggccgggctggtcgccgtggcggtgtgccacgggttcgggctgttcgtggcggtggccatcggcgccaacatcttcggcggccacgtcaacccggccgtcaccttcggcctcgccctcggcggccagatcaccatcctcaccggcgtcttctactggatcgccc

SEQ ID NO: 410232 - DNA, 416 bp, Oryza sativa
tcgttacgagttctgcagcggccaaagcatgaccagaactttggaaagataccaaaaattcagttatggtgggccagatactgcaatacagaacaaggaaaatgagttagtgcaaagcagccgcaatgagtacctcaaactgaaggcacgggtggaaaatttacagaggacccaaaggaatcttcttggtgaagatcttgggacacttggcataaaagagctagagcagcttgagaaacaacttgattcatccttgaggcacattagatccacaaggacacagcatatgcttgatcagctcactgatctccagaggagggaacaaatgttgtgtgaagcaaataagtgcctcagaagaaaactggaggagagcaaccagttgcatggacaagtgtgggagcacggcgccaccctac

SEQ ID NO: 410233 - DNA, 498 bp, Oryza sativa
tctctctatcggctgcagcaaagaatggcaggagctgggaggactaggagcacggccatggcggcgtggtcgtactcgtcgctgctgctgcagctgctgcttctctcgatggtcgccgtactagacggcgcggcgacgaccggcggcggcggtgccggggcgccggcgccggcggcggactgcacggacgcgctgctgagcctggcgggttgcctgagctacgtgcaggaggggagcacggtggcgaagcccgacgcgccgtgctgctcggggctcaagggcgtggtgaagaaggaggtggcctgcctctgccaggcgttccagggcagccagaacttcggcgtcacgctcaacatgaccaaggcgctccagctgcccgccgcgtgcaaggtcaagacgccgccgttcagcaagtgccacctttttatttcgggccggactggtggtgcttctgctcccgcttcattcttcggggctcgtttttggggggtcgcccct

SEQ ID NO: 410234 - DNA, 436 bp, Oryza sativa
gtctcaatctcttccaacctgcacacgactttctgccaatgatcgatgaggttaccaagtccctcttgcaagttgtcagtggaattgaaggtgcaactgttgagaacaacaaattctgcgtttctgtacattatcgcaacgttgcagagaaggattggaaactggtcgcacggctcgtaaacgaagtgctggaggcttttcctcgtctcaaagtaaccaatggacgaatggttttagaggttcgtccggtgatcgactgggacaagggaaaggctgtggagtttttgctccagtcactcgggctaaatgactctgaaaatgtgatccccatctacattggagacgacagaactgacgaagacgctttcaaggtacttcgacagcgaaattgcggttatggaatactagtttcacaggttcccaaggaaactgaagc

SEQ ID NO: 410235 - DNA, 451 bp, Oryza sativa
gtgcgtgccacttatggatcctatagtcacgcttttcggcagtgtccatgagaacatgcctcatgctggaggaagcatgcggagtacattgtttcccaactttggtagtatgtttagtgtgacagatcagcaccccaaggttgatcaatgggatgaggagaaccttcatagggatgatgaggaatacgcgtctgatggtgctggaggtgactatgaagacaatgtccacagcccgttgctgtcccgacagaccacgagcgcagaagggaaggacattgcacaccatgctcatcgtggaagtgctctgagtatgagaagaagaagcctcttggaagagggtggcgaggcggtgagcagcactggcattggtgggggatggcagcttgcatggaaatggtcagagcgagaaggcgaggatggtaagaagggaggaggatttaaaaggatctac

SEQ ID NO: 410236 - DNA, 494 bp, Oryza sativa
ttttagtgtccctagatatggaaggaagagaggcaggcttatggtaagccctggtgaatatttgtgggaggtcagtaagtggtggcctgattaagactgcatcagagaaatttgtggttatctttctttactaatgacggcattgacgagaatgaagttcccaaagcgctatgtcattgtgctgctgacattcatctgcacaaatgtttgttacatcgagcgtgtcggattctcgattgcttacaccgtggcagctgatgccattggcgtgaatcaagcaaacaaaggcatgatactttccatgttctactatggttatgtcttatcacagatccctggtggatgggcagcacagagaattggaggtagacgtgttctgctgctgtcatttgtgctgtggtctttgatatgcggtttaattccactagaccccaagagagaagtcatcctggtcctttctcgcctttttgtcggcgtagcacaaggattcatat

SEQ ID NO: 410237 - DNA, 510 bp, Oryza sativa
tgtgatgcgcaaagatcatctctttgcttctcgccttctcctcctcctcctcttctccctcctcgtgctccgcccgatccgtccgccgcctccagatccgcgcccatggcgtcgcgcaggcgaatgctcctcaaggtcatcatcctcggtgacagcggggtcgggaagacgtctctgatgaaccagtacgtgaacaagaagttcagcaatcagtacaaagcgacgatcggcgcggatttcctgaccaaggaggtgcagatcgacgaccggctcttcacattgcagatttgggacacagcgggacaggagcgatttcagagtcttggtgtggcattttaccggggagctgactgctgtgttcttgtatatgatgtcaatgttaccaagtcatttgaaaggctcaacagctggcgtgaggaattcctaattcaagctagcccatcagatccagagaatttcccttttgttgtacttggaacaaaattgatgttgatggtggtaatagcccga

SEQ ID NO: 410238 - DNA, 482 bp, Oryza sativa
ttaatattccccatctgtgaaattcgcaaaaccctagcgcggcggcgatgtcgaacacgagggtgttcttcgacatgaccgtcggcggagctccggcggggcggatcgtgatggagctgtacgcgaaggacgtgccgcggacggcggagaacttccgcgcgctctgcaccggcgagaagggcgtgggcaagagcggcaagccgctgcactacaaggggagcaccttccaccgcgtgatcccggagttcatgtgccagggcggcgacttcacccgcggcaacggcacgggaggggagttcgatctacggcgagaagttcgccgacgaggtgttcaagttcaagcacgacagccccggcatcctgtccatggcgaacgccgggcccaacactaacgggtcccagttctttatctgcaccgtgccctgcagctggctggacgggaagcacgttgtgttcggccgcgtcgtcgagggcatggacgt

SEQ ID NO: 410239 - DNA, 424 bp, Oryza sativa
tttttcgccaacccgacacgtctctcatcttcacgcaacgaacagcagcagcagctcaagctaagctaagctaaagtactacgtgttctttcgtcttcgtcggcgccggagtttgattcgtcggagctagctagcaagaggaagaagaaaatgttggccatattccagaagcaggtggcgcacgcgccggcggagctgaacagcccgcggagcagcgcggcgaatcccaagaaccccgacgagatcctcagggacttccacgccctccaccccatcgaggccttctccacctccttcggcggcggcgccgccctcgcctgcgtcgccggccacgcccgcaatggcctctctggctacgagaggatgttctgtgggctggatgacatctactgcgtgttcatggggaggctggacaacctgagca

SEQ ID NO: 410240 - DNA, 440 bp, Oryza sativa
tttttgagggggcgggcgtgcgtgcgtcgtcgatcgtcgacagtcgtctcttgccaccatgtctttcaccggcacgcaggacaagtgcacggcgtgcgacaagaccgtccacttcatcgacctcctcaccgccgacggcgtcccgtaccacaagacctgcttcaagtgcagccactgcaaagggattctctcgatgtgcagctactcgtccatggacggcgtcctctactgcaagacccactttgagcagctcttcaaggagacggggagcttctccaagaagttcgcgccaggttgcagatctacagacaaggaactggcaagggccccaagcaagatatgttcagcgttttctggaactcaggataagtgtgcagcctgtcagaaaacagtgtacccacttgaaaagctaactttgaaggtgagtcatccacaagagc

SEQ ID NO: 410241 - DNA, 497 bp, Oryza sativa
tcgtaaagactgtagatgtggaagagctcactgttgaggagcgcaacctcttgtctgttgcttacaagaatgtgattggtgcccgccgtgcctcctggcgtattgtctcatccattgaacagaaggaggagggtcgtggcaatgaggaacatgttactctgatcaaggagtaccgtggcaagattgaagctgagctgagcaagatttgcgatggtatcctgaagttgcttgactcacaccttgtgccctcatctactgctgcagaatctaaggtgttttacctcaagatgaagggtgattaccacaggtaccttgcggaatttaagactggtgccgagagaaaggaagctgctgagagcacaatggtggcttacaaggctgctcaggatattgctctggcggatcttgctcccacccattccataaggcttggactggcacttaacttttctgggttctactacgagattctaaactctccagacaaggtttgcaac

SEQ ID NO: 410242 - DNA, 485 bp, Oryza sativa
tcgttaatgttcaccgtggaattcatgttctcagtgcaaaggctaccgatgcatatgagagtgcaagaacaaaagttgcaaattttgtcaatgcagctaatagtagagagattgtttttacacgtaatgctactgaagctatcaatttagtagcatattcgtggggcatgtccaacttaaaacaaggagatgagattgttcttacgattgcagagcatcatagcgctattgttccttggcaatttgtttcccagaagactggtgctactttaaagtatgttgggctaaccaaagaaggggttccagacattgagcagttgaaaggtcttctgtcaaacaagacgaagattgttgttgttcatcatgtctcaaatgtactcggttcaatgcttcctattgaggatattgtaacatggtcaaacagaattggtgctaaagttcttgtcgatgcttgtaaagtgtttcttatatgcctgtcgatgttc

SEQ ID NO: 410243 - DNA, 457 bp, Oryza sativa
ttctttagaccaaccggaatcgtcgcgcgccgcggccgtcgtctcctcgccgtgcaccgcagccgtcgagcccatcggcgccggtcatgtcgatcttcgagtacaacgggagcgccgtggtggcgatggtggggaagaactgcttcgcgatcgccagcgaccggcgcctcggggtgcagctgcagacggtcgccaccgacttccagagggtgttcaagatccacgacaagctctacatcggcctcttcggcctcgccaccgacgcccagacgctgtaccagcggctggtgttcaggcacaaactgtaccagctgagggaggagagggacatgaagccgcaggcattcgctagcctggtctccgcgctcctctacgagaagaggtttgggccgtacttctgccaaccagttattgctggattaggagataatgatgagccatttatatgtaccatgga

SEQ ID NO: 410244 - DNA, 514 bp, Oryza sativa
gttgctgtcacgcgcttcgtgctcgccgccgtggaccttcgtgctaccccccgccatggcttcctccctcgccggatccgccctctccttcgccacccccgtcaaggcagtcaagactaattcgatatctttcaccagcgcaaggaagggaaatgcatttctccgcctgcagccagtgcctatgagatttgctgtttgctgtgccgcaaaaaaggagacagtggagaaggtttgtgacattgttaagaagcaactcgctgttcctgagggcactgaagtttctggtgcatccaagttctcagatcttggtgctgattcactggacacggttgagattgtgatgggtctcgaggaggagttccacatcagcgtcgaagagtcaagtgcgcagtcaattgcaacggttgaagatgccgctgcactcatcgacaagcttgttgagcagaaatctgctgaagcgaaatcatcttgatatgcacaaatcacaaatgtgaagctcgtaaactagctttac

SEQ ID NO: 410245 - DNA, 363 bp, Oryza sativa
ttgtgattgcgttcgtaaaccctactagctggtgttctagatcttctcttcctccttaatttgatagccttaaacctctcttaaataaataattcaagtaataacagtttggtggttcacccaaaagtttgggggttcaactgaacccccatgtgccaaggtggatccgcccctgtgtcgaggtcttggtggtggtgggtaccatttcagaatcaaacctcatttcccatgcataaagtagtatgtatagtggtgtttacttaattttaggagaggttgtcttccatgttattatcttatatgatttgaggcatattattccagattcaccagtcttcactgttggctgaaagaacaaccatt

SEQ ID NO: 410246 - DNA, 487 bp, Oryza sativa
tctttggagctaaaggaaaagatagaggatgagggccgggtgaacatgattctggacaacctcccgctagttgtgcctattacaaggccagatagggatgatgctgtttttcagggtggatatcatgttggtgttaagggccaatatgctggtagcaaggatgagaagtactttatccataaccacctgatatttttagtgaagtatcacaaggatgaaaattcagatctctctagaattgttgggttcgaggtcaaaccatttagtgtaaaacaccaattcgaagagaaatggaatgatgcatatactcgtttgagcacatgtgatccccatgccaacaaaataataataaactcagatactcctcaagaggttgaagctggaaaggatatcatattcacatatgatgttggctttgaggaaagagatatcaagtgggcttcttgctgggacacctatgtgcttatgacagatgatcaaattcact

SEQ ID NO: 410247 - DNA, 469 bp, Oryza sativa
tgccggcgaggaagcggctgatgcgggactgcaagcgggtgcagcaggagccgcccgccggaatcagcggcgcgccgcacgacaacaacatcatgctctggaacgccgtcatattcggaccggatgacacgccgtgggatggaggcacgttcaagctgacactacaatttacagaagattatcccaacaaaccaccagttgttcggtttgtctcaaggatgtttcacccaaatatttatgcagatggaagtatctgcttggatatcctacaaaatcaatggagccctatatatgatgttgctgcgatattgacctctatccagtccctgctctgtgatccaaacccaaactcccctgcaaactccgaagcagccagactgttcagcgagaacaagcgcgagtacaaccgcaaagtccgcgagattgtggagcagagctggacggccgactaagccaaggacatgattga

SEQ ID NO: 410248 - DNA, 475 bp, Oryza sativa
tggacgcgtgggcggcgccggcgccggggggagcctggacctccccgtgggggacctagcgtcctccgacctcgccgccgccgccaaatccgtccgaaaggcttgcgtggagtacggattcttctacgtggtcaaccatggagccgagggattggcggagaaggtgttcggggagagcagcaagtttttcgagcagccgctgggggagaagatggcgctgctgaggaacagaaactacctggggtacaccccgcttggcgccgataagctcgacgcctcgtccaaattcaaaggagatatcaatgaaaattactgtatcggacctatcagaaaagaaggttatcagaatgatgctaaccaatggccttctgaagagaatttcccatgttggaaggagacaatgaagctataccatgaaactgcacttgctactggtaaaaggatactctctctaattgctctgagtttgaatctc

SEQ ID NO: 410249 - DNA, 465 bp, Oryza sativa
tctctgagcttggtctcaccctgggggcgttcctgttgactccacgtctagaatgctctccccacacgtgttgggcgaggatcactacaacactgctggtggtgtccaaaaggttcttcataactaccagaatcttgaggatattattgcaattttgggtatggactagctcaatgaagatgacaaggtgaccgccactcgcgcaaggaagatccagcgtttcttgagccagcccttccatgtggctgaagttttcacgggtgctcctgggaagtacgtggaactgaaggagagcgtcaacagtttccagggtgttttggatgggaaatatgatgaccttcccgagcagtcattctacatggtgggaggcattgaggaagtcattgctaaagctgagaagatcgccaaggagtccgctttataagatctcttcattgttaagttcttgtacaagataaatttttg

SEQ ID NO: 410250 - DNA, 501 bp, Oryza sativa
tcttcagcagcagcagcagcagctgagcttgaagcatcatagcgaggtagacatggccgccgccaccatggccctctcgtccccggcgctggccggcaaggccgccgcgaaggtgttcggcgaggggcgcatcaccatgcgcaagtcggcggcgaagcccaagcccgccgcgtcggggagcccgtggtacggcgccgaccgcgtgctctacctcggcccgctctccggcgagccgccgagctacctgaccggcgagttccccggcgactacgggtgggacaccgcggggctctccgccgacccggagacgttcgccaagaaccgggagctggaggtgatccactccaggtgggcgatgctcggcgcgctgggctgcgtgttcccggagctcctcgcccgcaacggcgtcaagttcggcgaggcggtgtggttcaaggcggggtcgcagatcttcagcgagggcgggctcgactacctcggcaacccgagcctgatccacgc

SEQ ID NO: 410251 - DNA, 474 bp, Oryza sativa
tgttccggtaggccgtcctcccagcagaccaggcgggctccgcgcggcaggatgcttgggcggccttgccgccgtggctgcgtagcgtatgagcagctttggaccggtgtatgctcgcaggacccccgccctcgtgcggccgactgccggctcccgggccccgtcactccacggccgtccacgcgccgtgccggcccaggcttcaagagatgcttgcgcgctgctacccgtcccacgggcagaggtgctcgcacacgtccagcgcgccgcgggcgccccaccgggcgtcccgcggcggctcgacagcgcgagcggcgtggcttctcggcgcgcggaacccaagcgtgccggcgctgccaaggccacctcgcgcgtgccattggtcccggatgccgcccacgatacaggctcacggcggccccgccccgtgcctacccataagcgagatgctctcggaagacgacagcccgcccg

SEQ ID NO: 410252 - DNA, 498 bp, Oryza sativa
gccatggatccctacaagcaccgcccgtcgagctcgttcaacggcccgctgtggagcaccaactccggcgcccccgtatggaacaacaacaactcgctcaccgtcggctcccgaggcccgatccttctggaggactaccacctggttgagaagctggccaacttcgacagggagcgtatcccggagcgcgtggtgcacgcccgcggcgccagcgccaagggcttcttcgaggtcacccacgacatcacccacctcacctgcgccgacttcctccgcgccccgggcgtccagaccccggtcatcgtccgcttctccaccgtcatccacgagcgcggcagcccggagaccctccgcgacccgcgtggcttcgccatcaagttctacacccgggagggcaactgggacctcgtcggcaacaacttccccgtcttcttcatccgcgacggcatgaagttcccggacatggtgcactcgctcaagccaaccccaagtcgcacg

SEQ ID NO: 410253 - DNA, 411 bp, Oryza sativa
tcttaagggccagcagcccaattccccgtgaccggtatggtggacgtggtagagatctcccgaccagtcttctagtcaggaatcttcgtcgggactgccggccagaggaccttcgtcggccattcggacaatttggtcgtctcaaagacatatatattccaagagattactatagcggtgaaccgcgtggatttggatttgtccagttctacgatcctgatgatgctgccgatgcaaaatactacatggacgggcaggttattctgggcagggaagtagctgttgtatttgcagaggagaacagaaagaagccttctgagatgagatctcgcgacagaataagtggcagcagaggtcgttcctatgaccagaggtactctaggtcaccgcgatactcttctccttcaaggg

SEQ ID NO: 410254 - DNA, 511 bp, Oryza sativa
tcgcgaatcccaattcccaattccctactcccagatcccaacctcccattcatcgggtcgtgtcgccgccgacgaacaacacggcgagcggcgccggtggcgagctacctaccctccatctctccagatcccttccagggacagtacaagacaagtcgcacaaaacagaaaatcttgtgatagtttaaatggcttcaaagcttcaagccttttggaaccatcctgctggccccaaaaccattcatttctgggctccgacatttaaatggggtattagtattgccaatgttgcagactttgctaagccacctgaaaagatatcctatccacagcaagttgctgttgcttgcactggagtcatttggtcacgctacagtatggttataacaccaaaaaactggaatctattcagtgttaacgttgcaatggccggcacaggcttgtatcagctttcccgtaaaataaggaaagattacttttctgatcagaaggatgatgttgcatcattgga

SEQ ID NO: 410255 - DNA, 473 bp, Oryza sativa
tttatcatcagcaaccaattcgcaccgatcgagcgatctatcgatccagcagctagatcaacagtactagctaggaagcatggcccgtgcacagttggtgttggtcgccctggtggcagctctgctcctcgccgccccgcacgccgccgtggccatcacctgcggccaggtcaactccgccgtcgggccctgcctgacctacgcccgcggcggcgccgggccgtcggcggcctgctgcagcggcgtgaggagcctcaaggcggcagcaagcacgaccgcagaccggcgcaccgcctgcaactgcctcaagaacgcggcccgcggcatcaaggggctcaacgccggcaacgccgccagcatcccctccaagtgcggcgtcagcgtcccctacaccatcagcgcttccatcgactgctccagggtgagctgagccatcgatcagagagacggatcatatatatacagcagcgcgc

SEQ ID NO: 410256 - DNA, 495 bp, Oryza sativa
catgcaagcaagaagagacgagacgagggagagaaggagaagagggggccggccgcgggcgtcgtcgtgttcctccccccctctctctcctctcctgtcctctcgatctccatccttccttccatccattcctccccgcacccttcgcattgctctcgtcgtctcgattcggtcgaggatctccaggaaaagaggaggaagcgatatgggttgcttttcatgctgcggagcggatgatgtcggcaagaagaagaagcgcgacgatccttacgtcccgatccctgatccaggtggtaactatggacgtagcaagcccgggcccccagccccttcgcgttctccccccaccagcagaaatctgccaattgcagtaccggcaattccccttgatgaaataaagggaataaccaagaacttcagcagtgatgctcttatcggagaaagctcgtacgccagagttttctttgttgtgctgagagatggcaggagatctgc

SEQ ID NO: 410257 - DNA, 508 bp, Oryza sativa
tatgccattcttgttatcacatccagttgagtgcatctcacgggcattcaatcttgggcgtgtcttcatccatttctggtctgtaaattttaaatttgtccctgagaagttctttgtatcaaaagagctagctgttgcattgttggttcttcacctcactactcttttggtctttgcacactacaagtggcttaagcatgagggtggcttgttccatttcttgcattccagattcaaagatgccacatcaattggacagttaatttttgccaagcccaaactgtcaactcttaacaaagaacatattgtaacggtcatgtttgttggaaatttcattggcatcgtgtgcgcacgatcattacactaccaattttattcctggtacttctattcactgcctttccttttgtggaaaactcgttttccaacatttgtgagggtcattttatttcttgctgtggagctctgctggaatatctatccttccactgcctattcgtcactgctg

SEQ ID NO: 410258 - DNA, 446 bp, Oryza sativa
tctagttctagatcgcgatcggccgccctgggttttttttttttaatcagaagatcaacagtactagctaggaagcatggcccgtgcacagttggtgcaggtcgccctggtggcagctctgctcctcgccgccccgcacgccgccgtggccatcacctgcggccaggtcaactccgccgtcgggccctgcctgacctacgcccgcggaggcgccgggccgtcggcggactgctgcagcggcgtgaggagcctcaaggcggcagcaagcacgaccgcagaccggcgcaccgactgcaactgccttaagaacgcggtccgcggcatcaaggggctcaacgccggcaacgcccgcaggattcccttcaagtgcggggtcagcggcccctacaccatcagcgcttccatcgactgctccagggtgagctgagccatcgatcagagagacg

SEQ ID NO: 410259 - DNA, 500 bp, Oryza sativa
ttagccgacgacgacgacggcgagcggcgggggcggctgcggagggagaagcggagctacccgtaccgcggcatccggcagcggccgtgggggaggtgggcgtcggagatccgcgaccccgtcaagggcatccgcgtctggctcggcaccttcgacaccgccgagggcgccgcgcgcgcctacgacgacgaggttcgccgcatctacggcggcaacgccaagaccaacttccccccatcgccgcccacgccgccgccgccggagaagccagcggcggagaggagcccctcgacgacgccgacgacgaccacggaggactccggcgactcgcgcatactcatcgagtgctgctccgacgacctgatggacagcctcctcgccgccttcgacatgaccaccggcgacatgcgcttctggagctaacgaacaacagagcagattcaggacaacataaacggcacgtttttgcaaccttgacatgcgactcgcctaataatctt

SEQ ID NO: 410260 - DNA, 497 bp, Oryza sativa
ttgcgcacctcccgatccctccctccgctcggtcgcccatcgcgccaggtgggctctttggacacccggtgatggatcacgcggagctgaccaccgagcaggttctcaagagggatattccatgggaatcatacatggcaaataagctgatttccgggacatgccttcagcttttgcgacgttatgaccacaaaccagaaagccaacgaggtcctttgcttgatgaggatgggccatcctatgttcgagtgttcctgaatatcttgcggaacatctccaaggaagatactgttgaatatgtgcttgccctgattgatgagatgcttgcagtaaatcctaaacgagcagcactgttctatgataactctctctctggtgaagacatctacgaccctttcctaagattgctcttgaaaggtaactggtttgtgcaagaaaaaagttgtaagatattgacccaaataataagtgcacgacccaagatgcagaatggcata

SEQ ID NO: 410261 - DNA, 499 bp, Oryza sativa
ttggacgcgtgggtttccagaactagatggtcttagttccatctggaagctgttcacagctgtccctgttcttgtcactgcctacatctgccattacaatgttcacagcattgacaatgagcttgaagacagaacacaaattaaacctattgtgcgaacatccctgttcctctgctccagtgtttacattgctacaagtttctttgcatatctcctcttcggcgagggtaccctagatgatgttctcgctaacttcgatgcaaatcttgggattccatttagttccgtctttgatgatatagtgcgagtgagctatgctgctcacgttatgcttgtctttcccatagtcttctttgcccttaggctcaacttggatggactgctcttccccacatcaaggcacatttctcgtgacaacaagagatttgccataatcactatctcactcctcacagtaatttatcttgctgccattttcataccgagcatttgggatgca

SEQ ID NO: 410262 - DNA, 472 bp, Oryza sativa
  unsure (1)..(472): unsure at all n locations
tgcaaggcaccaaatccccccaccatggatgaccgcctcctcctcctcgggctcctcctcctctccccggcggtggccgccgcctcagtccccggcgaggaggagccgctgatccggcaggtggtcggcggcggcgacgacaacgagctggagctgaacgcggagcgccacttcgccagcttcgtccagaggttcgggaagtcctaccgtgacgccgacgagcacgcgtaccggctctccgtgttcaaggccaacctccgccgcgcgcgccgccaccagctgctcgacccctccgcggagcacggcgtcaccaagttctccgacctcaccccggccgagttccgccgggcctacctcggcctccgcacgtcgcgccgcgccttcctgcgggggctcggcgggtccgcccacgaggcgcccgtcctccccaccgacggnctccccgacgacttcgactggagagaccacggcg

SEQ ID NO: 410263 - DNA, 508 bp, Oryza sativa
tataaccaacccaaccgccgccgcatcgccctggttagaacgatggccgcgtgggcgctgcaccagaccaccagcttcctcggcaccgcccctcgccgggatgagctcgtccgccgcgtcggcgactccggtggccgcatcaccatgcgccgcaccgtcaagagcgcgccccagagcatctggtatggacctgaccgtcccaagtacctgggcccgttctcggagcagacgccatcgtacctgaccggagagttcccgggagactacgggtgggacacggcggggctatcggccgacccggagacgttcgcgaggaacagggagctggaggtgatccactcgcggtgggcgatgctgggggcgctgggctgcgtcttcccggagatcctgtccaagaacggggtgaagttcggggaggcgtggtggttcaaggccggcgcgcagaacttttccgagggggggctcgactaccctgggaaaccccacctggtgcacgcgcagagcatcc

SEQ ID NO: 410264 - DNA, 476 bp, Oryza sativa
tgtctacgtcgcgccgtgctgcctctgctggcggcttgttccatgggtgtggggggttctgcccaggctgcccgccgtcggtacgttccgcccggacttcttcatgttcgggaccaactcgctctgcgccttcgcgctgaatctggcggtgttcttgctcgtcggcaagacctccgcgctcaccatgaacgtcgccggggtggtcaaggactggctgctgatcgccttatcgtggtccgcgatccgggacacggtcacgccgatcaacctgttcggctacgggatctccttcttgggggtggcatactacaaccacgtcaagctgcaggcgctcaaagctaatgaggcgcaaaagaagatcagccaggcttttgatgacgcttgccttcttttgcaagagcgcgatgggcacagtgatcgcaagagcgataaccaggcatagagccaccacccgatctgaggctggcacacacaaa

SEQ ID NO: 410265 - DNA, 334 bp, Oryza sativa
tgctttatcaagctcacagggagtggggaaaacgcttcctgaaattgtatccacggtatactagttgggataacccaaaagtcgctgatcgtcctctggtcattggctatgtgtctcctgattactttactcactctgtgtcatacttcattgaagctccccttgcacaccatgactactcaaattacaaggtggttgtgtattctggtgttgtgaaggcagatgccaagacccttcgattcaaggataaggtattaaaaaagggtgggttgtggagagatatatatggtattgatgaaaagaaggttgctagcttggtaagggaggacaaagt

SEQ ID NO: 410266 - DNA, 504 bp, Oryza sativa
agatgatggaagctgcattgcaaggtgctgcaggacaatcccagtccaaagctgatgaaattgcaagactgatgaatgagaatgaacaactgaaatcaacaattgatgatcttaagagcaagtcagctgaagccgaaatggatgcacttaaagatgaatatcaccagagagtagcaactcttgaaaggaaggtgtatgccttgaccaaagaacgggatacattaaggagagagcaaaataaaaaaagtgatgcagctgctcttttgaaagaaaaggatgaaattatcagtcaggtcatggcggaaggtgaagagctatcaaaaaaacaagctgctcaagaagctactatgcggaaacttagggcacaggttcgtgaacttgaagaagaaaaacaacggctgaactcaaagatccaggttgaggagacaaagattgagagtattaaaagagataaggctgcaacggagaaattgctacaggaaacaatagaaagaaatcaaactg

SEQ ID NO: 410267 - DNA, 279 bp, Oryza sativa
ttactagttctagatcgcgaaggtgaactaggccggtgtgtcgaccaacaactacgccctggacgagatccaggaggtcaaatgattttaattcggatggatcgtcgtcgagctggagctgcaaagaatcatcttaaattgatcacggagtgaggagaggatgcatgtcgtacatgtggaagaaattaattaagctgcttgatcgagctttgtgtgtattagtgtaatggtggtggtttcttctttataatccgtataatactatgtaatttgcctgcc

SEQ ID NO: 410268 - DNA, 496 bp, Oryza sativa
tcggccgcccgcgtcgccgtcgccaacggcacggcccccgtcgccaaccggatcgtcgagagccggtcgttcccgctctaccgcttcgtccgcgaggagctcggctgcgtattcctcaccggcgagaagctcaagtcccccggcgaggagtgcaacaaggtgttcctcggcatcagccagggcaagctcatcgaccccatgctcgactgcctcaaggagtggaacggcgagccccttcccatcaactaagccaagatcccatcgccattgccattgccatacacccatcatcgaggaggagaggagactaaaaataaaagaaaacgaaccgcttcgtgtatcttcagacaaaaaagaccctgtattttcttcgttcgttgccgtttggtttatagtgatctcgtgttctttgtgttagctgctctgctcagcttgccagccatggcggcaaagcaagcggcttttctaagatattgtcgctaaactgtattttggg

SEQ ID NO: 410269 - DNA, 476 bp, Oryza sativa
gaaggatgttgatcgagattgtgagggagggtggtcttggcctgaggatggaacttaagaggaaggagttgagagatgatgtcaaccgccaacaagaattggctgcttatttcactaactgcaagcttcagagagttcatatgaggcttgtgcttggaagcgctatgggtctgtgctacaagcaaaagaacttcgctactgcagagcactttgcaaggatgcttctggagaacaaccctaatgaggcccaggcaaggagggctcgacaggtgcagcagcagtgcagtggcaagaaagatagctctgagctgaactatgactacagaaatccatttgttgtctgtggcgccacatatgttccaatctaccgtggccagaaggatgtttcctgcccgtactgtggatccccgcttgttccttcgatcgaagggcagctttgtaccatatgtgagcttgccgtggttggtgcagatgct

SEQ ID NO: 410270 - DNA, 504 bp, Oryza sativa
tttattaggtgaatttgaaactggttacgaaaaaggaggactgaatcgtgaacggggactgcttgcaaaaactttaggtgttgctaagttgatagttgtcatcaataagatggatgaaccaactgtaaaatggtctaaagaaaggtatgataaaattgagtcaaagatggttccttttctcaaatcttcagggtacaatgtcaaaaaagatgttcactttttgccaatatctggacttttgggaagcaatatgaagaccaggatggataaaagcatttgtagttggtgggatggtccatgtctttttgaagtcctggattgtattgaagtttctttgcgtgaccccaaaggtccagtcaggatgccaataattgataagtataaagatatgggcactgtagtgatgggaaaaatagaatctgggaccatcagagagggtgacagtttgttggtcatgccaaacaagactaacgtgaaagttattggcataagtttggatgagca

SEQ ID NO: 410271 - DNA, 556 bp, Oryza sativa
tttatttaatagagatgagaaatccgctaatgggaataacaccacggataagtacctagaccattagttgggaaacgaataaaatcattattgcaaaaacatcatcttcttcttcatcttcttagtgtacacaacaccaactcgatcatcatctcgtcgcactaaacccatcttccccaacccaaagacaacgaactcgctggccacaaatccatccaaccacaattaaccactgctaagctacggtcccccacttcacttgccggggacgaagttggtggcgtacgcccaggcgttgttgttgacggggtcggcgaggtggtcgccgaggttctcgagggggcccttgccggtgacgatggcctggacgaagaagccgaacatggagaacatggcgaaggcggccgtcttgatctccttcaccttgagctccgcgaacgcctcggggtcatcggcgaggccgagcgggtcgcaggcgccgccggggtagagcgggttcgacgacctcgccgagcggcccgccggcgatgcggtacccctcgacggcgcccatgag

SEQ ID NO: 410272 - DNA, 487 bp, Oryza sativa
tttcagctctcacagctcactgcatcaatgggcggggtcaccatggcgctctcctccccggtgatggcccgcgcggcgccgtcgacctcctccgcgctcttcggcgaggcgcggatcaccatgcgcaagaccgccgcgaagcccaagccggcggcgtcgtcggggagcccgtggtacggcgccgaccgcgtcctctacctcggcccgctctccggcgagccgccgagctacctcaccggcgagttcccgggcgactacgggtgggacaccgcggggctctccgccgacccggagacgttcgccaagaaccgggagctggaggtgatccactcccggtgggcgatgctgggcgcgctcggctgcgtcttcccggagctcctcgcccggaacggcgtcaagttcggcgaggccgttgtggctcaaggcgggctcgcagatcttcagcgagggcgggcttgactacctcggaacccgagcctgatccacg

SEQ ID NO: 410273 - DNA, 487 bp, Oryza sativa
tcgctttacccttcccctggctcctcctcctgcgattccacttccatccggcggcacaggaggaaggttgctaaggggggatcggctccattcctcattcttcattccatttgcgcgcgtgattcgggtttcttttccttcttgtcacctgtttcttggtcggtttcccgccttctcagaggtcggtctattggatttggagcccggggcccagccttgcctcaacgtctgtgttgtcgtgttcttattggattcttgaccggattggattttggcggttccaatttttgttggattgctccgattcttggttgatttggtcggaagatgatcaagtggggcatcggtagcaccgggacgccagcggattcgtattatgaggtccgctctgattgcacggatgacgtgcccaagagcaagttcaagatcaaggcatgaaaaacatttagtgtcctgaaatggcaggctgcatttagcactgatgggt

SEQ ID NO: 410274 - DNA, 505 bp, Oryza sativa
  unsure (1)..(505): unsure at all n locations
ttgtgggcatgctttgctgaataaggattgggaacttgggcgaggagggtggggcacagtctacaaggcagttttaagagatggccagcctgtggccatcaagaagctgacagtgtcaagcttggtcaagtcagaggacgagttcaaacggcaggttaagcttcttggaaaggggcggcaccataatgttgttaccctcagaggcttctactggacttcatcactgcagctcctcatctatgactttgtgcctggcggtaacttatatcagcacctgcatgagtcctcagcagagagatcggtttcatggatggaaaggtttgacataataatcggcgtagcccgagcccttgcgcacttgcaccgccatgggataatccactataatctgaagtcaagcaatgtcttgctagatagcaacggcgagccaagggttggtgactatggccttgtgaagctgctgcctatgctggatcgctacgtgctgagcagcangattcagagc

SEQ ID NO: 410275 - DNA, 493 bp, Oryza sativa
  unsure (1)..(493): unsure at all n locations
tcgcgagtgccctggacgattcctcatcacctgcacctttgatgccaccgtcgctggaagcatgactgtttacttctttgcaaaggaggagctgaactgtaatcttacagcaacgaaagaagatttactcaagccagtcactgtaacatttaaagagggtcttggtcaaaaatttaggcaaccttcagggacaggaattgacttttcgttgtttgaagatgctgaattatttaaggagggagagatggatgtatatccacttgcagtgaaggctgaaacaacattctcaattggtcaattctcagaaggggaagaacaaaagtcacaaactccaaattcacagatcacccaggctgtatttgagaggaaggagaatggggattaccatgttcgtgttgttaagcagatcctttgggtcaatggcacgagatatgagttgcaggagatttatggaattggaaactcttgtgaaagtgacaccgaanggaatgat

SEQ ID NO: 410276 - DNA, 503 bp, Oryza sativa
tggtgccttttggatcacccctctcctccgagcgaccgggtctctgctgaggtctccacgccgccgacaggtagcgcgagctagagagatggccgagacagtgttcactccctcgttggagggtatgaagcatgttaagtcagagagcagtgtcatactcaccaagccctttcttgatgtctgcaagcaaatcttgcctgttttggataaatttggagctgctatggcacttgtgaagagtgacattggtggtaatatcacgaggctggaaaataaatattcttcagacccatcaaaatatgagcaattgtacagcatggttcaggaagaggttcaaaacaagactgcaaaaggttcgtcaagctgcacaaatggacttctgtggctcacgagggctatggacttccttgttgaattattccgtaacctgcttgagcatcaagactggactatgagtcaagcttgtactgattcatataccaaaactctgaagaaatggcatg

SEQ ID NO: 410277 - DNA, 484 bp, Oryza sativa
ttttcacttccatccgtcggcacaggaggaagggtgctaaggggggatcggctccattcctcattcttcattccatttgcgcgcgtgattcgggtttcttttccttcttgtcacctgtttcttggtcggtttcccgccttctcagaggtcggtctattggatttggagcccggggcccagccttgcctcaacgtctgtgttgtcgtgttcttattggattcttgaccggattggattttggcggttccaatttttgttggtttgctccgattcttggttgatttggtcggaagatgatcaagtggggcatcggtagcagcgggacgccggcggattcgtattatgaggtccgctcggattgcacggatgacgtgcccaagagcaagttcaagatcaaggcaggaaaaacattgagtgtccggaaatggcaggctgcatttagcactgatggttgtcttgatattgcctcagtcctaagccggat

SEQ ID NO: 410278 - DNA, 486 bp, Oryza sativa
taagaacatcagcttcactgtttgggatgtcgggggccaggacaagatcaggcccctgtggaggcactatttccagaacacacagggactcatctttgttgtggacagcaatgatagggagcgtgttgttgaggccagagacgagcttcacaggatgctgaacgaggatgagctgcgtgatgctgtgctgcttgtatttgcaaacaaacaagatcttcctaatgccatgaatgcagctgaaatcactgacaagcttggtttgcattccctgcgccagaggcactggtacattcagagcacttgtgctacatctggtgaagggttgtatgagggtcttgactggctttccaacaacattgccagcaaggcttgagcgttttggcagctggatatctgaacaattcactagtgccggtttacatattatataacatatacaccctaccacacatagtgtgggggcctgtgaaggaaaaaactcctttg

SEQ ID NO: 410279 - DNA, 472 bp, Oryza sativa
tttggtcagaatttatctggccaaaatggctttgcattgttgttgactggtccaaatatgggcgggaaatctacaataatgcgtgccacctgcctagctattgtgcttgcccagctcggctgttatgttccctgtcagtcatgcgagttgacacttgcagatgccatatttacacggattggtgcaatggatcggattatgtctggagaaagtacctttcttgtcgaatgcactgagactgcatctattcttgagaatgcaaccgaggattctctcgtcttgcttgatgagcttggcagaggaactagcacatttgatggatatgcaattgcatatgcagtattccgacaccttgtcgaagcggtccgatgccgtctgctctttgcaactgactaccatcctctcaccaaggagtttgcctctcacccccacgtcacccttcagcacatggcctgcatgctgaagccaagaa

SEQ ID NO: 410280 - DNA, 461 bp, Oryza sativa
ttgatgtcaatgagttccagaccaaccttgggccctacccaaggatccacttgatgctttcgtcctacgctccagtgatctctgcggagaaggcctaccatgagcaactctctgttgccgagatcaccaacagtgccttcgagccatcctccatgatggccaagtgcgaccctcgccacggcaagtacatggcctgctgcctcatgtaccgcggcgatgtcgtgcccaaggacgtgaacgccgccgtcgccaccatcaagaccaagcgcaccatccagttcgtggactggtgcccgacggggttcaagtgcggcatcaactaccagccgcccagcgtcgtccccagcggcgacctcgccaaggtgcagagggccgtgtgcatgatctccaactccaccagcgtcgtggaggtgttctcccgcatcgaccacaagttcgacctcatgtactccaagcgcgcc

SEQ ID NO: 410281 - DNA, 339 bp, Oryza sativa
gaacgtcatgggggggcacaaccggctgggggccgtcaccaggctggccgtggaggcgtgggggctcaagaactgcacgcagaatgaggagtggattaactacaccgtcaccggcgttgatatgccgccttgcatcgacagcgcctagatcgtgaagctcgcctggaagaggtacaacttcagcctcggcctttgcctggacaatgttggcgagcaggcgttaaggagcggacacctggggcacttgaacgaggtacaattgatggatgccctgagtggagtggtgatggcgttcatagtgatacggtaatccatttagctggtgtgcggccacatatg

SEQ ID NO: 410282 - DNA, 445 bp, Oryza sativa
taccaagctgtctgaggcctagccgtcgtggtcgccgacgagcgccaccagcggaaccatgggcgccgggctcacccgcccggctccaggcacggaccagtgcttccggcgcaagaagacggacgtggccgtctcctactgcaagccggggcgcgggctgatcaaggtgaacggggtcccgagcgagctgatcagggcggagatgctccggctgaaggcgttcgagcccatactgctcgcggggcgctcgcgcttcaagggcatcgacatgaggatccgcgtacgcgggggggggaagacgtctaagatatacccgatgcgccaggccatcggcaaggccctcgctggctactaccagaagtgcgtcgacgaggcgttcaagaaggaggtcaaggacatctgtgcccgctacgaccgcacacttctagtcgccgagcccaggcgc

SEQ ID NO: 410283 - DNA, 335 bp, Oryza sativa
tctgtcacacgctcgagtcgctcaaccgggggggcgtttttcaataggaccggcgttaccaacaaacatatgaacgacccaccatcatgaggcccatagacaacagtcgaagatgacttctaaacaagctcaaagaatacaatggacacgactgcgaagtaatacatgaggctgactattttgctggagaaaaaactgaacatgaagatggtgacacaatacctactcactcaaatcacgtgaccaacactctcgctcttgatgatctgtttcctccaagttaacttgccaacttaaagagtatgcgcaaaggatctggttctggtaggactaac

SEQ ID NO: 410284 - DNA, 470 bp, Oryza sativa
ggcttactgaggttaggttccttgggcagctaagacatccaaatttagtcaagttgattgggtattgctgcgaagatgaccacaggctgcttgtgtacgagttcatgtttcgaggaagtctagaaaaccacttattccgaaggacagctactccactatcctgggctactaggatgtcggttgcattaggggctgccaaagggttagcttgcctccacaatgctgaaaggccaattatctacagggatttcaagacatcaaatattctgctggactcagattatactgctaaactctctgactttggtctggcaaaagctggcccagaaggcgatcaaacccatgtatcaacacgggtgatgggaacatatggttatgctgcccctgaatacgtgatgactggtcacttgactgctagaagtgatgtctacagctttggtgttgtccttcttgaactcttgactgggcgt

SEQ ID NO: 410285 - DNA, 490 bp, Oryza sativa
gaatcacacacgccggactctccccttctgggtggctcgctccttcgttcgctcgctttatcccccccgaataaaggcgagaagccgcagcggcggacgaagaagagggcagatagaaatggcggcggagacgttcctcttcacctccgagtccgtgaacgagggtcacccggacaagctgtgcgaccaggtgtcggacgcggtgctcgacgcgtgcctcgcccaggaccccgacagcaaggtggcgtgcgagacgtgcaccaagaccaacatggtgatggtgttcggcgagatcaccaccaaggccaccgtcgactacgagaagatcgtccgcgacacctgccgcggcatcggcttcgtgtccgacgacgtcggcctcgacgccgaccgctgcaaggtgctcgtcaacatcgagcagcagtcgcccgacatcgcgcagggggtgcacgggcacttcaccaagcgccccgaggagatcggcgccggcgac

SEQ ID NO: 410286 - DNA, 456 bp, Oryza sativa
gggtacaattagaagtggttagccatggctgcggaaaaatactgttccttgggctgcatttctccaaggtctgcaacgccacttccgtcaggaaccctgagtgggaaggatctccaaacctggctcagaaatcgggcctcatctcaacactcatcagcacacatttctccacagcagctcaaaagcccgcgcctcgccctgctgatgtgaacatcaactcggcagtgtaccctggtggaccccctgttccagtgcagaccccaaaacttctcaagtttgtggatccaacagagatgatgcgtggaccgcaggatctgccaggttattgggtggtctcaagtgcgaagctgcagctcgagaggggcaagatctcgctgcgggtgaagtactcgctcttgacagcaatgttggctgacgacgattagtttgcgttcgatgaagagttttagaaccatg

SEQ ID NO: 410287 - DNA, 511 bp, Oryza sativa
tttggcttcttgatttttccaacaacactgtgcagggtccagcacgtgctctaatggctgatttatcaggacgtcatggacctggcacagctaactccatcttctgttcttggatggcaatgggaaacatcctaggatactcctctggttccacaaacaattggcacaagtggtttccattccttaaaacaagagcttgctgtgaagcttgtgcaaatttgaaaggtgcatttctggtggctgagattttcctgtccctgtgcttggttataactctgatatttgccaaggaagttccattcaaaggaaatgcagccctcccaacaaaatcaaacgagccagctgagcctgaaggcactggtccactagcagtgttgaaaggcttcaggaacttacctactgggatgccttctgtgcttattgtgactggccttacctggttgtcttggttgccattcatcctctacgacactgactggatgggccgtgagatctaccacggtgacccaaa

SEQ ID NO: 410288 - DNA, 510 bp, Oryza sativa
gatctacggtattgatgccgtgcatgggcacaataacgtctacaaggctacaatcttcccccataatgtcgggctcggcgctaccagggaccccgacctagtaaagaggataggagaagcaactgctcttgaagttagagctactggaattccctacgtctttgctccttgcgttgcggtttgcagagacccaagatggggacgctgctacgaaagctatagcgaagacccaaaggttgtccagtcattgaccacactcatctctggcttgcaaggcgatgttccatcaaatgatgtaggaagaccatatgttggtggaagtaagaaagttgctgcatgcgcaaagcactatgttggtgatggtggaacggtcaagggaatcaacgagaacaatacaatcatcgatactcacgggctgttgaccattcacatgcctccttattataattctatcattagaggagtctccactgtcatgggttcatactctagctggaatggagtaaaaat

SEQ ID NO: 410289 - DNA, 477 bp, Oryza sativa
  unsure (1)..(477): unsure at all n locations
actggttttatgtgatctcataattctgggggaatcatcttctccgcgtcaatccgccattgttactagtagtagtagagctctcttgttgttgttcttcttcttcgtgttcttcttcggttgattaaataatcgtagcagcagaagaagcagctgtttgtagacaaggtgtttgtggaaatgtcgtcgtcgtcgctgtcgccggcggggtcgtcggacggggactcggcgggggtggtggtggcggcggaccaccggagggagaagcggcggctgtcgaacagggagtcggcgaggcggtcgcggctgcggaagcagcagcacctggacgagctggtgcatgaggtggcgaggctgcangcggacaacgcgcgcgtgctggcgcgcgccagcgaaatcgccgggcagtacgcgcgcgtggagcaggagaacacggtgctccgggcgcgcgccgncgagctcggcgacaggctgcgc

SEQ ID NO: 410290 - DNA, 500 bp, Oryza sativa
tagggtagcaagccatatttctccttccacggctcttcatgacattggaacacaagagtatatacagcgcttgctccatgtgctctcgcactatggggttcgacgtggcaactcaaccatcttcttagatcaccatcttggtggagacggttgaagtcacctatcatttctaggctcctggttaccacactttgagctttgggattactgctttctttggcgtgatggcggagcagagaggaaatatgttgatgaaaaagtatgagatggggaaattactcgggcaaggaacctttgccaaggtttaccatgcccgtaacaccgagacttctgagagtgttgctatcaagatgattgataaagagaaggttttgaaaggcgggctcatggatcagatcaaacgtgagatttctgtgatgaagttggtgaggcatccaaacattgtgcagttatatgaggtcatggctaccaagactaagagatattttgtgctggagcac

SEQ ID NO: 410291 - DNA, 494 bp, Oryza sativa
tcgccgttaaccccgttcgttttatttgcggtgacttcgtttcttgggaaggcacttccttcctcttcctaggaaggcttgaggagccaagaggaggaggagagcaatgggggaatctgccggcgaccgcgtcctgagccgcctccacagcgtcagggagcgcatcggcgactccctctccgcccaccccaatgagctcgtcgccgtcttcaccaggctggttaacctcggaaagggaatgcttcaggcccaccagatcattgctgagtacaacaacgcaatctctgaggctgatcgtgagaagctgaaggacggtgcttttgaggatgtcctgaggagtgcacaggaggggattgttatctccccatgggttgcccttgccatccgcccgaggcccggtgtctgggagtatgtgagggtcaatgtgagcgagctcgctgttgagttgctgacagtccccgagtacttgcagttcaaggaacagcttgtggaag

SEQ ID NO: 410292 - DNA, 438 bp, Oryza sativa
gctttatgcagcagctgagcttgaagcaccggagggaggtatacatggccggcgccaccatggccctatcgtgcccggcgctggccggcaaggccgccgcgaaggtgttcggcgaggggcgcatcaccatgcgcaagtcggcggcgaagcccaagcccgccgcgtccgggagcccgtggtacggcgcctaccgcgtgctctacctcggaccgctctccggcgagccgccgagctacctgaccggcgagttccccggcgactaccggtgggacaccgtggggctctccgccgacccggagacgtttgccaagaaccgggagctggaggtgatccactccaggtgggcgatgctcggcgcgctgggctgcgtgttcccggagcttctcgccccgaacggtgtcaagttcggcgaggcggtgtggttcaaggcggggtcgc

SEQ ID NO: 410293 - DNA, 484 bp, Oryza sativa
gtctaaccctctccagtctccactccactgaatcctcccacctcggctcgaaggaatggcaagcggtagtgaagctgagaagtcacctgaggttgtgctggagtggcctaagaaggacaagaagaggcttctacatgctgtttaccgtgttggagatttggatcgcaccattaaatgttacacagaatgctttggaatgaaattactgaggaaaagagatgtgcctgaagagaaatatacgaatgcatttcttgggtttggacctgaggacaccaactttgcacttgaattgacatacaattatggtgttgataagtacgacattggagcaggatttgggcatttcgctattgcaactgaggacgtgtacaaattggctgagaaaattaaatccagttgttgctgcaagatcactcgtgaacctggtcctgtcaagggaggatccactgtgattgcctttgcacaggatcctgacggttacatg

SEQ ID NO: 410294 - DNA, 493 bp, Oryza sativa
ttccgcccaagacggaggaggggctcgacaacctgttcgagcggatggatcgcatggtggcgcacggccccaacttctgcgacatcacctggggcgccgggggatccaccgccgacctcaccctcgagatcgccaaccggatgcagaacatggtgtgtgtggaaacaatgatgcacctgacatgcaccaatatgccagttgagaagattgatgatgccttaacaacaataaagtctaatgggattcaaaatgttctggctcttaggggtgatcctccacatggtcaggacaaatttgttcaagttgctggtggattcgcttgtgctcttgatttggtacaacacattagagccaagtatggtgattattttggtattactgttgctggttatccagaggcccacccggatgcaatacaaagtacggaaggggctacaccagaagcatacagcaatgatcttgcttatttgaagcaaaaggttgatgctggtgc

SEQ ID NO: 410295 - DNA, 453 bp, Oryza sativa
tcgttctcaagcagcttagctcctgcctccttctctgatcattcttgcaaaccaatcgagtcttgaacgaggtcaatgggcaaggaggtggacgtgtccactctcgaggccggcggcgcccgggactacatcgacccgccgccggcgccgctcgtcgacgtcgacgagctgggcaagtggtcgctgtaccgcgcgctgatcgccgagttcgtcgccacgctgctcttcctctacgtcacggtggccacggtgatcgggtacaagcaccagacggacgccgccgtgaacggcgccgacgcggcgtgcggcggcgtgggcgtcctcggcatcgcgtgggcgttcggcggcatgatcttcatcctcgtctactgcaccgccggcgtctccggcgggcacatcaaccggcggtgacgctcggcctcttcctggcgcggaaggtgtccctggtgcgcg

SEQ ID NO: 410296 - DNA, 328 bp, Oryza sativa
taaccatccatcgccggccgattcctctgcgccactgggtaccccaacatgcaggactatgtcgaccgtttcgctgtcaagtacccggagatcgcgataaagcttaaaggggtgattgggaaggatgtgagggtgaaagcggatacaaacaagcttggggatttggggttcaagtacaagtttacggtggaggagacgttggacagcagcgtggaatgtgccaagaggctgggattactttgagcgtgccaagcagtataatttcttgtcctaatgtctgtatttgttccggcccttttactccaaccgtatctaagaaatgtaccct

SEQ ID NO: 410297 - DNA, 509 bp, Oryza sativa
aaataaaatcacaagagaggaggagaaaaaaaaatcgcagcagcaaaccctcctcctccgccatccgccgccttccctcctcccccacgatctccggcggcggcggcggcgatggcccggaagaggaagacggacgcggcgccgcggctggacgaggccgaccggacgctctactccaccttctgcggcgccgccaactccctctcccagctctacacccaggccatggcccagcagaagctctccttccaggccggcgagcgccactccctcgaaaaactccaccagtggatattgagaaagcatgaggaagagtcgaggctcacggcggctgatataatgtctcatatccagcatgagttggatatggaggtaatgatccacatgtttccccagagtacatcagcatagtgcaaatccgtttgcaaactcaagcatccaaccctcagctggttcctatggtcaagcaacagtagggattgcgcctagacccagcatcagtgatcagt

SEQ ID NO: 410298 - DNA, 425 bp, Oryza sativa
ttaatccccacctccccctccccaccaaagccgcgttcgcatccgccgccgcagccgcagccgccgccgccgacgccgacgaggagaggaggagagggaaggcgagagggaggtaggtaggtaggcagtcagccatgtcgccggcggagccgacgagggaggagagcgtgtacaaggcgaagctggcggagcaggcggagcggtacgaggagatggtggagtacatggagcgcgtggcgcgcgcggcggggggcgcctccggcggggaggagctcacggtggaggagcggaacctgctgtccgtggcgtacaagaacgtcatcggcgcccgccgcgcgtcgtggcggatcatctcgtcgatcgagcagaaggaggagggccgggggaacgacgcccacgccggcaccattcggttctacaggggc

SEQ ID NO: 410299 - DNA, 432 bp, Oryza sativa
  unsure (1)..(432): unsure at all n locations
tcccagagcaagaagctcatctcctcctcctctcgcatggcagccatggccaccaccgcgtccagcctcctcaagacctccttcgctggcgcgcgcctccccgccgccgcccgcaaccccaccgtctccgtcgcgccgcgcaccggcggcgccatctgcaactccatctcgtcgtcgtcgtccactcccccctacgacctcaacgccatcaggttcagccccatcaaggagtccatcgtgtcccgcgagatgacccggcggtacatgaccgacatgatcacctacgccgacaccgacgtngtcgtcgtcggcgccggctccgcggggctctcctgcgcgtacgagctctccaaggacccctccgtcagcgtcgccgtcatcgagcagtcggtgtcccccggcggcggcgcgtggctcggcgggcagctgatc

SEQ ID NO: 410300 - DNA, 394 bp, Oryza sativa
ttcctcttaagaatggcgcgaatgctgggatggatgacgagatgctgcagctgtgggaagctgcccagaggagctgcaaaaaccaaacatccaaatcatgatcagctgcgcacgacatacaagcggttgaggaggacgaagacagaggacccaccctctgagctagcaaggggaggagaccttggaatcgataagcttgaggtgccgacatcatctcgagaggctcatgagcaacggagcaacactgtactggagaaggtctcttctgatgctcagaggatgcatagcatccaagcgagcatcaaggagctgcagcggaaaatggggagcccatcaaacgggaaatcgcccatgaactccgaatacaacaccgtcagcactcagctactcgata

SEQ ID NO: 410301 - DNA, 548 bp, Oryza sativa
gcagtaacaaccatccataaattggaggtaaacgggcgcattggggagcaccatgccaaccaggctgattacaaatcccaacacatcagatgttttcagggaaatcaatagaatatgatcgttgctcgcgacagccgggaatcagtatcagtcccacgaactagttgagccttgaccaccaccatagccaccgccatatccaccgccccctccataaccgccgcctccatagccaccaccgccaccaccataaccgccgccgcctccacccctattgtcgcggcggaagtcacggccaccaaaacgggcaccgcctgatcggcggtttctgccaccaccacctccgaacgaagaacgggccgagtatcgttcaagccattgaggaacctcctggtttgcttcctgcattagctcacataacggcctcgccagggatagattgccctcgttgaaaaatgcagttgccaagccagacttccctgctcgtcctgttcgtacgatacgatgaacatagtcatctatgtcatttgggaggtccaaattgatga

SEQ ID NO: 410302 - DNA, 481 bp, Oryza sativa
  unsure (1)..(481): unsure at all n locations
tctacggccgctgggagcagccgatccggccccgatccgatgggtggcgaggtgccggagccgcggcggctcaaccgggcgctcagcttcgacgactgggtccccgacgaggcgctgcacctcgtgatgggccacgtcgaggacccgcgggacagggaggcggcgtcgcgggtgtgccgccgctggcaccgcatcgacgcgctcacgcgcaagcacgtcaccgtcgccttctgctacgccgcgcgccccgcgcgcctccgggagcggttcccgcggctcgagtcgctctcgctcaagggcaagccccgcgccgccatgtacgggctcatccccgacgactggggcgcctacgccgcgccatggatcgacgagctcgccgcgccgctcgagtgcctcaaggcgctccacctncgtcgcatgacccgcaccgacgccgacatcgccgcccttgtccgcgcccgcggacacatgctgcaggagc

SEQ ID NO: 410303 - DNA, 394 bp, Oryza sativa
tcgttcagaagcaataccatctgagcttgaagcaagaaagcgaggtaaacatggtcggcgacaccatggtcatctatttccccttgctggccgtcaaggccgacctgaaggtgttcggcgaggtgcgcatcaccatgcgcaagtctgcgaacaacaccatgcccgccgagttggaagagcccgtgagacggagccgaccgcgtgctctacctctgaccgctatacggcgagccggccagctacctgaccggctagtaccacggtgactacggctgggacaccatagggctcttcatccacccgtagacgtttgccatgaaccgtgagctggaggtgatccactccactaggacgacgactaggacgctaagctgccatgtgcctgagctcctct

SEQ ID NO: 410304 - DNA, 510 bp, Oryza sativa
tcgtccagaaacagttgcaaggacattggttccgaggatgcgagttgtgaaaggaagtggaaaggcgataaactacttgacaccaccaaggatcttgcttgccttggttactgcatgggttcgccgaggccgatggtttgatgaagagggaagagcagtatatgcagcagaggctgatagaatccgtaattgggctgaaagtcgagcacgcttctctttcacagatgccatggagatgtacacagaaaacacatgggtttctgtgttctcgctctctgtcgtctgcgcattcataattctttccagctcaggtggacctcttccaggcacatgatcccaggagttgccaaactagatggctacacacaccatttttcttcagtacggggattctattatgtactgatatatgacacacgaaacttatgaaggggggaaattgaacccagaaagcttactgcgtacatacgcccaacggtgagaagcatcagctgccactcaccatttaag

SEQ ID NO: 410305 - DNA, 489 bp, Oryza sativa
  unsure (1)..(489): unsure at all n locations
tgatgccacagaggttgattttgatacggcaaacactggcatcaactttgatgcctatgaggacattcctgtggaaacaagtggccatgatgtgccaccgccagtcaatactttcgcagagattgatttgggtgatgcgctgaatgagaacatacggaggtgcaaatatgtgaaacctacgccagtgcagcggtatgccattccaatctccattgcagggcgggatctcatggcttgtgctcagacagggtctggaaagacagccgccttttgtttccctatcattagtgggattatgagctctaggccaccacagaggccaaggggatcgaggactgcataccctcttgcattgattntatcccccactcgcgaattatcagtccaaattcatgaagaagcaaggaaattcgcataccagactggtgttagggtggtggntgcgtatggtggagcaccaatacatcaacagttgagggaattggaaag

SEQ ID NO: 410306 - DNA, 497 bp, Oryza sativa
ttctccggcaggagcggcaggctgctgctgaggcaggccgagtcgtcgtccgcgcgggcgtcgttcgccgtgcgcgccgcggcgcccgacaggccaatctggttccccggcagcaccccgccgccgtggctcgacggcagcctccccggcgacttcggcttcgaccccctgggtctcggatcggacccggagagtttgcggtggaacgtgcaggcggagctggtgcactgccggtgggcgatgctgggcgcggcgggcatcttcatcccggagttcctgaccaagatcggcatcctcaacacgccgtcgtggtacaccgccggcgagcagcaatacttcaccgacaccaccaccctcttcatcatcgagctcatcctcatcggctgggccgagggccgccggtgggctgacatcatcaagcccggctgcgtcaacaccgaccccatcttccccaacaacaagctcaccggcaccgacgtcgggtaccctggtggtct

SEQ ID NO: 410307 - DNA, 482 bp, Oryza sativa
ttctacttcgattcgcttcgttacgttctcgctgttgatttgttcgtgagattggaattctagcaatggctcctctcggtgacggagcggcggccgcggcggcggcggagcccaacctggtggcgtcgctcggggagatgctgatcgacttcgtccccgacgtcgccggcgtctcgctggccgagtccggcggcttcgtcaaggctcccggcggcgcccccgccaacgtcgcctgcgccatctccaagctcggtggctcctccgccttcgtcggcaagtttggcgatgatgaggtcgggcacatgctggtggacatcctgaagaagaacggggtgaacgcggaggggagcctgttcgacgagcacgcgcgcacggagctggcgatcgtgaccttgaaaagcaactgcgagcgcgagttcatgttctaccggaacccgagcgccgacatgctcctgacggaggcggagctcaacctggacctg

SEQ ID NO: 410308 - DNA, 492 bp, Oryza sativa
tgcgattcccccatttttacctcactacctccgcccccgaaaatcccaacaattttttgatccttcgccgccggcaagcgccgcggagggttccccccagggagtggagaggagaggagcgggcgggttggtgttgggaaggggagggatggggttggaggaggacacgccggtgacgaagacggtgaaggccgcggcgacggggctggccgcggggaccatctggggcacggtcgtcgcgacatggcacgacgtgccccgggtcgagcgccacgtcgcgctcccggggctcatccggacgctcaagatgtgcggcagctacggggccacgttcgccgccgtcgggggcctctacatcggcgtcgagcagctcgtgctgagccagcgcaagaagaacgactacgtcaacggggccgtctgcgccttcgtcgccggcgccaccatattcggctacaaaggaaggagcatcccttctgcgctcatagctggttc

SEQ ID NO: 410309 - DNA, 487 bp, Oryza sativa
tcttgcttcattgggtcgtgggtggtgaaggagctcctgatccgtggctatgccgtgagaggaactgcaagagatccatctagtcaaaagaactcccatttgcaaaaacttgaaggagccaaagagaggctcagtctgaactatgcagatgtgatggactttgatagtctttctgttgcatttaatggatgtgaaggtgtattccatgttgcctcacctgtatccgttgatccgcgacttgtgcccgatgctgttgaaggaactaagaacgtgatcaacgctgcagcagacatgggcgtacgacgcgtggtgttcacatcaaccttcggtgctgtacacatggacccaaataggagccatgatacagtcgtggatgagagctgctggagtaaccttgagttctgcaaacaaaaagactggtactgttatgccaaaacggttgctgagatggtagcagcagagcaggcatcgaaaagagggattcagc

SEQ ID NO: 410310 - DNA, 474 bp, Oryza sativa
  unsure (1)..(474): unsure at all n locations
tgttcctgaaattgagtcatggctgccaagctagctcgcctccacagtctccgcgaacgcctcggtgccaccttctcgtctcatcccaatgagttgattgcactcttctctaggtatgttaaccagggaaagggaatgctccagcgtcaccagctgcttgcggagttcgatgccttgatcgaagctgacaaagagaaatatgctccctttgaagacattctccgggctgctcaggaagccattgtgctgccgccctgggttgcactggccatcaggccaaggcctggtgtctgggactacattcgggtgaatgtaagtgagttggcagtggaagagctgagtgtttctgagtacttggcattcaaggaacagcttgttgatggacacaccaacagcaactttgttcttgagcttgattttgagcccttcaatgcctncttcccgcgcccgtccatgtccaagtccatcggaaat

SEQ ID NO: 410311 - DNA, 450 bp, Oryza sativa
tgaggaggaggcggtggccaacgaggcgcatcacttcctcgtcgtcacgtaccccgcccagggccacatcaacccggcgcgccacctcgcgcggcgcctcgcgcgcgccgcgccgggcgcccgcgtcaccatctccaccgccgtctccgcctgccgcaagatgttcggcgacgccgcggcggcgggcgccggcggggagctcgtcgacgaggggggtgtgcggtacgcgccgtactccgacggctacgacgacggcttcgacagggcggtgcacgacagcgccagctacatgacccaggtcagggtcgtcggcgcgcgcacgctcgccgccgtcatcgaggggtaccgcgccgccgggaggcccgtcacccgcgtcgtctacacgctgctgctcacctgggtcgccgacgtcagccgcgaccatggcgttcccgtcgcgcctgactggat

SEQ ID NO: 410312 - DNA, 268 bp, Oryza sativa
atgattagtaggatgcaataatttatcttagccgggatctacataatacaatatcgggaggaagcaaaatcttcactggtctcagggcgggcacttgaacaaactacaaacaccctgttttttcaagggcagactacatcagggtatacaatctcctcaaaacaagcattatatgctactaccggttgcgtcaagttacaggttacagatctgtactagaaacaggccgaaattggtatcaaaaaggctttgggagcataagttttca

SEQ ID NO: 410313 - DNA, 381 bp, Oryza sativa
tatgacgcgtgggtcgccatctctctgaggtcttacagttaactgcatcagtggccgcggccaccatggcgctctcctccccggtgatggccacagcggtgccgcctacctcctcccagctcttgggagaggcgcggatcaccatgcgcaagaccgccgtgaagcccaagccggcggcgacgacggggagcccgtggtacggcgccgaccgcgtactctacctcggcccgctctccggcgagccgccgagctacctcaccggcgagttcccgggcgactacgggtgggacaccgcggggctctccgccgacccggagacgttcgccaagaaccgggagctggaggtgatccactcccggagggcgatgctgggcgcgctcg

SEQ ID NO: 410314 - DNA, 507 bp, Oryza sativa
ttcgaaacgacggatttcaccaacacatccatgtgctcaagcccttcttgctcttcccgttcattgtccagctcgattgatctccatggaaatggtcatgttattgaaaagtcgatatctagggttggctccttcaatctcaggcagatcaaaggcttatcaggtagcatgccattgccacctgaggaactaaggtgcccgatctccttgcaactcatgcatgaccctgttattatcgcatctggtcagacatatgagcgggcttgcattgagaaatggtttagcagcggcaacacaacctgcccaaagactcggaatgaattatcccagctctccatgacgcccaactattgcatcaagggtttgatagcttcatggtgcgagcagaacggggttctagttccatcggcgccgcctgattctcccaagctcaagtacctgaggatatcatccttgaatagtagcaaatgtcttgtgaccaattggcgtagcacggtcttgtttgaa

SEQ ID NO: 410315 - DNA, 482 bp, Oryza sativa
ttgtggacaagggcaccgtggacatcgccgggaccaacggcgagaccaccacccagggcctcgactccctgggcgcgcgctgcgccaagtactacgaggccggcgcccgcttcgccaagtggcgggccgtgctcaagatcggcgccgccggcgagccgtccgagctcgccgtcaagcagaacgccgagggcctcgcccggtacgcgctcatctgccaggagaacggcctcgtccccatcgtcgagcccgagatcctcaccgacggcgcccacgacatcaagacctgcgccgccgtcaccgagcgcgtcctcgccgccgtctacaagtctctcaacgaccacaaggtcctcctcgagggcaccctcctcaagcccaacatggtcacccctggctccgacagcccaaaggttggcgcggaggtgataggggagtacacggtggcggcgctgcggcgcacggtgccaccagcggagcccgggata

SEQ ID NO: 410316 - DNA, 502 bp, Oryza sativa
ttcttatcatatttggccaaccttgactgatgagcaatggctgaaggttgaatgtgcactcagggacctcatcctgtctgattatgcaaagaaaaacaatgttaatacgtctgcgctgacacaatctgaaattcgtgacattatacttggtgctgaaatagctccaccatcacagcagaggcaacagattgctgaaattgagaaacagtctagagagacgactcagctgaccgcagttactacaaggacgaccaatgtgcatggagatgagctcatcatcacaacgaccagtccatacgagcaacaagcatttgcatcaaagactgattggcgtgttagggctatctctgccacaaacttgtatcttcgtgtcaatcacatttatgttaactcagatgatataaaggagactggctacacttacattatgccaaagaatatattaaagaagttcatatgcatagcagatttaaggacacagattgagggtttctgtatgggc

SEQ ID NO: 410317 - DNA, 388 bp, Oryza sativa
ttcccttgtatactagagggcagtaggagtttggatccaagatgaggggcagaagcgatggggggcagagcaagaggcccatcttgctgctctgcgggatggacgggtgcctgtgcctcctcttcttgaatttctctggctccaatgggcaggctgggagtgccgcattagagtacgggaccaagttctcgcgctcactcgggtggggaagtgatggggacggagacgaccggtcgtaggagtccatatttggcaccggagatgcaaatgatgatgagctcatgagctttcctgagtgtgatgaccggcattctgtgctgatcccatccttggataggagcttgatatatcacatgaggatgaaactggatttaaacctgaccgaaca

SEQ ID NO: 410318 - DNA, 469 bp, Oryza sativa
ttatattctcagcttatagtcaggtgaggtctgagctgaggttgagagatggcacaggcaatggcgtccatgaccgggctgtcgcagggcgtgcagctgccggccgggcccaggcgcgccggcggcaggtccaggctcgccgtcgtcagggccgacgccgccgccgccgacgtccagaccggccgccgcgccgtgctcggcctcgtcgccaccgggatcgccggcggcgccctcgcgcaggcggcgctcgccgaggccgccaagcccatcaagctagggcccccgccaccgtcctccggtggactccctgggacgctgaactcggaccaggcgagggacacggacctgccgctgagggagaggttctacctgcagacggtgccgccggcggaggccgaggcgagggcgaaggacacggcccaggacatgatgaacctaaagccgatcatcgagaagaagcagtggccgt

SEQ ID NO: 410319 - DNA, 391 bp, Oryza sativa
tttttcaccgactctccgtggtccgatccctcggggccgacgccgccgtgagggtgttggcgcgcgcggaggacgtcggcgatggaggtggaacggatcacggcggagatgggcggggacattgacgtgagcctggactgcgccgggttcagcaagacagtgtcgacggcgctggaggcaacgcgcggctgtggaaaggtgtgcctcttcgtgatggggcacaacaagatgacggtgccgctgacgtcaggggctatcagggaggcgtacgtagtggggatattgcggaacagggacacgttgacgctgtgcatcgagtttcttctgagcttcaagatcgacctgaatcctttaatgatccaccggttcctgatctaacaggaggactttg

SEQ ID NO: 410320 - DNA, 507 bp, Oryza sativa
ttcctaaggcaccgtcttggcccaaactatttgaggcttcctgtgaatgcaccaaaatgtgcataccacaacaaccaccacgatggctccatgaatttcatgcacagggatgaagaggttaactacttcccttcaaggtttgatgctgcacgtcatgctgagaaggtccctattcctcctcgtgttctaacaggctgtcgggaaaagtgtgtcattgacaaggagaacaatttccaacaggctggtgagagataccggtcatttgaccctgccaggcaagatcgttttctccagcggtgggttgatgctctctcagatcctcgtattacacatgaactccgtggcatctggatctcctactggtcgcagtgtgatgcgtcccttgggcagaagctggcttcacgtatcaacctgaaaccaaacatgtagatcggccaggaggaatccagtggtggtgctatgttggacagtcaaacatgaactgtaatgtgtcgaccagccgtagtc

SEQ ID NO: 410321 - DNA, 487 bp, Oryza sativa
tttcagccggaagaagcggcgatcagatggagccaatactgatggcaagagaaaaggtggtggcttcaccaaattatgtagcatttccccaacgcttcaagagtttgttggtgcctctgagttagctaggacagaggtagtcaagaagctttgggcatatatccgagaaaataacttgcaagacccaagcaataagaggaagattctgtgtgatgagagattgaagaagatcttcaatgtcaactccatcgatatgttccaaatgaataaagcattgacgaaacacatatggccattgaattctgatggtcctgtgacctctgcctcacctgagagatcaacacccaaagagaagcctcaaaagagagaaagaaatgaagggaagaagcaaaaaggtggttcttctgggtctggatctggttttcttgtgcccctttaacttttcgatgatttaagtgaattcattggcacttgtgagagtatgctt

SEQ ID NO: 410322 - DNA, 396 bp, Oryza sativa
ctactatcagatgggcacgatacatatacagtcttaccaaccgctggtgtacacaaagcagcaccagagtactgctcactcctgccatatactagtaatggttgtcaacaggtaccagttcatgtctttggatttggtgctgaccatgattcagactcgctgcattcaatctcacaaacctccgggggcaccttttcattcatagagacagaggctgccatccaagatgcatttgcccagagtattggtggactcttgagtgttgatgcacaggatttgcatgtgaaggtggagagcctccaccctgatgtacactttggctcgatcagatcaggaagctattgtagcagacttgcagatgacaagaggaatggctccatagatgttggcgacatg

SEQ ID NO: 410323 - DNA, 484 bp, Oryza sativa
tgtttggtgtggcctacactgaagaagaaacaaaggctatggctgctgagattgaggtggttgatggtcctaatgatgagggtgaaatgttcacacgtcctggtaagttaagtgaccggttcccacaaccatatccaaatgagcaagcagcccgttttgcaaatggtggggcatacccaccagatctcagtcttatcacgaaggcaaggcacaatggccagaactatgtgtttgctcttcttactggttaccgtgatccacctgccggtgttcagatccgtgagggtttgcattacaatccctacttccctggtggtgccatagctatgcccaagatgcttatagatggagctgttgaatatgaagatggtactcctgccactgaagcccagatgggcaaggatgtcgtttcgttcttgtcatgggcagctgaacctgagatggaagagaggaaactgatgggagtgaaatggatcttcctact

SEQ ID NO: 410324 - DNA, 432 bp, Oryza sativa
tttgcggccaccatggcgctctcctccggggggattgtccgcgcggcgccgtcgacctcctccgcgctcttcggggaggcgcggatcaccatgcgcaagaccgccgcgaagcccaagccggcggcgtcgtcggggagcccgtggtacggcgccgaccgcgtcctctacctcggcccgctctccggcgagccgacgagctacctcaccggcgagttcccgggcgactacgggtgggacaccgcggggctctgcgccgacccggagacgttcgtcaagaaccgggagctggaggtgatccactcccggtgggcgatgctgggcgcgctcgggtgcgtcttcccggagctcctggaccggaacggcgtcaagttcggcgaggccgtgtggtatatggcgggctcgcagatcttcagcgagggcggtctcgactac

SEQ ID NO: 410325 - DNA, 430 bp, Oryza sativa
tcgctcgtcgtcgtcgcctctagggtttgtgtgcccccctccctcctccacctgccaaaacctcgcccccctcgccatggccaagaccaagcagggcaagcgggacgtcgactcctacaccatctccggcaccaacaaggtcgtccgagtgggggactgcgtgctgatgcggccggtggactcggacaaccagccgtacgtggcgcgggtggagaagatggagctggacgggcgcgggagcgtgcgggtgcgggtgcggtggtactaccggcccgaggagtccaagggcgggaggaggcagttccatggcgccaaggagctcttcctctccgaccacttcgacatgcagagcgccaacaccatcgagggcaagtgcgtcgtccactccttcaagaactacaccaagctcgacaacgtcggccccgaggac

SEQ ID NO: 410326 - DNA, 423 bp, Oryza sativa
  unsure (1)..(423): unsure at all n locations
cgttccgcaaccgcaaccgcgagagccgagagagaagcctttttccccgatcgattcccttctctccgctccgcatcgccatggcctcctcagcaccgacgccgccgccgctcctcccggtgaccaacccggcagccgcggggtcgtccccggccgccaccgccgtgggatctgacgcgccgatcgcaaccccggcgttccggctcttcctgagcaagctctccgactcggcgcggcgctcgctgtccgaccggcggccgtggacggagctggtcgaccgctcggcgttctcgcggccggactccctctccgacgccacctcccgccttcgccgnaacctcgcctacttccgcgtcaactacgccgccgtggtggccttcgcgctcggggcgtccctcctcgcgcaccccttatcggtcctcg

SEQ ID NO: 410327 - DNA, 446 bp, Oryza sativa
  unsure (1)..(446): unsure at all n locations
tttttattctatcaggagggttgtgctagcgaggtcttgttagcaacaaattgacatattgctcggcacatccccaccgagaataccaagatgacgttctctggtacacaggacaagtgcaatgcttgtgacaagaccgtgcatttcattgatctccttaccgcggacagtattccctaccacaagtcttgcttcagatgcagccactgcaaaggcacactttcgatgtgcagctattcgtccatggatggggttctttactgcaagacccattttgagcagctattcaaggaaacaggcaccttcaagaagaacttcccctcaggtacaaaggcaaacagtgaacaggctaagattcccagcaagctgtcctctgtgttctgtggaacccaggacaagtgtactgcctgcaagaagactgtgtatccattgnagaagatgaccat

SEQ ID NO: 410328 - DNA, 489 bp, Oryza sativa
tttcctctcctcctcgtctaccttacctagcagcagcagctagctagcttaattagctatagcagccatggcggcgacggcactgagcagccaggtccggttgccgatgtccctgcgggtggcgacggcgccggcgccggcgcgcgtgtcggtgctgccggcgagcaacaagctgggagacaggctgcggatgcaggcgacgtacaacgtgaagctgatcacaccggacggcgaggtggagctgcaggtgccggacgacgtgtacatcctggaccaggcggaggaggaagggatcgacctgccttactcctgccgcgcgggctcctgctcctcctgcgccggcaaggtggtctccggcgagatcgaccagtccgaccagagcttcctcgacgacgaccaggttgccgccggctgggtcctcacctgccacgcctaccccaagtccgacgtcgtcatcgagacccacaaggaggacgacctcatctaatc

SEQ ID NO: 410329 - DNA, 509 bp, Oryza sativa
tgctatctggacatactctactactactagccaggaagctagctaactaactacgtggctatggcccccaccgtgatggcctcctcggccacctccgtggctccattccaagggctcaagtccaccgccggcctccccgtcagccgccgctccaccaactcgggcttcggcaacgtcagcaatggcggaaggatcaagtgcatgcaggtgtggccaattgagggcatcaagaagttcgagaccctatcgtacctgccaccactcaccgtggaggatcttttgaagcagatcgagtacctgcttcgatccaagtgggtgccttgtctcgagttcagcaaggttgggttcgtctaccgtgagaaccacaggtctcccggatactacgatggcaggtattggaccatgtggaagctgcccatgttcggctgcaccgatgccacccaggtgctcaaggagctcgaggaggccaagaaggcctaccccgatgcctttgtccgtatcatcggctt

SEQ ID NO: 410330 - DNA, 356 bp, Oryza sativa
tcttatggcggcgccggatgttgagtaccggtgctttgtttgaggactcgtctgggccaccgacgaccgctccctcgaagccgacttctccacctacggcgagatcctcgagtccaagatcatcaacgatcgggagacggggaggtcgcgcggattcggcgttcgtgacgttctcgagcgagcaggccatgcgcgacgccatcgaggggatgaacggcaaggagctcgacggccgcaacatgaccggcaacgaggcccagtcgcgccgctccggaggcggaggctgcggtcgctactgccagcgcggtggatgcggaggctacggtggccgccgctacagcggtggtggcggcggt

SEQ ID NO: 410331 - DNA, 337 bp, Oryza sativa
ttcgaagtggagctcccgcagcaggaggtgaagctcttcagccgctggtccttcgaggacgtccaggtgaacgacatctcgctggcggactacctggcggtgaacccgacgaagcacgcgacgtacctgccgcacacggcggggaggtactcggcgaagaggttccggaaggcgcagtgccccatcgtggagcgcctgaccaactcgctcatgatgcacggccgcaacaacgggaagaagatcatggccgtgcgcatcgtcaagcacgccatggagatcattcaccttctcaccgacgccaaccccattcaggtcatcgtcgacgccatcatcaaca

SEQ ID NO: 410332 - DNA, 392 bp, Oryza sativa
tctgcgggagggaacgaagaagcagcagccggcctgagcttcgccgcacggaggaggaggagatggtgagggagctccagaaggagcgcgaacgcagcgaccgcaaccgtgactaccgtgaccgcgatgttagacgtaggaaagatgacggtgcagagccagaagctgatccagaaagagatcaaaggactgtatttgccttccagctctctttgaaggcagatgaaagagacgtctatgagttcttctcaagagcagggaaggtacgtgatgttcgccttattatggacaggaactcgcggcgttccaaaggagttgggattgcacactgaaatatttataattcgggatacctgctgggattgtctacagttacaagtaagatggaatat

SEQ ID NO: 410333 - DNA, 496 bp, Oryza sativa
ttcccgtctcctcgcattcgctcaccggtgagcatcctaatccatcccatccggcctcggcctcgaatttcgtctcctcgcccgccgcttgcgccgatccccatcctgcgagcagaggtggcgcccggcgtcctcctgcttccaccgcatcgtctatcgccggtgaccatccctccctccctatccacacctcatcaggtattctgcgttatccctcaaaaaagtttgggggttcaaccgaaaaccgacccctcaaccgaaacagggttagatctgcctctgcccagttccacctactttcaacttgttaattttgatttttgtttttagcagatgtaatttggttactgaatctcatccaaacacccttagaatagttgcattagaacggaaaatgtaagctcacataatttggactcatcctaactcacataaatttcttaagaagaatctataccacaaactactcatagtcactcaaaaaatctttttatta

SEQ ID NO: 410334 - DNA, 503 bp, Oryza sativa
actacgcgaaaataggtctggggaactttattcaagttcatatgatttgtctctgcaccgttacatgcatgcattgagctttgcaatatgcaggcagaaagcttattcaaacccaaactatatatggaacgcgtgtatgtatatatctatatcgatcgacgtttaattcatcatcgatcgatctcttctcagaacaatcttcttagaaattgatggagtatgccggcgactggtccgggttgaagaggccgaagtgcctctccgtctcgtcgcctcccttctggttctcgttgaacatggcgaaaatgtaggtctcgatgctcccgggcctcttgggcgtcccctgcccgacgtggttgatcaggttctggttgtacgtctgcgcgttgccggcgctcgccgtcgtgccgccggccgacggccacccgctctccgacaccacgatcgggacgctcccggcgccggcgctctccagcgcggagtagaacgtgtcgacgatggcg

SEQ ID NO: 410335 - DNA, 487 bp, Oryza sativa
tcaaatttcagcaggaaacagcctgtgagtgtagggaactgatcaccatccacgctggcaaaccaaaaggccatttgaaggatgcgcttaaggtggatcctgacaaagtcaggcgcctttctttgagcgaaacacagctagctaaagcaacagcttctcatggtgccgatgttataaggttcacccagaagaatatactcagggtgtatccgaagggtacaaggattaattcttccaactatgatccaatgaatgcctggactcatggtgctcagatggttgcatttaacatgcaggggcatgacaaagcactccggttaatgcaaggattttttagagctaatggaggttgtggctatgtcaaaaagcctgacttcttgcttaggacaggtccaaatggtgaagtatttgaccctaacgcaagtatgcctgtgaagaaaactctgaaggtgaaagtatatatgggagatggatggcgaatggattt

SEQ ID NO: 410336 - DNA, 469 bp, Oryza sativa
tcgcaccgaattccattcctcgcgattcctctgccctcgcctcctcgtcctccccctcccaggggatcgccggagaggaatcgcgcggaggaaaaaaaaagaaaagggcttccccgtcgtctaagttaaaaggaagccatggagcacaaggagactggatgccagcagccagaaggcccgatcctttgcatcaataactgcggcttctttggcagtgcggctaccatgaacatgtgctcaaagtgccacaaggagatgataatgaagcaggagcaggccaagctggcagcctcctctatcgacagcattgtcaatggtggtgattccgggaaggaaccaattattgctggtcacgctgaagtagctgttgctcaagtcgaggtgaagacgcttgttgcgcagcctgctgagattgctggtcctagtgagggggtcacggtgaaccccaaggggagggaaggaccaaatc

SEQ ID NO: 410337 - DNA, 472 bp, Oryza sativa
tatgtctacaaagatgtgcagaaagatgacgagagctttgtgaaccacttggtgatgagcattgccaagttcatccaaatggaagccgaggaggcagcctcctctgggagctacgaatcttcggaagggaggatggctgtcatacacacagaggacacaaccgggaccggtctggtgatgagggactccaataacgaggcttcaggcacgttcctgacaaggagcagcaggtcggagacgctgcggagcctccagtccatctacgagcaggagtccggtagtctcagcctgcgtcgcagagtccgctttgagattgcagaggaggagccgttcgacccccaggtgctggacgagctggatgatcttctggactccaaggaggccggcgtgacttacatcatcggtcactcctacgtgaaggcaaggaagaacttcaactttctaaagacgtcgtcatcgactacgcttactc

SEQ ID NO: 410338 - DNA, 374 bp, Oryza sativa
ttcattgctaccccagctgcaataatactcatacacctcacctcgtgccgcccgttgcgacacctcccgtacgtcaatgcccgtggccgccattgatggggaagaaggccggcaccacctcctcctggctcaccgccgtcaagcgcgccttccgctccccctctaaggacgactcccccaacaaggccgcccgcctacgagacgacaccgacgacgacaagggcaagagggagcgccgcagatggctcttcaggaagtcctcgtcgccgtctcccgcgccttcgacaccgccgccgccacagcagcagcagcagcaatcgagggcggcggccgtgactgaggagcagcggcacgccatcgcgctcgccgtggcg

SEQ ID NO: 410339 - DNA, 491 bp, Oryza sativa
tgagttctccgtagcagacacgtacaacgtaccgagcaaccttagctagtggcgcctgaaaattattaagcgcttcaagatggcaaagcatggcgttgcttccgttttaacactggcattggtccttggagttgcggccattcctacagtggtgcaatctatcggcgtgtgctacggcgtgatcgggaacaacctgccgtcgccgagcgacgtcgtgcagctctacaagtccaacggcatcgactccatgcgcatctacttcccaagaagcgacatcctccaggccctcagcggctcaagcatcgccctcaccatggacgtcggcaacgatcagctcggatccctcgcctccgacccctccgtcgccgacgacttcgttcagaacaacatccaggcgttcccgggcgtcaactttcgctacatcaccgtcggcaacgaggtttccggcggcgacacgcaaaacatcctcccggccatgcagaacatgaaca

SEQ ID NO: 410340 - DNA, 496 bp, Oryza sativa
tttggaagcttctagaagtttccgtgggcgatggcgatccgcgcgaggtcctcctcctacgccgccgcggcggtcgcgctggcgctcgcgctggcgtccgtcgccgctgtcgccggcgaggtcttcttccaggagaagttcgaagatggatgggaaagtcggtgggtcaagtcagaatggaagaaggatgagaacatggctggtgaatggaaccacacatctgggaagtggaatggagatcctgaggacaaaggtatccaaacctctgaggactacaggttctacgctatttcagcggagtacccagaattcagcaacaaggataaaaccctggtgctgcagttctctgtaaagcatgagcaaaagcttgactgtggtggtggatatgtcaagttgcttggtgtggatgttgaccagaagaaatttggtggggacacaccgtacagcattatgtttggaccagacatctgtgggtacagcaccaagagggccatac

SEQ ID NO: 410341 - DNA, 458 bp, Oryza sativa
cttctttgagcacgagcggctgaagatgaagggtgggcatcctgctaaatcatcagggagaaaaaaacgtaggaaagatgatgaggtgatgatggataacgaccagataatgatcccaggaaatgtatatcaaacatggctgaaggatccatcaagcctcattaccaaaaggcacagaatcaacagtaaagttaatcttattcggtcaatcaagatgagagacctcatggacttgcccctcgtttctctaatatcttccttggagaagtcacccttagaattttattatcctaaggaacttatgcagctttggaaggaatgtactgaagtcaagtccccaaaagctccatcttcaagaaggcagtagtcatcatcaccagaacaacagcaaagaaacttgcctccttaggcattttcaacccagcctcaagttgataatgacagggaaatgggattta

SEQ ID NO: 410342 - DNA, 553 bp, Oryza sativa
  unsure (1)..(553): unsure at all n locations
gcgcgccccggaataactgcggggaccgcacgcggcctgcgttcaccgggagtagaaagagatgatgggcaggattgaccattacaaagtgcgccagatactgaaaccctgcctcataacactccaaagagtagcataagcattagcgaagctgcagacggcaacgtttctgaggaggcaccacctcagagcagtgcatccatagaaacgccatcagaaagtgccatagctgtcgaggaaccaaaacacgacgacgaggccagcataaagccatccgaagacagcagtgctcttgaggagccgccgcaggacgatagcgccagcgtggagccatcagagaacactataactcttgagaaggcatcagaggaagatgagggaagtgtaaagccatcagaaggcaatgatgctcttgagaaaacattggaggaggatgaggcgagtgccaagctaccagaagacagtacgacctttgagaagccatncgagaaagatgatgctggcaccaagcagacagaggaccctgntactcttgagaaggaaccagaggaag

SEQ ID NO: 410343 - DNA, 399 bp, Oryza sativa
tttgcaacaaggaccgctcttgagaatcaggctgttaacgaagccaccttccgttgtccagatgagctagggtggaaacctcaaagggttcctattgtaccatcggatggagccatctcacggacaagagagactacgcttccggtaaatgagttgaccaagtcactccggaagacaggctacgatgtaatgccatcagacgatgctggtcggtttgtatgcaactatgtgtattatcattctcttcggttcgcagagcaacacggcatcaaatctctgtttgtacatgtgcccctgttcttgacgatcgatgaggaggtccagatgcattttgttgcttcccttcttgaagctcttgctgtcttgaactagggaaaaagaaataacaattcaagattg

SEQ ID NO: 410344 - DNA, 496 bp, Oryza sativa
tttatcctcctcctcctccttcctcccctaaatctctagagaaatggaggacaatctaccagtcaatgtccgggagtatcaagaactcgccaaaaaagcgttgccaaagatggcttatgattacatcaatgggggagcagaggatgagcacacactgagggagaatatcgcagcatacacaagaattatattacgacctcgcgttcttgtggatgtgagcaagatagacatgtcaacaactttattaggatacaccatgcgttcacccataattgtggctccaactggggggcacaaattagcacatccagaaggggagaaggctacagcaagagctgcagcatcatgtaacgccataatggttctttccttttcttccagttgcaagattgaggatgttgccttcagttgcaatgccattcgcttttattagctatatgtgtataagaatggactgtttcagcacattagtacggcgggccgagagttgtggatt

SEQ ID NO: 410345 - DNA, 282 bp, Oryza sativa
cgtatgctgccggcggtcggctggtaggctcttgtggagcggccctcctttttttttttttttgacaaattaaataaacccatgggggagacaagagcggagcgcgctaagattcattcattcattcagttggacaaagcaaacgagacgagctttattgtcgggatcaaaaacacagactgggcaaccacacatttaacacaaggtagatagttctacacaaagctaacgatgataacgatcggatggggatgaccgcagatggattagatggatagataa

SEQ ID NO: 410346 - DNA, 457 bp, Oryza sativa
gagcttgccagtatgaggatggataatgggtggccgcggttcagatccaagtacatgtccacggctgaaattgagaacattgcatggatgcagtaagctggtactcagatcaatgatccgtacattgatgattactatcatcaagcctgtttagctaaaaagtcagcaggaggtcaactcaagcaccacttctgtgcgaccttgattagagatccatcatcctgtgcacggagtaaagatgagccacatgcatatgtccagggtgaagctgttggaaggttaccatttgcttgcatgcgcaggcctcgtccgctcctcgatggtgaacaaacctgtgaatcaagtgatgacgttactgaaaaatctgcttcaaaaacacttgaccaagaaccaatgctggctgctaggatcacaattgaagatggcctttgcctactgcttgatgtagatgatattg

SEQ ID NO: 410347 - DNA, 385 bp, Oryza sativa
tgctcgggcctctgttgcaaagcactaccgtacttccacatgtctagtgggtaaggcttagtttgtggctcagtctggttataaacaaaagtacacggatggagatggatgaagtcgggggtcgatggacattctccagggcaaatgaaggctacacgagctgcggcccggtagtcgagatgtcatggcacagggccggtgtcctgctgctgggggctcagtcctgcctgcctgtcccgggggttccggccgtaggtgggattggagtcggtactcttgcctatggctaggatgggttggaaactatgtcacgtcttccgtctgtatacccgtggtggtatgtggcacgtggatgcacgtgaggaagatgtgtttcgcgggaaaa

SEQ ID NO: 410348 - DNA, 486 bp, Oryza sativa
tgttagcggcagaggaaggaggaggtggtgacgggggattttcaccattaacctggacaagcgcctccacagctggacattcaagaagaaggcgcccaatgccatcaaagagatcaggacgttcgcgcacaaggctatgggcactaccaatggcaggtgagctgtgaagctcaacaagcacatctgggactgtcaaatcaggagtgtgccgcggagggttcgaggggggatgcttccaaggagggatgcctaggaggatgccaaggcagagctatactctctggctacataatgacactgccatgctgacttgtttccttgcctggcctccaaggccattggcacaacttggtaacagcaccagctgcggcacgggaagcagcgttaccaatgctatcgttcagctactacgaccagcacgttccctggtctggttgcttcggtcaaacgagcagcactccccaaagcagatccctccgcgatctc

SEQ ID NO: 410349 - DNA, 461 bp, Oryza sativa
tgcgagcagagaagaaatctctgagctttatgaagatcgccactcacctgcgccgctcctgcttcctccactccttctcggttgtcttcctctactggttttatgtgatctcataattctgggggaatcatcttctccgcgtcaatccgccattgttactagtagtagtagagctctcttgttgttgttcttcttcttcgtgttcttcttcggttgattaaataatcgtagcagcagaagaagcagctgtttgtagacaaggtgtttgtggaaatgtcgtcgtcgtcgctgtcgccggcggggtcgtcggacggggactcggcgggggtggtggtggcggcggaccaccggagggagaagcggcggctgtcgaacagggagtcggcgaggcggtcgcggctgcggaagcagcagcacctggacgagctggtgcaggaggtggcgaggctgcaagcggacaa

SEQ ID NO: 410350 - DNA, 465 bp, Oryza sativa
tttctctcctgcgcgggcgagtcgtcctggtggtcctcgtcgtcccctttctctgctcccgcgagatctcacccccgctgcggcgacgcggccatggcggggaggaactaccacggctacggcggcggcggcggcgggggcatgtccatggtggcggcgagcacgccggggcaggagctggccctcaccaactgcgcgtacgtctcctccgccgacatccgccgcttccccaacgccctcgccctcgtcggcgacgccttcgtcttcaccctgcgtgcccatgatgctgtttctgctggaagcatcgcattgaatgccattcagcgtcgccagacgaaggtttcagctggggattcaatcactgttagcagttttgcccctcccgatgatttcaaattggcattgctcacattagaactagagtataccaaggcaagaaccaaccgaaatgaggagctggatgct

SEQ ID NO: 410351 - DNA, 457 bp, Oryza sativa
tcgattcgatcctagcttaagccgagtgaagtagctagcaggacattgttggtagtgtgatcttctccctgttttgcaacaatggcctcacgcagtagtgccctgctcctcctcttctcggccttctgcttgctcgcccggcgagccgccgccgactacggctcctggcagagcgcccacgccacgttctacggcggcggcgatgcgtccggcacgatgggcggggcgtgtgggtatgggaacctgtacagcaccgggtacggcaccaacacggcggcgctgagcacggtgctgttcaacgacggcgcggcgtgcgggtcgtgctacgagctgcggtgcgacaacgatgggcagtggtgcctgccgggcagcgtcaccgtcaccgccaccaacctgtgcccgccgaactacgcgctgccaacgacgactgcggctggtgcaacccggcggcccccac

SEQ ID NO: 410352 - DNA, 491 bp, Oryza sativa
tgagatatcaaggcaagcaatgtgctccttgacgcctagatgaatgggagacttggtgactttggccttgcaaggttgtacgatcgtggtgtcgatgcacaaacaacccgtgtggtaggcaccataggatacatggctcctgaattggcatcaagcagcaaggcaacccctctcaccgatgtattttccttcggtatatttgttcttgaagtcacatgtgggaaaaggcccatcaaggaagatgtcaacggtaaccaaatcatgctggtggattgggtgctagagcattggcagaagggatcacttactgatacagtagacacgaagctccaaggtaactatgatgttgacgaggcaagcatggcactaaagctgggattgctgtgctcccacccgtttgcagatgctagaccaaaaatgcagcaagtcatgcaataccttgaaggagaggttccaatacctgaggatatgccacctcatttgagctttga

SEQ ID NO: 410353 - DNA, 460 bp, Oryza sativa
tgtggacgaggttaaaagcaagcttaagggacgttcaatatagatcactgggctggcattctcgcagacaatgaatatgcttgtatcttcaggcgctgatgctcatctatgtgcttggagcattgatggttgggaaaagaagaaatcaagatatatccaatctccagcaaatcgttctggtgctttagttggtgatacaagggtgcagtttcacaatgaccaaacacatattttggtggttcatgagagccagttggcgatctatgatgcaaagctagagtgcttgcgctcgtggtccccaagagaagcactccctgctccaatttcaagtgcaatatactcatgtgatggtctcctcatctacgccggattttgtgatggtgcaattggagccttcgaagcagagtctcttaggctgggatgcaagatagcaccttttggatacatacccaccttccat

SEQ ID NO: 410354 - DNA, 482 bp, Oryza sativa
tatcttattgtcacttccatctcattctcctaattgtcatcactagcttctagctagcttaattaattaattagccatggcggaggagaagcaccaccaccacctgttccaccacaagaaggacgacgagccggccaccggagtagactcctacggcgagggcgtctacacgtcggagacggtgaccaccgaggtggtcgccggcggccaggacgagtacgagaggtacaagaaggaggagaagcagcacaagcacaagcagcacctcggcgaggccggcgccctcgccgccggcgccttcgccctgtatgagaagcacgaggcgaagaaggacccggagaacgcgcacaggcacaagatcacggaggagatcgcggccacggcggcggtcggcgccggcggctacgccttccacgagcaccacgagaagaagaaggaccacaagagcgccgaggagtccaccggcgagaagatgcaccacc

SEQ ID NO: 410355 - DNA, 461 bp, Oryza sativa
tttctcctcgccggccggagttctcgtctccggcgaccgccgccgccgccgccctcaccgtccggtggagctccggtgatcgacgccgcgatgtcgaggtctggggccatggatcttgcatctggactcggggggaagatcaccaaggatgaggtcaagtcggctgtcgatgagtatgagaaataccatggatactatggaggaaaagaagaagcaagaaagtccaactacacagacatggttaataaatactatgatcttgccaccagcttctatgagtatggttggggtgaatccttccactttgctcacagatggaatggagaatccctacgtgaaagcattaagcgacatgagcactttcttgcccttcagcttggagtgaaaccaggaatgaaggttttggacgtcggttgtggaataggcggaccactaagagaaattgccaaatttagcttggc

SEQ ID NO: 410356 - DNA, 461 bp, Oryza sativa
tgtcctgtcagttgctgactctccaccggtctcggcgatcgggtttgagggatatgagaaacgcctcgagatcactttctccgaggcgcctgtctttgctgaccccaatggcagggggttgcgtgcactgtcacgtgctcagattgactctgttcttgatctggcgaggtgcaccattgtgtctgagctctccaatgaggtcttcgactcgtatgtcctttctgaatcgagcctctttgtgtacccatacaagattgtgatcaagacctgtgggactaccaagctcctgctcgccattccgaggattcttgagcttgctgaagagctatctctgccacttgaagctgggaagtactctcgtgggacattcatttttcctgaagcacagccctctccacacaagaacttctctgaggaggttgcagtcctgaaccgctacttcggcggtctcaaatctggtg

SEQ ID NO: 410357 - DNA, 536 bp, Oryza sativa
ggaataatatgcctcaaatcatataagataatggcatggaagacaacctctcccactaggcaaatgtgcaaagctagcatgttattatcccttcgcaagttccatgccaacaagagtaaattttctcagccattcgaaggtattgagctaagtactagcacattagctttactaataaccacccctcagagcaaggacaagatggaggacagagccaccttcgatgttatagtccttcgcagtcttgtcgtcggcaagctgcttaccagcatagataagcctttgctgcacgggaggaatgccttctttctcctcaacacgctccttgatcctatcgatcgtgtcggtgggctcaatgtcaatttcaatctcttttccagtgagggtcttaaccttgatcatagtgccacccctgagcctgaggaccaagtgaagagttgactccttctgaatgttgtagtcggccagtgtgcgcccatcttccagctgcttgcctgcgaatatcaaacgctgttgatctggagggatcccttcct

SEQ ID NO: 410358 - DNA, 463 bp, Oryza sativa
taaaaaagggaaggaattattttctttgggttttgttcgcctccgcttcttcctcacgcagctctcgcctcgcctcgccgcccgccactagagaggagagggagaaggaggaggaggcaaatcccagcaaaagaagatgcagatcttcgtgaagaccctgacggggaagaccatcaccctcgaggtggagagcagcgacaccatcgacaacgtcaaggccaaaatccaggacaaggaagggatccctccagatcaacagcgtttgatattcgccggcaagcagctggaagatgggcgcacactggccgactacaacattcagaaggagtcaactcttcacttggtcctcaggctcaggggtggcactatgatcaaggttaagaccctcactggaaaagagattgaaattgacattgagcccaccgacacgatcgataggatcaaggagcgtgttgaggagaaa

SEQ ID NO: 410359 - DNA, 484 bp, Oryza sativa
tgctgctaccatgtttcttaaaggctttggtggtcttctgttcatcatcagcagctcatttggagcattcctactgctcctgtacttagcagttataacacctgttgtgtacgacttctacaactatgaaatggagtcttcacaatttgttcagcttttcgtcaagttctcacagaatttggcactttttggtgccctgcttttcttcttgggaatgaagaactctattcctagaagacattccaagaggagggccgggaagaccaagacaaactgaaaccagccactgtagtaggggaagctatttgtgctccttatgtttgcatactttacaaagtacatgtctcaattttcctcttgatactccatagaaattgtgaattggggacttaacaggacctagtatgtaggatacctaagtatgtctttaatagttctgttatcggtatatcccgttgtgtttcttctgtcatgaaagtaccat

SEQ ID NO: 410360 - DNA, 489 bp, Oryza sativa
tctgcccccgcctctccactccactccaacccacccatgggcacctcctggctggtccccctccacctccccacgaggccgtccgccgtcaaggcctccgccgccgcgacggcggcggcggccccgacgccgcagtcgctggaggagtcgttcggacggaagggcctccggttcgccgccgacccggccaccggcgcgcccaccgccgagctcagcgtgcggaacggcagctcgctgcagctccggctcgccgacgggctggtcacctcgtaccggcccaaggtgtactggaaggacgacgggtgcagggaggtgctccacaccgtcgccggcgccggcgccggcggcgaggtcaagggcggcgtcgggctcgcgctcagcgaggtgtcctcctccggcgccgccgagtcgctcctcgtcggctccgagtggtccgtcgtggacgccgactccgactcctacgatgcagtgcaggttgagctggggtgc

SEQ ID NO: 410361 - DNA, 441 bp, Oryza sativa
tggtacaagaagctatcagaaatcataagggctagcttgcagtaggaacaaacaatgaggtcgtccccgatcatcttcctgctcctggccgccgccgccgccatcgccgctccgtggcaggttgcgcacgccgcgggcaagtgcggcaagacgccggcggagaaggtggggctgaagctggcgccgcgcgcgaaggcggcgcaggaccccggggcccggccgccggccgtgtgctgcgcggccgtgcgcgacatcggcacgcaccagagccacgcgtgcctgtgcgccgtgctgctgtccagcaccgcgaggcgctccgggcgtaagccggagggggacatgaccatccccaagcgctgtaaactcgccaaccggcccgtcgggtacaagtgcggcgcttacacgctgcccagcctggagggctgatgacgacgtacgacg

SEQ ID NO: 410362 - DNA, 482 bp, Oryza sativa
ttggcaccaataccaatctctgactcctccggcctccggcggccggcgagagagatcccaccctcaccgacgacggcgagcgaccaccatgtcctcctccaccttcagcggcgatgagaccgcccctttcttcggcttcctcggcgccgcctccgccctcgtattctcctgcatgggcgccgcctacggcaccgccaagagcggcgtgggcgtggcgtccatgggggtgatgcgcccggaactggtgatgaagtccatcgtccccgtcgtcatggccggagtgctcggtatctacggcctcatcatcgccgtcatcatctccaccggcatcaaccccaaggccaagccctacttcctcttcgacggttacgcccacctttcctgcggtctcgcctgcggcctcgccggtctcgccgccggcatggccatcggcatcgtcggcgacgcccgagtcagggccaatgcgcagcagccaaagttgt

SEQ ID NO: 410363 - DNA, 349 bp, Oryza sativa
ggcaccggacgggttatatttttcacaagcaaaaaaggggacccagggccatataatcaggattggtacaacttacaaggggggggattggaaaacaaaaggcaacttattatcccaactagcattaacaggggggggggggcctgaagaacccccgccacgttttattttcagcataaacaaagcatcccgggatttccgggtcgggggccatggaataccctggcaagcaaaaggattctactgggtcttggccctgggggggaacagggcgatgacccgggtggtggaaccccccttgttggtgtacccggggacaaggttgacaaagtttttgttaagagcaatt

SEQ ID NO: 410364 - DNA, 477 bp, Oryza sativa
ttaatctcaagtctctgtctcgtcgtcctcgcatctccactcgccatgggcaagattaagatcggaatcaacggtttcggaaggatcgggaggctcgtggccagggtggccctccagagcgaggatgtcgagctcgtcgccgtcaacgaccccttcatcaccaccgactacatgacctacatgttcaagtacgataccgtgcacggccaatggaagcacagcgacatcaagatcaaggactccaagactctgctcttgggcgagaagccggtcaccgttttcggcatcaggaaccctgacgagattccgtgggctgaggctggtgctgagtatgtcgtggagtccaccggtgtcttcactgacaaggagaaggctgctgctcacttgaagggtggtgccaagaaggttgtcatctctgccccgagcaaagatgctccgatgtttgtctgcggtgtcaacgaggacaagtacacttca

SEQ ID NO: 410365 - DNA, 456 bp, Oryza sativa
gcttgggaagaggaggaggagcttgagcttggagagagacaacaatggcggctcaggctcttctctctgggaggcagctgctggggaggccattgcaatcttcagtctccaggtcttcttcctccaggaaggcacccttcatggtcagggcagaggccactccccctgccaagcaaggtgctgacaggcagctgtggttcgcatccaagcagtccctgagctacctggatggcacgcttccgggagacttcgggttcgacccgctggggctatcggacccggaggggaccggtgggttcatcgagccacggtggctggcctacggcgaggtgttcaacggccggacggcgatgatgggcgtcgtcggcatggtcgccccggagctcctcggcaagctgggcctcgtccccgccgagacggcgatcccgtggttccagaccggcgtgatcccccccg

SEQ ID NO: 410366 - DNA, 267 bp, Oryza sativa
gattcactgaacagtttctcatcaatagtacgacatatgttaacatacatggtctaaaaccagtacttcggggatatataccttctactattcatgttaagacaagaagcagcaccttttctttccatgtatgccatgtcagatactcgggtcccaagcacctgacccctttgctgaactctctgctgcccaaaccgacagtttgctgaacggttacctaatagaaatcaaccatttacataaaggctcattggaatcctttttgac

SEQ ID NO: 410367 - DNA, 436 bp, Oryza sativa
tttcgcgcgcacgcctatccctcccctgctgcgccgcctcgcctcgcagtgtggcagaaaggaaggaaggctaaaaccctatggagcgcgccagcgaccgaggcatctctgcttccttgcaatgacggcacccgcggacaaggggaagaaggacacgaccgacgccgacggcggtgccgccgaggagaacgagcagatcgacggcgcactcctgctctccatcgacaagctccaggagatccagcacgagctacagaaggacactgaggaagctcgcgacacggttctgcaggccgagcagaaatacagtgagattctcagacctgtatatctacgaaggagtgacattatccaaacaatgcccgacttctggctgacagcgtttctgagacatcctctacttagcgagcttttgaccgaagaggatcaaacgatg

SEQ ID NO: 410368 - DNA, 478 bp, Oryza sativa
tgtcccacggagcccgccggcttcggcgccggcaggggggacgccaccgtcgatgtcccgctcgacaccatgggcgactccaagagcaaggcaagggagctctcatcgtgggaaacagatctgaagcggcgggaggcggatatcaaaaggagggaggaagcgctgaggaatgctggagtgccaatggaggataagaactggccaccattcttcccgatcattcaccatgacattgccaatgagataccggctaatttgcagaaattgcagtatctcgcgttcgcaagctggcttggtatcgtgctttgcctctcatggaacttcatcgctgtcatagtctgttggatcaaggagggagattcgaagctgtttttccttgccactatctatgccttgcttggaattcccctctcgtacttgatatggtataggcctctctaccgtgctatgaggactaacagtgcgttcagttttggat

SEQ ID NO: 410369 - DNA, 469 bp, Oryza sativa
atcccctctcactcccactaccatggatccttgcaagttccggccgtcgagctcgttcgacacgaagacgacgacgacgaacgcgggagctccggtgtggaacgacaacgaggcgctgacagtggggcccagggggccgatcctcctcgaggactaccacctgatcgagaaggtggcgcacttcgcccgggagcgcatcccggagcgcgtggtccacgcccgcggcgcctccgccaagggcttcttcgagtgcacccacgacgtcaccgacatcacctgcgccgacttcctccggtccccgggcgcccagacccccgtcatcgtccgcttctccaccgtcatccacgagcgcggcagcccggagacgatccgcgacccgcgcgggttcgccgtcaagttctacacccgcgagggcaactgggacctgctcggcaacaactttcccgtcttcttcatccgcgacggcatc

SEQ ID NO: 410370 - DNA, 455 bp, Oryza sativa
gtacaagaagctatcagaaatcagaaacgctagctagcagtaggaacaaacaatgaggtcgtccccgatcatcttcctgctcctggccgccgccgccgccatcgccgctccgtggcaggttgcgcacgccgcgggcaagtgcggcaagacgccggcggagaaggtggcgctgaagctggcgccgtgcgcgaaggcggcgcaggaccccggggcccggccgccggccgcgtgctgcgcggccgtgcgcgacatcggcacgcaccagagccacgcgtgcctgtgcgccgtgctgctgtccagcaccgtgaggcgctccggcgtcaagccggaggtggccatcaccatccccaagcgctgcaaactcgccaaccgccccgtcggctacaagtgcggcgcttacacgctgcccagcctgcagggctgatgacgacgtacgacggcctttgttaggctct

SEQ ID NO: 410371 - DNA, 431 bp, Oryza sativa
gtcgatcagggtgttcaagaacagcggggacctgggcgtgcggtacccgttcaaccagccgatgaagctctactccagcctgtggaacgccgacgactgggccacccgcggtggtcgggagaagaccgactggtcgcgggcgccgatcgtcgcctcctaccggggcttccacgtcgatggctgcgaggcgtcggcggaggcccggtactgcgccacccagggcgcccggtggtgggaccagccggagttccgtgacctagacgccgaccagaaccgtcggctcgcctgggtccgcaagacgcacaccatctacaactactgcgacgaccgtgaacgctaccccgccatgtcgcccgagtgccaccgagaccgcgacgcctgagatctatcgagatctgtgatcgatgcttgctggccgttcgatggatgga

SEQ ID NO: 410372 - DNA, 472 bp, Oryza sativa
gttgtcaaggttctggtatgaaggtccaaattcgccagttggggccaggaatgattcagcaaatgcaacatccctgcaatgagtgcaagggaactggtgagaccatcagcgacaaggatagatgcccaggctgcaagggtgagaaggtggcgcaggagaagaaggttcttgaggtggtggtcgagaagggcatgcagaatggacagaagatcaccttccctggtgaggctgatgaagcgcccgatactgtcactggagacattatcttcgtcctccagcagaaggagcatcccaagttcaagagaaagggagatgacctcttctacgagcacaccctgaacctcactgaggccctttgtggctttcagtttgttctcactcacttggacaacaggcagcttgcttatcaagtccaagcccgtggaagttgtcaagcctgattcattcaaggctgtcaacgacataggcatgc

SEQ ID NO: 410373 - DNA, 460 bp, Oryza sativa
ttgcttaatgggggttttccgttgcagtgactacattcaggctcaaatagctaccgtgcagtatagtatgagagacctggatgaagctgacatgatttttgaagaactccttaggactgatcctttccgtgtggattctatggacgtttactcaaatttattgtatgcaaaagaaagctcgactgctttgagtttccttgctcacagagtatttttgacagataaatatcgcccagaatcttgctgcataattgcaaattactacagtttgaaggggcagcatgaaaaatcagttctgtactttcaaagagcgctgaagcttaatcgaaagtatctttcagcttggactcttatgggacatgagtttgttgagctaaaaaatacacctgctgcgattgatgcctacaggagagctgttgatataaatcccagagattaccgtgcttggtatggtcttggt

SEQ ID NO: 410374 - DNA, 402 bp, Oryza sativa
ttctgagaacgcgcacaggcacaagatcacggaggagatcgcggccacggcggcggtcggcgccggcggctacgccttccacgagcaccacgagaagaagaaggaccacaagagcgccgaggagtccaccggcgagaagaagcaccacctcttcggctgatcgacctcatcacaacgtcgccggcggcggcgacgacctcgtcgtacgttgccggccgccgtgtcgtcgatttgtgtgtgtaataatttgtcttcttctgcatgcgtggtgttgctggctttcacaagagtctctcgtccttgaccagtcagaggttgacaggtggggccgtgagtacaactagagttgcttgattttttttgcagtcttgccctgtgtgtgtccaaataagtggtgtgcat

SEQ ID NO: 410375 - DNA, 472 bp, Oryza sativa
  unsure (1)..(472): unsure at all n locations
cgggccctgcctgacctacgcccgcggcggcgccgggccgtcggcggcctgctgcagcggcgtgaggagcctcaaggcggcagcaagcacgaccgcagaccggcgcaccgcctgcaactgcctcaagaacgcggcccgcggcatcaaggggctcaacgccggcaacgccgccagcatcccctccaagtgcggcgtcagcgtcccctacaccatcagcgcttccatcgactgctccagggtgagctgagccatcgatcagagagacggatcatatatatacagcagcgcgccggttgccacctagtagattctgcctgggtcgatgtgtggagccgaattctgtatccagtactagtagtatcatatctgtattctggaataaaagatgagctagctaaggtctcgatcaatcaccatgcatgcatgtgtgtgcatccatggttgatcggnccggtcacgctagctagctttc

SEQ ID NO: 410376 - DNA, 530 bp, Oryza sativa
  unsure (1)..(530): unsure at all n locations
ggacgacaactttaaatattgctcaataaaacactatctggagacaacacacacgagagtcatatccagaggaaaacaatcagcccagacggaccactagcaccaaatgcaaagcaatgggaagaactaattcgaccgctaccaccctagtaaaaaccagagaagagagaggaaggggggacaggaagaaaaacattctagtagaacaggagaagaatccatccatcatggtgacagcagcatgaggcatctaaatcgatggtctccaataacatgcggagccatcgatcgatcgatcttcccattttactggccctcgccggcgtcgcccttggaggcttctttcacctcatcaccaccgtcctccgtgaggtcagaggtccagagggtcacagttgtccctcaggagctgcatgatcaaagtgctgtccttgtaagactcctcccgagggtatccaactcggagatggcttcgtcaaaccctgcttagcaaggttgcagccttgtctggagagttaantctcgtagta

SEQ ID NO: 410377 - DNA, 474 bp, Oryza sativa
ttaaagcattcgcatccacgagaccactcgaacccgacccgcctcgccgccgccgccaccgaagtaatcccttaattggtcaaaatgtctcgggaggagaatgtctacatggccaagctggccgagcaggctgaaaggtatgaggagatggttgagtacatggagaaggttgcaaagactgtagatgtggaagagctcactgttgaggagcgcaacctcttgtctgttgcttacaagaatgtgattggtgcccgccgtgcctcctggcgtattgtctcatccattgaacagaaggaggagggtcgtggcaatgaggaacatgttactctgatcaaggagtaccgtggcaagattgaagctgagctgagcaagatttgcgatggtatcctgaagttgcttgactcacaccttgtgcccttatctactgctggagaattaaggtgttttacctcaagatgaagggtgattaccaca

SEQ ID NO: 410378 - DNA, 475 bp, Oryza sativa
tatcgccggatcgccgcccgccgccgccacgatgtcgtcgatgctgtccgcgttctcgcagtggttcgtgaacccgcgccgcaacccgctcgcccgcctccacatgcaggcgatctcctcgcgcctccggaaatacggcctgaggtacgacgatctgtacgacccgaagcatgatctggacatcaaggaggcgctcgagaggcttcccagggaggtggtcgacgcccgccaccagcgcctcaagcgcgccatggacctctccatgaagcaccagtacctctccgaaaacgaccaggcgcaacagacaccattcagaggctatttgagtgacatgatggatctggtgaagaaggagagattagagcgtgaagaactgggagcccttccccttcaccagaggacccttcctgaagtcttatcttgataggccctgctgttttttcccaccacaatgcatcaaataaaatgcagtgga

SEQ ID NO: 410379 - DNA, 458 bp, Oryza sativa
tcacttcgcacatcctccgccgccgccgccgacggtccccatcaatcccgcgagcgagcggggccccgtcgttcgtcctcctgccgcttccgccgcatccatcctgtaggatcgatggaggcgaagttatcgttttctcaggacagcccgccaatttccataatttctgctgctaaggttgccggtgtctccctgtccatagatcctagtcttgctgcgggctcagcacccgttctatgcttcagttctggagaatcactccgtggtatcaaccctattctcgagtacattgcccaatcctctccaagcctccatggccgagatgctattgagtctggacatgttgttgaatggcttgaatacgcccccaccttccttttaggatcagaatttgaggttgcctgctcatttgttgatggatacttgatgtctcggacctttctggttggtcatgtttt

SEQ ID NO: 410380 - DNA, 457 bp, Oryza sativa
ttcttctgatgtctgcaacgtcaagcgctgatattgagaaactgactaagctacttctgcacaacccttttattctgacccttacggaggttggtcatgcgaaggatgatttgatcccaaaaaatgtgcagcagttttggatatcatgtgatgctaaggataagatgctttatatccttgtactcctgaagttggagcttattcagaagaaagttctcatatttgtaaactcaattgactcggcattcaaattaaggctgtttctggagaagtttgggataagatcttcagtgctaaatgctgaattaccacaaaattcacgcctccatatcattcaggcattcaatgctaggctatttgattatctgatagcaacggatgacaataagtctaaagaggagaggcaagccaataagggaaacaaaaaggattctagggtgtcacgcaagcagttgca

SEQ ID NO: 410381 - DNA, 446 bp, Oryza sativa
ttgaaagagaagccggggctcatctactgggcgctaacctacacccttgcggagccttgtcgaagctaccggttcaaggctgtgccgctccaatggtgaacgaaccgatgcgcgcgctcgacaccggtgccgcatgacaaagagtagatgatcttgtccccatgattgctaggggagcgaagggggatgctgaccaggctgaacatctacacatgctagacattccaccagctactgaatatatgaatgggctcaagagggagatgattgctgctgcattagatctttcgctgggaattgaaggaccaactgatgttgaggaggactgccctgccgttaaagtaccaggattggttggcgtcaatccagaaggcgaccttggagctagggtggaagccggagtacgacctggaggagggccttaccgactcgacaaccttcacttc

SEQ ID NO: 410382 - DNA, 474 bp, Oryza sativa
ttctcctccgctcccgatctcacaaccaccgactcctcctcctcgcgcggcggcggcggcggcgtgagccagcagcagccatggtgctgttctcggtgacgaagaaggccaccacgcccttcgacggccagaagcccggcacctccggcctccgcaagaaggttactgtattccagcagcctcattacctccagaactttgtgcaatccacatttaatgcccttcctgccgacaaagtaaaaggtgcaaccattgttgtgtctggtgatggccgctatttctcgaaggatgctgttcagatcattacaaaaatggctgccgctaatggagtaagacgtgtttgggttggacaaaacagcctcatgtctactccagctgtatctgctgttatccgtgaaagagttggtgcagatggatcaaaggctactggtgccttcattttaacagctagtcacaaccctggtggtcctactg

SEQ ID NO: 410383 - DNA, 461 bp, Oryza sativa
tctgtttttttttttcgagaagatcagtactagtttattcatgccatgaccatgcatacatatgggctttcacagatccatgaagaattccctcggccgaagccgaaacagacatatatagcaaactcactcactgtggctggagagcgaccgtgctaagtgcgtactcacacgcaattttattagatcgatcggggccggcacggctgtgcacacgtatactgctccgcagacgccgacatgatgccgccgtcaaacggcgcctggccgaagcagtccaggttgggcccgttgcctgacgccgagcacgtcgcagtaagcgcttgtagaacgcgaccccggtcggcgccggcgtttgccgtcgggtcactggaagcccgccggtgaggatgttcgtggtgagcccgtagcctggcgcgcggacggacgcgcttgtcccgggaggtcggattccactggcc

SEQ ID NO: 410384 - DNA, 456 bp, Oryza sativa
caaaaagaggagagaggggatcggaggagaatttctccacttcacccccaacaagcatgccgaccaccaccaccccccgctaccccaggagagattcacccgcaatgtccgacgaggccaccaggcgcttggccgggggcggcgggggcggcgcggcgctgagggcctcctccgacgtcgaccgcaagccggccgccgcgggctccccgcctcctggcgccgccgccgccgcggggcacaagatccagcttaagagcgcccacatgaaggaggagatgcgccaggaggccttcgacatttgccgcgttgcgttcgagaagcacaccttggagaaggacattgcggagttcatccagaaggagttcgacaagaaccacggccctacctggaacttgattgtccgccgtaactttcggtcctacgtaacacacgagacgaactactttgggattttta

SEQ ID NO: 410385 - DNA, 473 bp, Oryza sativa
cccacgcgtccgcccacgcgtccgcggacgcgtgggtttctccccaatctcgcgaggctctcgtcgtcgaatcgaatcctctcgcgtcctcaagatgcagatctttgtgaagacattgaccggcaagactatcaccctcgaggtggagtcctctgacaccatcgataatgtcaaggctaagatccaagataaggagggcatccccccggaccagcagcgtctcatcttcgctggcaagcagctggaggatggcaggacccttgctgactacaacatccagaaggagtcgacccttcaccttgtcctccgcctccgtggtggcatgcagatctttgtcaagactctgaccggcaagactatcacccttgaggtggagtcttctgacaccatcgacaacgtcaaggccaagatccaggacaaagagggcatccccccagaccagcagcgtctcatcttcgccgggcagcagctgg

SEQ ID NO: 410386 - DNA, 470 bp, Oryza sativa
ctgacgcgtgggggcaagggtatccttgctgcagatgagtccactggcaccattggcaagcgctttgccagcatcaatgtcgagaacgttgaggagaaccgccgctctctccgcgagctgctcttcaccacccctggtgccctccagcacctaagtggtgtgatcctcttcgaggagaccctgtaccagaagaccaaggacggaagcccttcgtcgatgtcctcaaggagggtggtgtcctccctggcatcaaggttgacaagggtaccgttgaggttgccggcaccaacaaagagaccaccacccagggccacgatgatcttggcaagcgttgcgccaagtactacgaggccggtgcccgcttcgccaagtggcgtgccgtcctcaagattggccccaacgagccatcgcagctttccattgacctgaatgctcagggtcttgctcgctatgccatcatctgccaggag

SEQ ID NO: 410387 - DNA, 430 bp, Oryza sativa
tctccctcctctcctcgtccctcctccccgccgccgccgcagcagatttaatcctcaatggcggccttcaacaagctcggtagcttcctcaggcacagtggcttgacaagcagtgcctcggccggctcttcccctgccatgttcaatgctgctcgtctgatgtccaccaagcttttcgttggtggtctttcttggaatactaatgacgattcgctgaaagaggcattcaccagcttcggggatgtgactgaagctcgggtgatcaatgacagagaatctggaaggtcaagagggtttggctttgttagctttgccaatggcgatgatgccaagagtgccatggatgccatggacggtaaggaacttgagggacggagtatccgcgtgaacttcgcgaatgagagacctccagggaaccgaggtggcggcg

SEQ ID NO: 410388 - DNA, 461 bp, Oryza sativa
tttcctttaactgcaacctgctgtaccatgacagacttaaaattgacccagaacttgagaaagaaattggggccaaatatgaagaggatctcgatgctatgcttccaaagtgtgatgtcattgtgatcaatacacctcttacagagaaaacaagaggtatgtttaataaagaaagaattgcaaagatgaagaaaggtgtaatcattgtgaataatgctcgaggagcaatcatggatacccaggcggttgcagacgcttgctctagtggtcaagttgcaggatatggtggtgatgtctggttcccccaaccagcaccaaaggatcacccatggcgatacatgcctaatcatgccatgacccctcatatctctgggactacaattgatgcacagctgagatacgcagcaggagtgaaggacatgctggacaggtacttcaaaggggaagacttcccggtgcag

SEQ ID NO: 410389 - DNA, 465 bp, Oryza sativa
tagggcatcgcctggtccttcggaggcatgatcttcgcgctcgtctactgcaccgccggcatctccggaggacacatcaacccagcagttacttttgggctgttcttggccaggaagctgtccctgacccgggccatcttctacatagtgatgcaatgcctaggggccatctgcggagctggagttgtgaagggcttccagcagggtctgtacatgggcaatggcggtggtgccaatgtagttgccagtggctacaccaagggtgacggtcttggtgctgagattgttggcaccttcatcctggtctacaccgtcttctcagccactgatgccaagaggaatgccagggactcacatgttcctatccttgccccactgccaattggttttgcggtgttcctggtccacctgggcaccatccccatcaccggtactggcatcaacccagccaggagccttggcgct

SEQ ID NO: 410390 - DNA, 412 bp, Oryza sativa
tgtcctcttgctgcggcggcaactgcggctgcgggagcggttgccagtgcggcggcggctgcggcggatgcaagatgttccctgatgtggaggccacagccaccaccaagaccttcgtcctcgctgctccatccaacaaggcgagctctggaggaatggagatggcggtggagagcggcgagaacggcggctgcggctgcaacacctgcaagtgtggcaccagctgcagcggctgctcctgctgctcctgcaactgaatctatcgtcgtcgtcgcccggctgcatgaggatttatcgtatggatgctgctactgtccatcagagctttgatcgaggccttaatttgcttgcattagtacccagcttatatgtaggcaggccttgccttttgctatgacgcctaaataaaacc

SEQ ID NO: 410391 - DNA, 464 bp, Oryza sativa
tattagagcagcgtcgcctctcctcctcctgcctaacccctacgcttccagaaccttctcgaagctcccgctcccccccccttccgctccaatggcgaaggaaccgatgcgcgtgctcgtcaccggcgccgcaggacaaattggatatgctcttgtccccatgattgctaggggtgtgatgttgggtgctgaccagcctgttattctacacatgcttgacattccaccagctactgaatctcttaatggccttaagatggagctggttgatgctgcatttcctcttttgaagggaattgtcgcaacaactgatgttgtggaggcctgcactggtgtgaatgttgcggttatggttggtgggttccccaggaaggagggaatggaaaggaaggatgttatgtcaaaaaatgtctccatctacaaatcccaagcttctgctcttgaggctcatgcagcccctaact

SEQ ID NO: 410392 - DNA, 460 bp, Oryza sativa
tgtgtacacgtgtggcccggccaccatcgtcccttccaccgtctacctcaccccggaccggcgccgccgcacctaggcgctcatgacgtggaccgtcacctgcacctactcccagcagctggcgtcgcgctacccgacctgctgcgtctccttctcctccttctacaacagcaccatcgtgccgtgcgccaggtgcgcctgcgggtgcggccacgacggctaccgcggcaacggcggcggcgggaagaacgcccgcgccggcgacggacgcagcagaccacagcggcggcggcggagggcacagcggcggcaccgagtgcatcatgggcgactcgaagcgggcgctgtcggcgggggtgaacacgccgcgcaaggacggggcgccgctgctgcagtgcacgtcgcacatgtgcccgatccgcgtgcactggcacgtcaagctcaactacaaggactactg

SEQ ID NO: 410393 - DNA, 462 bp, Oryza sativa
tgtacagcagaggttgagtctgctctggtttcacatccaaaatgcgccgaggccgctgttgttggaattgaccatgaggttaaaggccagggaatttacgctttcgtgacattggtggacggtgttccttacagcgatgagctacggaaaagcctcgttatgactgttcgcagccagattggggcgttcgcggcgccggacaagatccactgggcgccggggctcccgaagacgcggagcggcaagatcatgcggaggatcctgcggaagatcgcgtccaggcagctggacgagctcggcgacaccagcacgctcgccgaaccaggcgtcgtcgaccagctcatcgcgctcgccgatagctagctttagctaaagccaccgtcgtctcgtcgcgcgcgaggaacctctgctcggccgagagtctcattttcgttatgagcaagattacattcttattccatc

SEQ ID NO: 410394 - DNA, 473 bp, Oryza sativa
tgagagcaccaaggacacgcgactagcagaagccgagcgaccgcctcctcgatccatatcttccggtcgagttcttggtcgatctcttccctcctccacctcctcctcacaggttcttggtgtagcttgccactttcaccagcaaagtttcatgtctgatctcgacattcagatcccaactgccttcgatccctttgctgaggccaatgctggagactctggtgcggctgcaggatcaaaggactacgttcatgtacgcatccagcagcgtaatggccgtaagagcctgaccactgtccagggattgaagaaggaattcagctacaacaagatcctcaaagatctcaagaaagagttttgctgcaatggtactgttgtccaggacccagagcttggccaggtcattcaacttcagggtgatcagaggaagaacgtatcaaattttcttgttcaggccggcattgtgaagaagg

SEQ ID NO: 410395 - DNA, 342 bp, Oryza sativa
tgaatcaattaaccatcggcgagcagaagaagagcagaggctcagctagcaggcgagagagatcagcgagcaggatggctggggctgcagggtcgtcgtggtcctctctgctcctcgcagcggtggcggtggcgctcgccgtcgtcgcagtgccgccgatcgccggtgacccggactacctgcaggacatccgcgctgccgacctccactccctggagatggcgcccggtaccccgtgcatggcggaccctacggtggacgactttgtctccggattgcttgtctggcccggagccgtcgccaccaccgccgccgtggacgcgtgcactggtgccaacgttg

SEQ ID NO: 410396 - DNA, 317 bp, Oryza sativa
ttgtggtggtgggcgtacgcggggatatcctgcttcctggtgctcttcgccgggatcatgtcggggctcaccctcggcctcatgtcgctcggcctcgtcgagctggagatcctccagcgcagcggcaccgatgccgagaaggcccaggctgctgccatcctcccagctgttcaaaagcagcaccagcttcttgccaccctgctcttgtgtaatgcttgtgccatggaggctcttcctatattccttgacaggatttttcatcctgttgttgctgttatcttatcagtaacgtttgttcttgcttttggagaggctat

SEQ ID NO: 410397 - DNA, 360 bp, Oryza sativa
ttgccgccgccaccatggccctctcgtccccggcgctggccggcaaggccgccgcgaaggtgttcggcgaggggcgcatcaccatgcgcaagtcggcggcgaagcccaagcccgccgcgtcggggagcccgtggtacggcgccgaccgcgtgctctacctcggcccgatctccggcgagccgccgagctacctgaccggcgagttccccggcgactaccggtgggacaccggggggctcttcgacgacccccagacgttcgacaagaaccgggagctggaggtgatccactccaggtgggccatgctcggcgcgctgggctgcatgttcccggagctccttgcccgcatcggcgtcaagt

SEQ ID NO: 410398 - DNA, 465 bp, Oryza sativa
gtttggtatcagtttattcctcagctgatattcttgaacagcttatttggttacctttcactcctcatcattattaagtggtgcacgggctcaaaagctgacctttaccatgtgatgatatatatgttcctgagtccaactgatgatcttggggagaacgagctatttcctgggcagaaactagtgcagcttgtactacttctgcttgctctggtttctgtgccttggatgctgattccgaaaccatttttcctgaagaagcaacatgagcagaggcaccaaggccagcagtacaccatgcttcaggccactgatgaatcagtgacagagctagaagaacaccaggatgaccctcaccaccatgaggagtttgaattcagcgaagtctttgttcaccagctgatccacacaattgagcttgtgctcggtgcagtctcaaatacagcctcttaccttcgtctttgg

SEQ ID NO: 410399 - DNA, 456 bp, Oryza sativa
gttctacactactaaagcaacaagagcaggggcacttcccaattatccccaacttcgtttctagctctttttggtgtgatttgatggtgctttggagggtggaggcgtgcccgtggcacagcttgccactcccaccagcaaagtgtcatgcttgatctctacattcagatcccaactgccttcgatccctttgctgatgccaatgctggagactctggttcgtctgcaggatcaaaggcctacgttcatgtactcatccagcagcgttatggccgtaagagcctgaccacttgcccagtgattggagacggaattcaggtacaccacgatcctcaaagatcctaagaaagagttttgctgcactgtgactggtgtccaggacccctagcttggcccggttcattcaactttaggtcgatcagaggaagaacctatcttattctcttgctcatgccc

SEQ ID NO: 410400 - DNA, 469 bp, Oryza sativa
ttgaaaacccaggtaattacgaactagggcttctccagcccggcgacgcgggggaattttacagataagccctcggattccttccccctattctccgctcctcgcgtcgtcgtcctccgagagggggaggagaaggcgagaaggggctccggtggtgggagagggagaccgccattgccgctacttccgagttcagattggggaagatggttgtccaggagttcaccgttgatctgaacaagcctctcgttttccaggttggccatcttgaggaacgttatcaggaatgggttcatcaacctatcgtgagcaaggaaggtccacgctttttcggaaatgatgtcctggagttcttgacgcgcacaaagtggtttgctgtgccaaccatatggctgcctgtcgtctgctggttgcttgtgaaatctattcggatgggtcatactattcaggaagtaggtctaatggccct

SEQ ID NO: 410401 - DNA, 460 bp, Oryza sativa
ttgcaagctcgacggccagggcgccgccgtgtggagcaagaactcctgcgccaagaaatacgactgcaagatcctccccaacactttggtgctggacttcgtgaacaacggtctcatcagcggcatctctctggtgaaccccaagttcttccacatgaacgtgttcaagagcaagaacatcaccatcaaggacgtgaccatcaccgcgccgggggacagcccgaacacggatggcatccacatgggagactcctccaagatcagcatcattgacacggtcatcggcaccggcgatgattgcatctccatcggccccggcaccgagggcgtcaacatctccggcgtcacctgcggtcctggccacggcatcagcgtcggtagcctgggcaggtacaaggacgagaaggatgtgacggatgttaccgtcaagaactgcgtgctcaagaagtccaccaatggc

SEQ ID NO: 410402 - DNA, 468 bp, Oryza sativa
tgtctctctctctctctctctctctagatatgtctctctttttctctctagatctctcttttttcttgtatctctataggttgttagagcggcgacggcgagaagaggaaggagcaacaaggagtagatcatcagtatagagagcagcagcaatttgggaaggttcattattacagctctgttgtttcatttctttgaggagacgaagttagcaagcagggattgctgtttctgaatttcaaggagaagataacaatagcaaatgatgatgtcatctgggttccagctcggtgtgatcgggtctcttgcgctgacggttgcatcatcagttgccattgtcatctgcaacaaagctctcatcagtacccttggtttccctttcgctacaacattgacaagctggcatctcatgatgaccttctgcaccctccatgtggcacaacgcttgcatttctttgaaccaaaggc

SEQ ID NO: 410403 - DNA, 337 bp, Oryza sativa
ttcttcgaacatggcgatgcgtgccaatccggccaagggctaccccggccggacctaccgcttctacaccggcccgaccatccaccccttcggccatggcctcagctacacctgcttcacccactgcatcggccacgcgccgtcgcagctcaccgtgcgcctctacggccaccacgccgccgcctgcggctccgcctggctcaacgccacggatcgcctcagccgcgccgccgccgtgcgcgtcgcgcacgcgcggtgcgaggagctgaggatgccggtgcacgtcgacgtcaggaacgtgggagaacgcgacggcgcgcacacggcgctcgtgtac

SEQ ID NO: 410404 - DNA, 463 bp, Oryza sativa
tgcttgagcttggagagagacaacaatggcggctcaggctcttctctctgggaggcagctgctggggaggccattgcaatcttcagtctccaggtcttcttcctccaggaaggcacccttcatggtcagggcagaggccactccccctgccaagcaaggtgctgacaggcagctgtggttcgcatccaagcagtccctgagctacctggatggcacgcttccgggagacttcgggttcgacccgctggggctatcggacccggaggggaccggtgggttcatcgagccacggtggctggcctaccgcgaggtgttcaacggccggacggcgatgatgggcgtcgtcggcatggtcgccccggagctcctcggcaagctgggcctcgtccccgccgagacggcgatcccgtggttccagaccggcgtgatcccccccgcgggcacctacacctactgtgccgac

SEQ ID NO: 410405 - DNA, 521 bp, Oryza sativa
ttgacgcgtggggaagtactcgagcaaagaaggagagagcttggtgagctgcagagatggccccctccgtgatggcgtcgtcggccaccaccgtcgctcccttccaggggctcaagtccaccgccggcatgcccgtcgcccgccgctccggcaactccagcttcggcaacgtcagcaatggcggcaggatcaggtgcatgcaggtgtggccgattgagggcatcaagaagttcgagaccctctcctacctgccaccgctcaccgtggaggacctcctgaagcagatcgagtacctgctccgttccaagtgggtgccctgcctcgagttcagcaaggtcggattcgtctaccgtgagaaccacagatcccccggatactacgatggcaggtactggaccatgtggaagctgcccatgttcgggtgcactgacgccacccaggtgctcaaggagctcgaggaggccaagaaggcgtaccctgatgcattcgtccgtatcatcggcttcgacaacgtcaggcag

SEQ ID NO: 410406 - DNA, 550 bp, Oryza sativa
  unsure (1)..(550): unsure at all n locations
ttaacttgttgatggctcaccagctatggtcaaatcaaaaagaggtcgacctcctggactaaagtcattggagaagaaggctgctggaaagaaagttctaggtctgaaaaaggttgaggagactactgattcaacagggaagttatcgaagcagtcatctaaggatgattccaagtcatctacaagaaaggcaagtggagcagggtcatcaaaaaagcaacaaaagatcagtttgaaacagaaggatgaaactgactccaaggaagatactgctaaggatctgagcctaaaggaaatggtctctccaaagtccgtgtccaaggggtcagctaagaccaagggcagccaaggccaggacaataatggctccaagaggaaaaggtcacaagaggatgaacaagagactcctcgttctaagaagaataaaggccttgatgctagccttgntggtgcaaggatccaagtatggtggcctgacgacaagaagttttacaagggcattgttgactcatttgatacagcttcaaaaaggcacaagattgcatatgat

SEQ ID NO: 410407 - DNA, 422 bp, Oryza sativa
  unsure (1)..(422): unsure at all n locations
ttcaagttccactggaagcccacctgcggcgtcagctgcttgatggacgacgaggccacgctcgtcggcggcaagaaccacagccacgccacccaggacctctacgactccatcgccgccggcaacttccccgagtggaagctgttcgtccaggtgatnacccggaggaggaggagaggttcgacttcgacccgctggatgacaccaagacatggccggaggacgaggtgccgctccggcccgtggggcgcctcgttctcaaccgcaacgtcgacaacttcttcaacgagaacgagcagctggcgttcgggccggggctgggggggccggggatctactactccgacgacaagatgctgcagtgcaggggtgttcgcgtacgccgacacgcaacgctacaggctggggccaaactacctgat

SEQ ID NO: 410408 - DNA, 448 bp, Oryza sativa
ttcgtgttgctgcttccttctcggaagatagcaccaccagaggtcgtcgttgggttgtaatggcggaggtgcagagcgtgcaggcgctggcgtcgtcgctggcggcgctgccgccggagttcgtgcgttccgagcacgagcggccgggggcgaccacgttccgcggcggcgacgcgccggagatcccggtgatcgacatggcggcgcccgagtccgccgcgcgcgtggcggaggcggcggcagagtgggggctcttccaggtggtgaaccacggcgtgcccgccgcggcggtggcggagctgcagcgcgtcgggcgcgagttcttcgcgctgccgcatgaggagaaggcgcggtacgccatggacgcgtcctccggcaagatggagggctactgcagctagctgcagaaggaccttgagggcaagaaggcgtgggccgactttttttt

SEQ ID NO: 410409 - DNA, 460 bp, Oryza sativa
ttatgattgatcagggtgagaaagatgacaagagcatacatgtttgtgctgatgaccctgaataccggcacttcagggacatcaaggaaatcccccctcaccgacttcaagagatccgtcgcttctttgaagactacaagaagaatgagaacaaagaaggtgctgtcaatgagtttctcccagcagaagatgccatcaacgcaatcaagtactcaatggacctctacggcgcctacatcattgagagcttgaggaagtgatctccagctgatcaactgtagaggctacatgattcactgaacagttgctcatgaatagtacgacatatgtgaacatacatggtctaaaaccagtacttcggggatatataccttctactattcatgttaagacaagaagcagcaccttttctttccatgtatgccatgtcagatacttgggtcccaagcacctgacccct

SEQ ID NO: 410410 - DNA, 444 bp, Oryza sativa
ggtatttccccctttttttatacaacccctaaaccagaagtatctttgggtgtccagacataggagtgagtgattacaggcccagctgttctgaaaccaatagaactactgaagagcaaatcgaacacactgagcaaaaactggggcagcagttgagcatattgatatgggaggtctaagaatgaaacaaatgaagaagtaggttgtgcttacattacgcttaacacgacgatgggttcgacaaaaactaggatagggtagagctagagagagacaagaaaaagcatgacataataactgataagcgtgctcgttgagcctctcagacttgggccgtgccttgcgtgaacaagggatcctcacaccggtacttcccgtcagggccaattccaaagcccttgggatctgagaacacgttttccagaagctggcttcggggaggga

SEQ ID NO: 410411 - DNA, 516 bp, Oryza sativa
ttcattgagagggcaaggagaggtgaaggaccgactcttgtggagtgtgagacttaccggttcagaggacattctcttgctgatccagatgagctcaggaggcctgatgagaaatctcattacgccgcaagggaccccattacagccttgaagaagtacatcatcgaacagaaccttgcaactgaatccgagctgaagagcatcgagaaaaagatcgatgatgttgttgaagaggccgtggagttcgctgacgcaagcccgctccctccccggagccagcttctggaaaacgtgttctcagatcccaagggctttggaattggccctgacgggaagtaccggtgtgaggatcccttgttcacgcaaggcacggcccaagtctgagaggctcaacgagcacgcttatcagttattatgtcatgctttttcttgtctctctctagctttaccctatcctagtttttgtcgaacccatcgtcgtgttaagcgtaatgtaagcacaacctacttcttcat

SEQ ID NO: 410412 - DNA, 530 bp, Oryza sativa
tgagaaggtaggctccagccatggcttcccagctctccgccgccacatccgtgccgcagttccatggcctccggacctactcctctcctaggtccatggtgacgctgccatcgttgaggatgagcaagaagaggtcccagggcatccggtgcgactacatcggctcagccaccaacgttatcatggtgacgacgacgacgctgatgctgttcgcggggaggttcgggctggcgccgtcggcgaacaggaagtcgacggcggggctgaagctggaggcgcgcgactccggcctgcagaccggcgaccccgccgggttcacgctcgccgacacgctggcctgcggcgccgtcggccacatcatgggcgtcggcgtcgtcctcggcctcaagaacatcggcgtcctggaccagatcatcggctaatcaaattcattaagctagtcacacgaatcaatactcctatgtgtaatcgatgcatgagtgcctgtgtgatggacgatgtaatgatcatgtaaattgtgcgtgggatca

SEQ ID NO: 410413 - DNA, 573 bp, Oryza sativa
ttcgagctcgctccgtgccctggtcgcccccatcctcccctccgtctcctcctcgccctctgctcgcccagggctccgcggagtggcggcaccggtacagcacgcgcgggcgcggcggcggaggggggcggcggtcgtggcgcgggcggcggcgctgccgtcggacgccgagtggctggagcggctgccggagaagaagaagccgctgtacacgcacagcctgccgtgcatcgaggcgtggctgcgcagcatcgggttctcccagacccgcgaggaccgcgccgactgggtcgccgagatgcccctctggcacgcccgcctcagactcgacgtcactgacctccacatcaggtacttgaagagcggccctgggaatcttgacacggacgtagagaggagattcagctatgcccttagcagagaagacatcgagaacgcaatacttggaggaccttaatctcatcaggccatcagaggctcaagaataggagttcttgcaggatcttagaatttgggcagcgcagtaggtgcatgctctttcatgagagactaagaaaagctttgccctgctgc

SEQ ID NO: 410414 - DNA, 529 bp, Oryza sativa
  unsure (1)..(529): unsure at all n locations
tactgttgagatggataaagtaactaaagagctacataagttctctggtgacagtaagaaacttcctgaattactgactgagctagatgggctccgaaaagagcatcagagtctaagatctgcttttgaatatgagaaaaacacaaacatcaagcaagttgagcagatgcggacgatggagatgaatttaatgactatgaccaaagaggctgacaagttgcgtgctgatgtggcaaatgctgaaaaacgagctcaagtggcagcggctcaagcagtagcagcacaggcgggggtggcacatgtgactgcttcacaaccaggggcagcacaagctgtggcagtgccagctgcctcaaacccatattcaagtgcatttaccggtcatccctctgcatatcaccaaggagccacccaagctgnggtttatcagcaagggaccacccaagctggggcatatcagcaaggatctacccaagctggggcatatgcttacccaactatgatgccgtactgttaccagatgcatgct

SEQ ID NO: 410415 - DNA, 541 bp, Oryza sativa
gtgtgtgcaactaggaggcttgttccatactagtttgctaggtcatggaaaagagcgagattttcgtaggagcacactcatatgcagctatatgtgcttttacactcatcataggatggttagctcactgggtatacagatggataaatcctccatgcaatgggaggcttcctccgggctcaatgggcttccctattgttggtgagaccttccaatttttcagaacaagtccatcaatagacatgccaatttactacaagcgaagactggagaggtatggacctatattcaaaactaacataggaggccagcacgtggtcatatcccttgatcccgaggtgaaccagttcatatttcaacaagaggggaagttgttccaatcctggtttccagaaaccacactaaacatctttggaaagaagacactcaccacgtataatagaactgctcacaagttgatccggagcttcgtatgcaagctctatggccctgaaaacgtgaaaaaatcactcctgccagaactagagaactccatgaggga

SEQ ID NO: 410416 - DNA, 560 bp, Oryza sativa
  unsure (1)..(560): unsure at all n locations
ggccggacggcgatgatgggcgtcgtcggcatggtcgccccggagctcctcggcaagctgggcctcgtccccgccgagacggcgatcccgtggttccagaccggcgtgatcccccccgcgggcacctacacctactgggccgacccttacactctcttcgtcttcgagctcgccctcgtcggcttcgccgagcaccgccgcttccaggactggtacacgccgggctccatggggaagcagtacttcctcggcctcgagaagtacctcgccggctccggcgagccggcctaccccggcggcccgctcttcaacccgctcggcttcgggaccaagagcgaggcggagatgaaggagctcaagctcaaggagatcaagaatggcaggctcgccatgctcgcctttctcggcttctccgtccaggcgctcttcaccggggttggccccgtgcagaacctgcttgatcacctcgctgatcccgtncacaacaacatnctcaccagcctcaagtccattagagatgccatcaactacgtatttaattaattacgagttttaattat

SEQ ID NO: 410417 - DNA, 502 bp, Oryza sativa
tagatacaaacccctctcactcccactaccatggatccttgcaagttccggccgtcgagctcgttcgacacgaagacgacgacgacgaacgcgggagctccggtgtggaacgacaacgaggcgctgacagtggggcccagggggccgatcctcctcgaggactaccacctgatcgagaaggtggcgcacttcgcccgggagcgcatcccggagcgcgtggtccacgcccgcggcgcctccgccaagggcttcttcgagtgcacccacgacgtcaccgacatcacctgcgccgacttcctccggtccccgggcgcccagacccccgtcatcgtccgcttctccaccgtcatccacgagcgcggcagcccggagacgatccgcgacccgcgcgggttcgccgtcaagttctacacccgcgagggcaactgggaccttctcggcaacaacttccccgtcttcttcatccgcgacggcatcaagttccccgacgttatccacgcct

SEQ ID NO: 410418 - DNA, 513 bp, Oryza sativa
ctctctctctttcctctcgtctttctcggcggcggcggaggcggaggcggcggcggcggagatggctcaccggctgctgcgagacgcgcaggcggacgggtgggagcggtccgacttccccatcatctgcgagtcctgcctcggcgacaacccctacgtccgcatgttgagagcagaatatgataaagagtgcaaaatatgtgcacgtccgtttactgtcttccgttggcgacctggccgggatgcaagatacaagaagacagagatctgccagacatgttgcaaactgaaaaatgtctgccaggtctgcctgctagatcttgaatatggtctaccggtccaggttagggatacagcactcgctattaattcaaatgatgcaatcccaaggagtgatgtgaaccgtgagtactttgcggaagagcatgatcgcaaggccagggctggaattgattatgattcttcccatgggaaggcacaacccaatgacaccattctgaagcttcagaggac

SEQ ID NO: 410419 - DNA, 404 bp, Oryza sativa
ttctcagctcgtcgacaaggcagtgagcacccaccaagatagcgggatgatccaccgagcgcgtgtaggcggcgtttgattctagattgttctagaaccgatcgagcgagcttagctagctagctagctgcatgctgcttcgatcgatcggtcgttgcctcatgcaggagttccagtccatgccggggctcgccgggcggctgttccgctgcctggcggcggttgacatccagcgcgcgcaggcgcagaacggcccggtgtcgcggtgctgcgggataccgaccccggaggtgttgaactgcccgcggagcgagtcgaccaacaccaagctgtgctactacaacaactacaacctgtcgcaggcgcgccacttctgcaagagctgccgacggtactggaccaag

SEQ ID NO: 410420 - DNA, 230 bp, Oryza sativa
ttcgttagaaaaagaaagaaattaaaaagaaaatcacggcgcgtgagcttgcagagacagcaatggtgagagttgctgccgccgcggcggtgctcgtgctggcggcggcggcggcggcggcggcggccatggccgtcgagccgcccaccgatgacggcgcggtccgggtggcggcggggctgacgaagtgcgtgtccgggtgcggtagcaaggtgacctcctgcttgctc

SEQ ID NO: 410421 - DNA, 376 bp, Oryza sativa
aagccactgagaagcaacactttaaccccaaaagacagattaacgacaatatctgagagaagtcacttgctgtgccaccatggctggacagccgagcagagcatgtaacacacagagcacgagatcactatacaccaaacgggaacgaacgaagacaactcagggtatcatctgactgaagatacacgacgcggaccgttcaatataatattaagtcttcactactcctatatgatgggagaatggcaaaggcaatggcgacgggatcttggcttagttgcagggaagggggtggcccgtccactcaatgaggcagaggaccctgaggtcgatgagcttggcctgggtgatgccgaggaacaccttggtggactcc

SEQ ID NO: 410422 - DNA, 462 bp, Oryza sativa
tttcagaatctaattctctattttgctagtgtcgaccaccaccaccgtagcaatggccgcctacggctcgatcaacaaggaggacccggtcaactggggcgtggtggtggtcgagatggccggcaggcacatccacgaggtgaagctcatggtggaacaactccgcaagccggtgatcaagatccagggcgccaccctccgagtggggcaggtgggcgccgtcatccaggccaaggacgccgtcggcgtagtggccgagctcgaccaggaggtccgcccccgggtgaaggtcagcagcgagtggatcctcaactgcatcatccacggcggggacatgtacggcgtcaccaccggcttgggcgggacctcataccggcgcaccaaggacggccccgccctgcaagtggagctcctcaggcatgtcaacgccggaatcttcggcactggatgcgatggacacac

SEQ ID NO: 410423 - DNA, 531 bp, Oryza sativa
tacctcaccaccatcacctcctcctcctcctcctcttcctccgcgcgcgcgagatccagggagagggagagggagagatcatggcggggacggtgacggtgccgtcggcgtcggtgccgtcgacgccgctgctcaaggacgagctggacatcgtgatcccgacgatccgcaacctggacttcctggagatgtggcggcccttcttccagccctaccacctcatcatcgtgcaggacggcgacccgaccaagaccatccgcgtccccgagggcttcgactacgagctctacaaccgcaacgacatcaaccggatcctcggccccaaggcctcctgcatctccttcaaggactccgcatgccgctgcttcggctacatggtctccaagaagaagtacgtcttcaccatcgacgacgactgcttcgttgccaaggacccatctggcaaggacatcaatgctcttgagcagcacatcaagaaccttctcagcccgtccaccccgttcttcttcaacaccttgtatgatccctacc

SEQ ID NO: 410424 - DNA, 465 bp, Oryza sativa
attcgatagtgacaagaggaaaagcgcggctctctccgtctccggcggcggtgacgcgaggaggaggaggaggaggagcccgcgccgccgggccaagccatcatggacgaggagcagctgcgcgcgctgctccgcgacctggaggcgctcaagcagcgccccgaccccgccgccatcgatcggatgcgagagcgcgtggcgggaatggtgaccccggccgccgctgcacggtccaagatcaaggatatgagctcggaggtggtggacagcaatccctacagcaggctcatggcgctgcagcgtatggggaatcgtggacaactacgagcgcatccgtgattactccatcgccatcgttggtataggtggcgttggtagtgttgctgctgagatgctcactagatgtggcattggtcgccttttgttgtatgactatgatacaagtgaactggccaacatgaatag

SEQ ID NO: 410425 - DNA, 573 bp, Oryza sativa
  unsure (1)..(573): unsure at all n locations
atcctccgcaagtggatctcccgttttgatgtctggccattcctggaaacatacactgaggatgttgcaaacgaaattatgagggaaatgcaagccaaacctgatctcatcattggcaattacagtgatggaaaccttgtcgccactctgctggctcacaaattaggagttacccagtgtaccattgctcatgccttggagaaaaccaaataccccaactcagacatatacttggacaagtttgacagccagtaccacttctcatgccaattcactgctgatcttatcgccatgaatcacactgatttcatcatcaccagtacattccaagaaattgctggaagcaaggacactgtggggcagtatgaatcacacattgcattcacccttcctgggctttaccgagttgtgcatggcatagatgtttttgatcccaagttcaacattgtctctcctggagctgacatgagtgtctacttcccgtacaccgaggctgacaagaggctcactgccttncaccctgaaatngaggagcttctctacagtgaagtcgagaacgatgaacacaagttg

SEQ ID NO: 410426 - DNA, 505 bp, Oryza sativa
tggacctcaccaaccccgtccagaacgtcggcgagggcgccggcgcctccgagtacggcgtgcccttccgccgcctcaccggccactcccacttcgtccaggacgtcgtcctcagctccgacggccagttcgcgctctctggctcctgggacggcgagctccgcctctgggacctctccaccggggtcaccacccgccgcttcgtcggccacgacaaagacgtcctctccgtcgccttctccgtcgacaaccgccagatcgtctccgcctcccgcgaccgcaccatcaagctgtggaacaccctcggcgagtgcaagtacaccatcggcggcgacctcggcggcggcgagggccacaacgggtgggtctcctgcgtccgcttctcccccaacaccttccagccaaccatcgtctctggctcctgggaccgcaccgtcaaggtgtggaacctcacgaactgcaagctgcgctgcaacctcgagggccatggcggctacgtcaacgc

SEQ ID NO: 410427 - DNA, 517 bp, Oryza sativa
tgttttgctctccggcggatccctcatcaagaacatcaggaagctcgcggagccaccgtacctggattcggtggattggagcaagtggcatgtgttctgggtggacgagagggtggtgcccaaggaccatgaggatagcaactacaagctcgccttggatgggtttctctccaaggtcccaattcctactggccaagtttatgctataaatgatgccttgtcagctgagggagcagcggatgactatgaaacttgcttgaagcaacttgtcaagaatggtgtgattgcaatgtcgcaatcgactgggtttcctaggtttgatgtcatgctcctgggaatgggccctgatggccatattgcatctcttttcccaggccaccctcttgttaatgaaaacaagaagtgggtcacctacatcaaggattctccaaagccaccacctgagaagattacgtttacatttcctgtgatcaactcatctgcgtatgtcgcaatggtggtcactggagctgggaaa

SEQ ID NO: 410428 - DNA, 473 bp, Oryza sativa
ttcatcccttcaccacagcgggcgccggcgagcggcgaggctgggccggcgagcggcgaggccgggccggatctcgccgccgcccaccgcttgacctccctccgtggcgctgcctccagccaaatctctaaaagctcgggaagaaattaacaaaagcagcaatggacgtcgatttttggggagtggtaattgagccgtgcaataagaaggagatcttttgtcctgaggataccctgtatcatctaacatcggtagcccttgatgaggcttacgggctaaaagactccaatgtgaaagtatttgtcgaagttaatgatgagaagtttgcgattgggacggtttcctccaaaaggcacacgcatatcaaggttgacttctgtgtcaagaagaacttttaactattccacacctcactaatcagcaaagttgccttttgtggctatcaagtaaagaatttgggaaaattcactgat

SEQ ID NO: 410429 - DNA, 520 bp, Oryza sativa
ttttaagcagcaggcgggggcggcagagcacggcgacctagcccgacctcgcaaccatggcaaggggtttgaagaagcatttgaagaggctcaatgcgcccaagcattgcatgctcgacaagcttggtggagcttttgtccccaagccatcttctggtcctcacaggttcagggagtgcctgcctctgatcctcattatcaggaacaggctcaagtatgctctgacataccgagaggttatttctatcctcatgcagcgccatgtattggttgatggcaaggtcaggactgacacgacctacccagatggttcagtggatgtcatttgcatccacaagactggtgagaactacaggcttctgtacgacacgcagggacgtattcggctcagtctgtaaggatgaggatgctaagttcaagctttgcaaggttcggactgtgcagttaagctcagagggaattccctacctgaacacctatgatggtcggaccatcacgttaccctgacccgatcatcaag

SEQ ID NO: 410430 - DNA, 569 bp, Oryza sativa
gctcgccgccgtcgaaacccaaaatcttctcttcccgtacgtgagaagcgccaggtcgtcgtcgccgccatgggcgtggaggtgtgcgtcaaggccgccgtcggccacccggacacgctcggcgactgtccattctcgcagagggtgctgctgactctggaggagaagaaggtgccctacgagatgaagctcatcgacgtccagaacaagcccgactggtttctgaagatcagcccagaggggaaggtgcctgtgtttaacggtggtgatggcaaatggattcctgattctgatgtgatcactcaagtcattgaggagaagtacccaaccccgtctcttgtcacccctcctgagtatgcatcagtgggatcaaaaattttctcatgcttcacaacgttcttgaagagcaaggatccaaatgatggttcagagaaggcacttcttactgaactgcaggcactcgaggagcatctgaaagctcatggcccctttatcaacgggcagaacatttcagctgctgaccttagccttgcaccaaagctctaccatttctcagttgcttctgagca

SEQ ID NO: 410431 - DNA, 219 bp, Oryza sativa
aaagaaattaaaaagaaaatcacggcgcgtgagcttgcagagacagcaatggtgagagttgctgccgccgcggcggtgctcgtgctggcggcggcggcggcggcggcggcggccatggccgccgagccgcccaccgatgacggcgcggtccgggtggcggcggggctgacgaagtgcgtgtccgggtgcggtagcaaggtgacctcctgcttgctcggc

SEQ ID NO: 410432 - DNA, 522 bp, Oryza sativa
  unsure (1)..(522): unsure at all n locations
gaatcaaccagcaaactaaaaaagcgaagggaaaaaaggagagaaaaaaaaaaaccaactccctcctccccgttctccagatccgcaccgccaccgccgccgccgcgcgatcctccgccgcgcctaccggtcggggattggtggaggaggcgcgccgggtgggctgtggagtagggggagggaggaggaggannggtgtgaagcgggcgacgagatggntgngccgncggagagggctcgggcggactacgactacctcatcaagctcctcctcatcggggacagcggtgttggcaagagttgccttctcctgcggctttctgatggttccttcactacaagctttattaccacaattggtattgacttcaaaattagaacaatagagctggacgggaagcgtattaagctacaaatttgggacacagtatgccaaggacgtttgcggacaattaccactgcgttctaccgtggagccatggtttttctgcttgttatgatgtcaccgacgagtcaattttt

SEQ ID NO: 410433 - DNA, 524 bp, Oryza sativa
  unsure (1)..(524): unsure at all n locations
tgcgcacctccacagcattagccatcaacgaccagcatctcagctttgctcgccttctcgaagcttctgctgccatggcggaccagctctccgaagagcagattggagagttcagggaggccttcagcctcttcgacaaggacggcgacggttctatcaccaccaaggagctaggaaccgtgatgcgaagtctagggcagaacccaacggaggcggagctgcaggacatgatcagcgaggtggacacggacagcaacggcaacatcgaattcaaggagttcctgggcctgatggcgcgcaagctgagggacaaggactccgaggaggagctgaaggaggcattccgcgtcttcgacaaggaccagaacggtttcatctctgccaccgagctccgccacgtgatggccaacatcggngagcggctcaccgacgaggaggtcggcgagatgatcagcgaggccgacgtcgacggcgacgggcagatcaactacgaggagttcgcaggtgcatgatggccaagaaga

SEQ ID NO: 410434 - DNA, 559 bp, Oryza sativa
tgccttgccgccgccgccgccgccgccaccgccaagagggggggaagcaacccgcagccgccgcgcggcgagatgaacaccgacatcaccgcgtcggtgaagccggagtacccggtggtggaccggaacccgcccttcaccaaggtcgtcggcaacttctccgcgctcgactacctccgcctctccaccatctccgccgtctccgtcaccgtcggctacctctccgggatcaagccggggatccgcgggccatcgatggtgacgggagggctcatcggggtcatgggagggttcatgtacgcctaccagaactccgccggccgcctcatgggcttcttccccaacgactccgaggtcgcccgctacaagtacaagctgtagtgagaaactttatcgattcgctgcggtctctctctctctctctctgctgctggaagcgtttacatcttttttttctttttcctgatgatctcgttttagcgtcacttggtgatgtgcgagatgtgtggccttggctgaataaatgttgtccgttgcacgcttgtgaggaatcgtgctc

SEQ ID NO: 410435 - DNA, 517 bp, Oryza sativa
  unsure (1)..(517): unsure at all n locations
cgcaaatgacgccacgagattgcttgggaattacttcggccctccttgcatatcggtgactcctctccaagtgctgcaaggctatgtgaaggacaccaggttcctagctgggtgcaactcggctgcctgcaatgtgtcatcaattggtgaagcggcgcaattggcaagttcagtggactacgttgtgctgttcatgggattagaccaagatcaggagagggnagaggttgataggctggaactgtcgctcccaggaatgcaggagaacctcatcaacacggtcgctaacgcggcaaagaagccgngtgatcttggtgctactgttggggtggtccaagtggatgtgacctttgctaagtataatcccaagattggggccatcctgtgggctggttaccctggcgaggctggagggattgcgattgctcaggtcctctttggagagcacaaccctggtggaaggctgccagtgacctggtatccaaaggagttcacgagcgtgcccatgacagatatg

SEQ ID NO: 410436 - DNA, 525 bp, Oryza sativa
tgacgggccgttcggcgccacgggcgtcaagcggctgcaggacatcggcatgatcgacgccgtgcccggcatgcgcgccctcgacatgaacaccgccgaggacgagatcgtccgcctcacccgcgaggtcgttcccggcatgatcgtcaccggcatggaggtcgccgagatcgacggcgccccgagaatgggcccgacgttcggagccatgatgatctccggtcagaaggcggcgcacctggcgctgaaggcgctcggccggccgaacgccatcgacggcacgatcaagaaggcggcggcggcggcggcgcacccggagctgatcctggcgtcgaaggacgacggcgagatcgtggacgcctgagcgaatagaacagggtaaaaaaaaattcgcaagacgtggtggtgacacggaggcgttggggacgagaagaagatgtggactttcccctgtgtttttttttcgggattcgctttgatccccttgtttgtttagctttggatggctactagcgtcttgttcat

SEQ ID NO: 410437 - DNA, 548 bp, Oryza sativa
  unsure (1)..(548): unsure at all n locations
atcgcttcccccctccacccgtctcctccgtctccggcgccggcgccggcgagctcgccccccgcgattcgtgccctccgatcagaggcgaggcgggagaagagatggggctcacgttcaccaagctgttcagccggctcttcgccaagaaggagatgcggatcctgatggtgggtcttgacgcggccggaaagaccacaatcctctacaagctcaagctcggcgagatcgtcaccaccatccccaccatcggattcaatgttgaaaccgtggagtacaagaacatcagcttcaccgtctgggatgtggggggtcaggacaagatcaggcctctgtggaggcattatttccagaacacccagggtctcatctttgttgtggacagcaatgatagggaccgtgttgtcgaagccagggatgagctccacaggatgctgaacgaggatgagctacgtgatgctgngctgcttgtctttgctaacaagcaagatctgccaaacgctatgaatgctgctgagatcactgataagcttggactgcactccctt

SEQ ID NO: 410438 - DNA, 548 bp, Oryza sativa
  unsure (1)..(548): unsure at all n locations
gcgacagcttcgcctcgtctctcccccccgagtccccaacccctcctcctcctcctcttccccttccccgcgccgcggcgagatcgctccccccgggggcagcagctagatcccgatggcttcgcgccgccgcaccctcctcaaggtcatcatcctcggcgacagcggggttgggaagacgtccctgatgaaccagtatccttcgattcggataggggatggcggatgatatagcccgcgtcgtttcacgaacacgggcgggttttttttttcttcttcgatttatttgggggnttttgttttcttgagctgtgatttaattcagatatgtgaacaagaagttcagcaaccagtacaaggctacgattggcgcggatttcctcaccaaggaggttcagttcgaggataggctcttcactttgcaaatatgggatactgctggccaggaaaggtttcagagtcttggtgttgcattctaccgtggagcagattgctgtgttctagtttatgatgtcaattctatgaagtcatttgataatcttaacaac

SEQ ID NO: 410439 - DNA, 430 bp, Oryza sativa
aaaagtcaatccacgccaccatcgatctctctatccaatccaagcgcgcaaatcaatggcagagcatttcagccacgccggcatgtacatcggctacacggcagacgccgccgcgtcctcctcctcctcctcctcgtcttcgtcgtcttcctcctcggagatgcttcggttcgacacgggctggcccgacgagacacctgcgccatcctccgtggcggggaggaggaggagcgcgggcggtgatcatcgtcaaggtcggggacagacggaggcggcggcggcgttcatcggggtgcggaggcggccgtggggcaggttcgcggcggagatccgggactcgacgcggaacggcgcgcgggtgtggatcggcacgttcgacagcgccgaggccgccgcgatggcctacgaccaggccgcgctctcgcgcgtg

SEQ ID NO: 410440 - DNA, 520 bp, Oryza sativa
  unsure (1)..(520): unsure at all n locations
ttggaattcaaagctgttctctttgttcccaagagggcaccattcgacctctttgatacgaggaagaagctcaacaacatcaagctctacgtccgccgagtcttcatcatggacaactgtgaggagctgatccctgagtggctgagctttgtcaagggcattgttgactccgaggatcttcccctcaacatctcccgtgagatgctgcagcagaacaagattctcaaggtcatcaggaagaaccttgtcaagaagtgcgttgagctcttcttcgagattgctgagaacaaggaagactacaacaagttctatgaagccttctccaagaacctcaagctcggtatccacgaggactccaccaacagaaacaagattgccgagctcctgaggtaccactccaccaagagcggcgatgagctgaccagcctcaaggattacgtgacgaggatgaaggaaggccagaacgacatatactacatcnaccgcgagagcaagaaaggccgggagaactccccctttt

SEQ ID NO: 410441 - DNA, 460 bp, Oryza sativa
gccggcgtggtgtccgtcgtgtttttggaccagttcgagcgcatgctgccccaccgcgacgacgcggcgtgccccgcccgcgggttctacgcctaccgcgccttcgtcgccgcggccggcgcgttcccggccttcgccgccacgggcgacgccgacacccgcaagcgtgaggtcgccgcgttcctggcccagacttcccacgcgacctctggtgggccctactcgtggggctactgctacaaggaggtgaagggcgcgacgtcagacttctgcgtgccgaacgcgcgctggccgtgcgcgcccggcaaggcgtaccacgcccgcggacccatgcaaatcgcatacaactacaactatggggcggccggcgaggcgatcggcgcggacctgctgggcaacccggagctggtggcaacggacccgacggtggcgttcaagacggcgctgtggctgtggatga

SEQ ID NO: 410442 - DNA, 459 bp, Oryza sativa
ttagttgatcagtactactttattcatgccatgaccatgcatacatatgggctttcacagatccatgaagaatttcctcgcccgaaaccgaaacatacatatatagcaaactcactcactctggctgcagagcgaccgtgcgaagtgcgtactcacacgcaattttattagatcgatcggggccggcacggcggcgcacacgtctacttcgccgcagacgccgacatgatgccgccgtcgaacggcgcctggccgaagcagtccaggttgggcccgtagccgacgccgagcacgtcgcagtagcgcttgtagaacgcgacccggtcggcgccgtcgttgtcgccggcgcactggagcccgccggtgaggatgttcgtggtgagcccgtatcctggcgcgcggacggccgcgctgtactggggagtcggagttcactgccccgtgacgacagcgtgcggc

SEQ ID NO: 410443 - DNA, 569 bp, Oryza sativa
ttcactcgatcgcagcgagacccaccctcaagctccaagctccaagaaccatggccgccacctcgctgtcgccgccgaccgtggccgggctgcggctggcgccgtcgccgcgcgtgcggtcgccgtctgtggcgttcagggcggcgccggcgaggaggaggtcggtggcggcgagggcggagctgagcccgtcgctggtgatcagcctgagcaccggcgtctccctgttcctggggcggttcgtgttcttcaacttccagcgggagaacgtggcgaagcaggtgccggagcagaacggcaagacgcacttcgacgccggcgacgagcgcgccaaggagttcgccggcctgctccggtccaacgaccccgtcggcttcaacctcgtcgacgtcctcgcctggggctccctcggccacatcgtcgcctactacatccttgccacctgcagcaacggatacaacccaaacttcttctgatcattctcatcctggatggatgcaatgtaatctgaatggatctctggtggttctacgtgaatatgaatgagatgggtaaaaaagaaaagaaaa

SEQ ID NO: 410444 - DNA, 518 bp, Oryza sativa
  unsure (1)..(518): unsure at all n locations
atcccctgagtctacagaggaagaagagacagaagagagtgaagagaagaagcccaagacaaagacagtaaaggaaaccactactgagtgggagcttctgaatgatgtgaaggctatatggcttcgtagccctaaggaggttactgaagaagaatacacaaagttttaccactcacttgctaaggactttggtgatgacaagcccttgtcttggagccacttcactgctgagggagatgttgagttcaaagctttgctctttgttcctcccaaggctccacatgatctctatgagagttactacaactctaacaagtcaaaccttaagttgtatgttagaaggggttttcatctctgatgaatttgatgagcttcttccgaagtatctcagctttttgaagggtctcgtcgactcggacacattgcctctcaatgtatcacgagaaatgctccacaacatagcagcctggagaccatcaagagaaactaatncgcaaagttttgacatgattagaaac

SEQ ID NO: 410445 - DNA, 498 bp, Oryza sativa
  unsure (1)..(498): unsure at all n locations
ttagtctcaagtgttcaattagctagctctcttttgcttagccatgagtgcagcaatggctgcctttgccttcctactagtcatcgccatcgtcttccccctcgcatccgcattcccttcccctcctgtttcatggggccaacagcagctagaccctcacttctacgaccactcgtgcccacaagcacagcaaatcgtggcatctatcgtcgggaaagcgcattaccaggacccccgcatggccgcatccctcctccgtctccacttccacgactgctttgtcaagggctgcgacgcgtcgatcctactagacagcagtgcgacgatcatgagcgagaagcggtcgaaccctaaccgggactctgcgagggggttcgaggtgatcgacgaaatcaaggcggcgttggaggccgcttgccacacaccgtctcttgcgctgacatccttgccctcgccgngcgtgactncaccgtcatgacgggaggcccccggtggata

SEQ ID NO: 410446 - DNA, 572 bp, Oryza sativa
  unsure (1)..(572): unsure at all n locations
cggacgcgtgggatgtcttgctgcggcggcaactgcggctgcggcagcggctgccagtgcggcggcggctgcggcggatgcaagatgttccctgatgtggaggccacagccaccaccaagaccttcgtcctcgctgctccatccaacaaggcgagctctggaggaatggagatggcggtggagagcggcgagaacggcggctgcggctgcaacacctgcaagtgtggcaccagctgcagcggctgctcctgctgctcctgcaactgaatctatcgtcgtcgtcgcccggctgcatgaggatttatcgtatggatgctgctactgtcgatcagagttttgatcgaggccttaatttgcttgcattagtacccagcttatatgtaggcaggccttgccttttgctctgacgcctaaataaaaccgtcgtcgtcgttgtcagtgtgtgcgtgtgtcgatcaatgttggatggatccctagctagcttggatggatcatctatcatcatggtgatctcatcatgtactnctgctncatctnctcatgcgtgccaggctttttaatataatctacct

SEQ ID NO: 410447 - DNA, 557 bp, Oryza sativa
tatgttatgtcaaaaaatgtctccatctacaaatcccaagcttctgctcttgaggctcatgcagcccctaactgcaaggttctggtagttgccaatccagcaaacaccaacgctctcatcttaaaagaattcgctccatccatccctgagaagaacattacttgcctcacccgtcttgaccacaacagggcacttggccagatctctgaaaaacttaatgtccaagttactgatgtgaagaatgcgatcatctggggcaaccactcatccacccagtaccctgatgttaaccacgccactgtgaagactcccagtggagagaagcctgtcagggaactcgttgctgatgatgagtggttaaatacggaattcatctctaccgtccagcagcgtggtgccgccatcatcaaggcgaggaagcaatccagtgccctatctgctgccagctctgcatgcgatcacattcgtgactgggttcttggcactcctgagggaacatttgtctccatggtgtgtactctgatggttcgtatgtgtgcctgctggctgatctactc

SEQ ID NO: 410448 - DNA, 257 bp, Oryza sativa
tttggttggcaaattgaatgctcatacagcgggttgttattgcattggaatggatccccttgataggtattttgctgttggaagtgcagattcacttgtcagtctttgggatgtcaaagagctcctttgcattaaaacctttaccaaactcgagtggcctgtaagaacagttagcttcaatcatactggagagtttcttgcatatgctagcgaagatcccttcattgacattgccaatgttaaaactggacgatcga

SEQ ID NO: 410449 - DNA, 525 bp, Oryza sativa
ttacttgttacgcctgttggtgttcgagtggtaggagcccttgggcttttccaggttcagatcgacgcctccttcctctggacattgttgctagttggtgatggctgagcaggctaatcaaccgactgtccttcagaagttcggtggccagttccaccttggctccagcttttctgaaggtgtacgggctcgcaacatctgcccatctgtctcatcctatgacaggcgctttaccacaaggagctacatgacccagggccttgtcaatggtggcatcaacgtcccaatgatgtcgtcctctccaatttttgctaatgctccagctgagaaaggtggcaaaaacttcatgattgatttcctcatgggtggagtgtcagccgcagtttcaaagactgctgctgctccgattgagcgtgtgaagctgcttatccagaaccaggatgaaatgatcaaggctgtgaggctttcagagccatacaagggtattggggcctgctttggacgcactatcaaggatgaggtttt

SEQ ID NO: 410450 - DNA, 499 bp, Oryza sativa
tggagagtatgttggtcttactggtgtaaggttggatgctgctgaaatgcttgcttgtggcctagcaactcattttgtaccttcagataggctgtctttgctagaagaatcacttaaaaaggttgatacatctgatccatttgctatatgtggaattatcgatcaatattcgcaacaaccatctctgaaagaaaaaagcgctctgaataggctagaaatcatcaacaaatgcttttccaaaaaaacagtagaagaaatcatagcctctcttgaacaagaggctccaaatgttgctgatgaatgggattgcttctgcaatccagtccatgaggaaggcttcttctactagtatgaaaatattcttgagatcgataagagaagggcgaacacaaactgttggtgaatgcttaccgtcagaatataaaagggtttgccatgtgatgcgtggtgacttcagtagagacttctttaaggaatgcagggtatattgttggtagag

SEQ ID NO: 410451 - DNA, 494 bp, Oryza sativa
ttgacgcgtgggcggacgcgtgggaacgaataaggagaaggataatgtactatcacaatgaagctttcaagaaggttgatgtcatagcaactcctacaactggcatcactgctccagaaataccacaaagttctctgaagttaggagagtccaattacgttgtgtcagcttacctgatgcgattcgtgatagctggcaatcttcttggtttgcccgcgataactgtacctgttggtcatgataagcaagggcttcctataggcttgcaactgataggtcgaccatggggcgaggctagcttattaagggtggcttctgcaatcgaggagctctgtctgaagaagcggaaacggccatctgcatttcatgacatcctgaacgcttgagttgacaaattatgtatccatccatcaatgatgtatggcacttggtgctacgcttttattcagaacatttgtacagtgcagatgattcagtctttcctgggggtggat

SEQ ID NO: 410452 - DNA, 574 bp, Oryza sativa
ttaaactcagctgcaaggagaaggagaaggtaggctccagccatggcttcccagctctccgccgccacatccgtgccgcagttccatggcctccggacctactcctctcctaggtccatggtgacgctgccatcgttgaggatgagcaagaagaggtcccagggcatccggtgcgactacatcggctcagccaccaacgttatcatggtgacgacgacgacgctgatgctgttcgcggggaggttcgggctggcgccgtcggcgaacaggaagtcgacggcggggctgaagctggaggcgcgcgactccggcctgcagaccggcgaccccgccgggttcacgctcgccgacacgctggcctgcggcgccgtcggccacatcatgggcgtcggcgtcgtcctcggcctcaagaacatcggcgtcctggaccagatcatcggctaatcaaattcattaagctagtcacacgaatcaatactcctatgtgtaatcgatgcatgagtgcctgtgtgatggacgatgtattgatccatgaaattgtgccgcggatcagtgcttatttagcttaattttg

SEQ ID NO: 410453 - DNA, 463 bp, Oryza sativa
ttcggattacaaatttctgaaccctggcttcgtgaataccaggtccttccatcacgaactcatccacacatgcaaatgaatgcatttggtggttatattttgagtggcattaggatacacaatggcgatgcatgtaatggaagcaagtgaatgaccaagcccgtcaatgcgtgcttctatccttggaattaaaatatggtcaccattttacacggtaacctgaaacaatagacacaattttgtagtccagagaagccaacttttatgctgaagcgacttatgtgattagtagaaattggtgcgcatatagagaataactagtgcgagttctagaagaaaatgaaatgagcatgtacaccaaatccatgtagcttacataacaatgttgtgtttgtttatcaaccaaattgaaacgcttgtggactttgagatatttgttaaggtgtgctacttactatttgtt

SEQ ID NO: 410454 - DNA, 450 bp, Oryza sativa
  unsure (1)..(450): unsure at all n locations
tgcagaaacaaacccctctcactcccactaccatggatccttgcaagttccggccgtcgagctcgttcgacacgaagacgacgacgacgaacgcgggagctccggtgtggaacgacaacgaggcgctgacagtggggcccagggggccgatcctcctcgaggactaccacctgatcgagaaggtggcgcacttcgcccgggagcgcatcccggagcgcgtggtccacgcccgcggcgcctccgccaagggcttcttcgagtgcacccacgacgtcaccgacatcacctgcgccgacttcctccggtccccgggcgcccagacccccgtcatcgtccgcttctccaccgtcatccacgagcgcggcagcccggagacgatccgcgacccgcgcgggttcgccgtcaagttctacacccgcgagggcaactgggacctnctcggcaacaact

SEQ ID NO: 410455 - DNA, 289 bp, Oryza sativa
cacctcgttcccggaggtgttcaacaacagcggcatcctcctcggctacgtctccaacttcgccttcgcgcgcctccccgtccacctgagctggcgcgccatgttcctcgtcggcgccgtgccgcccatcttcctcggcatcgccgtcctcgccatgccggagtcgccccggtggctcgtcatgcggggccgcatcgaggacgcgcgccgcgtgctcctcaagacctccgactcgcccgacgaggccgaggaccggctcctcgacatcaagaaagccgtcggcatccca

SEQ ID NO: 410456 - DNA, 348 bp, Oryza sativa
tcttgaagaccaaggatgaaaagaaggcgaagaaggctgaggtaaccaagtcccagaagtcgcagtcgaagggtgccgccccgaggggttccaagggcccgaagattggtggtggtggtggaaagcgctgaagatttcttgatccccaggaaagggtcgcctggttctcgccggctgtctaaatcgtatctcatcaaaagctaccctgtagaacctctgttaaattagcactactgccaaaatgttttaacatcgccactggagataatgtcatgaagtttgaaatgctatgtgggaaaaatgtttttctttggttgtgttactattacgagatttgacttggcttaa

SEQ ID NO: 410457 - DNA, 472 bp, Oryza sativa
gtcgttttcgtactcgcctctctccgcgccctcctccgccgccgctcgccgccgttcgtctccgccgccaccgccgccgccatgagggagtgcatctcgatccacatcgggcaggccggtatccaggtcgggaacgcgtgctgggagctctattgcctcgagcatggcatccagcctgatggacagatgcccggtgacaagaccgttgggggaggtgatgatgcttttaacaccttcttcagtgagactggtgctgggaagcatgtcccccgtgctgtcttcgtcgatcttgagcctaccgtgattgatgaggtgaggactggtgactaccgccagctcttccaccctgagcagctcatcagtggcaaggaggatgcagccaacaactttgcccgtggtcactacaccattggcaaggagattgttgatctgtgccttgaccgcatcaggaagcttgccgacaactgcactg

SEQ ID NO: 410458 - DNA, 315 bp, Oryza sativa
  unsure (1)..(315): unsure at all n locations
ttcgtttggagacggcgtcgacgccgcgcgggtgggtgttcccgaacaacgggaaggcgctgcggatcggggtgccgtaccggacgacgtacaagcagttcgtgtccaaggacgcgggggggccggacggcgcgagcgggtactgcatcgacgtgttcaaggcggcggtggcgctgctggcgtacccggtgccggtgtcgtacgtggtggtgggggcggngtttgaagaacccgagctacggggagctggtgcagcgggtggcggagggggtgctggactcggaggagggggacatatcgatcgtgaccaacaag

SEQ ID NO: 410459 - DNA, 552 bp, Oryza sativa
ttaatctcccccaaattcgcgattctctcatctaatcctcctcctcctcccccgaaatcagcacaccgaggcttcctcgccggcggcgatggcgggggcggcggtggagcaggcgcacgagctctaccggggagggcgacaccgggacgcgctcgagctgtacacggcggcgctggcggcggcgcggggacccgcgcagcgcatcgcgctgcacagcaaccgcgccgcgtgctacctcaagctccacgacttccacaaggctgcagaagagtgcacatctgtccttgagttggatagggagcatgctggagctctcatgttacgtgcacagacacttgacactctgaaggattaccagtcagctctatttgatgtgaacaggctgattgagataagtcccgcatctgacgtatatcggaaccttcatgcacgactgaagacacaagattgcactaactcccattccagaatctgaagaggaatcgttatatttgaagagatagcaagagttgccttcagagagaatgtaatatcgagatttgtttaccaagt

SEQ ID NO: 410460 - DNA, 485 bp, Oryza sativa
tccacatcttattgtcacttccatctcattctcctaattgtcatcactagcttctagctagcttaattaattaattagccatggcggaggagaagcaccaccaccacctgttccaccacaagaaggacgacgagccggccaccggagtagactcctacggcgagggcgtctacacgtcggagacggtgaccaccgaggtggtcgccggcggccaggacgagtacgagaggtacaagaaggaggagaagcagcacaagcacaagcagcacctcgccgaggccggcgccctcgccgccggcgccttcgccctgtatgagaagcacgaggcgaagaaggacccggagaacgcgcacaggcacaagatcacggagggagatcgcggccacggcggcggtcggcgccggcggctacgccttccacgagcaccacgagaagaagaaggaccacaagagcgccgaggagtccaccggcgagaagaagcacca

SEQ ID NO: 410461 - DNA, 458 bp, Oryza sativa
tcagaaacaaacccctctcactcccactaccatggatccttgcaagttccggccgtcgagctcgttcgacacgaagacgacgacgacgaacgcgggagctccggtgtggaacgacaacgaggcgctgacagtggggcccagggggccgatcctcctcgaggactaccacctgatcgagaaggtggcgcacttcgcccgggagcgcatcccggagcgcgtggtccacgcccgcggcgcctccgccaagggcttcttcgagtgcacccacgacgtcaccgacatcacctgcgccgacttcctccggtccccgggcgcccagacccccgtcatcgtccgcttctccaccgtcatccacgagcgcggcagcccggagacgatccgcgacccgcgcgggttcgccgtcaagttctacacccgcgagggcaactgggacctcctcggcaacaacttccccgttt

SEQ ID NO: 410462 - DNA, 484 bp, Oryza sativa
taaagttatcgatggatgaggccactttccgtgagattcaggagaagaaattggagatttataatgcgatagttaaactgcagaaaggggatggaaatgatgaaaagcttcaggagcgagctaaccagatacaatctgatcttgaggagcttgttaaatctttgaatgaacagtgcaagagatatgggttgagagctaagccaactactcttgtggagcttccttttggttggcaacctggaatacaagagacagcagctgtatgggatgaagaatgggacaaatttggtgatgatggcttctccacaataaaggaactcacagttgaaatggagccacctgttgtacaaaaggatcagcctaccgttgaagacagtaaagtgtctaccaatgggccatcagcacctacatcaacagagaaagaagatagcaggggtgataaatctgccgctgcctctgagcaaactgtagaacctgatgcaac

SEQ ID NO: 410463 - DNA, 501 bp, Oryza sativa
  unsure (1)..(501): unsure at all n locations
tcggcgctcactgccctccgcgacgaggtcagcgccggcacgcgcacgggcccctgggcgctcgtcgacgacctgctgcagtacaacagctggttatacattcccccggcatcgcccttagctcgggagatcatcgaggctacacatgaggacgggcacgagggtgtcaagcgcaccatgcaccgcctccggcgcgagttccacatccccaacatgaagcagctcgtccaggactgggtacgctcctgcgcagtgtgccaacgctacaagtccgagcacttgagcccggccggcctcctgctgcccctgccggtgccccagggcgtttggaccgacatcgctctagatttcatcgaggcgctaccacgagtgcgcggcaagtccgtcatcctgacggtggtggacaggttcagcaaatactgccacttcatcccactggcgcacccgtactccgccgagtccgtcgctcaagccttcttcgccgagatcgntcatctacat

SEQ ID NO: 410464 - DNA, 424 bp, Oryza sativa
taaagattatggcttcagctgctcctatggttaagcctgtttcactggaacttggtggaaaaagtcctatagtggtgtttgatgatgttgatgttgaaaaagctgttgagtggactctctttggttgcttttggaccaatggccagatttgcagtgcaacatcgcgtcttattcttcataaaaaaatcgctaaagaatttcaagaaaggatggttgcatgggccaaaaatattaaggtgtcagatccacttgaagagggttgcaggcttgggccgttgttagtgaaggacagtatgagaagattaagcaatttgcatctaccgccaaaagccaaggtgctaccattctgactggtggtgttagacccaagcttctggagaaaggtttttatattgaacccacaatcattactgatgtccataca

SEQ ID NO: 410465 - DNA, 85 bp, Oryza sativa
gcccatctgtgtttttgatcgcaagaagaaagctcgtcgggtttgatttgatcaaatgaatgaatgaatgaatcttagtgtgctc

SEQ ID NO: 410466 - DNA, 526 bp, Oryza sativa
  unsure (1)..(526): unsure at all n locations
caaaatctacttctcgtgggtagaagagagagagagggaggcgatttaaaccaagaagagggccgggatcgtggtggtgttcgacttcgacaagacgatcatcgacgtcgacagcgacaactgggtcgtggacgggctcggcgcgacggaggagttcgagcggctgctgcccaccatgccgtggaacaccctcatggacaccatgatgggcgagctccacgcgagcggcaagtcgctcgccgacgtcgcgggcgtgctcaggtcggcgccgctcgacccgcgcgtcgtcgccgccatcaaggcctgctacggcctgggctgcgacctccggatcctcagcgacgccaaccgcttcttcatcgacaccatcctcgaccaccacggcctcacgggttacttctccgagatcaacaccaacccgagcgccgtcgacgccgncaccggccgtcttccgatcgcgccgtaccacgacttccacgccggcccgcacgggtgccgcctcgggatctgcccgccaacatgtgca

SEQ ID NO: 410467 - DNA, 444 bp, Oryza sativa
gcgaggctacatcggcggcgagaggcgggctagggtgtggagcaccgacaccgcgcgccatggccgaggccaaccagtaccagatcctggtgcggctcctcgacggccgcacacgctgcctccgcttctcgacgacgaccgtatccggcgcggcgctcctcgacgccgtctcggcgctctcccgcgtgcccgccgcgtgcctccgcctcgtcaccggccgcctcgacgtctcgccgtcctccgtcctcgcctcctccgccgacggccgattcccctccgcatccgcgctccttcgccttcgcggaggcaagggcgggtttggctcgctcctccgtggcgccgcctccaaggccggccagaagaagaccagcaacttcgacgcctgccgcgatatcaacggccgccgcctgcgccacgttaacgccgagcgcccgctctaggagt

SEQ ID NO: 410468 - DNA, 499 bp, Oryza sativa
cctttccgtcgaaccctctcagtctccactcggtgaatcctcccacctcgggtggagggaatggcaagcggtagtgaagctgagaagtcacctgaggttgtgctggagtggcctaagaaggacaagaagaggcttctacatgctgtttaccgtgttggagatttggatcgcaccattaaatgttacacagaatgctttggaatgaaattactgaggaaaagagatgtgcctgaagagaaatatacgaatgcatttcttgggtttggacctgaggacaccaactttgcacttgaattgacatacaattatggtgttgataagtacgacattggagcaggatttgggcatttcgctattgcaactgaggacgtgtacaaattggctgagaaaattaaatccagttgttgctgcaagatcactcgtgaacctggtcctgtcaagggaggatccactgtgattgcctttgcacaggatcctgacggttacatgtttgagctta

SEQ ID NO: 410469 - DNA, 535 bp, Oryza sativa
accggtaccagtttgtgggaaccataggctttttgggtgtagtctctcttcaactattactgcaagaattgtatctcttgcatgtctaactagcctgcacaacgcaaggcatatacacgggtgattcacacgaacaaatcaaaatgaacaagtgcaaaaaaaaaaaaaaatcctcgtggatcatcagaccacgccttgctggtctcgcacgacggcgtagttgatgacgcgggcaacggtgcccatcgatggccggaacgtagggtcgtactgcaggcactgcaccgcgattctccccagcttgagagctccggtaggaggatacttgtcgccaagattggggtcgatgcagtcctggaccctgtcttcagtcaaaattggagttgcccagttaaccaggcttctctgaccctgcggcaacgttcgggccagcggctttctccccgtcaagagctccagcagaacaatcccaaaactgtagacgtcgctcttatcgttcatctgaccagtcattgcatacctggaacatccccaa

SEQ ID NO: 410470 - DNA, 478 bp, Oryza sativa
cgctcatcgccatctctctctcagctctcacaggtgactgcatcaatggccgcgggcaccatggcgctctcctccccggtgatggcccgcgcggcgccgtcgacctcctccgcgctcttcggcgaggcgcggatcaccatgcgcaagaccgccgcgaagcccaagccggcggcgtcgtcggggagcccgtggtacggcgccgaccgcgtcctctacctcggcccgctctccggcgagccgccgagctacctcaccggcgagttcccgggcgactacgggtgggacaccgcggggctctccgccgacccggagacgttcgccaagaaccgggagctggaggtgatccactcccggtgggcgatgctgggcgcgctcggctgcgtcttcccggagctcctcgcccggaacggcgtcaagttcggcgaggccgtgtggttcaaggcgggctcgcagatcttcagcgagggcgggctcgact

SEQ ID NO: 410471 - DNA, 453 bp, Oryza sativa
agctattcttgagctcaatcagcaacaacatcgatggccttcttgcttagttaagtccttcgccctcccaagaagaagaagatgtcttgctgcggcggcaactgcggctgcggcagcggctgccagtgcggcggcggctgcggcggatgcaagatgttccctgatgtggaggccacagccaccaccaagaccttcgtactcgctgctccatccaacacggcgagctctggaggaatggagatggcggtggagagcggcgagaacggcggctgcggctgcaacacctgcaagtgtggcaccagctgcagcggctgctcctgctgctcctgcaactgaatctatcgtcgtcgtcgcccggctgcatgaggatttatcgtatggatgctgctactgtcgatcagagctttgatcgaggccttaatttgcttgcattagtacccagcttatatgtag

SEQ ID NO: 410472 - DNA, 420 bp, Oryza sativa
cgctcatttccatctctgtctcaggtctcacagctgactgcatcaatggccgcggccaccatggctctctcctccccggtgatggcccgcgcggcgccggcgacctcctccgcgctcttcggcgaggcgcggatcaccatgcgcaagaccgccgcgaagcccaagccggcggcgtcgtccgggagcccgtggtacggcgccgaccgcgtcctctacctcggcccgctctccggcgagccggcgagctacctcaccggcgagttcccgggcgactacgggtgggacaccgaggggctctgcagcgacccggagacgttcggcaagaaccgggagctggaggggatccactcccggtgggccatgctgggcgcgctcggcttgcgtctgccggagcttctcgaccggaacggcggtaagttc

SEQ ID NO: 410473 - DNA, 399 bp, Oryza sativa
tctatttttcaagaaacaaggaagattacaccaacagatagaactagctagccaatgggttcgttgtcctctttccggcttgccgtggcggtggcagcactgttggttgttggctcatgtgccactgagctcaccttcaaggtcgctgagggctctagcgccagtagtctagagcttgtcaccaacgtcgccatctgtgaggtggagatcaaggagaagggtggcaaggactgggtggcgctcaaggagtcatcatctaacacctggacgatcaaaagtgaggcgccgctcaagggcctcttctatgcccggttccttgggaagaatggcgggtaccgtggttgataagaggtcattcccgaaagcttgactgctgggtttgatatacaagaggatcca

SEQ ID NO: 410474 - DNA, 386 bp, Oryza sativa
ctctcacagctcactgcatcaatggccgcggccacgagggcgctctcctccccggggagtggcccgcgcggcgccgtcgacctcctccgcgctcttcggcgaggcgcggatcaccatgcgcaagaccgccgcgaagcccaagccggcggcgtcgtcggggagcccgtggtacggcgccgaccgcgtcctctacctcggcccgctctccggcgagccgccgagctacctcaccggcgagttcccgggcgactacgggtgggacaccgcggggctctccggcgacccggagacgttcgccaagaaccgggagctggaggtgatccactcccggtgggcgatgctgggcgcgctcggctgcgtcttcccggagctccttcgccggaacg

SEQ ID NO: 410475 - DNA, 481 bp, Oryza sativa
cttgattgaagctagacctcatctagttcttggtttgttatcccaaatcataaagatacaactgttagctgatctgaatttaaagaagacacctcagttggcagagttggtggctgatgataatagcaaggaagcagaggagctagtcacattagcaccagataagatgttgctcaaatggatgaactttcatcttaagaaagcagggtacaagaaaactgtgacaaacttctctactgatgttaaggatggcgaagcatatgcttaccttctcaacaccctagctcccgaacttagctccacaaccatgatagaaacttcagatcctaatgaaagggcaaagaaagttcttgaaactgcagaaaagctcgagtgtactagatatgtaacgtctaaagatattgtggagggttctgcaaatctcaacttggcttttgttgctcaaatattccaccacagaaatggcctgtcagacaacaat

SEQ ID NO: 410476 - DNA, 541 bp, Oryza sativa
  unsure (1)..(541): unsure at all n locations
agatttgcatattaaagcctcccatcaacttcttgcgcacaccctccctttggctttcatctgcatctattcagttgcagattgagagccaaagacattatcttgattctatcaggagggttgtgctagcgaattcttgttagcaacaaattgacatattgctcggcacatccccaccgagaataccaagatgacgttctctggtacacaggacaagtgcaatgcttgtgacaagaccgtgcatttcattgatctccttaccgcggacagtattccctaccacaagtcttgcttcagatgcagccactgcaaaggcacactttcgatgtgcagctattcgtccatggatggggttctttactgcaagacccattttgagcagctattcaaggaaacaggcaccttcaagaagaacttcccctcaggtacaaaggcaaacagtgaacaggctaagattcccagcaagctgtcctctgtgttctgtggaacccaggacaagtgtactgccttgcagaagactgtgtatncattggagaagatg

SEQ ID NO: 410477 - DNA, 567 bp, Oryza sativa
  unsure (1)..(567): unsure at all n locations
cggtcgcgtggggccatttctcccccccatctgctctctgcttgcgagcttgtcaaccgcgcaaaggttcatatatacaccgatcggtgtagagccacactcttggagtcgatcgttcgctggttagctaactaagctaagctgagctgccttgctctcttcgacgatcaggttgcttggtttgacgagctgacgatcgaggagaagaggacggcgaacgtttttttgcaggatcagtactagggttcatcttggagaaccaatttgattcgatagaacgagcgagtcgaagaagatggtgctcgcgagcacgccgaaggtggtgctgggatgcgtggcgttcacgatcttctgggtgctggccgtgttcccgtcggtgccgttcatgccggtgggtcgcacggcggggtccctcctgggcgccatgctgatggtgctcttccgcgtgatgacacccgaggaggcgtacgccgncatcgacctccccatcctcggncttctcttcggcaccatggtcgtctccatcttcctggagcgcgccgacatgttcaagtacctcggcaacat

SEQ ID NO: 410478 - DNA, 473 bp, Oryza sativa
ttgtcgcgtgggtgaagtacttggaaagaagagagggtgagtatgaccagaagatctctgtggatttctacaaggaaggagattctttgaagccagctgtgacaggtgtactagtctttgtatccactcctgatccagtaggcaacaaatactatcttgggcctgctcctttggaggacatggcaaggcaaattgctacagccaatggccccaatgggaataacagggattacctgttctcaatggagaaggcattggccaacatatgccatgaagatgattcaatcatcgagctagctaactaggtcaggaaggtgttgagccgctcggacgagaagatcaccggctcctatagcccacagaaatcttacgctctcgtgcacctgattgcgcttactgaggagactgtcgtggacttaagatagcatgttctggtgttgtagagatgaaatacttctctgagctcgctcact

SEQ ID NO: 410479 - DNA, 389 bp, Oryza sativa
gcgtgttctcagcgcaggccaacggcgtggacgacgggcgccctttatggatcgccggtgccccgcgcgccacagcttccatccggcgactgcaaggccgcccaagccaagagggtttctttgcaagctttagccgctcgacgttcattgacagaacatgcctaaaataaagacaagccgtgtcaaatatcctggaggatgggagcttattgaaccaactatccgtgagttggaggccaaaatgagggaagctgaaaatgacacacatgatgggaagagaaagtgcgaagccctctggccaattttccgtatttcccatcaaagaagtcgctacatatatgatctttattacagaaggaaggagatatcaaaagagttgtttgagtttt

SEQ ID NO: 410480 - DNA, 545 bp, Oryza sativa
cacttctctgttatgtaacaccaaaggagcaccttggggggcctaaccgtgatgatgttaagacaggcgtgatatcctacaaaattgctgctcatgctgctgatttggcaaagggccatccctatgcacaagcatgggacgatacactaagcaaggcaagatttgagtttagatggttggatcaatttgctctatctctggatcctgtgaccgctatgtctttccatgatgaaacattaccatcggagggtgccaaagtggcacatttctgctcaatgtgtggcccaaagttttgttcgatgaaaatcacagaggatattagaaaatatgctgatgaacatggttacgggacagtggaggaagcggtgatacaaggaatgaatgctatgagtgctgagttttcagctgcaaggaaaacagtcagtggggagcaacatggtgaagctggaggggagatatatgttccagaaagctttacagcttggcaataagatcgtcttggttcctttactccgggtgagcgtttttagctcactcctaaccat

SEQ ID NO: 410481 - DNA, 477 bp, Oryza sativa
ggatgttcctgaattttacagcactgcattgaattcagagacaacagcaattaagactgctggctttaaaacatttcctgattacctggtgttgcagatgcgcaagtttgtaatggaagcaggatgggtgccaaagaaactagatgtatacgtagatgtgccagatataattgatatctcgcacatgcgcagcaaaggcatacagcctggtgaagagctactacctgaaggagcttctggtgataacaaagctgaacctgttcatcctgttgccagtgaggacattgtatctcagctggcaagcatggggttcaattatcttcattgccagaaagctgctattagtacatcaaacacaggagttgaggaggcgatgaattggcttctctcacacatggatgatccagatatcaacgatccaatatctaaagattcacaggctgctgaacaaactgttgatgaaactagcgttcaaac

SEQ ID NO: 410482 - DNA, 325 bp, Oryza sativa
acaaagcatgaccctgtcacagttagaacgttcgttctaactgaaaaggtttggcctaaaaaatgttttcactgggccagcaaaagttttgtcctaaaaaaaaaaacttgcccttttttagcttaccagcccttttatttcacatcaaatgggactacaattttatttcaccatttgacccattttgggggcggtaaaaagggcctgaaaatgatgataggaatgtcccccacaccctcactttggttggggcacctcaagaatagccttagcccgaaagggcacatttcctgggggaaccccagccaagcttatcccccccttt

SEQ ID NO: 410483 - DNA, 443 bp, Oryza sativa
ctagtcgttcctcgccgacccctccccggacagggggaacgtcggcgtcggcgcgtaccgggacgacagcgggaagcccgtggtgctggagtgcgtgcgcgaggcggagcggcggatcgccgggagcatgaacatggagtaccttccaatgggtggaagcataaagatgattgaagaatcacttaaactggcctatggggagaactgtgagttcatcaaggacaagaggatcgcagcagtgcaggctctttcaggaactggtgcatgtcgcctctttgcagatttccagaagcgtttcttgccagattcacagatttatatacccacacctacatgggccaaccatcacaatatttggagggatgcccaagtaccacaaaagacatttacctattaccatccagagtcaagaggacttgactttgcaggcctaatggatgata

SEQ ID NO: 410484 - DNA, 511 bp, Oryza sativa
  unsure (1)..(511): unsure at all n locations
ctcatcattttccccaaataataatagaggaagggggggaacacataagcagccacgtcatccatggcctctctccgcaccattccggtgatcttcggcatcctcttctatgtccttgccagcactgccactgccaccgacgcaccggactacgtcgtccaaggccgtgtctactgtgacacgtgccgcgccgggttcgagaccaatgtcaccgagtatatcaagggtgccaaggtcaggctggagtgcaagcactttggcaccgacaaggtcgagcgtgcgattgacggtgtgactgatgagaccgggacatacaagattgagctcaaggacagccatgaggaggacatctgcgaggttgtcctcgtccacagcccccttgcaaactgctctgaaatcgaggccgaaagggatcgtgcccgtgttttgctcaccaggaatgtcngcatctgtgacaacctgcgcttagccaacccactcggctacctcaaggacatcccactgcccatct

SEQ ID NO: 410485 - DNA, 550 bp, Oryza sativa
gaaggagaaaggaattgagccggaattctcacgggatttcaaggcttcatttctcaggcttctgccattgcgttcgatgtcacgtttatggggatccttgatggaagtggaacttccagtgttcatgcgccctgccatctataaagcatgggctagagccttccactccagtatgtcttctcctgttatgatgctttcttatattacagttcattaggtaatttcactctgatgattgacttgcattttagagtatctagtgcagaggttgtgtgcctgcacactgctagattgactttgaaatatatttttttgaccaaaatgactttgaaatatatgcagttttagactttttagtgcattggaatgagtagtacacattattcttgatataacacatgaatacttgctattcccgtgaggcaagtttttggcaagaacttgcttctccatagatagtgcaatgcttctaagaaagtcatgcttagttagtagcacttctttcagaaattatgtgccatctttctgaataaaatgatgattgttgagt

SEQ ID NO: 410486 - DNA, 565 bp, Oryza sativa
  unsure (1)..(565): unsure at all n locations
cggacgcgtggggttggtagcagttgcaaaagagcgtgctgcatatggtgatactgcagaatcaacggctggtcagggggtcaaactgttgaatatactcagaaaatattgtgaagccttttcttccatggtggaagggaaaaataaagtgtcaacagatgaactatctggtggagcaagaatccactacatttttcagtcaatttttgtcaagagcttggaggaagtggacccctgtaagagcataactgatgaagatatccgtacagccatacagaattctgacggtccaaagggtcctatgtttctgccagagttgccgtttgagattcttgtgcgaaggcaaataagtcgtttgcttgatccaagccttcaatgcgcaaattttatctatgacgagctagtcaagattagccgtggttgcttaaccagcgagctgcagaaatacccgattcttaaaaagcggatgggtgaagcagttagcaatttcttgagagatggtcttcgacctgcagagacaatgataacccatattatngagatggagatggattacataaatact

SEQ ID NO: 410487 - DNA, 506 bp, Oryza sativa
ctcctgtccttagtcctgctcaagaaacaagagggggagaagttgaccttctatgatgggccattcaaagcatctgcaattgccgattttgtatctgcaaacaagcttccgttggtcaacaccctcacacaggaaactgctccttccatttttgacaatccaatcaagaagcagattttactatttgttgttgcaaacgaatcgtcgaaatttctgcccatctttaaggaagcatcaaaatcattcaaggggaagcttttgtttgtctttgtggagcgtgacaatgaggaagtaggtgaaccagttgccaactactttggtattactggacaagagaccacagttcttgcttacactgggaatgaagatgctaggaattttttccttgatggtgaaatatcggtagagaatattaagagatttgctgaggatttcttagaggataagctcacaccgttctacaaggctgaacctgtccctgatctaatgaatgagatgtcaaaatt

SEQ ID NO: 410488 - DNA, 538 bp, Oryza sativa
gcggtaccggaggagcctaccgcgcgtctcgccgtggcagctccgcaaggcttgcagccctgccggagatgcagacgacgaccgtgcccatggcggcagcggcggcggtggcgccgtccaccaccacctcctcctccgcctccttcaaggttgcggcctatgcttggtcgtcatgccggagcagctcctctccggcgacaagattggtcgccgcccccaatcaccagcgaccaccgctagttgttggagccattgccggcctggatccggttaccgcggtgcagctgccattaaccgctgggaacgtcgagtctgttctagatcaagtgcgcccttacctgacggcagatggaggggaatgttgcccttcatgaaattgccgggaatgtggtgaggctgaagcttcaaggagcttgtggatcgtgcccaagctcgctgatcacgatcaagaggggcatcgagcgccggttgatggagaaaataccagatgttgctgctgttgaccttgtacagataagagactgggcttgagctgatg

SEQ ID NO: 410489 - DNA, 368 bp, Oryza sativa
gctcgttaaagacaatatagttctgtaatttgtaacaacacaagagcctgaggatataacgagttacaaacatgctgccgttgcagcatggtcatcaatatacaacattacaacaacatatggggatcgcagaacactcccattccacgattttacaacatatgcttcacaacacgttataaatacatggttgtaccgagctgtagagagacagccagcacgtcccaactacaaatgcacactagccaacagcaaacataaaaactactctttggtaagtcactatatatacgcactatagcttcacatgacttaaattataacatgacataatttcttttggataaattagccccaggaaggttttg

SEQ ID NO: 410490 - DNA, 351 bp, Oryza sativa
tggttatttcgcctagggcaggcggaggcggaggcggccgcttttacaggaaggtggtgccttttgtggtggcggcggcggccggcgactaggcgcatagcgagatgcacgtgctggcggtggacgacagctccgtggaccgcgccgtcatcgccaagatcctccggagctccaagtacagggtgaccactgtggagtcggcgactagggcgctcgagctcctctgcctcggcctcgtccccaacgtcaacatgatcatcaccgactactggatgcccggcatgaccggctacgagctcctcaagcgcgtcaaggaatcgtctcagctcaaggagatcccggtggtgatca

SEQ ID NO: 410491 - DNA, 489 bp, Oryza sativa
attcttttcgatcgagagctcacgatgtcggccatggggaccgacatcaacgcgccggcgtcccccgcccccgcccccgccggcgccggcgagggatcctcctctgccgccggcccctcctcccgcaagcccaacaagcgcttcgagatcaagaagtggaacgccgtcgcgctctgggcatgggatatcgtcgtcgacaactgcgccatctgccgcaaccacatcatggatctatgcatcgagtgccaggcgaaccaggccagcgccaccagtgaggagtgcactgtcgcttggggtgtctgtaatcatgcttttcacttccattgcatcagcaggtggctcaagactcgccaagtgtgcccgttagataacagtgaatgggaatttcagaaatatgggcactagacaccacctgctgtctgcgcttgtttgttgccacggctgtgcttcatacacaagccgtattatttgccgaacagctccatcgtt

SEQ ID NO: 410492 - DNA, 506 bp, Oryza sativa
  unsure (1)..(506): unsure at all n locations
tttttagtataatctcaaagaacaatgaacgtgctctttggtcatctgcagttcctgaaatgaaagcaaaatttttggaaatagtccatccttccaacaggggtttgtcggagcaggattttgaggttttaagaggaattgctggttgtggtgatgacattggaagagacgagtttgataagctatggtcctggttatacccagttgccattgctttgtcaaaagacaaaataaacaggctatgggatttcacagcacatagatggatagagggattgattacattacaggaaactgagaatgcgctaagaagttccagggaccggcttatgaagccaggaacatttgtccttagatttcctactacccgaagctggccacatccagatgccggtagcctggttgttacctatgttggctccgataactcaattcatcatagactttngtctcttgatgtcagtgatgctaagtctggcaacctagaagatttgttgctgaaggag

SEQ ID NO: 410493 - DNA, 556 bp, Oryza sativa
tacattcactctttgtggagtcctgtgcttcagtgggccttgcgtacagattactatttgtagtattaactgtttgcgtcagtcatcaagctttgcctgggggaagtaaaaggccaactggtagtgataatcattcctctgaggaggtcacaaatgattcgagattaaccaatggaagaaacagatgtaagaagagacaaggaccagttgctacattcgactcatacgttctagcagccgtttgtgccttatcttgtgagctccagctgttcccttttatttccaagaatgggaaccattcaaatctgaaggactccataaagatagtcatacctggaaaaaccactggtatcagtaacgagctacacaatagcattagctcagcgattcttcatactcgtagaatacttggcatcttggaagctctgttctccttgaagccatcatctgttggtacttcatggagttatagttcaaatgagattgttgcagcagctatgggtgctgctcatgtttctgagttatttcgtcgattcaggccatgcttaaatgcact

SEQ ID NO: 410494 - DNA, 487 bp, Oryza sativa
gtttttcctgtcgtggtactcgcagatgctgggggggcacggttagcgcgtactgtcgggcgcgacgtccgtgttcggcgacggcgccggcgccaagatctcggtcaaggtggccggcatccactggcactacggcacgcggtcgcacgcgccggagctcacggcggggtactacaacacgcggcaccgcgacggctacctcccgatcgcgcacatgctggcgcgccacggcgccgtgctcaacttcacctgcgtggagatgcgcgaccatgagcagccgcaggaggcgcagtgcatgcccgaggcgctcgtcaggcaggtggccgccgcggcgcgcgcggcgggcgtcgggctcgccggggagaacgcgctgccgcggtacgacggcacggcgcacgaccaggtggtcgccgtcgtcggcgaccgtgcggtggaagaccggatggtcggcttcacctacctccggatggggcccgaccttttcacc

SEQ ID NO: 410495 - DNA, 385 bp, Oryza sativa
gcttttgcttctgaaaggtgccagtgagaggggagcaaaaagaattcgtgttcacattcttactgatggacgcgatgttttggatggcagcagtgttggttttgtagagacactagagagtgatctttctcagcttcgtgacaagggtattgatgcacggattgcatctggtggtggaaggatgtatgttaccatggaccgctatgagaatgactgggatgtggtcaaacgtgggtgggatgcccaggtgcttggcgaagcaccctacaaattccaaaatgcagtcgaagcagggaaaactctaagagcagagaccaatgcttgtgatcagtatttgcctccatttgtgatcgtggatgagagtggtcaatttgttgggcctgtt

SEQ ID NO: 410496 - DNA, 547 bp, Oryza sativa
ttcctgtccttagtcctgctcaagaaacaagagggggagaagttgaccttctatgatgggccattcaaagcatctgcaattgccgattttgtatctgcaaacaagcttccgttggtcaacaccctcacacaggaaactgctccttccatttttgacaatccaatcaagaagcagattttactatttgttgttgcaaacgaatcgtcgaaatttctgcccatctttaaggaagcatcaaaatcattcaaggggaagcttttgtttgtctttgtggagcgtgacaatgaggaagtaggtgaaccagttgccaactactttggtattactggacaagagaccacagttcttgcttacactgggaatgaagatgctaggaattttttccttgatggtgaaatatcggtagagaatattaagagatttgctgaggatttcttagaggaaaagctcacaccgttctacaagtctgaacctgtacctgaatctaatgaaggagatgtcaaaattgttgttggaaaaaacctagatcagattgttttggatgaat

SEQ ID NO: 410497 - DNA, 461 bp, Oryza sativa
tcctatctcgcgaggctctcgtcgtcgaatcgaaggctctcgcgtactcaagatgcagatctttgtgaagacattgaccggcaagactatcaccctcgaggtggagtcctctgacaccatcgataatgtcaaggctaagatccaagataaggagggcatccccccggaccagcagcgtctcatcttcgctggcaagcagctggaggatggcaggacccttgctgactacaacatccagaaggagtcgacccttcaccttgtcctccgcctccgtggtggcatgcagatctttgtcaagactctgaccggcaagactatcacccttgaggtggagtcttctgacaccatcgacaacgtcaaggccaagatccaggacaaagagggcatccccccagaccagcagcgtctcatcttcgccggcaagcagctggaggatggcaggacccttgctgactacaaca

SEQ ID NO: 410498 - DNA, 543 bp, Oryza sativa
ggttctttatcgagcttatcaacaaaagcatgatccagcgaatagaagacacatactaccttggcactattagtggttgtcacatccatgacatggtgctggacctcatccgcatgtcggcaaaagaagagaactttgtaaaaatattggatagagcacatgaggagcacaactcatcttcgcattgcagatcagtccgtaggctagcactgcataagagttggaaccagcataaaaacaataatccggcgatgggcatggagcagcagctgaggtcattcaatgccattgagtgccctattagcatgattcccctgcctgcgagattccaggttctacgtgtgttagcgctggaaggttgtgatgtcacaggaggctgtaaactgaagcatcttgggaagctgcttcagttgaggtaccttgggctgagaaatacacgtgttggtgagctcccaaagcaaacactgcgggatctcgttcacctgcaggtactggacgttagggacactgacttggtgcactgccagcgacagttagcgaact

SEQ ID NO: 410499 - DNA, 507 bp, Oryza sativa
aatttctgcgcgtcatggaggataaaatttggaatactgaggcaaaagtatatggtctaatccctgcattaaaactgagttatgatgcacttcctccccatctgcgagcatgcttttcttgtttatccattttcccaaaagaccatcagttgttttattctactacagtcatgttatggatggcattggggatgttgaatacaggcaaggaaagcaaacaaatgatatctgctggaagtaagtgctttcatgatctcctaggaagatcgttgttccaagaccaaattattgtttatgatgaaaccattcaaagctgtaaaatgcatgatcttattcatgatctagcacaattcgtttcagaaaatgagcatgctgttatcagttgtgaaaagactgctttctctaaaagggttaagcatctagtgtgagattgcaaggacttctcaggagagcacgaatttcctaagcagttgaaaaaggcatgtaaggtgagaacattttcaagca

SEQ ID NO: 410500 - DNA, 544 bp, Oryza sativa
cttggttgcaaaaaccaagacatacacacagaatcgaagagataacaaaggtttcctagcctcaaaggatacatatatatagtttccctacaatacaatggagcctgtcaatgatttccaggaaggcatttcaacagagcatgcctttgaggcagagcctgtgccatcattgtcggaaacaataacgccacgatcaatggtggtgagcttcatccttagtgtaactctcagcatcgtcgccatgaaggtcaccttgagctctggcttcattccgtcgttcagcatcccagccggcctcctcggtttttgtgtatcccgtgcgtcgatccgcattcttgactacttcgcagtggcacaactaccattcacacgccaagagaacaccatcatccagacctgtgtcgtcgcatgcacctcgatcacattcaccggtggctttgggacatatattcttgcaatgggaaagaaagcagcttgaagggatgtcaatgcccaaaataacgttgggaggcaagctttgccaggatgatcacctttctcttcc

SEQ ID NO: 410501 - DNA, 465 bp, Oryza sativa
gtttttacttcaccaaggacttcaagggctccgtgggcggcttctacgtcaacaccgtggacaccaccggcgccggcgacgccttcgtcggctccctcctcgtcaacgtcgccaaggacgactccatcttccacaacgaggagaagctgagggaggcgctcaagttctcgaacgcgtgcggagccatctgcaccaccaagaagggtgccatcccggcgctgcccaccgtcgccgtcgcgcaggagctcatcagcaaggcagccaactagagctcctcggtttcgtcgtcgatcgccgccattgggggcctcggaattttaggtcgatttaatttagttgctgcttcgttttagacaaggaagaggaggggcttgggtgtgttcatgtctgtcttttgtgtgctaaagtagttggttccgtgtgagaacttttggcgtttattttactatattattataagaagct

SEQ ID NO: 410502 - DNA, 410 bp, Oryza sativa
tttttcaactactccgttgatcactattgcaatgacggaaatagttgccagtgtattggagaggaacaacttgccaggctcaatttttacagcattctgtggtggtgctgacattggccaagcaatttctcttgacacaaggatacccttggtttcattcacaggaagcacaaaggttggtctaatggttcagcagcaagtgaatgcaagatttggcaaatgccttcttgaacttagtgggaacaatgccattattgtaatggatgatgcacacattcagctagctgtccgttcagtgttgtttgctgctgttggaacagcaggacaacgctgcactacatgtcgtaggctgcttcttcacgaaagcatataccgaacatttcttgatcaacttgttgaggtttataaac

SEQ ID NO: 410503 - DNA, 226 bp, Oryza sativa
cggtcgcgtgggcggttcggttcggttcggttcgggtccggttcgatttcggtttttccttcggttcgggggttggtgggaaagcatggcggcgccggatgttgagtaccgctgcttcgtcggcggactcgcctggaccaccaacgaccgttgcctggaagccggcttctccacctacggcgagatcctcgagaccaagatcatcaacgatcgggagaccgggagg

SEQ ID NO: 410504 - DNA, 555 bp, Oryza sativa
tttcttcttcttcctcctcctcgcgctcccccgatgggaatcgtgaagagaggagcggcgcttgcgagaggagagagatggcccgtaccaagcagaccgctcgtaggtccacaggaggaaaggctcccaggaagcagcttgcaaccaaggctgctcgtaagtctgctcccaccactggaggagttaagaagccccaccgttaccgccctggaactgttgccctccgtgagattcgcaagtaccagaagagtactgagcttttgatcaggaagctgcccttccagaggcttgttagggaaattgcacaggacttcaagaccgatctgcgtttccagagccatgctgtccttgccctccaggaggctgcggaggcataccttgttggtctcttcgaggacaccaacctgtgcgctattcatgccaagcgtgtgaccatcatgcctaaggacatttagctggctaggaggattcgtggtgagaggggcttaatttccctcggcgactcctttgacaaatgaagcatgcgtcgtattgttaggagggggttaaatcttt

SEQ ID NO: 410505 - DNA, 561 bp, Oryza sativa
ttcctctctacctcgccggagttcaccctgtgtgggactgggagcggcggcggcgtcggaggcaatggacgcttcgtcggtggcgctctacggccagctcaaggctgctcaaccattcttcttgttagctgggcctaatgtgattgaatcagaggagcatgtcctgaagatggcaaaacacatcaaaggcatcacaaccaagcttggtctgccacttgtgttcaagtccagctttgataaagcaaatcgtacatcatcaaaatccttccgtggtcctggtctggaggaaggcctgaagatacttgaaaaagtgaaagcaacatatgaccttccagtggtcactgatgtgcatgaaagccaccagtgtgaagccgttggaagagtggccgacatcatacaaattccagctttcctctgtcgccagactgatcttctagtggctgctgccaagactggaaaaattatcaacatcaagaaaggacaattctgtgctccttctgttatggccaactctgcagagaaaatcagacttgctggaatcaaaatgttatggtctggagc

SEQ ID NO: 410506 - DNA, 521 bp, Oryza sativa
atttccattaccagtattggagttaagacgccgagcgaaagatagggcaaagaaagctgaagggaaacccaaacgatctttaccacctccaaaaaatgggatgctgatcaaaagactgataccagttgcatacaaggtgtataatgcaagaattttgctgatcaacaacttgaagaggcttatgaaagtaattccagtgaaaggatgcaaacattgcagtgagatacatgttggatctgttggacaccctttccgaacatgcaaaggaatgtcttcagataaacgtagggggcaacatgactggggaggtactttggttgaagctgtttttgtgccggttgaagcctaccatctagaggatcgcttagggaagcgtatccctcatgatcagaggtttgctgtacctcgcatccctgctcttgtggagttatgcattcaagctggagttaaatttcctgaataccccacaaagcggcgaagaaagcccattattaaaatccgaaagaacgagtttgtgatgc

SEQ ID NO: 410507 - DNA, 367 bp, Oryza sativa
gcgccgtgtcgccggcgcgcgcgaggggcggcgaccggcggcgaagctcctccctccgcgcccccacgacctctgcgccgccagatctggccccgcctccaccgccgcatccagagactgcatgtccggcgtccagaacacagcggaagatgggttgccagatggaggagcttctgaactgtcgacgaaaacctccgtcacgttgtactccgatgaaaccagaagatccctccacgcaattcttacagctttcaacatgtcggtcacctccgccatggatggcctctccttccccttggcgctcagacacatactccccaccttggcgacctcctggagcaggggcagcgcctccatgctggcacca

SEQ ID NO: 410508 - DNA, 507 bp, Oryza sativa
  unsure (1)..(507): unsure at all n locations
cgcgtgctccgtggggatgctggtggtgggggcgtgcggcgccggtgagaccagcgagtaccggcgccagctcggctccgccgtcgacatgccgctcgacgccgacgtcttccgcgccccgcccggccgcaatgcgccccagcaggttcatatcacacaaggaaatcatgatggcactgccatgataatctcatgggtgacaacaattgagccaggctcaagcactgtgctctatgggacttcggaggataatcttaatttctctgcagatggaaaacacactcagtatacgttctacaactacacctcaggatacattcatcactgtacaataaaaaagttggagtttgacacaaaatactactatgctgttgggattggacaaaccgtgaggaagttttggttcagaacccctccaaaaagtggcccagatgttccatatacanttggtctcataggtgatcttggtcagagctacgactcgaatattacgctggcccattatga

SEQ ID NO: 410509 - DNA, 527 bp, Oryza sativa
cccacgcttccgctctattatcaagaaacaagcaagatgtgccccagctaactagctaccttggcaatggcctccttatcctccttcctgctcgccgcatcagtggcgacactgtttgtcgttggctcatacgccaccgagcttaccttcaaggttaatgagggctctagcgcaactagcctggaactcatcaccaacgtcgccatctctgaggtggagatcaaggagaagggtgccagcgactggacggcgctgaaggaatcatcgtctaacacctggacgatcaaaagcggctcgccactcaagggccccttctccgtccgcttcctcgtcaagaatggcgggtaccgcgtcgtcgacgatgtcatccccgaaagctttacggccggctctgtctataagagtggtatccagctctaagtaacatacacgtatgcttttttttttggttgagtcgcatgagaatttttagcctctaaataattctattttaagacagattgggccgcctgcgagcgagccaaaaa

SEQ ID NO: 410510 - DNA, 491 bp, Oryza sativa
cagctctcgcctccccatcaccgtcctcctcctggtgctcctgcaacagcagcaacctcccggcccccttccgcccccgcctcatccgcaacacccccgtcttcgccgcccccgtcgcccccgccgcgatggacgccgccgtcgaccgcctcaaggatgggttcgccaagttcaagaccgagttctatgacaagaagccggagctcttcgagccgctcaaggccggccaggcacccaagtacatggtgttctcgtgcgccgactctcgcgtgtgcccgtcggtgaccatgggcctggagcccggcgaggccttcaccgtccgcaacatcgccaacatggtcccagcttactgcaagatcaagcacgctggcgtcgggtcggccatcgagtacgccgtctgcgccctcaaggtcgaactcatcgtggtgattggccacagccgctgcggtggaatcaaggccctcctctcactcaaggatggagcaccagac

SEQ ID NO: 410511 - DNA, 519 bp, Oryza sativa
cggtcgcgtgggcggacgcgtgggcggacgcgtgggcgccagaagagcaacctcccagtgaactggcctgtttttggtatgcttccattcctcgtgcagaatctgcactatatccatgacaaagtcgcagatgtgctccgcgaggcggggtgcaccttcatggtcagtggcccgtggttcctcaacatgaacttcttgattacctgtgacccagccacggtcaaccattgcttcaatgccaacttcaaaaactacccgaaaggcagtgagtttgctgaaatgtttgacattctaggtgatggactccttgtggcagactctgaatcatgggagtatcagcgacgcatggcaatgtacatatttgctgcccgtacctttcggtcctttgcgatgtccaccatcgcgaggaagactggcagtgtcttgttaccctaccttgatcacatggcttagtttggctcagaggttgagctggagggtgtcttcatgaggttctcactagatgtgacatactctact

SEQ ID NO: 410512 - DNA, 490 bp, Oryza sativa
gaatataaaaatctcccctcgaagcgaagcgtcggggcgccttctcaagatgcagatctttgtgaagaccctcaccggcaagaccatcaccctcgaggttgagtcctcggacaccattgacaatgtcaaggccaagatccaggacaaggagggcatccccccggaccagcagcgtctcatctttgctggcaagcagcttgaggatggccgcaccctggccgactacaacatccagaaggagtccaccctccaccttgtgctcaggctcaggggaggcatgcagatcttcgtcaagaccttgactggcaagaccatcacccttgaggtcgagtcgtctgacaccattgacaatgtcaaggccaagatccaggacaaggagggcatccccccggaccagcagcgtctcatcttcgctggcaagcagcttgaggatggccgcaccctggccgactacaacatccagaaggagtctaccctccaccttgtgctc

SEQ ID NO: 410513 - DNA, 455 bp, Oryza sativa
atttttgtcatccaaatcgatgaggctgctttgagagagggtctgccactccgcaaggcggagcatgctttctacttggactgggctgttcactccttcagaatcaccaactgcggtgttcaggacaccacccagatccacacccacatgtgctactctaacttcaacgacatcatccactccatcatcaacatggacgctgatgtgatcaccatcgagaactcccggtccgacgagaagctgctctccgtcttccgcgagggtgtgaagtatggtgctggcattggccctggtgtctatgacatccactccccaaggatcccgtccacagaggagattgcggaccgcgttaacaagatgctcgcggtgctcgacactaacattctctgggtgaaccctgactgcggtctcaagacccgcaagtacaacgaggtcaagcccgcccttaccaacat

SEQ ID NO: 410514 - DNA, 483 bp, Oryza sativa
cgagtatttgctccggtccaaatgggtgccttgcctcgagtttagtaaggtcgggttcgtctaccgtgagaaccacaggtctcctgggtactatgatggcaggtactggaccatgtggaagctgcctatgttcggatgcactgatgccacccaggtgctcaaggagctcgaggaggccaagaaggcatatccagatgcatttgttcgcatcatcggcttcgacaacgtcaggcaggtgcagttgattagcttcatcgcctacaagcccccgggttgcgaggagtccggcggaaactaaactagttggcaagccagcaagcttcactcgtgagctctatacagaggagactcgattgatctattcggttttggcagctttgacgttcgaatcgggccaccttgcattggtttccctttcccagtttgtgcttcagtttttttttcatttgttgggcaacatcagctggatgatgtcatatgatg

SEQ ID NO: 410515 - DNA, 561 bp, Oryza sativa
cgagttcttgctccggtccaaatgggtgccttgcctggagtttagtaaggtcgggttcgtctaccgtgagaaccacaggtctcctgggtactatgatggcaggtactggaccatgtggaagctgcctatgttcggatgcactgatgccacccaggtgctcaaggagctcgaggaggccaagaaggcatatccagatgcatttgttcgcatcatcggcttcgacaacgtcaggcaggtgcagttgattagcttcatcgcctacaagcccccgggttgcgaggagtccggcggaaactaagctagttggcaagccagcaagctcactcgtgagctctatacagaggagactcgattgatctattcggttttggcagctttgaacgttcgaatcgggccaccttgcattggtttcccctttcccagtttgttgcttcaagtttttttttcatcttgtttgtgtcaacatcagctgtgtatgtatgtacatatgtatgtatcaacataggttgaagagcatgcatatgtgaatgctagcaccaggctatcatatgcacatacaca

SEQ ID NO: 410516 - DNA, 481 bp, Oryza sativa
tctccatctgtgcacggagggattcattgtccctgggggcaatttcccggccggccgggacggcggaacctcgtccatgatcacttgaaacacctcccttgctcttcatggccatggagacgacgagccaagattcgcaggtgatcatgggccggtacaagctcggccggctcctcggccgtggcacgttcgccaaggtctacaaggcctataagttggccaccggcgaggccgtcgccatcaaggtgttcgacaaggaggcggtgcagcggtccggcacggtggagcaggtgaagcgcgaggtggacgtcatgcggcgtgtgcaccaccgccacgtcatccgcctccacgaggtgatggctacgcggtccaggatctacttcgtcatggagtacgcgagcggcggcgagctcttcacccgcctctcccggagcccgcggttcccggagcccgttgcgcgccgctactttcagcagctgat

SEQ ID NO: 410517 - DNA, 461 bp, Oryza sativa
ttttctaaccagaccaaggacaagaccgactacctcgggtacactaccagcttccgggtggagacggacgacctgccgtaccggaaggaggtcaagccggtgctggaggtgagcagccatggacacgccatcgtggcgtttgtcaatgacgctttcgtagggtgcgggcacgggacgaagatcaacaaggcgttcacgatggagaaggcgatggatctcaaagtgggcgtcaaccacgtcgccatcctctcctccacgctgggtctcatggacagtgggtcatacctggagcaccggatggccggggtgtacacggtgacgatccgggggctgaacacggggacgctggacctgacgacgaacgggtgggggcacgtggtggggctcgacggcgagcggcggcgggtgcactcggagcaagggatgggcgcggtggcctggaaccccgggaaggacaacca

SEQ ID NO: 410518 - DNA, 340 bp, Oryza sativa
  unsure (1)..(340): unsure at all n locations
ttctcgagctcggctcagctcagctcacctcgcacggagatcccaatgcaccaaccagccataatgcagcgggctctcgccgtcgtcgccctcctcgccgccgcagccgccatcgccgccgcccagggggagtcgccggagttgctgccgttcgcggtgggggcggcgccggaggggtgcgacgtcggggaaggggagtgggtgttcnactaggcngcacagccgtcgtacaccacggaggagtgcccttacatacagtgtgacctatggtgagagggtcatagccggagcaacgtctggtaccagtgttcacgctggctgtcctgcggctgatccctgc

SEQ ID NO: 410519 - DNA, 459 bp, Oryza sativa
tgtttgggccaagccggagcggagggatggcggcggcggctaatccggaggcgggggagggggaggcgacgaattgccacaggagatcggcggcggggcaggaggaggaggaggaggagtcgaagaggccacgcgatggcaacgatgaggaggaagagctgctcaccgagctctcccgctaccgccgctactggacggatctttggtccgacgattccggcgacattgacagaagaactgagattggtcccatgcggtacacggaggaatcgccccggttcgcaatgctcctggatttacttgaggttttttcttttgaggtgaccgagctgaaaggtattctacgctggccaatagatgtgtttggtctcatctccgttcgtgactctctggaccggaaccgcaactatatctttgagcgcaccaggaacaactgccagactcttactgcaaaggatt

SEQ ID NO: 410520 - DNA, 254 bp, Oryza sativa
gcagttcctggagcttgacatggaggagctccaggtcgaggaggtcgacgacgccggctcatcctcctcctccgaagtcgacacctttctcagaaacactcatggggatggaggatctagaacttctgaagcacttgcattcaatacgtctgtggtttcgctgcccacctgtgatggtgaggttcatgatgccccaggcagatttgctttcttggatggtggtgtggtcctctgattaccaattggttatcttc

SEQ ID NO: 410521 - DNA, 506 bp, Oryza sativa
cttttcctccgccgctgcagctcagccatgccgcggggggtttcccactcgtacaccgacggcgaccacccggtcaccgccaaggccgccctcgccttctacctcgacttcgccgcctccaccatccacgcctccgcgctgctcaccctctccgccccgcactccggcgacctcctcctcgacacccgcgccctcgccgtccactccgcctccaccgcctccggcccgccctcccccatccccttctccctcgccgacgccgccgaccccgtcctcggctccgccctcacgctcaccctgccccccgacaccacctccttcctcctcaccttctccaccttcccctccgcctccgcgctgcagtggctctcgccgccgcagaccgcctcctcgctccccttcgtcttctcccagtgccagtccatccacgcccgctccgtttttccctgccacgacacccccgccgtgcgcatcacctttgacctccttctcaacgtccccaccca

SEQ ID NO: 410522 - DNA, 519 bp, Oryza sativa
ctttctctatacaaagcaagtagtagcaataactgggtcttgatcatttttatctaagttcttaatttcgatcgcgaagggccatggcgaaggtggcgttggcggtggcggcgatggcggtgctgctgctgctcgcggcggcggcggcgccgggggcggaggcggcgtgcgacgcgctgcagctgtcgccgtgcgcgagcgcgatcatcgggaacgcgtcgccgtcggcgtcgtgctgcagccggatgaaggagcagcagccgtgcctgtgccagtacgcgcgcgacccaaacctgcagcgctacgtcaactcccccaacggcaagaaggtcttggccgcctgccacgtccccgtcccctcctgctaaaaccaaaccataatactccagttctgcgtgccgtttatacgtgtgtgagtgcgcctgtcgcatggcccacctgccatagacgccgtctatatatggacgtacgtacgtgtctcgcttacttgatttcgtgtctgcttcgacgagttcgatc

SEQ ID NO: 410523 - DNA, 501 bp, Oryza sativa
agattctatgtgttctacacctgttttggcccttgggggcttttctaagccttttgtgagttgagactgatgcttgtgccacaggaattggtgttgtgttgtctcaagaaggacatcctgtggcattttatagcaaggcattgggaattgtgaatcagcggctgtctatatatgaaaaagaatttttggctataatgatggcagttgatcattggagatcttatttacttcggggtccttttgttatcaagactgatcacaaggctctttgtcatttagatgatcagactttggacactgagttacagaaaaaggcgatgactaagcttattggattacagtacaagttccagtataaaaaaggagttgagaacaaatctgctgatgcactatccaaagtagggcatttttttgggatttatgtggttcaatcttgttgggtttaggagattctcaactcctatgctggagattcatctgctcagcagttactttgtgagc

SEQ ID NO: 410524 - DNA, 474 bp, Oryza sativa
agattctatgtgttctacacctgttttggcccttggggactttgcttagccttttgggagtgagactgatgcttgtgccacaggaattggtgttgtgttgtctcaagaaggacatcctgtggcattttatagcaaggcattgggaattgtgaatcagcggctgtctatatatgaaaaagaatttttggctataatgatggcagttgatcattggagatcttatttacttcgggggccttttggtatcaagactgatcacaaggctctatgtcatttagatgatcagactttggacactgagttacagaaaaaggcgatgactaagcttattggattacagtacacgttccagcataaaaaaggagttgagaacaaatctgctgatgcactatccaaagtagggcatttttttgggattcatgtggttcaatctgtttgggtttaggagattttcaaactccatgttgagattca

SEQ ID NO: 410525 - DNA, 510 bp, Oryza sativa
  unsure (1)..(510): unsure at all n locations
agaatattctgtagaattacagaagaagatcatgggggcggaattcgacttcaatggctggctaaagcaatcacagaatgttgcaaaaatgggttccatgagccgtgtagttggaatgattccaggcatgaacaaggttactcctgcacaaattcgagaagccgagaaaagacttgcatttgtggagtctatgatcaatgcaatgactgccgaggaaagggaaaagccagaattactggctgaatcacgtgacaggaggataagagtggctgaagagtccggaaagagtgaacaagaggtgagccagttggttgcccagcttttccaaatgcgtgctcagatgcagaagctgatgggtgtgatgaccggacaagaagcacttncaggcatggggaatctcatggaatctcttaacgccgatgagaaggcacctcctggcactgcacggcggaagaggaggcacagcaagacgaggcagagggagctggatgcagtccctagttcttgagc

SEQ ID NO: 410526 - DNA, 566 bp, Oryza sativa
ggttcttttgtaccaagtaggagcattttatccttggggtagaggtcatgctcatgatggcgccaagagacgcgagccatggttatttggagagcgaagaactgctctcatgagggaggcaattcatatgcgatattctttgctgccatactattacacactgttcagagaggctagtgtaactggtgttcctgtgatgcgtcctttatggttagaatttcctgatgacaaagagacatataataatggtgaggcttttatggttgggccaagccttttagcacaaggaatttatgaagagggccagaaatcagtgtcagtgtaccttcctggagaggagttatggtatgacttgagaaatggatctccatacaagggtggtgtgtcacacaagctagaagtttcagaagatagcattcccagtttccaaagggcaggcgcaattgtgccaagaaaggatagattcaggcgcagttctactcagatggtgaatgatccatataccctggtgatagcgcttaatagctaaagtgcggcataatgcgagctttatgtggatgatggga

SEQ ID NO: 410527 - DNA, 498 bp, Oryza sativa
ctcgtctttctcgcatctccactcgccatgggcagaagtaagatcggaatcaacgggtgcggaaggatcgggaggctcgtggccagggtggccctccagagcgaggatgtcgagctcgtcgccgtcaacgaccccttcatcaccaccgactacatgacctacatgttcaagtacgataccgtgcacgggcaatggaagcacagcgacatcaagatcaaggactccaagactctgctcttgggcgagaagccggtcaccgttttcggcatcaggaaccctgacgagattccgtgggctgaggctggtgctgagtatgtcgtggagtccaccggtgtcttcactgacaaggagaaggctgctgctcacttgaagggtggtgccaagaaggttgtcatctctgccccgagcaaagatgctcccatgtttgtctgcggtgtcaacgaggacaagtacacttcagatattgatattgctaaatgctagctgaccacaaactgc

SEQ ID NO: 410528 - DNA, 219 bp, Oryza sativa
gcagattgtcactctcatagtgaacaagctcaagaagtcaaatttataagcatcacaggggggccccatcattctggcacagattgagaatgagtaccagcacctggaggtgggattcaaagaggctggcaccaagtacatcaactgggcagctaagatggccatcgcaaccaacacttggtgtcccgtgggatcatgtgcacgcacgactaaagctcc

SEQ ID NO: 410529 - DNA, 457 bp, Oryza sativa
tctttatctcgtcttctctctctcgcaggactgggtggcgattgcggcggaggtggcgaaggcggcggtggtgccggagtcggtgctgaagaagcggaagcgggaggagcagtgggcggcggacaggaaggagaaggcgctcaccgagaagaagaaggccgtcgagagccgcaagctcatcttcgcccgcgccaagaagtacgcccaggagtacgacgcgcaggagaaggagcttgtgcagctcaagcgtgaggctcggatgaagggtgggttctacgtcagccctgaggccaaacttctgtttgtggtccgcatccgtggtatcaatgccatgcaccccaagaccaggaagatcttgcagcttctgcggttgaggcagatcttcaatggtgtcttcctcaaggttaacaaggcaaccattaacatgctgcgcagggttgagccatatgttgcatat

SEQ ID NO: 410530 - DNA, 551 bp, Oryza sativa
  unsure (1)..(551): unsure at all n locations
gccttggccatggagaagagccgggtcctcgtggggggcggcaccggcttcgtcggtcggcgggtcgtggcggcgagcttggcggcgggccacccgacctacgtcctgctccggccggagatcggcctcgacatcgacaagctccagatgctgctggccttcaaggcgcggtgcgcgcggctcctcgaggcgtcgctcgacgaccacgacggcctcgtcgccgccgtccggcaggcggacgtcgtcgtctccgccatgtccggcgtccacttccgcagccacaacctcatgctccagctcaagctcgtcgaggccatcaaagatgctggaaatgtcaagcgattcctgccatctgaattcggcatggatccatcaaggatgggggacgctctagaacctgagagggtttcatttgatgagaagatggtgataaggagagcaattgaggatgcaaacatnccccacacatatgtgtctgccaattgctttgcagctacttctgtgctaaccttgtcagatgaaactctcctccctccaaagagaagtgtgtt

SEQ ID NO: 410531 - DNA, 365 bp, Oryza sativa
agctctactcggcgtgggagtactgcgagaagtcgtacctccacagcgagcagaagcagatggttctagacaacttgaaggattatgctgtgagggctttggtgaatgcggttgaccaccttggcacagttgcctacaaactgacagacctgtatgaacaacaggcttcagaagtttccactcttgagctgaaagtagcatgcttgaaccagcaagtcctcacctgccaaacttacacggataaagaaggcattaggcagcagcagatgaccggaaccgccacaagacattacaaacattacattgtaccgactttggcgaacaaaagaatgcaggctttctctgagatgcaaactgatgctgat

SEQ ID NO: 410532 - DNA, 432 bp, Oryza sativa
tcgttcgcccgcttcgccaagtggcgggcggggctgatgatctgcgccgccggcgagccttccgagctcgccgtcaagcagaacgccgagggcctcgcccggtacgcgctcatctgccaggagaacggcctcgtccccatcgtcgagcccgagatcctcaccgacggcgcccacgacatcaagacctgcgccgccgtcaccgagcgcgtcctcgccgccgtctacaagtctctcaacgaccacaaggtcctcctcgagggcaccctcctcaagcccaacatggtcacccctggctccgacagcccaaaggttggcgcggaggtgataggggagtacacggtggcggcgctgcggcgcacggtgccaccggcggtgcccgggatagtgttcctctccggcgggcagagcgaggaggaagcgtcgcagaacctg

SEQ ID NO: 410533 - DNA, 399 bp, Oryza sativa
cctagcttcccaccattgcttgcaaagctgggggggtcactcctcccgttaagcgggccgcggcggcgagagcaagctaagctaggtcgggcatggggaaggacgaggtgatggagagcggcggctcctccggcgagttcgcggccaaggactacacggacccgccgccggcgccgctgatcgacgcggcggagctggggtcgtggtcgctgtaccgcgccgtcatcgccgagttcatcgccacgctgctgttcctgtacatcaccgtggccacggtgatcgggtacaagcaccagacggacgcgttggccttcggcgccgactcggcgtgcggcggcgtgggcgtgctcggcatcgcgtgggcgttcgggggcatgatcttcatcctggtctactgca

SEQ ID NO: 410534 - DNA, 457 bp, Oryza sativa
ttttcttgagccaatcaaccgcttccttttgggggacgagtgagaagaggatcgaccgtttccttcgatcgcttggtctagactcatggggaacctagaagagactaggcccggaacacatggccggcaggcgccccgagcacacgtacccggatgactggtccaccaaggatcagttcatgacccgctggtccttctccgtccgcagctgctacacgctgttttgtgacccgccgcacaccaagtgtttgggcttctcggaggcggcacgcgacgcacactatctacggtggctccttacagcatctatattatcaacagagctccaataaactaagataatgcacaacctggggaactacaccgtcccggtcaggtctacatgttcatgatggacctctaggataggaatgacaggctgttctacaagctgctgatgacaccatcgaggagctgc

SEQ ID NO: 410535 - DNA, 448 bp, Oryza sativa
tcgttatgtcctccgatcccttcctttcttggcatggatctatcaaagatgaggtggggggacgcggctcgcaacgtcgtcggcatcatcggcaatgtcatctccttcggcctcttcctcgcccccgtgccgacgttctggaggatctgcaagaggaaggacgtggaggagttcaaggcggacccgtacctggcgacgctgctcaactgcatgctctgggtgttctacggcatccccatcgtccacccaaacagcatccttgtcgtcaccatcaacggcatcggcctcgtcgtcgagggcacctacctcttcatcttcttcctctactcccccaacaagaagcgcctgaggatgttggctgtgttgggcgtggagttggtgttcatgctggccggtgattctgggcgtgctgctgggcgcgcacacgcacaagaagcgctccatgatc

SEQ ID NO: 410536 - DNA, 345 bp, Oryza sativa
  unsure (1)..(345): unsure at all n locations
tttcgatctcgtcttctctctctcgcangactgggtcgggatggcagcggagggggggaaggctgccgtggtgccggagtcggtgctgaagaagcggaagcgggatgagcattgggcggcggacaggaaggagaaggcgctcaccgagaagaagaaggccgtcgagagccgcatgctcatcttcgcccgcgccaagaagtacgcccaggagtacgacgcgcaggagaaggagcttgtgcagctcaagcgtgaggctctgatgaagggtgggttctacgtcagccctgaggccaaacttctgttttgtggtccggatacgtggtatcaatgccatgcaccccaaga

SEQ ID NO: 410537 - DNA, 395 bp, Oryza sativa
gtccagttatacacattaccaggtatcattggagtcccgtctcgttggacatgaggactgggtgtatactgtagaatggcagcctcctacgctactaactgatgatgaagctcatcagccaatgagcatattatctgcatccatggacaagatgatgatgatatggaagccagagaaaaataccggtctttggataaattcagtgactgttggtgagttaagtcactcagcactgggattctatggtggccattggcagcctgatggcaaatccatccttgcacatggatatgatggatcgtttcatatgtggggggatgttggactgggttctgaaaactggcagcctcagatagtcccatcttgtcattttgcacctgtatctgacttaacat

SEQ ID NO: 410538 - DNA, 453 bp, Oryza sativa
tctatctgcaccctcactccctcctctctcctgtgggctccaatcaacggcggggggggtaacagcagcaggatggcggattcgacggcgaggacggtgaaggacgtgaaccctcatgagttcgtcaagggctactccgcccacctcaagcgctccggcaagatggagctccctgagtgggttgacatcgtgaagactgcgaggttcaaggagctccctccttatgatccggactggtactacacgagggctgcctcgattgcaaggaagatctacctgaggcagggtattggtgtaggtggcttccagaagatctatggtggccgccagaggaatggctcacgtcccccgcacttctgcaagagcagcggcgctatctcacgcaacatccttcatcagctgcagaagatgggcatcatcgatgtccaccccaagggcggaagactcatcacc

SEQ ID NO: 410539 - DNA, 478 bp, Oryza sativa
gtctattcgccagccacacctctctccatcctctggttgtctctatggctcctctggggtgtcccccgacggagaggagagaaggcgaggagccgggggagatgggatcggactcgccgcccaagaaatggggcctcagggagcagcgcgaagcctacctccggtgggtctccctcgccgacgacgatggagatgggcgcgtgacggggaaagacgcgctcaagttcttcgccatgtcgaatctctcccgccccgagctgaagcaggtctgggcaatcgctgattccaagcgtcagggttatcttggattctcggagtttatgaccgcaatgtagctggtttctcttgcacaagctgggaatgagattagtcaggacacccttgcacatgcagatttggagacgttgctacctccgacatggaagggtctggacaaaaacctaaaaataattctatgagcaagagcaactctgatatt

SEQ ID NO: 410540 - DNA, 459 bp, Oryza sativa
tttgtttctggaaatgactacttctatattgggtgtgggtctgatactgttccggtgtcgatcacaaaggtagctttaaatgaggacagaacaaaagtagttagtttctcaataatttggtcatcctcatcagatgttgtacaatatagttctttcttcagtgcaccagaatttgttgagttttcaacatccagcaccggccagaaagcttatgcatatttctacccaccttcaaacccaaattttcaaggtttgccagacgaaaaacctccattgcttgtcaaaacacatggaggaccaacagcagaaacacgtggaattctggacctgagtgttcagtattggacaagtcgaggatgggcatatcttgatgttaactatgggggaagcactggttttgggagggagtatcgagagaggctattgaggaaatggggtatcgccgatgttgatgattgt

SEQ ID NO: 410541 - DNA, 360 bp, Oryza sativa
cttgcatggtgtactccaagccccggcggctcgggacggactagatccctcaggggggcgatgacttcaggcgagccgcgcggaacgccatcgaggctgggttcgacggcgtggagatccacggtgcgcacgggtacctcctggagcagttcatgaaggacagcgccaacgaccgcaccgacgagtacggtggcaggctcgagaaccgttgccgcttcgccgtcgaggtgatcgacgccgtcgtcgccgaggtgggagctcaacgtgtcggaatcagattatcgccgttcgtggacttcatggactgcttcgactccgacccggtgactctcgggtatacatggtgcagcaactcaacaa

SEQ ID NO: 410542 - DNA, 539 bp, Oryza sativa
  unsure (1)..(539): unsure at all n locations
cacgacgctcgctctctcctctctctccctcttccgccgccgcgcttggggaaggaaggagaaagcaagccatcggcccccgcctccgcctccgaagggacattgttgctagttggtgatggctgagcaggctaatcaaccgactgtccttcagaagttcggtggccagttccaccttggctccagcttttctgaaggtgtacgggctcgcaacatctgcccatctgtctcatcctatgacaggcgctttaccacaaggagctacatgacccagggccttgtcaatggtggcatcaacgtcccaatgatgtcgtcctctccaatttttgctaatgctccagctgagaaaggtggcaaaaacttcatgattgatttcctcatgggtggagtgtcagccgcagtttcaaagactgctgctgctccgattgagcgtgtgaagctgcttatccagaaccaggatgaaatgatcaaggctggtaggctctcagagccatacatgggtattggngactgcttcggacgcactatcaaggatgagg

SEQ ID NO: 410543 - DNA, 535 bp, Oryza sativa
ggcggccaaccttctctctcgcgcgctcctccctgctctaaaccctaacccaagcagccacagcaaccgcgtcagcccttcggccgtatctctccgctgccgccacggcctgacggcctccgttcgcgcctctctctccacggcagcgccgtccccgccgccgcggccggcggcggcggcggccgacggtcgggcgccgaagcgctgtttccggcgcggcgccgatgggcacctgtactgcgagggggtggtggtgggaggacgcgatgggggccggcggaagcggacccccttctacctctacagcaagcctcaggtggtgcggaacttcaccgcctaccgcgacgccctcgaggggctccgctccatcgatgggtacgccgtcaaggccaacaacaatctccgcgtgctgcagctcctgcgggagctcggctgcggcgccgtcctcgtcagcgggaacgagctccgtcttgccctacgggcaggattcgatcccactaggtgtatatttaatggaaatggtaagacattggaa

SEQ ID NO: 410544 - DNA, 189 bp, Oryza sativa
atcgtcatctatctcagctctcacagctcactgcatcaatggccgaggccaccatggcgctctcctccccggtgatggcccgcgcggagccgtcgaccttctccgcgctcttcggcgaggcgcggatcaccatgcgcaagaccgccgcgaagcccaagccggcggcgtcgtcggggagcccgtggtacg

SEQ ID NO: 410545 - DNA, 490 bp, Oryza sativa
  unsure (1)..(490): unsure at all n locations
atccccctcctcctccgccaccgccatggctcgcctcctcctccccctccccatcgccgccgccgccgcctcccgcctccgcctccccgtcctctcctcctccgtggcgcggcgtgaggcgctgctcttcggggggagggtggcggcggcgagggcgccggtgaggctggcgaggagaggggtgagcgccggggcggaggcgggcgggtcgtcgtcggccgccgcggcagcgcaggtgatcgggcaggacgaggcggtggagtgggtcaagaaggaccggaggcgcatgctccatgtcgtctaccgcgtcggcgacctcgacaagacgatcaagttttacaccgagtgcttgnggatgaagctgttgcgcaagcgcgacattccggaggagaggtataccaatgcttttctcgggtacgggcctgaggactcgcattttgttgtggagctcacttacaattatggtgtggaaagttatgatatcgggact

SEQ ID NO: 410546 - DNA, 552 bp, Oryza sativa
atgcttctcagctcacagcaaagcccaggcttgttgagcccgtctacctggtggagatccaggcccctgagaatgcccttggtggtatctatggtgttctgaaccagaagagaggacatgtgttcgaggagatgcagaggcctggtacccctctgtacaacatcaaggcttacctccctgtcatcgagtcctttgggttctcaagccagcttagggctgcgacatctggccaggccttcccccagtgtgtgttcgaccattgggacatgatgacctctgatcctcttgaagctggctcgcaggcttcaaccctggtgcaggatatccgcaagaggaagggtctcaaggagcagatgactcccctctccgatttcgaggacaagctctaaatttttggccgccgcatgtgttgtgccgttacccttacatgttctagttggtctactgctaagagaactgctttcgttgtcgtatttcaatttccttttgtcgaatgcatgtgtttcacatcaacaattctatgttcgcgtgctactgagaaactatttttac

SEQ ID NO: 410547 - DNA, 285 bp, Oryza sativa
attgaattgggccagtgctggcgagaagcgtggtgatacccctgactacaccatttttgtcggggatttggctgcagatgttacagactacctactacaagagacattcaggggccattacccttcggttaagggtgcaaaagttgtaactgacaaaatgacaatgcgttcacagggatctggccatgggtaccgtgatgaccatacagagcaggctcgtgcagtgactgagatgaatggaatgctgtgctcttccagaccttcccaaaaacgacttgcaaacat

SEQ ID NO: 410548 - DNA, 347 bp, Oryza sativa
  unsure (1)..(347): unsure at all n locations
gctgtttaattatgggattggtatccatctgcttcaggctgaagatcctgacagcctgtcagggaaaacagagatcaatcctaaagataatcacatctccttccagtgtgagagcatggtggcagtggagcggcggctgaaggagctaggcataccttacatacaacgatgtgtggaggaaggtggcatctatgtggaccaaatcttcttccacgatcccgatggcttcatgatcgagatctgcaactgcgacaacctgcccgtcgtccccctgggcgccgaccagccgctcgtcatggccgtctgcangagggctcgtcgtcatcaagcagcagcagcaggcgttc

SEQ ID NO: 410549 - DNA, 447 bp, Oryza sativa
gaagatctgggacttgataacatatatgtatatatatccgggtagaatataacaacacgagggaatgattagggaagaattaatgggtataggagtagctagctcggaggcggttctggacgaaggaacggtagaaggtgttgggcgtccagttgagggggatgacgtcgggtgccaccaacgtcttgccggagtcgctccggatgcggatggagaatggcgcccgcaggcggtggttggagtccagcctccacaccgacccccacgactcccgcatgggcgtccaccttcctcctccggcgccggcctgcttgaggtccacctgcgccacgtctccgtcgccgttctcgtactccaccagcaccgccaggtacacggggctggaccctatcttcacgtggaaacccaccttgaggcccgggaacttgcacggcacgcgcgcgaact

SEQ ID NO: 410550 - DNA, 448 bp, Oryza sativa
gcatcaggctgtaagcacaagtatcgaaatggttaggcggtgatgtaggagtagtagtgtactacctgctgctagtattagtggtggtgcaggggtgcaaaggcagcagcgcggtgcagggtgaaggtcggtggtacaacgagagcgaggccatcggtggtgcggcagcgtgggggaacgcgaaggcgacgtggtacgggcagccgaacggcgccggggcggtggacaacggcggggcgtgcgggttcaagaaggtgaaccagtacccgttcatggggatgacgtcgtgcgggaaccagccgctgtacaagggcggcaagggctgcggctcctgctaccgcgtcaggtgcaatcgaaaccccgactgctccggcaacgcccagaccgtcgccatcaccgacatgaactactatcccctctcccagtaccacttcgacctcagcggcat

SEQ ID NO: 410551 - DNA, 381 bp, Oryza sativa
acttgccagtaagctagctaactaactacgtggctatggcccccaccgtgatggcctcctcggccacctccgtggctccattccaagggctcaagtccaccgccggcctccccgtcagccgccgctccaccaactcgggcttcggcaacgtcagcaatggcggaaggatcaagtgcatgcaggtgtggccaattgagggcatcaagaagttcgagaccctatcgtacctgccaccactcaccgtggaggatcttttgaagcagatcgagtacctgcttcgatccaagtggctgcctggactagagttcagcgcggttgcacacgtctaccgtgagaaccacaggtctcccggatactacgatggcaggtattggaccatgt

SEQ ID NO: 410552 - DNA, 509 bp, Oryza sativa
  unsure (1)..(509): unsure at all n locations
cagcagctgagcttgaagcagcagagcgaggtagacatggccgccgccaccatggccctctcgtccccggcgctggccggcaaggccgccgcgaaggtgttcggcgaggggcgcatcaccatgcgcaagtcggcggcgaagcccaagcccgccgcgtcggggagcccgtggtacggcgccgaccgcgtgctctacctcggcccgctctccggcgagccgccgagctacctgaccggcgagttccccggcgactacgggtgggacaccgcggggctctccgccgacccggagacgttcgccaagaaccgggagctggaggtgatccactccaggtgggcgatgctcggcgcgctgggctgcgtgttcccggagctcctcgcccgcaacggcgtcaagttcggcgaggcggtgtggttcaaggcggngtcgcagatcttcagcgagggcgggctcgactacctcggcaacccgagcctgatccacgcgcagagcatcctcgccatctgggc

SEQ ID NO: 410553 - DNA, 294 bp, Oryza sativa
gacgaggaggcgtgcatgtacgcgctgcagctggcgtcgtcgtcgatcctgccgatgacgctcaagaacgccatcgagctgggcctgctcgagacgctgcagtccgccgccgtcgccggaggaggggggaaggcggcgctgctgacgccggcggaggtggccgacaagctgccgttcaaggcgaacccggcggcggtcgacatggcggaccgtatgctccgactgctcgccttctacaacgtcctcaggtgcgagatggaggaggtcgccaacgacaagctcataccgcctata

SEQ ID NO: 410554 - DNA, 436 bp, Oryza sativa
ggagaatatatgttgacctcaagaagaatgataccataactgtgaagctgagtaacaactacaatacatataactttggtggcaagaaaaagctggtcctttctactgcaacctggcttggtgggaagaatgattttctaggatttgcgtatgttatagtcggaggggtctgctttttcttggcatttgctttcaccttgctatacctcataaaaccaaggaaattgggtgatcacaactacttgtcctggaacagacatcctggaggccgttaagacgtccaaaacacttgtcgcataaaaatggctcatccggtgacatgtatcatgcacttaatgatgatatactgaaaattgtcagggagtgtaatcaggtctttggtttgacctagaccttcatgtacatcttagcataagaaccacgctgttttgtatca

SEQ ID NO: 410555 - DNA, 421 bp, Oryza sativa
tctgcgacgcagtacaatgcaggccctcgtaagccaagaggaccaaatgcacccaggagcggcggcccgccaccgaaggtgctctccatcgacgtgccagccatctccatgggcgagctgaacaacatcaccggacactttggacagagtgccttgataggagaaggttcgtacggtcgaatctacagggcggtgctgacctccggggagccggttgccataaaaaagcttgatcccagcgtgtcaagcgactctgaagcagacttctctgctcagctgtcaatggtttcgaggctcaagaacgagtatttgattcggctgatgggctactacctggatgcaaactgaagaatcctggtctaccagtttgccacgcacggcttcctgcatgacattctacacgggaagaagggcgtgaggg

SEQ ID NO: 410556 - DNA, 537 bp, Oryza sativa
cggacgcgtgggcacgcacgttgccaccacaggctacgcaaaattctctcccttcctcctccaccacctccactccgacgatcctcctcctgatcctgtgccggccggcgatggcgtaccggttgctggagctcacgctggtctccgcgagcgacctcaagaaggtcactctcttctcgcgcatgcatgtctacgccgtcgcctccatctccgggagcaacgtccccatgcccatgcacggcacccacgccgaccgcaacggcggcagcaaccccgcgtggaacaccgtgctccacttccccgtccccgcccgcttcgacacccgcggcctcgccctccacgtccagctccgcgcccggcgctccttcggcggccaccgcgacgtcggggacgtgttcgtgcccctcgacgacctcctcgccggcgcgcacgacggcggcgagccgaggccggctagctaccaggtgcgccgccccatggtccgccgcgcgcacggtacgctctacttctgctacaggttcaccgacgtcaagcatc

SEQ ID NO: 410557 - DNA, 409 bp, Oryza sativa
  unsure (1)..(409): unsure at all n locations
gctagctaactaagcttaccacactcacatactcctatatattttggcacgcattgattacctgctagctccttgagcaatatcaatatggctcagccgacttggtcagcaaggcgcgtcactgccgccctggtcgtgatggtggtggtgtngtctccccgacgggctcctcccgctgccgtccctggaggaggtcgggtacaaccgcgccgccgggttcgtgtggctccggcagacccatgcgggcggagccacccacacgtttgacaccatctggaagcatgtgtggtacgtcggcgaggtgactgcgttcgtggagcaggggcggatgcacggcgtcgtcggggtgaagagcaaggagctcctcatctgggtctccatcttcgagatcgttctcagcccctccggc

SEQ ID NO: 410558 - DNA, 459 bp, Oryza sativa
ctctccaaggaccactacgtcatcaacggcaccgtgcgcgacctcggtgagggcaagaacgcccatctgaaggcgctggagaacgccggcgagaggctgcggctgttcaaggccgacgtgctcgactacggcagcgtcgcggcggcgatcgccggctgcgacggcgtcttccatgtcgccagccctgtcacctccggccgacccaccaatcctgaggtagatatcatcgctacggctgtaactgggacactgaatgtgttgagagctagccacgaagcaaaagtgaagcgagttgtggtggtttcttcagttgtcgcagtgttcaataatcccaactggccaacgggtgagcccttcaacgaagacagctggtcagatgaggagacctgcaggaagaatgaggaagtggtacccctattacctttccaaaacactggcagagcgtgaggcttttgagta

SEQ ID NO: 410559 - DNA, 478 bp, Oryza sativa
  unsure (1)..(478): unsure at all n locations
tggacgcgtgggcgacggctcgagcttaaaaccctagagccgctcctcctcctcctcctcgcctaccccgaaacccaaatcccccccaaggcggacgcgcccgcaaagggtcgagcgcgctcatggctcgcgtgtacgtggggaacctggatccgcgcgtgacggcgcgggagatcgaggacgagttccgcgtgtttggggttctgaggagtgtatgggttgctagaaaaccaccaggttttgcctttattgactttgatgaccgcagggatgcagaagatgcaattcgtgatttagatggcaagaatggatggangggttgtagctgtcaaccaaagctggtagtggtcgtggccgagatcgttccggtggttctgacatgaagtgctatgaatgtggcgaacctggtcattttgcacgtgaatgccgcttacggattggttctggaggccttggcagtggaagacgccgcagccgc

SEQ ID NO: 410560 - DNA, 525 bp, Oryza sativa
  unsure (1)..(525): unsure at all n locations
ttcacgaattgacagtgctaagggtgttgctcttcttgctgtggtaattcttatcctctcaaatgtggcctcaaatgttcccacagtactactgctcggcacaagagtggctgcatcagctgctgcaatctctcacgattcagagaggaaggcctggcttatcctagcgtgggtcagcaccgttgccgggaacctcacactactgggctcggctgcgaacctcatcgtctgcgagcaggctagaagagctcagttcttcggctacaacctctccttctggagccacctccggttcggggtgccgtcgaccatcgtcgtcacggcgatcgggctgctcatcgtcaccagttactgaagaagaagaagaagaagaagaagctgacagcagcataaggtagcgtacaagaaggagatagatgaacgaaccctttggatcaataagagagagtacatgtaaaatttctaaaataggctngtcctgtaaaactcgtgtgtgttttgtgtgtatctatgccagctgctgcg

SEQ ID NO: 410561 - DNA, 558 bp, Oryza sativa
tcaactccgggcctccggcaagccaagaaacccccaacccaactccggcgatggcgtcgcagctggtggaggagcaccggtcgggcgcggaggtccacacggggcacgagctctgcgagcggaaggcccgggagctgctggtggagctcggcctccccgacgggctcctcccgctgccgtccctggaggaggtcgggtacaaccgcgccgccgggttcgtgtggctccggcagacccaggcgggcggcgccacccacacgttcgacaccatcgggaagcaggtgtggtacgcgggcgaggtgacggcgttcgtggagcaggggcggatgcacggcgtcgccggggtgaagagcaaggagctcctcatctgggtctccatctccgagatcgtgctcagcccctccggcaccaagctcgtcttccgcaccccggccggactcggccgcgccctccccgtcaccgtcttccagctcaacccggcgccctcgagccggagaagaggacgccgtcgtcgtcgacaggccgaccccgcgcaccactgatccagaaacatggcgt

SEQ ID NO: 410562 - DNA, 531 bp, Oryza sativa
atcacactcacacaacacaaccctccccaaaacctcccgaagagagcaagatgttcggcttcgggcaccacggccaccatggccaagaccagccgccccagcaccacggcggcggcggcggcggcgcgcaccagcccaccttcaagatcttctgccgcgccgacgaggggtactgcgtcgccgtgcgcgaggggaacgtcgtcctcgccccgaccaacccgcgcgacgagcaccagcactggtacaaggacatgcgcttcagcgccaagatcaaggacgaggagggcaacccggcgttcgcgctcgtcaacaaggccaccggcctcgccatcaagcactccctcggccagggccacccggtgaagctggcgccgttcaacccggagtacccggacgagtcggtgctgtggacggagagcggcgacgtgggcaagagcttccgctgcatccgcatgctgaacaacatccgcctcaacttcgacgcgttccacggcgaccaggaccacggcggcgtgcacgacggcaccacca

SEQ ID NO: 410563 - DNA, 384 bp, Oryza sativa
gttgttcttttagatggaggaccgctttcacagaaaaggagtattgaattcacatctgatcctctcgcttcaagcacatgggaggaggtgtcagaaaagaatacgctgatcacaccagtgcagtgtaaattcatctggaggcaattcaatgcagagacagagtatgctgttgcacaagcaatttctatgcaggaagcacacagacgtagcaataactggctgccacctgcatggactgttttgcttctcgcaattttaggttacaacgaatttatattccttctaaggaaccctttatatctgctggggctcttcgtcgccttcgtagtattctatgctgcatggttgtaatatgacatctcagctctatttttgccttggcac

SEQ ID NO: 410564 - DNA, 368 bp, Oryza sativa
tgctattgtaaatgactttaagagtgttgagggagatagagctctggggcttcagtcactcccggttgcttttggtatggaaactgcaaagtggatatgtgtaggagcgattgacataactcaattatccgttgcaggctaccttttcagttccggcaagccttattatgccctggcactgctaggactcacaattcctcaggtggtctttcagttccaatacttcctcaaggaccctgtgaagtatgacgtctaataccaggcaagcgcgcaaccgttcttcgtcttgggccttttggtgaccgcccttgcaaccagtcactgatgaaagcagcatttgccctggactgtgattctgtgacagttaa

SEQ ID NO: 410565 - DNA, 558 bp, Oryza sativa
ttacaaaggagctcaaacgtgcccttttgacagctctgaggtgcatcgatttgaattctgagaagagaccaaggatggaccaggtggtccggatgttggactctaatgaacccattcctcaagaggaaagaagacaacgacagaaccacatctctaataattcagaaaccgagccattaagaggcaagagcagcagcggcaagagtgatgcccctgaaaatgagatgaggccacctcggtataagaatcgatcatttccccccaagtgaaaagtgaaaagcatactagagtggaagttatggagttacctgcgatgctctcaatacataatgaattggtcaattgttttgtttctcttttattatttctcttcacctgatcaatttttttgttccctgggaggctgggggagcggccattgctgttacacatatttgtatatttcttgaaacatgtacagtgctggtgtgtgatacatgtacagtagtttgtgtgtgatagatagttgaaggatgcacatgagagcatataagctattatttagaagctagtggctgg

SEQ ID NO: 410566 - DNA, 560 bp, Oryza sativa
  unsure (1)..(560): unsure at all n locations
ctagatttgatctaatctttattgttaaagatgtcagaatgtatgatcaagacaagcgaattgcaagccacatcattaaggtgcatgccagtggtgctgctgcttcatccaagaatacagatgctagtgaaggagagaattggctaaaaaggtacattgagtattgccgtgttacttgtaaaccacgactctcagaaaaggcagcagagatgcttcagaacaaatatgtggagattagacagaaaatgagacaacaagctcatgaaacagggagggctgcagctatacccatcactgtgcggcagcttgaagccattatacgtttgagtgaatctcttgcaaagatgagattgacaagtgtggctacaccagagcatgttgaagaggcatttaggctgttcaatgtctccactgttgatgccgcaggatctggaatcaatgagcatttgaacctatcaccagatattgcaaatgagatcaagcangctgaggcacatataaagagaaggatgggaattggagccacatatacgagcgacgcctgatcgatgaactaaata

SEQ ID NO: 410567 - DNA, 388 bp, Oryza sativa
gtcggcctgggcatggccgctcgtcttcctggtctcgtgctgctgttcttggacccagcggcgaatcttggttgctgcgaccactgacgccaatgatgttactgtcctcaatgcgctattcaccagcctcaattcgccggggcagctgcgcggttggcaggtgaatggcggtgacccatgtggcgcctcatggcagggcattacctgctctggatcatcagtcacagcaattaaattgccgagcttggggctttcggggaatctggcctacaatatgaacaccatggagtccctagttgagcttgacatgagccaaaataatcttgggggtggccgaaatattcaatacatgctctcaaataagaagcttgtaaggcttaatcttgct

SEQ ID NO: 410568 - DNA, 482 bp, Oryza sativa
  unsure (1)..(482): unsure at all n locations
gtgaatcgaaatgcctatataatgatcgccattaccgggaaagggttcttcaaagcttctgttcttgcaactggtttgatcatgaataacatactgcgcattggaaaagttaacgtcattggagatgtcatcctctttctggggaagctctgtgtgagcttgttctgtgcgctctttgcgttccttatgttagacacacacaaatacaagtccgcacataacaagatatcatctcctcttgttcctgtagtggtatcatgggcccttggtttcatagttgccaagcttttcttccaggtcgtcgagatgtcgattgacaccataatcctctcattctgccaagatgcagaagagcaccaagggaacgcgcagtacgctccccctctccttatggagacactggatgaacagagtgaacttcaaagactaactcanggaccttgatcttttctttatttttttttcctctggcaagtagaatt

SEQ ID NO: 410569 - DNA, 294 bp, Oryza sativa
  unsure (1)..(294): unsure at all n locations
agggagacggtgccgtggggcccgagcatcgtgtgcagcacgcctgcggcgatcgagtgggtggagcagtggaaggcgtcncacgacccatccggtcggctgatcgcctcccacaatttcgtcttcgcctccgtcaaccacaccaaccacgcaatcgccagcgtcaacggctacagcaacggcttggccaatgatgcctattcgatggcagccaacgggacaaacggcgtcatcctgtttgagctcattgatgcatagaatgaggagcttcaagcgtaacgcttcaagcttgct

SEQ ID NO: 410570 - DNA, 388 bp, Oryza sativa
tgtctttctttccctcctctgctcatcctctccccagatctccagccccaggagctccggagggtttccaatggcggtgaaggtttatgtcgtgtactactctatgtatggacatgttgctaaactagctgaagagatcaagaagggtgcttcatctattgaaggtgttgaggctaaaatatggcaggttcctgaaactctacatgaggaagtacttggaaagatgggcgcgcctactaagccagatgtgccaacgatcacaccacaggaacttactgaggctgatggaatcctgtttgggtttcctacaaggtttgggatgatggctgcgcaagatgaaagcattctttgatgcaaccggtggtctgtggagtgagcagagtcttgc

SEQ ID NO: 410571 - DNA, 367 bp, Oryza sativa
cccgcatctccctcctcgcctctcgctgccggccgcgcttcgccaagatgaacaaggagaggcttatgaagatggccggcgccgtccgcaccggcgggaaaggcaccgtgcgcaggaagaagaaggccgtccacaagacggggaccactgacgacaagaggctgcagagcacgctcaagagagtaggtgtcaacaccatccccgcgatcgaggaggtcaacatcttcaaggatgatctcgtcatccagttcgtcaatcccaaagtgcaagcttccatcgccgcaaacacatgggtggtcagtggcttcacacagaccaagaagcttgatgatgttcctccctgagatcatgaaccaattgtctcctg

SEQ ID NO: 410572 - DNA, 509 bp, Oryza sativa
  unsure (1)..(509): unsure at all n locations
tatagggaagaaatacaaaggattaaatcggatttggagaaggaaaaggctttctttgaagaggagaaacgggaagcaattcaagcccaacaagatctagcaataacacaagcagatagagatgagttgcttactctgcagatgaaacttaaagaagaaattgacagcctcagagcccaaaaaagggaactcatggctgatgcagataggctgcaagccgaaaaggaaaggtttgagattgaatgggagctgattgatgaaaagaaagaggagctacaaaaggaagcgatcagaattgctgaagaacgaagagcaataactgagtatctgaagaatgaatctgatatcatcaaacaggagaaggataatctccgtgttcagttcaaaagtaattcagaaacactctctcgtgaacacaaagagttcatgagtaagatgcagcangaacatgcaagttggctgagtaagattcaacatgaaaggcatgatctgaagagagacattgatat

SEQ ID NO: 410573 - DNA, 505 bp, Oryza sativa
tttggtgaaggaagtaacaggcttggtgtgcggacaaccgttgctattatttttgcacggctcatcttggttcctcttgctggggttggcatcattgtgttggttgataaacttggtttcattcctaaagatgacaaaatgttcaagtttgtcttgctactgcagcattctatgcccacatctgtgctgtcaggtgctgttgcaaacctgaggggctgtggaaaagaatctgctgctatcttgttctgggtgcacatctttgctgtgttctccatggcaggatggattattttgtatttgagcttactcttctaagtacgtcataccctgatgctatactgcacaggaacgtccataagatcaaaatatcaccagatttaccagaaaaagattgttccatgacatgtacattagccagttaaccatggcgacagcctgaaggtactagtcgtatcagttttcaatttagatatggttctcttgccctagtgcccaatcgcttaag

SEQ ID NO: 410574 - DNA, 530 bp, Oryza sativa
  unsure (1)..(530): unsure at all n locations
tcaaccagcagctgcggcggcgcgatcacacgaagaggaggcggagcagccggagccacctacgccgccgccgacaccatgggtatctcgcgtgactccatgcacaagcgccgggccaccggtgggaagcagaaagcgtggaggaagaagcgaaagtatgagcttgggcgccagccggcaaacaccaagttgtcgagcaacaagacagtgaggagggtccgtgttcgcggaggaaatctgaagtggagggctcttcgcctggatactggtaactattcttggggaagtgaggctgtcactcgcaagacccgtattcttgatgtggtctacaatgcgtcaaacaatgagcttgtgaggacccagacccttgtgaagagtgccattgtgcaagttgatgctgccccattcaagcagagggatctcactcactatggcgtcgagatcggtaggaagaagaaagctnctgctgctaagaggatgctgctgagggacatgagtgtgaggctgccacggacgaagcaaaaagagca

SEQ ID NO: 410575 - DNA, 420 bp, Oryza sativa
tcattacctggccgtatagggaagcaatgtcgagagaggtggcacaatcatctaaatccagaaataaggaaagatgcttggactactgaggaggaacaggcactcataaatgctcatcggatttatgggaataaatgggcagagatagcaaaagttcttcctggaaggactgataattctataaagaatcattggaatagttctctcagaaagaagcaagatatgtacaataccagcaataatatggtagttccgaaactgcttgttcatgataagttcaaggataaaccaaagctgatggctatggagggtcatcttgatttgaacaaggcacccattatcaattcaaaagaccaacctggaacagcttatcggtctaattgctcacggatactatctcgctcctcataccaactgctc

SEQ ID NO: 410576 - DNA, 337 bp, Oryza sativa
gttttctttttcttgttgggtttctcttcctcctgctcgagtttgatctcttgattcgtgaggagtgtggcgaagatgagcgcgagtttcctcgagatccagccttcggagctctcattcccctttgaactactgaagcagagctcatgctccatgcaactcaccaataagaccgaccattatgttgcatttaaggtcaaaacaaccaacccaaagcaatactgtgtgcgccctaatattggcgtcgtattgccggggtctacatgtgatgttacagtgacgatgcaagcacagagggaggcacctccggatctgcagcgcatggcttagttccctt

SEQ ID NO: 410577 - DNA, 534 bp, Oryza sativa
  unsure (1)..(534): unsure at all n locations
cccccagcagccgccgccgcagcctcctctcggctgctcccatcctctccttcgagttagcttcctccttattcaaccatgggtaaggagaagacgcacatcaacattgtggtcattggccacgtcgactccggcaagtcgaccaccacgggccatctgatctacaagcttggaggtatcgacaagcgtgtgattgagaggttcgagaaggaagccgctgagatgaacaagaggtccttcaagtacgcgtgggtgcttgataagctcaaggccgagcgtgagagaggtatcaccatcgatatcgccctgtggaagttcgagaccaccaagtactactgcacggtcattgatgcccctggtcaccgtgacttcatcaagaacatgatcacgggtacctcccaggctgactgtgccgtgctcatcattgactccaccactggtggttttgaggctggtatctccaggatggccagacccgtgagcacgctcttcttgctttcactctnggagtgaagcagatgatctgctgctgca

SEQ ID NO: 410578 - DNA, 548 bp, Oryza sativa
ttatccccaaattccccgatccccgcagccgctcctgcgactcgtaggtctcgtcaagtcggcggcgacgactttgatctctattcaagatgcagatctttgtgaagactctcactggcaagaccataacccttgaggttgagtcctcggataccattgacaatgtaaaggccaagatccaggacaaggagggaatcccaccggaccagcagcgtctcatcttcgctggcaagcagcttgaagatgggcgcacgcttgctgactacaacatccagaaggaatccaccctccaccttgtcctccgcctccggggaggcatgcaaatctttgtcaagaccttgactggcaagactatcacccttgaggttgagtcttctgatactattgacaacgttaaggcaaagatccaggacaaggaagggattcccccggaccagcagcgtctgatctttgctggcaagcagctcgaggatggtaggacccttgctgactacaacatccagaaggagtccacccttcaccttgttctcggctaagggaggaatgca

SEQ ID NO: 410579 - DNA, 322 bp, Oryza sativa
tgtgatgtggattcaattaaggctgtcatggccaaatccaatgtggtcattaacctaataggacgcgagtatgaaacaagaaactatggatttgacgaagtaaatcatcatatggctgaacaacttgcaatgatttcaaaggagcatgggggtatcatgagatttatccaggtttcttccctaggagcatcggcctcttctccttctagaatgctgagggccaaggctgctggggaggaatctgtgttgaaagaatttcctgtggctacatttatgaggcctgctactatgatttggacagaagatcgtattttgtatagat

SEQ ID NO: 410580 - DNA, 479 bp, Oryza sativa
ttcaaacacaaccaatccacctccgattccttcatccgccgccaccgccgccgtcgccgtcgccgggatcccgcccgcaaccgcaccgcggcggctccttcccttcctccaggtaccaaccagattgtgggatcttcctagagagcgctgttgtcctgcacgagtagaatagcagatggcgaggataaagccgaagcaattgctaattcaaagcaagacgaagaaggccccaacacggatcagttactccactatcgttacttggaacctaattgttatcttggttgcgctatccctctatgctacctacaggcattggcatcacaggccaatgctcgagactgaaatggatctccctcgtgctgagcatgttggaagatctgaggattccacgaagactagtataccaagctatgcggttattgatactgccaaaggctcaattactatcgaaatttacaaagatgcttctgctgatg

SEQ ID NO: 410581 - DNA, 456 bp, Oryza sativa
tttaatgttcagcagggaacctgcctcatggctaaggacagtccactggcagtgaaggctctgaagcgtaccctggcaaagccaaacttgtctttcttgtttggcaacggcaagaagagcagcgcttgagcaatttcagaaccgtatcagaccgtccagagccagcgtggttgcatcatcaaatgatcagctggtaactgacgaagacgattgcgcagctcggcggcgaaccctgcgcactaagtatatctgcttttataatagatttctcgtgtacataaaatctaaaaaaacgggttcagttggttacagaactgccaaatttgcttctgaatgtatatgtaaaattcagctaggtttgctcctaagctcctagatgccagttcgacggaactgcaaattgatattggaacaagataaggtcattgccatattaatccatcattcatgtattcc

SEQ ID NO: 410582 - DNA, 435 bp, Oryza sativa
tgacgattagctatctagcttagctactcgatcatcagatcatcgatcatccgacgatcaaatcagtaatcttgaatatggcggctttgaacggtaaggtggtggtggcggtgatggtggtggcgatggtggtggcggcgccgggagcgtcggcggcgatcacgtgcggtcaggtgggatcggcgatcgcgccgagcatttcgtacgtgacggggaggagtgggctgacgcagggatgctgcaacggcgtcaaggggctgaacaacgccgtccgtaccaccgtcgaccgtcaggcggcctgtcgttgccttaagagcctcgtcggcagcatcaagtcgcttaaccttggcaccggttgtcggcattccatgttagagcggcgtttacgttggcttctctatgtgttttttccccggttgtaactaggtctgttaa

SEQ ID NO: 410583 - DNA, 466 bp, Oryza sativa
ttctccaccttgtgctcaggctcaggggtggtatgcagatcttcgtcaagaccctgaccggcaagaccatcacgcttgaggtcgagtcctcggacacgatcgacaacgtgaaggccaagatccaggacaaggagggtatccccccggaccagcagcgcctcatcttcgccggcaagcagctggaggatggccgcaccttggctgactacaacatccagaaggagtccacccttcacctggttctcaggctcaggggtgggatgcagatcttcgtgaagaccctgactggcaagaccattacccttgaggttgagtcgtccgacactattgacaacgtgaaggcgaagatccaggacaaggagggcatccttccggaccagcagcgtctgatctttgctggttagcagcttgaggatggccgcacccttgcggattacaacatccagaagggggtcacactccacct

SEQ ID NO: 410584 - DNA, 524 bp, Oryza sativa
  unsure (1)..(524): unsure at all n locations
cattatcgactggggtctcgagctggggtggatctacgggtcgatcacggaggacatcctaacggggttcaagatgcactgccgcgggtggaggtcggtgtactgcatgccgaagagggcggcgttcaaggggtcagcgccgatcaacctatctgaccgtctcaaccaggtgctccggtgggcgctcggctccgtcgagatcttcttcagccggcacagcccgctcctctacggctacaagaacggcaacctcaagtggctcgagcgcttctcctacatcaacaccaccatctaccccttcacctctctccccctcctcgcctactgcaccctacccgccgtctgcctcctcaccggcaagttcatcatgcctccgattagcacgtttgcgagtttgttcttcatcgcgctcttcatctccatcttcgcgacgggcatcctggagatgaggtggagcggngtgagcatctaggagtggtggagggacgagtagttctgggtcatcggcggcgtgtcggcgcacc

SEQ ID NO: 410585 - DNA, 519 bp, Oryza sativa
ctcccctccccttccgcccgcatcgccgccgcgccgcgccgcgtgcgaatctccggcgaggatcgagggcgcctctggtcccgtctggtggtcggtcagccatgtcgctccgcgtgctgaacccgaacgcggaggtgctcaacaagtcggcggcgctgcacatgaacatcaacgccgccaagggcctccaggacgtgctcaagaccaaccttggccccaagggcaccatcaagatgcttgtgggtggagctggcgacatcaagctgaccaaggatgggaacactctcttgaaggaaatgcaaatccagaacccaacagctatcatgatcgcaaggaccgcggttgcacaggacgataccagcggtgatggcacaacctccactgtgctttttattggggagcttatgaagcaatctgagcggtgcattgatgaaggcactcatccacgttttttggttgatggttttgatgttgcccagagagcaactcttgaatttctcgagaagttcaagacatcag

SEQ ID NO: 410586 - DNA, 573 bp, Oryza sativa
catttcttgagctcaatcagcaacaacatctatctccttcttgcttagttaagtccttcgccctcccaagaagaagaagatgtcttgctgcggcggcaactgcggctgcggcagcggctgccagtgcggcggcggctgcggcggatgcaagatgttccctgatgtggaggccacagccaccaccaagaccttcgtcctcgctgctccatccaacaaggcgagctctggaggaatggagatggcggtggagagcggcgagaacggcggctgcggctgcaacacctgcaagtgtggcaccagctgcagcggctgctcctgctgctcctgcaactgaatctatcgtcgtcgtcgcccggctgcatgaggatttatcgtatggatgctgctactgtcgatcagagctttgatcgaggccttaatttgcttgcattagtacccagcttatatgtaggcaggccttgccttttgctctgacgcctaaataaaaccgtcgtcgtcgttgtcagtgtgtgcgtgtgtcgatcaatgtttgatggatccctagctagcttggatggatcatctatcatcatg

SEQ ID NO: 410587 - DNA, 520 bp, Oryza sativa
aattaaatatccttgctcatcctgcagccttaattatatatattacatatggtacatacactgggaagaaaaataaaaaaaataactccttgattaattcccccatttgggtcaagcccaaccacccaacccaaaagcggccacgaacacaacaagatacattttgctactgctcctccgacctccaatcgttcgatccgagcccatgcacgcgcccgatcgatgcaacagctagcgatcaaacacgaagcgcgcatgcaagcgaaacccaactctgtgtgtcagatccatggcgagcgagagcggggttgattgctcataggccgagggcgccgagcggcgtcttgccctggccggcctcgaagtagaagatgagcatggcgagcatggcgaggcgggcgtgcttgatctcggcgagcttgagccggtcgagcttgtcggtgtccgggatgtagacgccgaccctggtctcgccgccgaggccgagcgggtcgaagaacttgccgccggggtagccctg

SEQ ID NO: 410588 - DNA, 459 bp, Oryza sativa
tccgctggggctgggcaaggacccggcgttcctcaagtggtacagggaggcggagctgatccacgggcggtgggcgatggcggcggtgctggggatcttcgtcgggcaggcgtggagcggcgtgccgtggttcgaggccggcgcgcagccggaggccatcgcgcccttctccttcggctccctcctcgggacgcagctgctgctcatgggctgggtagagtccaagcggtgggtcgacttcttcaacccggactcgcaggcggtggtagtgggccacgccgtggtcgcgcaccgacgagaacttctgcaacgccaccggcgagcagggctaccccggcggcaagttcttcgacccgctcggcctcggcggcgagaccagggacggcgtctacattctggacaccgacatgcttgaccggcttaagcttgccgagatcaagcacgcccgccttgccatgc

SEQ ID NO: 410589 - DNA, 354 bp, Oryza sativa
tttatgaggacgccttctttgcggattacgccgaggcccacctcaagctctctgaactgggatttgctgaggaataagaagcctttagagagcgggatatccgcaaaagattaatgccgatttgtattttgcgccttagagtcagtacgatcaagactgtcgtggcggttgtaataaaaattagtgtgctttgggccatctttttatgtgattccaattgtctttctcttcattcttgctttgatgctctttgtctggacctctagaacgccgtattgtactgtggagtttcaaagataccaaactatttgctgtcaagataactatggattgaattccccttgatggatgaac

SEQ ID NO: 410590 - DNA, 370 bp, Oryza sativa
cttgatagaaaaagaaagaaattaaaaagaagatcatcgtgagattcgcaagtaccagaagagtactgagcttttgatcaggaagctgcccttccagaggcttgttagggaaattgcacaggacttcaagaccgatctgcgtttccagagccatgctgtccttgccctccaggaggctgcggaggcataccttgttggtctcttcgaggacaccaacctgtgcgctattcatgccaagcgtgtgaccatcatgcctaaggacattcagctggctaggaggattcgtggtgagagggcttaaattcccctcggcgactcctttgacaaatgaagcatgcgtcgtagtgttagtagtgggtttaatcttttg

SEQ ID NO: 410591 - DNA, 565 bp, Oryza sativa
gcgatctccagcctacatgccaccacctccctgcactccccatgcaccaccaacacaagcttcaggcagaatcaggtcatcttcttcaccaccagaagcaacaggaggggtagcacaaggtacggaggagcaagaacctttcaggtttcatgctcagtcgacaagccagtggtgattggccttgcagcagactcaggatgcgggaagagcacctttatgcgccggctcaccagtgtgtttggtggtgctgcagagccacccaagggtggcaacccagactcaaacacactcatcagtgacacgacaacggtgatatgcctcgatgactaccattccttggacaggactggcaggaaggagaaaggtgtgactgccctggaccctagggcaaacgattttgatctcatgtatgagcaggtgaaggcaatcaaagaaggcaaggcaattgagaagccaatctacaaccatgttactggtctcctagacccaccggagcttatccagccccccagatttttgtcattgagggcttacatcccatgtttgatgaacgtgtgagggacct

SEQ ID NO: 410592 - DNA, 360 bp, Oryza sativa
acttcttcatggtcggattcgccccgctgacatcacgtggctcccagcagtaccgtgcccttactgttcctgagctcacacagcagatgtgggatgccaagaacatgatgtgcgctgctgatcctcgccatggccgttacctcaccgcctctgccatgttccgtggaaagatgagcaccaaggaggttgatgagcagatgatcaatgtccagaacaagaactcatcctacttcgtcgagtggatccccaacaatgtgaagtccagtgtctgtgacattccaccgagaggcctttccatggcatcgaccttcattggcaactcaacattcattcaggagatgcttcggtgggtgagcgagc

SEQ ID NO: 410593 - DNA, 236 bp, Oryza sativa
cctccctccaagatggacgccgccgtcgaccgcctgaaggatgggttcgccaagttcaagaccgagttctatgacaagaagccggagctcttcgagccgctcaaggccggccaggcacccaagtacatggtgttctcgtgcgccgactctcgcgtgtgcccgtcggagacaatgggcctggagcccggagaggtcttcaccgtccgcaacattaccatcacggttctagcttactg

SEQ ID NO: 410594 - DNA, 152 bp, Oryza sativa
ttcgatagaaaaagaaagaaattaaaaagaaaatgcacggcgcgtgagcttgcagagacagcaatggtgagagttgctgccgccgcggcggtgctcgtgctggcggcggcggcggcgtcggaggctcgaggagaatgggagggagcatagcc

SEQ ID NO: 410595 - DNA, 355 bp, Oryza sativa
  unsure (1)..(355): unsure at all n locations
acaagccacagctctctcacacgagagctcgagtctctctcgtcggcgacaatggcgagcggcggcggcggaggaggggagggggagacggtgctggtcaccggcgcgagcggcttcatcggctcgtgtctcgttcgccgcctcctcgcccgcggctactccgtccacgccgccgtcctcaaccccgatgacaaggccgagacggaccacctccacgcgctcgccgccgccgcggtngttnagggcctccgccttcgcgtgttcccgggcgacctgctggacggcgcctgccttctcgtcgtcgtgcggngctgcttcggcgtcttccaccttcgctccctttgcattgtggacc

SEQ ID NO: 410596 - DNA, 514 bp, Oryza sativa
  unsure (1)..(514): unsure at all n locations
ctctgaacgtggatgtcaatgagttccagaccaaccttgtgccctacccaaggatccacttcatgctttcgtcctacgctccagtgatctctgcggagaaggcctaccatgagcaactctctgttgccgagatcaccaacagtgccttcgagccatcctccatgatggccaagtgcgaccctcgccacggcaagtacatggcctgctgcctcatgtaccgcggcgatgtcgtgcccaaggacgtgaacgccgccgtcgccaccatcaagaccaagcgcaccatccagttcgtggactggtgcccgacggggttcaagtgcggcatcaactaccagccgcccagcgtcgtccccagcggcgacctcgccaaggtgcagagggccgtgtgcatgatctccaactccaccagcgtcgtggaggtgttctcccgcatcgaccacaagttcgacctcatgtactccaagcgcgccttcgtccactggtacgtnggtgagggcatggaggagggtgagtt

SEQ ID NO: 410597 - DNA, 550 bp, Oryza sativa
gtgattagtggccaacatagcacgatgaagatcttattggagcatcatgctgatcctaacagggttttcaatcttgatggtaccccgttgattatgtccatagtttctggatcattggaatgcgtgaagctattaatcaaagttggtgctgacatgaattttagagactccaatggcgttacttgtgtaatggttgcagcaaatcatggctcttctgtcatcatgaagtgcttactagatgctggtgctaatccaaacattccagatgaagtgagtaatattctttcctctatagcctgtgactggatgttgttgcgacaggctgtatggtcttgagagattaggataatctactcacttattctttttatcaactgtaccaatggataagtctgcatgagaagaaggcagtgcttctatgctgctctaaaggaatgcaattgttgaaatgtcatctcaaaggaaattgctcacattccactccaaagggtggatatatggttggattttcaatactgtttgaagcttcttgatataggaatgatgagaa

SEQ ID NO: 410598 - DNA, 550 bp, Oryza sativa
ggactgtcagaaattggattgctgtcatcaaccaaagccattggtctgccaaccatcattctcatcaggccgtttcatgtggagtaggggtttctcttctcaggccggtgcaagttctggtgataagcaggatgagttggaggaagggttttctgatctggaggttccaccagaagctcataaaaaggatttagatttgacatccgatgagagttctgatgaggacaccattgatgcaattggcttgtctgaagtggaggctgatgcaaaacctgaggagccgataaagaagtcacaatccactcttcttaaggctttgctggaatctccaagggttgatgtcgctggagcattgaaaaaatggcttaatgatggcaatacattggatagaagtgagctcttttatgtccttcttattcttcggaggcggaagctctacatcaaagccttgcagcttctggagtatgttgaagaatccaaactaattgatcttggagaacgtgattatgcttcacgcgtggatttggtagctaaaacccacagtatttac

SEQ ID NO: 410599 - DNA, 416 bp, Oryza sativa
cttttcggccgctgcttcacaccatccgcatcctccccgctcgccgccgcgccgctccaagtttctttcgtgaggagttgatcgaggagttggggttgagatgggccagatccagtactccgagaagtactacgacgacacctacgagtacaggcacgtcgaccttccgccggaggtcgccaagctcctccccaagaatcgccttctctccgagaacgagtggcgcgcgatcggagtgcagcagagccgcgggtgggtgcactacgcgatccaccggccggagccgcacataatgctgttccgccggccgctcaacttccagcagcaagaggaggcagccgcggatgcagcggagcagatgctgaccaagcgactgccccctccacacggggatggcggcgaccccgggttgaaat

SEQ ID NO: 410600 - DNA, 565 bp, Oryza sativa
ttcgagcaaagaaggagagagcttggtgagcggcagagatggccccctccgtgatggcgtcgtcggccaccaccgtcgctcccttccaggggctcaagtccaccgccggcatgcccgtcgcccgccgctccggcaactccagcttcggcaacgtcagcaatggcggcaggatcaggtgcatgcaggtgtggccgattgagggcatcaagaagttcgagaccctctcctacctgccaccgctcaccgtggaggacctcctgaagcagatcgagtacctgctccgttccaagtgggtgccctgcctcgagttcagcaaggtcggattcgtctaccgtgagaaccacagatcccccggatactacgatggcaggtactggaccatgtggaagctgcccatgttcgggtgcactgacgccacccaggtgctcaaggagctcgaggaggccaagaaggcgtaccctgatgcattcgtccgtatcatcggcttcgacaacgtcaggcaggtgcagctcatcagctttatcgcctacaagcccccgggctgcgaggagtctggtggcaacta

SEQ ID NO: 410601 - DNA, 244 bp, Oryza sativa
cttatcgccatctctctcagctctcacaggggactgcatcaatggccgcggccaccatggcgctctcctccccggtgatggcccgcgcggcgccgtcgacctcctccgcgctcttcggcgaggcgcggatcaccatgcgcaagaccgccgcgaagcccaagccggcggcgtcgtcggggagcccgtggtacggtgccgaccgcgtcccttaccttggcccgctctccggcgagtcgccgagcta

SEQ ID NO: 410602 - DNA, 468 bp, Oryza sativa
gccatagctatgcccaagatgcttatagatggagctgttgaatatgaagatggtactcctgccactgaagcccagatgggcaaggatgtcgtttcgttcttgtcatgggcagctgaacctgagatggaagagaggaaactgatgggagtgaaatggatcttcctactgtcacttgcacttctccaagccgcatactaccgtcgcatgaggtggtccgtcctgaagtcacgcaagctggtccttgatgttgtcaactgagggaccactgttccttactttcattaaaatgttttgagcatttaagcggaagcatttcaaataatgagtatgacgtacattttgccactggggtttccatgccttagaattttctgctttctttctctgctgcaaaagcatttttttcatgggagtacttgcaatctttgttaatgatacctgataggtaccagcaagcttctaacagaa

SEQ ID NO: 410603 - DNA, 389 bp, Oryza sativa
cgactcgcaccaccaccagcagctcaagcagcaacagctcaaacggaggaagatctcatcgccatgacgaccggcaatggcgacgcaccggtgatcaagaacgcccacagcgacatcgacagcaccaacaagacgctgctcaagagcgacgccctgtacaagtatgtcctggacacgacggtgctgccacgggagccggagtgcatgcgcgatctgcgcctcatcacggacaagcaccagtgggggttcatgcagtcgtcggcggatgaggcgcagctgctggggatgctgctgaagatggccggagcgaagaggacaatcgaggtgggtgtctttaccggctactcgctgctggcgacggcgcttgcgctgccggaggacgggaaggt

SEQ ID NO: 410604 - DNA, 392 bp, Oryza sativa
gcttttatccagcaacccacggatacgccaccggggacaccacctgctaactacgagttgaagcgaccagaggccgcggataatggacgggatgtctgggctcaaggagacagtgctggacctggccatgttcagagacatgggcgctcaggtctggcttaccggcgagaggacagacacagggacttgggagggttatgaccagattctaaacttggtgcttgatgaagaggttgattctgaatgagagcaaggggaggcctgggacctatcatgggtaacgggtctgcttgatgttattgcatgtcggggtacagcggagatggtagcatgggctgctgatggaacggaacagtttgagcatgtcattctaattgacacgagggctatct

SEQ ID NO: 410605 - DNA, 434 bp, Oryza sativa
tggacgcgtgggagacgattgcttccatcaagagcaagcttgatacagctttaattccagctgcaagaaaagctgatcttaaaggccgggtgtcgaagttggaggatgaacttaggaaggccaagaagaaaatgggcgaggagaacatccagaaggccgtgaagtttgcaatagatgccgcccaaactgctctttctgaaggaaagcgcttctgtgttgctcatgtagatgtgggtcttgacacaagtgctattcgggaagcagttatcaaagtcaaggaccagaaggatttgccaatcatgctattcagcacggatgaagccacgaataaggcagtcatttatgctggtgtgccttccagcgctgctaacagcttgaaggtgttggattggttgacaccatcgattgcgccccttaaaggaaagggaggtggt

SEQ ID NO: 410606 - DNA, 155 bp, Oryza sativa
cagcagttgagctctttttccactacgcactagtagtagcactctggtattctcccatggcgactgcgaccgaggaggttgccgctgcggctgctgccgccggcgaggcgccgccgccgccgccgccagcggtggtagaggaggtgaaggaggcg

SEQ ID NO: 410607 - DNA, 499 bp, Oryza sativa
ttttaccagatgcgcccgccggcgatgctccgagggcccgccgccgcggcggcgctcgcgctcgtcttcctcctcctcatcgccgccgcgccccccgccgcggccttctaccttcccggcgtcgcgcccaacgacttccagaagaaagatccacttcaagtgaaggtgaacaagctgtcatccacaaagacacaactcccctattcatattactcccttcctttctgcaagccagatacgatagttgacagtgcagaaaatcttggagaagttctacgtggcgatcgcattgagaattctccttatgtgtttgagatgagagagcccaagatgtgtcagatcgtctgcaaagctaccattagcgatcaacaagccatggagctaatggtaaagatagaggatgagtaccgggtgaccatgactcttgacaaccctccgctagttgcgccttttgcaaggccagatagggatgatgctgtctttcgggtggctttctgtt

SEQ ID NO: 410608 - DNA, 482 bp, Oryza sativa
cagttttcatgagagagctgatagcttgctgcagtgcttacctggttgcctgacagtgaccatcttacgtgggaataacttaaagcagacaatggggagtacaaatgcattttgctgcctgcaaataggaaatgggcccccaaggcaaactaaggtggttaacaacagcatctgcccagtatggaatgagggtttcacttggttatttgacattccaccaaaggggcagaagctatacatcttgtgcaaaagcaaaaacacgtttggaaagtcgacactcggtcgagtcaccatccagatcgacaacgttgtcaccgagggtgtatacagtggtttcttcagccttaaacatgatggtggcaaggatggctcgagaacactagagatagagattgtatggtctaataggccattcaatgacattatgtagcagtgctgatttgctctcaccaatgttatagttttggccttaatgtaattag

SEQ ID NO: 410609 - DNA, 582 bp, Oryza sativa
  unsure (1)..(582): unsure at all n locations
ttcgcgtccgcttttctccctctccgcccatttctcctctccacctgcgttctttttgtgtttgtgtggtggtgggtgttcttttttcttttttttgtgtgtttgtttgtgttggtgtggtggagttctcntttcttttttctctttttttttttttttcttcttttcttttttttttttttttttttttcttttttttttttttttttttttttttttttttctctttttttcctttttttttttttttcttttttttcntttcttttttttttttttttttttttcttttttttttttttttcttttttttttttttctttttttttttttttttttttttttttttttttttttttttttttttttttttttttctttttttttttttttttttttttttctctttttttttttttttttttttttttttttttcttttttttttctttttttctttttttttttttttttttttctttttttttttttttttttttttctttcttttttttttttttttcttntnttttttttcttttttttttttttcttttttttttctttttttttttttttttt

SEQ ID NO: 410610 - DNA, 255 bp, Oryza sativa
gccgtatcgcgtctctcccatcctctcgcgcatcctcctccgactacctcggttgggttttgggggcggctggagatgtcggactccgaggagcaccacttcgagtcgaaggccgacgccggcgcgtacaagacctacccgcagcaggttggcactatacgcaagaacggtcatattgtcatcaagaaccgcccatgcaaggttgtcgaggaatccacctccaagactgggaagcatggacatgcaaaatgccac

SEQ ID NO: 410611 - DNA, 217 bp, Oryza sativa
gttcctgtcggtgccgatcatgccggtgggccgcacggcggggtccctcctgggcgccatgctgatggtgctcatcctggtgatgacaccggacgaggcctacgcctcaatccaagggctcatgattcactccctatttagcgccagggccggctccatcaacctggagtgcgccgacatgagcaatgaccttaggaacaagctgctgcggaagagt

SEQ ID NO: 410612 - DNA, 482 bp, Oryza sativa
tttacgagttcctcacttcctcctccgcccggggcgcccctcctctcctctccctcccggctcccggctaccgccgccgccgccccgaggaaatggctgccctgcaaccctcattctcttcagcaatggctatgaaagtctgaagttacccaaaactgcagttttacctggatttggtggtattgcacgtcctcaagatgtgcaggacaggagcgctaacttcacttgttcaaggcctagagcagcttcagtgactgaccagtcaacagcagagccagcaaaacccaggcaaaacaagcacactgttgatccttctgctccagaatttctgccactcccatcatttgaagaatgctttccaaggtgcacaaaagaatccagagaaattgtgcacgaggaatctggtcatgttcttaagatccattttaggagaatccatttgaccggagacgagaggattttggcacatactacaccagggg

SEQ ID NO: 410613 - DNA, 538 bp, Oryza sativa
aatttacctgctccacctcctcctcctccccccgatcggatcggcccggctcctcctcctccgccgccgccaccgccgccgcagataggagaagatggccgcacttgataccttcctctttacctcggagtctgtgaacgagggccaccctgacaagctctgcgaccaagtctcagatgctgtgcttgatgcctgcctcgccgaggaccctgacagcaaggtcgcttgtgagacctgcaccaagacaaacatggtcatggtctttggtgagatcaccaccaaggctaacgttgactatgagaagattgtcagggagacatgccgtaacatcggctttgtgtcagctgatgtcggtctcgatgctgaccactgcaaggtgcttgtgaacatcgagcagcagtcccctgacattgcacagggtgtgcacggtcacttcaccaagcgccctgaggagattggtgcctgtgaccagggacacatgcttggatatgcaactgatgagacccctgagttgatgcccctcagccatgtccttgct

SEQ ID NO: 410614 - DNA, 385 bp, Oryza sativa
attggtctaccctcttgtcgtcgctgcacatgcgcaggagtcgaatcaatttgcggttgggctttcagatggatctgttaaagtgattgaacccttggagtccgaagggaagtggggaacgacccctcccacggaaaacggggtgcccaatggcaggacgtcaacatcatcagcaactagcaacccagctgcagaccaaatccaaagatagacgtgcatgccggttggatcttcactgtaaagcttttctaatcttttacattgacttgtttgtatgtcgatgtgactaggctattgttgcatcctgcgcacaagcaaacatattacatattggattgtcagatctggtgtgctctgtccttagttacacgttcgctcttacttt

SEQ ID NO: 410615 - DNA, 110 bp, Oryza sativa
gatattgaaagaaattaaaaagaaaatcacggcgcgtgagcttgcagagacagcaatggtgagagttgctgccgccgcggcggtgctcgtgctggcggcggcggcggcgg

SEQ ID NO: 410616 - DNA, 79 bp, Oryza sativa
gttgtcttctcctccccctctttaccttttcctcctgggttcggttccgtggttcgtctagggtttagtgggttgagat

SEQ ID NO: 410617 - DNA, 521 bp, Oryza sativa
tctatagcatcgcgcccgagccaaacctaaatccctcggagagagagagagatcgagaggaggaaaaaatcaaatctttttgaggaagaaatcatggcgtggcagcaacccatggacggatcccacgcgagcgggagcaaggcggcggcggcggcggcggatggcccgggaacccagaggacgcagtatccttatgtgactggctcatcaattattgcactgaaatacaaggatggtgtcatcatggcatccgacactggagccttatatggcttaactttgcgatacatgagcgtggagcgcattaaggctgttggtctgtcttattctattggagctcgtggtgagcttaattatttctcttctatcctgcttctttttaaattctcctacctctttcctacctttctccttctctttcttatccttcttacatattttcttctcttctatcctccttatccctctcctctattatcattttctttcctattctctctctctttttctctacctcttct

SEQ ID NO: 410618 - DNA, 375 bp, Oryza sativa
tcttgctctccctcaccctcgactccgcgcgcctccgcatcgcccacctccacgacctctcccgcctccccgaccacctcctcatcgacctcttccgtagaactatagctgccggtaagctgacagaaaaagtcctgaagttgtttctggcaacggattgcgaggaaatcgccttgcttgttcagttgctcaacattaagcagccgcttgtaccggtccttcccacgaggtgctctgagaagttctagaagtgacactgattaggtcagtcttggttacctgagaaaagatgtctttggaaattcaggacagtgaggtcgacattgtgattgcagcacttcagcccaaccctgactactttttttgaggcatgga

SEQ ID NO: 410619 - DNA, 188 bp, Oryza sativa
gtccgcgccgctactcccccctcgccgagagagctctagggtttccgctgccgaatttttttttaattcggggggagagatttgaagaggcggcaccatgttggtctaccaggatctgcttaccggtgacgagctccctgcggattcgcttccctacagagagatcgagaacggcattctctggtaag

SEQ ID NO: 410620 - DNA, 242 bp, Oryza sativa
gttcgatggactgcgggcgctgatctagctgcagcgtttatttactgcttggttggttgagtcctgcgcgctgccaagaagaagaggatgtcctgctgcggcggcaactgcggctgcggcggttgctgtcagtgcggctggccttgtggcggctgcacgaagttctcagttgttgctccctcttctgtctctcccactccttattttttttcctcctctccctacctctttttccttttcct

SEQ ID NO: 410621 - DNA, 328 bp, Oryza sativa
tttcagggtcctaacattctcttagatgacaccctttcagtcgaggtggataaaaacttgctcaatgcagtcaaagattcaattgttcaagggtttcaatggggtgctagagaaggtccgctgtgtgatgaaccaattagaaatgtgaaattcaagatcttaaatgcaaacatagctcctgaaccgttgcaccgtggtggtggtcagataatttcaacagcttgttgcgtggcttactcagcgtttctaatggttaatccacgccttatggagcttgtctattatattgcgattcatacacctattgactgtgtctctgccatatcta

SEQ ID NO: 410622 - DNA, 141 bp, Oryza sativa
ttattcagtggaaccatcgactatggtgaattcagtggctgctactctccacatgaataagctagagagggaggaaaacttagtatcagcattctcatttttcgacaaagatggaagtggtttcatatctattgatgagct

SEQ ID NO: 410623 - DNA, 391 bp, Oryza sativa
tatttttctatggactgagaagaccactgagaaggaaatttctgatgatgaagatgaggaagagaagaaggatgctgaggagggcaaggttgaggatgttgatgaagagaaggaagaaaaggagaagaaaaagaagaagatcaaggaggtttctcatgagtggtccctggtcaacaaacagaagcctatctggatgaggaagcctgaggagatcactaaggaggagtatgctgctttctacaagtccctgacaaacgactgggaggagcatcttgctgacaagcacttttctgtggagggtcagctggatattaaagctgttctctttgttcctaagagggcaccattcgacctctttgatactaggaagaagtttaacaacttcaagctc

SEQ ID NO: 410624 - DNA, 200 bp, Oryza sativa
cctgtatccatgagcatggaaaggaggatcattcgtgaggccttcggtgccgagttggttcttaccgatccacttctgggcatgaaaggtgcaatccaaatggcagatgagctggcagtaaagatgcctaactcttacatactacagcaggttgagaactttgaaaacccaaagatccactatgagacaactggacctga

SEQ ID NO: 410625 - DNA, 443 bp, Oryza sativa
atcctttggaggtccatctgcttgacttccctaacattgtgatcaagggcagtgagctgcagctgccattccaagcttgtttgaagattgagaagttcggtgatcttattctcaaggccacagaaccccagatggttctttacaacatatatgatgattggttgaaaagtatctcatcattcactgctttctctcggattgtgcttatattgcgtgcacttcatgtcaataatgagaaggcaaagatgctgctcaagcctgacaaaactattgttacggaaccacatcatatttggccaaccttgactgatgagcaatggctgaaggttgaattgtgcactcacggacctcatcctgtctgattatgcaaagaaaaacacagttaatacgtctgcgctgacacaatctgaaatctgtgacattatacttggtgctgaaatagc

SEQ ID NO: 410626 - DNA, 526 bp, Oryza sativa
ccttcctctcacattttccccaaataataatagaggaaggggaaaaacacatttgcagccacatcatccatggcctctctccgcaccattccggtgatcttcggcatcctcttctatgtccttgccagcactgccactgccaccgacgcaccggactacgtcgtccaaggccgtgtctactgtgacacgtgccgcgccgggttcgagaccaatgtcaccgagtatatcaagggtgccaaggtcaggctggagtgcaagcactttggcaccgacaaggtcgagcgtgcgattgacggtgtgactgatgagaccgggacatacaagattgagctcaaggacagccatgaggaggacatctgcgaggttgtcctcgtccacagcccccttgtaaactgctctgaaatcgaggcctaaagggatcgtgcccgtgttttgctcaccaggaatggtggcttctgtgacaaccttgtgcttagccatccaatcgtttcttttagggcaatcctctggcctttttcggcgcgct

SEQ ID NO: 410627 - DNA, 491 bp, Oryza sativa
atcaacttgtaagagactgtctttgcgggcagatgtacgactcgagtcctgtagattttgttagtgatttgggcacccgatttctccttcacccaagtgtcctgaagatgtctcaaccgcctcgtatcctatcatggatgactagaggcattgcctcgggactagacacgctgttcattggcaaatttgaagcgcaacgtgcagaatattgggacacactatactcatcagtgcatgttggtccaatactcatattctgttctgaagacgatgaacttgctccgtgttcaattgttcaaaaatttggtcgacgtctgctggagcttggtggtgatgtgaacctagttaaatggcaaaattctcctcatgtaggtcactacaagcatcatcctgaggaataccgagctgcagtaactgagctactcacaaaggcttcaatgctttacatgagcaggaggcaacctaacagctatgatctaggcccaagtgag

SEQ ID NO: 410628 - DNA, 216 bp, Oryza sativa
gtctttttggtggtgcaggagtcggcaaaactgtccttattatggagttgatcaacaatgttgctaaggcccatggtggtttctctgtgtttgctggtgttggtgaacgtacctcgtgaaggtaatgatctttacagggaaatgattgaaagtggtgtcatcaagctaggtgtcaaacagagcgtaagcaagtgtgctcttgtatactggcaaatt

SEQ ID NO: 410629 - DNA, 325 bp, Oryza sativa
ctacatgtgaatattttgatgtgacgtgaagagaaaaattaatcttggtttttggttgttgtcatgcacggctgaaacgcacaggcaagagctgccggctccagcggctgaactacctccgccccgacctacggcgaggcaacatcacgccgcaggagcagctgctcatcctggagctgcactcgcggtggggaaaccgatggtccaagaacgcgcagcacctcccggaacgcaccgacaaccagatcaagaactactggcgcacgcgggtgcagaagcacgccaagctgctcaagtgcgactccaacagccagcagttcaagga

SEQ ID NO: 410630 - DNA, 372 bp, Oryza sativa
tgcaacagcagctttgcccttcggcactatctgtgggattgtgctcatctggaccttagttacatttccccttctagttttgggaggcattgctggtaaaaacagcaagactgaattccaagctccctgccgtaccaccaaatatcctagggagattcctccacttccgtggtaccggcaaacaatcccgcagatggctatggctgggtttttacctttcagtgccatttatattgagctctactacatctttgctagtgtttggggccacaggatttacacaatttacagcattctcttcatagtcttcatcatcctccttaattgacactgcctgcattactgttgcaccgtcgtacttttatgcttgat

SEQ ID NO: 410631 - DNA, 445 bp, Oryza sativa
cgtctcatccgcaacgtcaactccgccctggcctcgtcggtcctcggcgccatcaaggcgtccaccgcggtgaagttcgacgtcatctccaactcctacccaccctccgccggcgtcttcagggacgcctacatgaaggacatcgcgcgctacctggcgtgcttttgtcttttctatgcttcttcacattttcttctcactatatcctcttatttttatttcttcttttttttttttttttttttatcactttttaattctttttctacttattttattcattactaaatcctttttctcactttaatattttttttttctaatttctttttcctacttctatcttatctctttacttattcctattctctttcctttttcttctctttctcccatttttttccttttccttttttctcattacattttaatatttttcctttac

SEQ ID NO: 410632 - DNA, 353 bp, Oryza sativa
gtttaccgctctttggcaagctcttctttgccttctgggtgattgtccacttgtaccccttcctcaagggtcttatgggtcggcaaaaccgcactccgaccatcgttgttgtttgggcaatccttttggcttcgatcttctcattgctgtgggttcgcatcgatccattcaccacccgtgtcaccggcccagatacccaaacatgtggtatcaactgctaagaaagcaggggattgtagagacagaaatactgccagttgtgttttttcagaatacaaagtgccactgccaccaattgtgttttaagttattaggaggtggttttattttactgctacctacagactagaaat

SEQ ID NO: 410633 - DNA, 543 bp, Oryza sativa
ccgccgcccgtccaaaccctagctccgccgcctccgccgcctccaggagaggagaggtaagtcgaagatggtgtccggctccggcgtgtgcgcgccgcgcgtggtggtggacgcgcgccaccacatgctcggccgcctggcctccatcatcgccaaggagctcctcaacgggcagcgcgtggtggtcgtccgctgcgaggagatctgcatgtccggcggcctcgtccgccagaagatgaagtacctccgcttcctccgcaagaggatgaacaccaagccctcccatggccccatccacttccgctcccccgccaagatcctctggcgcaccgtccgcggcatgatcccgcacaagaccaagaggggagaggcggcgctggcatggctgaaggcgtacgagggcgtgccgtcgtcgtacgacaggaccaagcgcatggtcatccccgacgcgctcaaggttctgaggctgcagcctgggcacaagtactgcctccttgggcagctttccaggaggttggctggaactccttgacacctcaggga

SEQ ID NO: 410634 - DNA, 264 bp, Oryza sativa
gttatttttaggagaaagtcccacacaccttcggctattgttatcggcagtgggtttgcaggcattgctgcagccaacgctctcaggaatgcatcatttgaggttgttcttttagaatcttgtgacaggataggtgggagaatccacactgattacttttttggctttcctgttgatctgggagcatcctggcttcatggtgtttgtgaggaaaaatcccctggccccaattattggaaggtttggacttccattgtatcgcac

SEQ ID NO: 410635 - DNA, 142 bp, Oryza sativa
ggtggttacgccttccacgagcaccacgagaagaggggggtctcacaagagcgccgaggagtccaccggcgagaagaagcaccacctcttcggctgatcgaccttatcacaacgtcgtcgtgttatttatttcttttttttt

SEQ ID NO: 410636 - DNA, 411 bp, Oryza sativa
gaccgacccacgcgttttgtttataggagagagacatacacagtgatatggatagatgtgggtagtgcgttcgctggcattgctgccgacaacgctctcaggaatgcatcatttgaggttgttcttctagaatctcgtgacaggataggtggtagaattcacactgattactcttttggctttcctgttgatctgggagcatcctggcttcatggtgtttgtgaggaaaatcccctggcaccaattattggaaggcttggacttccactgtatcgcacaagtggagatgactctgtgctgtttgatcatgaccttgagagttatgctctctatgacactaagggccatcaagttccccaagagctggtagaaaagatagggaaggtctttgagactttattggtagagact

SEQ ID NO: 410637 - DNA, 513 bp, Oryza sativa
ctctatgttttgatggctggataccttccttttgaggaagatgatcttccaacactgtatgataagattactgcaggtcagttttcatgcccttattggttctctccaggtgctacatcgcttatccacagaatactcgacccaaatccaaaaactcgtatcactattgaacagataagggaagacacatggtttaagaagacttatgtagccattaaacgtggtgaagatgaaaatgttgatctggatgatgtacaggctgtttttgacaatattgaggacaagtacgtttctgagcaagtgactcataatgatggtggccctcttgtgatgaatgccttcgagatgattacattatctcaaggtttggatctttcagcattatttgatagacagcaggagtttgtcaaacgtcaaactcgttttgtctcaaggaaaccagcaaagactatagtagctacaattgaagttgttgctgagactatgggtcttaaggtccactctcaggattac

SEQ ID NO: 410638 - DNA, 498 bp, Oryza sativa
gtagtttattaatgctcaccaaactgactatgtctgagagggagaaatctatttgttcagagacgtataacttctggtggctaatgtgacaagtaatatgcaatcagtccatgtctcattcggaggaatctgtttattaatttactgtttatattgaataaaggtggtgatagtgatttaccatttttgtgtagttactcactcataaggatatacagtatatacttttactcccattcattagggttctgcaattactgcaaatgtgtatactgaatgtggatttcacattgcaatcactttgatacttctactttaaatttaggtgcttcgtggtttgggaaatcttattgccgctgatgactacatggttgattcagtcctaactgttggaaacaatatcattggtaaactccatgacccttttcctaccatatctgtttacaatgtttattcatcagttaacagttccttgtctttctggaaaatatatcttgc

SEQ ID NO: 410639 - DNA, 489 bp, Oryza sativa
ctcatcccctccccagatctccagccccaggagctgcggggggttatcaatggcggtgaaggtctatgtcgcgtactactctatgtatggacatgttgctaaactagctgaagagatcaagaagggtgcttcatctattgaaggtgttgaggctaaaatatggcaggttcctgaaactctccatgaggaagtacttggaaagatgggcgcgcctcctaagccagatgtgccaacgatcacaccacaagaacttactgaggctgatggaatcctgtttgggttccctacaaggattggcatgatggctgcgcagatgaaagcattctttgatgcaaccggtggcctgtggagtgagcagagccttgcaggcaagcccgccggcatcttcttcagcactggtacccaaggcggcggtcaggagactacaccgttgacagcaataactcacttgactcaccacggcatggtgttcgttccggtcgggtacac

SEQ ID NO: 410640 - DNA, 483 bp, Oryza sativa
tttgttgttgtaaagttgcgagagagagagagggagatctttaaattagatgaggggtagcaaatcaggaagatgctggagaagctgtgggacgacgtggtggccggtcctcgaccggagaccggcctcgagaagctccgcaaggccgctacaacccgcccccttgtcatcaacaaagatggcgacggcgaggcgagcggagtggcgtacaagcggacgcagtcgatgccgacgaccccgacgacgccggtgacgccgtcgtcttcgtccccgacgacggctacgacgacaacgccgcggggcagcaacgtgtggaggagcgtgttccacccggggagcaacctcgccaccaagagcctcggcgccaacctcttcgaccgtccccagcccaactgccccaccgtctacgactggctgtacagcgacgagaccaggagcagccatcgctgaactgaataatcccattgatcggaggctggtcga

SEQ ID NO: 410641 - DNA, 497 bp, Oryza sativa
ttctatatttgacaaatttgagtgttgtcttagtggggatggactccatgttgcaactagttcatatggtaatttatttcgggtttttggctgtactcctgggagcacagaagcgaccactttggaggcaagcagaaaccccatgaggcgtcagattgtaaacccaacaaggcccacacgcacactaacctctctggcccgtggtgtgcggagaggtggggaaaatcaaggcgttgatgccaatggaaattcatttgacttttcgacaaagttgctccatcttgcatggcacccaactgagaattctatcgcatgtgctgctgcaaatagtttgtatatgtattatgcgtagagaaggtgcttgagaaaatttattgtttttggttcgctcttggaggccgcgtgccttcacatgcaaccagagatatggtgcaggatgttgtcgtcaattcctcccttggggccaaaagaaggccgtgatgcccacaagatggctt

SEQ ID NO: 410642 - DNA, 418 bp, Oryza sativa
caattactagcaagaacgcgaaccatgtttacgcgaaagggaggcctgggatgatgtgacctacacctatggagacatggattataatcataatgcccacaggcggactgttgctgattgtattaatgctacaaatggaactagtggtgcatttgatgttagcaccaatggaatactagattgtgcactggaaagatctgagtactggcgagtgtgtcatgaaaaaggaatactccctggagtgttaggttgacggccttcgcgtgctgagacatttattgaaaatgatgacactcattatactcagggtgattggagattgcactacggtatggtgttgcaagggtatgtctacctattaactcacccatgcactcctgcaatattctatgatcatatattgttgcattaacagcca

SEQ ID NO: 410643 - DNA, 498 bp, Oryza sativa
cggactcttgggggcgcgcgccccgcgccggggcggggtcctcttaacccgcgcggtgcggtcggcaccccggccgccgagcaagtggtcgctgggtagctggcgcaacctgacggcgctgcagcagccggagtaccccgacaaggcggagctggatgaggtgctccggacggtggaggcgttcccgctcgattgtcttcgccggcgaggcgcgcaagctggaggagcggctcgcggaggccgccgtcgggcgcgcgttcctcctccagggcggctactgcgccgagagcttcaaggagtttaacgcgaacaacatccggtacaccttccgtgtgctcctccagatgttcagggtgctcatgtttggaggccagatgcctatcatcaaggtaggaagaatggcaagtcagattgcaaagccaaggtcagatggctttgacgagagggatggagtgaatatgccactctacataggggataacattaatggggattcat

SEQ ID NO: 410644 - DNA, 371 bp, Oryza sativa
ttctttatctgatcgtcggacatggcgtccccgaggctcttcgttaacaccgtgcgggtccagggaggcggcttgtcggagttctccggcctgaggagctcgtcgtcgctgcccctgcggcggaatgccacctccgacgacttcatgaacgcggtctccttcaggacccacgcggttggcacgagctgcggggcgcggcgggcgccgacggaggcgacgctgaaggtggcgatcaacgggttcggccgcatcgggcgcaacttcctgcggtgctggcacgggcgcggcgacagctcgcccctcgacgtcatcgccatcaacgacaccggaggcgtgaagcaggcgtcgcacctcctcaagtacgactccac

SEQ ID NO: 410645 - DNA, 447 bp, Oryza sativa
ctgttttctacccacccaccctctcgccgtcacaggggcgattttagaaagagctgggggtctccgctgccatggagctctccgcggagaagacctcgtcggggagggagcacaaggcgaaggacctgtaccaggcggacttcggccgcctcgagatcgagctagccgaggtcgagatgccggggctcatggcgtgccgcgccgagtacggcccctcccagccgatcaagggcgcccgtatctacgggcccctccacatgaccatccagaccgacgtcctcatggagaccctcaccgcccttggcgccgaggaccgatggtgctcctgcaacatcttctccacgcaggaccacgccgccgtcgccatcgccagggactacgccgccgagttcgcctggaaggtggagaccctggaggagtactggcggtgcaccgagcgctgcctcg

SEQ ID NO: 410646 - DNA, 484 bp, Oryza sativa
atggtgctgcaatgctcacatttgaagcactgtcaggaacatctgaatttgcaaagagatgggtccctttctgcaaaaagttcaatatcgagcctcgtgctccagagtggtacttccagcagaagatagactacctgaaagataaggtagcagcgtcctttgttagggagaggagagcaatgaagagagattatgaggaattcaaggtgaggatcaacgccttggttgccaaagcccaaaaggttccagaggaaggatggacaatgcaggacggaagcccttggccaggcaacaatgtgcgcgatcatcctggaatgattcaggtcttccttggccaaagtggtggccgtgatgtggaaggaaatgagcttcctcgcttggtttatgtctcaagagaaaagaggccaggctataatcatcataagaaggctggtgctatgaatgcattgtccgcgtctctgctgttctttcgaatgctccatac

SEQ ID NO: 410647 - DNA, 489 bp, Oryza sativa
cggtttcgtggggctggacatccacttccccccgggggacgtgttataatcacaggaagtctaaaagatggtcccatgatgactatatcaaaggatgggggcaaaccatgtccactacctgacagctggaagctggctgagatctttacaactggagttgtcctcggaggatactcggcagtgatgacagtaatgttcttctgggctgcatataagacagactttttcccgagaatattgcatgttgaaagccttgagaagacagctcaagatgatttgcaaaggcttgcctctgctgtttacctccaagttagcaccatcagccaagctctcatctttgtcacaaggtcccgcagctggtcatctgttgagcgccctgcatttctgctggtctttgctttcttggatgcacagctgattgctacactgattgctgggtatgctgactgggcgttcacctcaatcaaaggcattgggggggggttgggc

SEQ ID NO: 410648 - DNA, 500 bp, Oryza sativa
catttatccgcgcgcggtgcgtagtagcgagaagaggaggggttgagggcaaagcgggggctccgatgaagctgtacgggtcgacgctgtcgtggaacgtgacgaggtgcgtggcggcgctggaggaggccggcgccgagtacgagatcgtgccgctcgatttctccaaaggcgagcacaaggcccccgaccacctcgtcaggaacccctttggtcaggtgccggctttgcaagatggtgacttgttcctctgggaatcacgtgcaatttgcaagtatgtatgccgcaagaacaaaccagagctgctgaaggatggcgacctcaaggagtcagcaatggtggatgtgcggcttgaagtggagtccaaccagtacactcctgcactgaaccccattctttttcagtgcctaatgcgtccgatgatgtttggggcaccccccgacgagaaagttgatgaggagaaccttgagacgctgaacaaggtgttggaggtgcccgag

SEQ ID NO: 410649 - DNA, 455 bp, Oryza sativa
gccgttcggggaaacaagtaaacgctcgctcgctggggctcctttgaccccgtccccgcctggccgctgctgctctctcgctcttctccctccaataattcgcttgccctctggtggctcaaagcccagggaaattgatggagaagaattggggtagccccatgccacctggttcgggctagatctccggcgagacggccgctgggagcagccgatccggccccgatccgatgggtggcgaggtgccggagccgcggcggctcaaccgggcgctcagcttcgacgactgggtccccgacgaggcgctgcacctcgtgatgggccacgtcgaggacccgcgggacaggaggccggcgtcgcgggtgtgccgccgttggcaccgcatcgacgcgctcacgcgcaagcacgtcaccgtcgccttctgctacgccgcgcgccccgtgcgcctccgggag

SEQ ID NO: 410650 - DNA, 521 bp, Oryza sativa
cggttcggtgcagtgcgatcttgagctgcagggggggtaccactagtcgatccatggggggcacggcgacctccggcacgcgccgtggtggccgccgctctccacgccggtggacctggcgtccatcctgacgacgctggtctggctcgcgtcggcgcagcacgcggcgctcaacttcgggcagtacccgctgggcgggtacgtcccgaaccggccgccgctgatacggcggctgctgccggacctggagcgcgacgcggcggagtacgccgcgttcctcgccgacccgcaccgcttcttcctgaacgcgatgcccggggtgctggaggcgaccaagttcatggcggtggtggacacgctgtcgacgcactcgcccgacgaggagtacctcggcgaggggcgggacgagggcggcgtgccgtggacggcggacgaggcggccgtggcggcgcacggcatgttcgcggccgatgtgcgacgcgccgaggagaccatcgagaggcggaacgccgaccacggcc

SEQ ID NO: 410651 - DNA, 525 bp, Oryza sativa
  unsure (1)..(525): unsure at all n locations
gtcgtttcggagggcaccttcgacaagctcatggactgcgcgatcagacggggcgcgtgcatcaaccagtacaaggcgccgcggtgcgtgcgccctggcccggtcgtcgagctgctcgacgcgagggtgcagggcaagtacttcagtcccaagtgccccaagtggagccccgggaacaagcaatggaacaaaagcaaggatctggtcggcaagggagacgcctaatattgaagctagagggtgatgatctgatcgagtatttgtgtgagctggtaattaattaacggtacatgcatatggccattggtcgatatgtttctttagggatatgataattcatgtttgaattatctctgatgctgcgagaggatcgaatagttatgagatgacgacttagcctatatgatcatttgctttactctttctctgctgtaacgcagtatatgttatttcctccgtctcaaaatataagcatttttagtacattngataatcaaacatttttaaatttgactattaatagca

SEQ ID NO: 410652 - DNA, 486 bp, Oryza sativa
cccaaatatcttgcagtgaaaaaggttaggaatttgagggttcttggtaatcttgaagtgaaaaaggtgggatatttgaggggctttgtggctgtattatttgggggaggtgtttgcgtcatggatgtgtctgtcccaccaaccaattatccgaaatctttatcctcgattatcaaatgccatcgtcgtcgtgcggcaataaacaattgccattcagtcgtctcgcatccgccgctctcgcactcgaaccaccaccaccgctcgctgcgtgtgagatccagcgccgccgtcgcgccgccgctgccgccgccgctggtggtgccgatgacgacgccgaagccgagcccgacgatccggaggctggacgtggcgtcgccggtgccggcggacatcgacatcgccaacgccgtctcgccgctccccatcgccgacatcgccgcggagctcggcctgcgccccgagcacttcgatctctacggcaagtac

SEQ ID NO: 410653 - DNA, 483 bp, Oryza sativa
gtttgagttgaaggcagctggtgctacttggatggagtttgatgaacccacactggttcttgaccttgactctcaccaattggctgcattctctgctgcatacacagaacttgagtcggcactttctggattgaatgtgcttattgagacatacttcgctgacattcctgctgaatcatacaagaccctcacatccctgaacagcgtgactgcttatggttttgaccttatccgtggagccaagactcttgaccttatcaagagtgctggtttcccctctggaaagtacctctttgccggtgttgtggatggacgcaacatctgggctgatgatctcgctgcatctctcactacccttgagtctcttgaggctattgctggaaaggacaagcttgtggtctcgacttcctgctcactcatgcacaccgctgtggatcttgtaaatgagaccaagctcgatagcgagattaagtcatggctcgc

SEQ ID NO: 410654 - DNA, 519 bp, Oryza sativa
gatcatcgtcggcacgtcggcgacgcccgaggccgggacgctcaactgcgccaacaacctgccgtgccagggcatccagctgcacaacgtcgacctcaagtacgccggccaagggaacaccaccctctccgtctgcaagaacgtcgccggcaagtccagcaacgtcgccaaggagctcgcctgcgtctgattttcatcttattatactactcttccgtttcatattacaaagtcatttgtttttttttaaagccaattttttcaaagtttgaccaaagttttttaaaaaatatagtagtattttcaatatgaaaagaacatattatcagaatatatttcatattggatttaattagactaatttaatattttatatgttgctatatttttttataaatttgtttaaactaaataaaaattgactagaaaaagtcaaacaacttataatatgaaatggagatagggggagtaattgtcgtctgatatatagttgaagttaatcatcgttcccttcgtaca

SEQ ID NO: 410655 - DNA, 526 bp, Oryza sativa
tttttatcatggccatcgcgctggccaacggggggggcttttcaaggactgggaggtcttccacggcatcattgtcctgctgcttatcaactccaccatcttccttcattgtagagaacaacgcccatcactcgccgctgctgttctcatggccaaccttgcacccaagaccaatgtgcttcgggatggccgattgggcgagcacgaggcaacaactctcggttcccggtgacattattaccatcatactcgatgacatacgccctgctgatgctcgtctccttgagggtgacccccttaagattgaccactctgcacttactggtgagtcccttccactgaccaataaccctggtgatcgaggtcttctctgccttgacctgcaaacaagttcagattgatgccgtggtcattgccactggagtgcacaccttcttccgcaaggcggctcatcttgctcacagcaccaaccaagttggtcactcccagactgtgctcactgcgatcgggaacttctgtatctgct

SEQ ID NO: 410656 - DNA, 494 bp, Oryza sativa; identical to SEQ ID NO: 392262

SEQ ID NO: 410657 - DNA, 391 bp, Oryza sativa
gcgttttccctccccctcctccctcccacgccatgggcctcctttttggtggagtcgagatccccggctcggttctctcctcttctttagatcagttaaaataaatggctgacgcagaggacattcagccccttgtctgtgacaatggaaccggaatggtcaaggctgggcttgctggagatgatgctccccgtgctgttttcccgagtattggtggccgtccgcgacatacaggcgttatggttgggatgggacaaaaagatgcttatgtcggtgatgaggcccaatccaagaggggtatcctaaccttgaaataccccattgagcatgggattgtaagcaactgggatgacatggcgaggatatggcaccacacattctacaatgagct

SEQ ID NO: 410658 - DNA, 466 bp, Oryza sativa
gttattcttatgaagattctcacagagagggggggcgcctttacacacaactgctgggcgggaaattgccagagacataaaggagaagctcgcctatgttgctcttgattatgaacaggagcttgatactgccaggagtagctcctctattgagaagagctatgagctgcctgacggccaggtcatcaccatcggagcagaaaggttcaggtgcccggaggtgctcttccagccatcttttattggtatggaagctcctggcatccatgaagccacatacaactccatcatgaagtgcgatgttgatattagaaaggatttgtacggtaatgtggtccttagtgggggatctacaatgttccctggtattggtgatcgtatgagcaaggaaataactgcacttgcccctggcagtatgaagatcaaggtagttgcaccgtcagaaaggaaatacagtgtctggatt

SEQ ID NO: 410659 - DNA, 525 bp, Oryza sativa
tatttgatgaggtgatagaccaggtggttggggggggttttttaagcatgatgggtgtggatgacgtcgtgagcagtgatagtgatgaataagaggaagatggagaggaaaattctggagcttcccaaaagaagaaaggatggttctcctcgatgttcaagagcattgcaggtaacaatgtgcttgataagtctgacatccaacctgcactcaaagcgcttaaagataggctgatgactaagaatgtggctgaagaaattgcatagaaactttgtgaatcagtggcagctagccttgagggcaaaaagttgggatccttcacaaggatatcctctactgttcagacagctatggaggaggctcttcttcgcatcttaaccccaaggcgatctattgacatattaagggatgtacatgctgccaaagagcgtgggaagccatatgttattgtttttgttggagtgaatggagttggcaaatctaccaatcttgcaaaggttgcttattggctctttcaacataacc

SEQ ID NO: 410660 - DNA, 393 bp, Oryza sativa
tgtttccccgccgcccgtccaaaccctagctggggcgtttccgacgccttcaggagaggagaggtaagtcgaagatggtgtccggctccggcgtgtgcgcgccgcgcgtggtggtggacgcgcgccaccacatgctcggccgtctggcctccatcatcgccaaggagctcctcaacgggcagcgcgtggtggtcgtccgctgcgaggagatctgcatgtccggcggcctcgtccgccagaagatgaagtacctccgctttctccgcaagaggatgaacaccaagccctcccatggccccatccacttccgttcccccgccaagatcctctggcgcaccgttcgtggcatgatcccgcacaagaccaataggggagaggcggtgctggcaaggc

SEQ ID NO: 410661 - DNA, 370 bp, Oryza sativa
ctctttgaggaggggtggcttctcctccccctggtggcctttttctaatcggtacggtttcgaggatcgccaagggttaagagggatgagatggcggatactgatgtacagtaccgttgcttcacaggtggtctcgtctgggacaccgacgaccattgcctcgaggacggcttatgcacctacggtgagatcctacactgcaagaacataaacgacagtgagacagggaggtcacgtgggtttggcttcgtcaccttctcctccgagcagtctatgcgcgacgccatcgagggcatgaacggcaaggagctcgacggccgcagcatcaccgtcaatgaggcccagtcccgccgcttccggcggtggaggc

SEQ ID NO: 410662 - DNA, 481 bp, Oryza sativa
tttatgtcaagaagctcatctcctcctcctctggcggggcttttatggccaccacggcgttcagcctcctcaagacctccttcgctggcgcgcgcctccccgtcgccgaccgcaaccccaccgtctccgacgcgccgcgcaccggcggcgccatctgcaactccatctcgtcgtcgtcgtccactcccccctacgacctcaacgccatcaggttcagccccatcaaggagtccatcgtgtcccgcgagatgacccggcggtacatgaccgacatgatcacctacgccgacaccgacgtacgtctgtcgacggcgtcggctccgcggggctctcctgcgcgtacgagctctccaaggaccctttcgtcagcgtcgccgtcatcgagcagtcggtgtccccccggggcggcgcgtggctcggcggtcagttgttctccgccatggtggagcgcaagccggcgcaactgttactcaacaagctt

SEQ ID NO: 410663 - DNA, 541 bp, Oryza sativa
  unsure (1)..(541): unsure at all n locations
naatctcaaggatgcgaagcgcagaatactagcgggggtttgacaagaaagagcttttttaacggccccgcctttggaaccgcttcatcggcttatcagtatgaaggtgctgtcaaggaggacggaagggggccaaccatttgggacaaattcgcacatacatttggaaagatcattgacttcagcaatgctgatgttgcagtggatcagtaccaccgtttcgaggaagatattcagcttatggcagacatggggatggatgcatatagattctcaattgcatggtctaggattttcccaaatggcactggtgagggcaaccaggcaggcattgatcactacaacaagctaattaacccattactagctaaaggaattgaaccatatgtaacgctctatcactgggaccttccacaagctttgaggacaagtacactgggtggcttgacaggcagatcattaatgaatatgcggtatatgctcagactgcttccaggcaattggggacagggtgaagcaccggaccaactttaacgagccc

SEQ ID NO: 410664 - DNA, 413 bp, Oryza sativa
gtaagcatatcaagcggcggccatgacggtgggattttcgtactccagcggggtattgccacgcaacttccggttgctggaggagctggagcgtggcgagaagggcatcggcgacggcaccgtcagctacggcatggacgacgaccgcgacgacatcttcatgcgctcctggaccggcacaatcattggaccactcaacatctgtgcacgaggggctgcatctaccagctgaagctcttctgcgacaaggactaccccgacaagccgcccaccgtgcgcttacactccaggatcaacatgccctgcgtcaaccctgacaccggactggtcgaaagcaagaagatgcatatgctggcaaactggcagagggagtacaccatggagaatatcctgacacagctgaagaaggagat

SEQ ID NO: 410665 - DNA, 193 bp, Oryza sativa
ttgtggcgaagcggagccagatttccctctcgtcggcttttttactacgcgacgcctcctagccgccaccgcttcaccaaatcaaaagctctcgctgctcctcgagagggagttggtggagagagaaagagagagagagagatggcttccctcttctttcccttctcttttcctgtcttcttttctttttttt

SEQ ID NO: 410666 - DNA, 511 bp, Oryza sativa
atcctttcccaaaattagccccgatccgatcggttcctagccctgattcgaggtaaaaaaggggaggagaagatgagggagatcttgcacatccagggcgggcagtgcgggaaccagatcgggtccaagttctgggaggtggtgtgcgacgagcatggcatcgacccgacggggaggtacgccggcacgtcggacctgcagctggagcgcgtgaacgtctactacaacgaggcgtcgtgcggccggttcgtgccgcgcgccgtgctcatggacctggagccgggcaccatggactccgtccgcacggggccctacggccagatcttccgtcccgacaacttcgtcttcggccagtccggcgccggcaacaactgggccaagggccactacaccgagggcgccgagctcatcgactccgtcctcgacgtcgtccgcaaggaggccgagaattgcgactgcctccaggtttccaggtgtgccactcgctgggcggcggcacgggctccgcatg

SEQ ID NO: 410667 - DNA, 407 bp, Oryza sativa
aacatttctcgacgaggtcgacccggagcttctcaaggcggtctttaagcctcgggagggggctcagcaagcagaaccgcctcgccaacgtcgccgacgatgccgtcatcgactccacctccatcggcaccacccaccgggaggagctcatgaagaagggcgtcatcttttgctccatttccgaggccatccgcgagtacccggaccttgtcaagcgctaccttggcagcgtcgtgcccccggcagataactactatgctgccctcaattcggccgtgttcagcgatgggtcgttctgctatgtgcccaaggatacggtttgcccaatggagatatcgacatactttaggatcaacgacaaggagaccgggcaatttgagaggactttaatttgtggctgaatgaga

SEQ ID NO: 410668 - DNA, 510 bp, Oryza sativa
aatagctttccgtcgtcgaaacccaaaatcttctcttggggtacgtgagaagcgccagggggtcgtcgccgccatgggcgtggaggtgtgcgtcaaggccgccgtcggccacccggacacgctcggcgactgtccattctcgcagagggtgctgctgactctggaggagaagaaggtgccctacgagatgaagctcatcgacgtccagaacaagcccgactggtttctgaagatcagcccagaggggaaggtgcctgtgtttaacggtggtgatggcaaatggattcctgattctgatgtgatcactcaagtcattgaggagaagtacccaaccccgtctcttgtcacccctcctgagtatgcatcagtgggatcaaaaattttctcatgcttcacaacgttcttgaagagcaaggatccaaatgatggttcagagaaggcacttcttactgaactgcaggcactcgaggagcatctgaaagctcatggcccctatatcaacgggcagaa

SEQ ID NO: 410669 - DNA, 354 bp, Oryza sativa
ccagttactaaatcgaacctaccaactcattcccgggggggcgttcttaaaaaaaaagctgggggtaacttctctctctctctcctatctttagaactagcaggtagcaactgcttcgagtgtagtgtggtgaacgtccgatctttcgttcgttcatcaagatgaccgtgatcgactgcgccgtctctgccgacgccggctgcgcagccgcggcggtggtgcagccggggaacgggcagaccgtgtgcgtgaccggcgcggccgggtacatcgcgtcgtggctcgtgaagctgctgcttgagaagggctacactgtccagggcaccgtcagggacccacatgacccgaagaacg

SEQ ID NO: 410670 - DNA, 504 bp, Oryza sativa
ttcgttcgcatcttccccggagatgccgccgggggggagtatgcatccaccaccgggggccaccactccctcctcggctcgcccacctgcttcgcgcgcccgcggcggcggtgctgccccgtgcgcgccgccgtcgccgtccaggccgaggcgcaggccaaggtctcgctcatccggattggcacccgcgggagtcctcttgcactggcacaagctcatgaaacccgagacaagctgaaggctgcacactcagagttagccgaggagggggccgttgagattgtcatcattaagaccacaggagacatgatcttggacaaacccctggcagatataggtggcaagggtttattcaccaaggagatcgatgatgcactcttgcagggaaggattgacattgccgtccactcgatgaaagatggtccaacatatttaccagaaggcacgatattgccttgtaatctcccacgggaagatgtgagagatgcattcatatgcttgact

SEQ ID NO: 410671 - DNA, 552 bp, Oryza sativa
  unsure (1)..(552): unsure at all n locations
ttgtttctaggagggtgttcgatgacatgccgtcgaggagcaccattacatggaacgccatgttgcatcagtatgccaggcacgggaaagttgacacggcttatgagctgttcctcgcaatgccgaggagagatgttgtgtcctggaacacggtgttggccgggtactgtgttgctggccggtgcagggaggcacttggcttgttccgtcagatggtgtcgccgtcatcgtgtgcggtgcatcctaatgtgcctacgatgagcactatcctcggtgcttgtgccggcgcgggttgtttggagaccgggatttgggtccatgcatatattgagaggaacagaatgaatgatgatggctatctggatcggtgcctgatagacatgtactgcanatgcggaagcatcgataatgccctacagggtgttgagaaggcacctaggaagagggacctgttctcatggacaaccgtgatctgtgggctggcaattgcacggcgaccactgatgctttgagatgtttgcatgatgcagataatgcatatgcccgatgatg

SEQ ID NO: 410672 - DNA, 546 bp, Oryza sativa
  unsure (1)..(546): unsure at all n locations
tttttgatcttcccaagcttgttgaaggtttaaagcgtctggcaaagtctgatcctatggtcctctgtaccattgaggagtccggtgaacatatcattgctggagctggagagcttcaccttgaaatctgcttgaaggatctacaggaagacttcatgggtggtgctgagattattgtttcccctcctgttgtctccttccgtgagactgttcttgagaagtcctgccgtacagttatgagcaaatccccgaacaagcacaaccgtctttacatggaagctcgccccttggaggagggactggccgaggccatcgacgatggacgtattggcccacgtgacgatcccaaggtgcggtccaagatcctgtctgaggagtttgggtgggacaaggacctcgccaagaagatttggtgctttggacctgagaccactggccccaacatggtggtcgacatgtgtaagggagttcagtatcttaatgaaatcaaggactctgttgtggctgggttccagtgggcatcanaagaaggtgcattggctgagg

SEQ ID NO: 410673 - DNA, 539 bp, Oryza sativa
tataaagaaaattataaaaagcggaggcggctggagtgaagtgggcgagggcgcaaaccagagagaggtcacgagattatcgccggccatggccgccgcatcgtcgtcgcgtgttctgctcgccgccgtcgccgtcctggccgccgccctcgcgggctgcggtgcgggggcggcgctggacgacccggcggggctcctgcggcgtgcgaaggaggcggagttcgcgggctggatggtggggctgcgccgccggatccacgagaacccggagctcgggtacgaggagttcgccaccagcgagctcgtgcgcagggagctcgacgcgctggggatcccctacaggcaccccttcgccgtcaccggcgtcgtcgccaccgtcggcaccggcggccctcccttcgtcgcgctccgggcggacatggacgcgctcccgatgcaggaaagtgtggaatgggagcacaagagtaaagtgcctggaaagatgcatgggtgtggtcacgatgcacatgttgctatgcttgttggttctgccaggatac

SEQ ID NO: 410674 - DNA, 547 bp, Oryza sativa
ttatgaactgttcgaggtggtttaaagccatcacaagtcacctccaccaaggatagtagatccgatgcttctcatagtccaaacacaccaaaacgtacagctgatcgagaaaatcaatggagaacatcatggacggggtctgaagagtcgatctcaacaaacccgtcgcagagagatgcacaaagtgaatatggaagactagagagttctacagaagataatgaccaatctataagtgggtctggaactgttgtactgcgctcgccaagagcatctcaggtgtaccctgcagctactaaccacagttccaagcctcccagtagattctcctcgtatgaagacacgtctatcagtgggacagtcgttcggaatcaaattgaagaaccagaaactccacgatcttcaaggtcgagactgggaatccaagaaaagtcaccaaatgcttcactggaggacagtgcaactaaccttgcagaggcaaaggctgctctccaggctgcgtttaaaaagggtaatgctcgtgaaagacatgttatcaacaaacatg

SEQ ID NO: 410675 - DNA, 452 bp, Oryza sativa
tttatgaacattatattgcagcaatggcatcctcctcccttctactcgcctgtgttgtggtggcggctatggtgtccgccgtctcctgcgggccacccaaggtgccaccgggccccaacatcacgacaagctacggtgacaagtggctggaagccaaggccacctggtatggtgcgcccaagggtgctggccccaacgacaacggctgcgcctgcgggtacaaagatgtacacaaggctcccttgctcgacatgaactactacagaaacgaccccatcttcaaggacggcaagggctgcggctcatgcttcgagatcaagtgcttcaagccggaagcctgctccgacaagcccgcccttatccacgttaccgacatgaacgacgagcccatcggtgcctaccaatttgaccttttcggccttgccttttgcgccatggctaaagatggcaag

SEQ ID NO: 410676 - DNA, 555 bp, Oryza sativa
tcttcgatcaggccagggctgcccctcttcctctacaactactccacccaccagctccacggcatcttcgaggctgcgagctttggcggaacaaacatcgatccgacggcgtgggaggacaagaagtgccccggcgagtcgcgcttccctgcacaggtgaaggttgcgacgaggaagatctatgacccgctggaggaggacgccttccggccgatcctccaccactacgacggccccaagttcaggctggagctcagcgtcgccgaggcgctctcccttcttgacatctttgcagacaaggatgacgcctgaggctactgcttccctgctgctgcttgctgaagaatatcaggggactgccggtgaaggacacaagtaataaagattcgacgtgtatccgttgtgagatatacatacataaatacataaatacaagtagtaagtaattaacggtgtgtgctgatgaatttggaacgattagtacaatttctgagggggtttcccatctcgcgggctaagagatgatgcgtcccattgtattttttttaatcatgt

SEQ ID NO: 410677 - DNA, 551 bp, Oryza sativa
  unsure (1)..(551): unsure at all n locations
ttttgtcacgatgacaaacaagcaagattatcatttactcaagccagaaataccagaaactgtagctgacaatctttcgttttcgaaaacaggcaccgcaaaggtttggttaattggtgatggtctagattctgctgaacaattcagagcacagaaaggaactctgtttatcccatactcacaatttcctccaaagatggtacgcaaggacagctgcagctactcgacaactcctgcaatggctgtaccaaaaacgctgcagaatgtgcattcatgcgagaattggctgccaaggagggttatgagcgcatggcgaatcgcgggaattcttcatgcgttggagggatggaatgagncatgaatgtggtgacaaggtgcttgatatggacaaagtttggtctgctgcaattatgcatgggttctgcccagttgctcaaggttgatgattcagttgcaaagtatcagaataagttttagctggattatgctatgtggtcaccgtatcagaaagagagattgtctgttggcaagaagagatatagtatctgagt

SEQ ID NO: 410678 - DNA, 483 bp, Oryza sativa
tctttatacagaaaagggtcttgagatcctcaaagggaaatcaaagacattgaggatactggaggcgaagagaagtggaaaagggatgctatcactcaggcaagtcagtggtggctggttggctcaagagtctgatgatctaacccctgaagatatcaccttcacaacagtgtccgagagagctcctcaagacagtgagctctctgatgccaaatttgcctggctttgtgtaaagcacgtaaagagtaacgccattgtgatagccaagaataactgcatgttaggcatgggaagtggccagccaaacagactggagagtctgagaattgctttcaggaaagcaggagaggaggccaaaggagctgctttggccagtgatgcattcttcccattcgcttgaacgacgccgtggaagaggcgtgccagaacggcatcggcgtgatcgcggagccgagccgcagcatgagggacggcgacgccgtc

SEQ ID NO: 410679 - DNA, 527 bp, Oryza sativa
ttttgagagaaaaaaaaatctcccctcgaagcgaagcgtcgaatcgccttctcaagatgcagatctttgtgaagaccctcaccggcaagaccatcaccctcgaggttgagtcctcggacaccattgacaatgtcaaggccaagatccaggacaaggagggcatccccccggaccagcagcgtctcatctttgctggcaagcagcttgaggatggccgcaccctggccgactacaacatccagaaggagtccaccctccaccttgtgctcaggctcaggggaggcatgcagatcttcgtcaagaccttgactggcaagaccatcacccttgaggtcgagtcgtctgacaccattgacaatgtcaaggccaagatccaggacaaggagggcatccccccggaccagcagcgtctcatcttcgctggcaagcagcttgaggatggccgcaccctggccgactacaacatccagaaggagtctaccctccaccttgtgctcaggctcaggggaggcatgcagatcttcgtc

SEQ ID NO: 410680 - DNA, 419 bp, Oryza sativa
atcgtttctcaccttgtcaacctctctctcggggtctttgcgatcctctcctgttgaataatgcggccgctcatcggcaagcagaaggggaattggtactctgctaaggcatctgaaagtagcatgtcgggcctgttcggttacaagtccttcatctgcattgcacttctcgttggagatggcttctacaacttcgacaaagtgatcgttgtcactctcaagagcgtacgcgaaagatcaaggcgcaggggtcttaacaacagagtggcggacgcggacaccatggcgatcgacgacatgcagcggaacgaggtgttcaaccgggacaacatcccgacctggatggcggacacccgggtacacgctgctcagcgtaatcgccgggggtctcattccggtgatgttccggcaggtgaagt

SEQ ID NO: 410681 - DNA, 410 bp, Oryza sativa
tcgtccccaatcctcccaaggccgtgaaccacaaaccgacgagcacagcgggcgcgagggcggccggcgccgggcggagcacacgcctctttcacaccatcatcgccagcgccggatccatccacgatgggcggcggcaacgggcagaagtccaggatggcccgcgagcgcaacatggagaaggccaagggcgccaaggggagccagcttgagaccaacaagaaggccatgaacatccaggttttagtttttgattggcatataaaaatctgatgaactgtgttggcggatggcatgaggcccttcgaccaaatttgccgaaacccgtggcgaaggctatgaaccaaggatgatgcgaggcgaagggtcgcgtgagtacctgccgaagaaggacgacttcgccatagcca

SEQ ID NO: 410682 - DNA, 556 bp, Oryza sativa
tggttttgttggcccccattcctcccccaccccggtgtcctcccctccgccgctcgcgtcgccgcctttttcccctatggcgctgccgaatcaggggaccgtggattaccccagcttcaagctggtcatcgtcggcgatggcgggactggtaaaactacatttgtgaagaggcatctcactggagagtttgaaaagaaatatgagccaaccattggtgtcgaagttcaccctctagattttaccaccaactgtggtaagatccgcttctactgctgggacactgctggacaagagaagtttggtggacttagggatggatactatatccatggtcaatgtgcgataattatgtttgatgtcacttcaaggctgacttacaagaatgttccaacatggcatagggacttgtgcagggtgtgtgaaaacatccccattgtcctgtgtggtaacaaggttgatgtgaagaacaggcaggttaaagccaagcaggtcacattccacaagaagaagaatctgcagtactatgaaatttctgccaagagcaactacaacttt

SEQ ID NO: 410683 - DNA, 513 bp, Oryza sativa
gttatttaccaaatttgatagtggtactgggtggccgtcatattatcaacccattggagataatgtaaagtgcaagcttgatatgtccatcatattcatgcctcggactgaggtgctgtgtgctgtctgtgacgctcatctggggcacgtgtttgatgatgggccacgaccaacagggaaaagatactgtatcaataggtatatgtgagattttcttcacttgttatcaattgttcataggcctcatttgaaatctgaacagaaacattgtctcccatatctacgaaattattttttttgaggggtatctacgaaattaactgtttgcttaattttcccactaacatttttcccattgttcaactccggtaagtcccagattagtttctaagtaaacttccgtgcatatatacatagtagtaccatagctaatatctgtctcatatgtgttgcattgcaccgaaggacctttctatacatgttcttttggttgatacatgactgcagagttgc

SEQ ID NO: 410684 - DNA, 510 bp, Oryza sativa
  unsure (1)..(510): unsure at all n locations
cggtctcttgggctcggtggaggcccacgcggtgcggggggaagcctggtgtcacggaagttgtagccgagaaggagacttcgccggatggcgaagaggaggaggtgcgcgggcgcggatggttcatggttgatgagattggtatggacatcctcaccatcgccttgcctgctgtgctcgccctcgccgccaaccccatcacggctctcgtcgacaccgccttcgttggccatgtcggttcgactgaacttgctgccgttggagtatccatttctatcttcaatctggtatgcaagctgctcaatgtgccattgctcaatgtcaccacatcctttgttgccgagcagcaggcagtggatgcagctgaaatcctcgcataggaaatgaaatttcaataccccaagagaaagcaagtaaacaaaggaggtttcttccagcggtctcaacatccttggctctagctgctggcataggattgatggaaatggtggcactgatacttgngtctgg

SEQ ID NO: 410685 - DNA, 476 bp, Oryza sativa
aaccaattcgcaccgatcgatcgatgggtggggctaattacaagatcgggggggctaactaggaagcatggcccgtgcacagttggtgttggtcgccctggtggcagctctgctcctcgccgccccgcacgccgccgtggccatcacctgcggccaggtcaactccgccgtcgggccctgcctgacctacgcccgcggcggcgccgggccgtctgcggcctgctgcagcggcgtgaggagcctcaaggcggcagcaagcacgaccgtagaccggcgcaccgcctgcaactgcctcaagaacgcgggccgcggcatcaaggggctcaacgccggcaacgccgccagcatcccctccaagtgcggcgtcagcgtcccctacaccatcagcgcttccatcgactgctccagggtgagctgagccatcgatcagagagacggatcatatatatacagcagcgcgccggttgccacctagt

SEQ ID NO: 410686 - DNA, 468 bp, Oryza sativa
attaattaccttggtgataagcagcgtgcaccagggggtattcttggaaaaaggagcatgttattccttgttccaccctcagacttctctgaacaagtactgagggttccaggtaaagtcagcatatctggagtcattctgaagtttgagcagtcagatccagaagtttcctcgccaactcgcaaaccagaaacatttgtgagtcatttgaaccatgatgttcgtgctcatgaggatctagatgcattgagaagaatcaacccaccagatatcaggccacttcctcagggttcagattatctcgagttgtcgcctggaagctataatccagcaagtgcacatttggttccgccttacaagtttggaaatgcctcttcatatttagaatctgaattagctcatcaaaagcatccacctgactcccacagggagatcgcacatgacatgcagcagcaacacccagatgta

SEQ ID NO: 410687 - DNA, 515 bp, Oryza sativa
ggtttttgtctgcacgttggcgccgagaatcaggcggggggatgattgaacccaagcaagagctaagcaagcgcctgttattcctttcagctgggtttatgaccgcaaagtgcagctttgatcatgatcagtgagcaaccgagactgcatcctatatattggttctaagatatgaggttctctatatggaaaaaaatctaggttatctagctggggtagaatgcaattacctgtccatctgccctcacaaaatctgttgtcttttaagttgataacagtgtcgatgagtctggtgagaagctgatgtgagatgcaacagagtgaacttatgttgtattgatgtgagatgagtatggtgacatttatgtgtacttgcaggttttacatgacttgtataagttttaaagtaataatggagatttgtatacagacaagcgtgtgcactgtcgcatgattaagtagtctaaaatccagactatcttttgtgctctgaatttagcagtaataagattgat

SEQ ID NO: 410688 - DNA, 526 bp, Oryza sativa
gtgtatcgcacagcccactttaggccctgatgggaagataaaggagcctgagagcaatgtgcttttggcttcaatagagaacatgcagtatgctgtgacggtggatgttctacatactgtgttctctgcttttggtactgttcaaaagattgcaatgtttgagaagaatggtggaatgcaggccttaattcaatatccagacatcacaacggcagcagttgctaaacaagctttggaagggcactgcatatatgatggaggttactgtaagcttcatctgtcatactctcgtcatactgatctcaatgtaaaggcacatgatgagagaagcagagactacactgtttcatcagatcctagtgcacaaatgcaagctgcagcgcaagccccaggtcctagcactctaggagtggcatggcaaaacaccgcacccagtgcttccttttatggcagcactgcggcagcgactcctgttggacaagtgccagcttggaatccaaacatgcaggcaggtgcttttggatcg

SEQ ID NO: 410689 - DNA, 525 bp, Oryza sativa
taaaaaatattccccatctgtgaaattcgcaaaaccctagcgcggcggcgatgtcgaacacgagggtgttcttcgacatgaccgtcggcggagctccggcggggcggatcgtgatggagctgtacgcgaaggacgtgccgcggacggcggagaacttccgcgcgctctgcaccggcgagaagggcgtgggcaagagcggcaagccgctgcactacaaggggagcaccttccaccgcgtgatcccggagttcatgtgccagggcggcgacttcacccgcggcaacggcacgggaggggagtcgatctacggcgagaagttcgccgacgaggtgttcaagttcaagcacgacagccccggcatcctgtccatggcgaacgccgggcccaacactaacgggtcccagttcttcatctgcaccgtgccctgcagctggctggacgggaagcacgtcgtgtttcgccgcgtcgtcgagggcatggacgtcgtcaaggccatcgagaaggtgggatcccgcggcgggagca

SEQ ID NO: 410690 - DNA, 517 bp, Oryza sativa
gaacttcgcttggaccaccacctgatcagagaagtagctagctgcaggagagaaaccgaccaacaatggcggagtactactcgaacaccgtggacgagtgctacgagaccaccggcaggcagcacggccacggccacggccacggccatggcggcatgagggtggagtcccacaccgacgactactactgcgagggcggcgagatcgaccgtgggaggaggaacaactccatgcactcgcaggagtacctgatgaggcagcagagcggccatggcggctacggccacggcggcggccagcagcaggagtactacaagcgggaggagcgcgagcacaagcagcgcgagcgcgtcggcgagatcggcgccctcgccagcggcgccttcgctctctatgaggggcaccaggcgaagaaggacccggcgaacgcgcagaggcactaggatcgagcagggcgtggcggcggtggcggcgggtggcgccggcggctactcctaccacgagcaccgcgagcaga

SEQ ID NO: 410691 - DNA, 528 bp, Oryza sativa
cgcagttctctgagctcgtgaacgacttctacaacaacgggcttccttccaacctgtccggtggacgcaaccccagcttggactatgggttcaagggcgcggagatcgccatggcgtcgtactgctccgagctccagttcttgggcaacccggtgaccaaccatgtccagagcgcggagcagcacaaccaggacgtgaactcgcttggtctcatctcctccaggaagaccgccgaggccatcgacatcctgaagctcatgtcctccacgttcttgatcgccctgtgccaggccatcgacctgcgccacctcgaggagaacatgaagaccgcggtgaagaactgcgtgatggcaggtggccaagaaatccctgagcatgaaccacatgggcggcctccacatcgctcgcttctgcgagaaggacctgctcaccgcgatcgaccgcgagggccgtgttcgcctacgccgacgacctctgcagcgccaactacccgttgatgcagaagctccgcgcggtgctcatcgagca

SEQ ID NO: 410692 - DNA, 354 bp, Oryza sativa
cttataagcaaaaactgactgctagtgggatttttccatcacatccaatccagaaacttaaaaagccatataagttcaggcaacatataactgtgattgtatcacagcagaattataacggtggctcaggaggcagtcagatgacaactctgaaacaaaactcagatatttaacgagaactagccaccaagaggtgatcgattataggcgcgaagctctaagactcatagatccaagggtgaaggttgctcctccactcagctaaaccttcagggaaccagagagcgatctccttattgccgttgtacacggagtcgctcccatggatgacattcctgccaactgccacggcat

SEQ ID NO: 410693 - DNA, 303 bp, Oryza sativa
agtcgacctctgcggaccacccacggtgccatgggggccgaagatgagtacaagatagggggaaatgtggctggaagccaaggacatctggcatgtctccggccagggtcgccgctctaatgacaacggtggatcctgcagctacagcgtgatgccgccaggctgcctagcaaccatgaactcctggtggagcgaccccattttacacgacggtaggggctggaggtcatgcatagggatcacctgctgcaaggcaaacgcctgatggaccaggacatgccttatccactgcaccgacatgaa

SEQ ID NO: 410694 - DNA, 430 bp, Oryza sativa
ttgttgtttacaaataatggggtcgcgcttggggctctttttatctcttgttgttcataaaccgccgaaatggcaacgcactgactgagaatctctaagtggcaagtcccactgcattcttatcactccttaaaatgtggcaaccagcaaatgggaatcttatggcaaatgacactagtgatggcaaccccgaataagcaactgcctgcattgctctgcccaaaaatgatttctattgtgatgtctgcatcctgtggcaaagtctcattgttcaacatgatgacattcaaggtcatgactacttttatggcacctccacctgctgcaactttacttgcattccacccttaatacaataatatcattgctataggaatggaggactctaccattcaaatttaaaatgtccgtgatgacgaggttaaaagca

SEQ ID NO: 410695 - DNA, 530 bp, Oryza sativa
catcgatgtggcggcggcaagtgggtgccctgcttctccggcaccgatccacgccttcctccaccctccgccaccatctccccctccccgtccccgaccagagcccaccttcttgcttccaatcttctgctccgcctcttcacttctcaatctggagagggaggtgatggtgccaccaagcccttcattgctttcgtcttagggggtcccgggagtgggaaaggtacgcaatgtgtccggatcgcttctgattttgggtttgctcatttgagtgctggtgaccttctacggagtgaaatttcaactggcagtgagaaaggggaggttgatcttaaatataataaaagaagggaagattgttccatcagagattactgttgaactgattagaaaagctatggaatcgagcgatgctaaaagggttcttattgatggtttccaaggtgtgaggaaaacaggatcgccttcaaagaaaactggaacagaaccgaccttgtgattttctttgactgccctgacgatgagatggt

SEQ ID NO: 410696 - DNA, 496 bp, Oryza sativa
  unsure (1)..(496): unsure at all n locations
gttcgatgtttccccaatggaacaggatatgccctaagttctgttgaaggacgagtttctatggaattctttgatctatctgagtctgctcaatctaaaaagtatgctttcaaggtgtcatcggaaatcagaagctggccgggacaccgtttatcctgtcaatgcaattgcattccatccaatatatggtacatttgccactggtgggtgtgacggatttgtgaatgtatgggatggcattaacaagaaaagactatatcagtattcaaagtatgcgtcaagcatagctgctttgtcatttagtaaggatgggcacctgctcgctgtggcatccagctacacttatgaagagggagaaaaatcccatgaacctgatgcaatatttatccggtcagtgaatgaagtggaagtaaagccgaagcctaaggcactggcagcaccttaaangtgttttagttgtctcacgaaggggatatcgtgtggtttgatgtgtatg

SEQ ID NO: 410697 - DNA, 440 bp, Oryza sativa
ttcgatagaaaaagaaagaaattaaaaagaggggcatttttcgtgagcttgcagtgacagcaatggtgagagttgctgccgccgcggcggtgctcgtgctggcggcggctgcagcttttcgcggttgccatggccgatgagccgtccaccgatgacggtgcggtccgggtggcggcggggctgacgaagtgcgtgtccgggtgcggtagcaaggtgacctcctgcttgctcggctgctacggctgcggcggcggcgccgccgccgccgcgacggagatgccgttctgcgtcatcggctgcaccagcgacgtcttgttctgcgccaccggctgctccacctcgttctgattaagtacttaatgaagtaattaacccgcgcttattaataataaatcgcacctacgtatgccacatgtggacttgcttgactattaaatact

SEQ ID NO: 410698 - DNA, 506 bp, Oryza sativa
gctgctttcaaatatctacagcaagcaatccaaaaatgggatagagatgagcaagatcttgcacaggtatacaatgccctgggagtcagctacaagcgagataacaaacttgacaagtcgatccagcaatttgagaaggctgttgagcttcagccaggctatgtgacagcttggaacaacctcggggacgcatatgagcaaaagaaagatctgaagtctgcgctcaaggcattcgaggaggtactcctatttgatccaaacaacacggtcgccaggccacgccgagatgacctaaagcagcgtgtgggcatgtacaagggagtcccagtgaagtcagaaaaacgataggtcctgtgagtatgtgttaaggggggcgcgcttgtgtgtgttagtgtggtgtgcatttgtgcataattgtgcgcgcaacatgtaattggggaaaagtagaaaagcagtaggctcagatctcaaatttgtgcaaaatctttggttcctcaatttgaacg

SEQ ID NO: 410699 - DNA, 383 bp, Oryza sativa
  unsure (1)..(383): unsure at all n locations
gcaggaggagcagcggaggtggtatggcgtcaaggagccgcgccatgtcctggtcgtgacgcccacctactcccgcgcgttccaggcgctccacctcaccggcctcctccactccctccgcaacgtgccctacccgctcacctggatcgtggtcgaggcaggcggcaccaccaacgccaccgcgttcctccttgcacgctccgaccttaccatcgttcacatccncttccctgaccgcatgcctcatgactgggctgaccgtcacgcaaccgaaaatcgtatgcgcctccacgcactgcgggtgatccgggaaaggaagatggatggtgtgacttgtgtctgccgatgacagcaatgttcatagcttggagctgtttgatgag

SEQ ID NO: 410700 - DNA, 490 bp, Oryza sativa
tttatgtcagggagggtgtcatggagttcctgtggaggaatcatccgctggactgcccaatctgtgatcagggtggggagcgcgatctccaggatcagtctatggcatttggggctgaccgtggtcggttcactgagatgaagcggtccgttgaggacatgaatttgggcccattggtgaagacagggatgacccgttgcatccaatgtacaaggtgcgtcagatttgctagtgcgggtgctggtgttcaagacctgagtatgttaggtcgcggtagtggtgaagaaattggtacatacgtggagaaccttatgacaagtgaactctctggaaatgttattgctatctgcccagttggaggccttacatccaagccatctgcctttaaagctaggacctgggagctgaagggcactgctactattgatgttactgacgcaggttgttccaacattttagtagcctgcagaggttctgacctttgcgtatc

SEQ ID NO: 410701 - DNA, 472 bp, Oryza sativa
gtcgccttcttttcctcctccttttgacttctcccgtggggttctttgagttagctacctccttattcaaccatgggtaaggagaagacgcacatcaacatcgtggtcattggccacgcctactccggcaagtcgaccaccacgggccatctgatttacaagcttggaggtatcgacaagcgtgtgatcgagaggttcgagaaggaagccgctgagatgaacaagaggtccttcatgtccgcgtgggtgctcgacaagctcaaggccgagcgtgagagaggtatcaccatcgatatcgccctgtggaagttcgagaccaccaagtgctactgttctgtgatcgatgcccctggtcaccgtgactttatcaagaacatgatcacgggtacctgccaagctgactgtgccgtgctaatcattgactccaccactggtggttttgaggctggtatctccaaggatggccagaccc

SEQ ID NO: 410702 - DNA, 385 bp, Oryza sativa
atcgcgatactttctccttcccgtcgaaccctctccagtcgcggctctatttaatcctcccacctcggctcgaaggaatggcaagcggtagtgaagctgagaagtcacctgaggttgtgctggagtggcctaagaaggacaagaagaggcttctacatgctgtttaccgtgttggagatttggatcgcaccattaaatgttacacagaatgctttggaatgaaattactgaggaaaagagatgtgcctgaagagaaatatacgaatgcatttcttgggtttggacctgaggacaccaactttgcacttgaattgacatacaattatggtgttgataagtacgacattggagcaggatttgggcatctcgttattgcaactgagga

SEQ ID NO: 410703 - DNA, 166 bp, Oryza sativa
cgaggctgatgaggaagcagtcgaccgagaagcccgagaggctcttttaaaatcagagatcgcttgtcacacggcacgcgctactcggataaccgtatcaattctagagccaacacctgcaacaaaccccgacttcccgtgaggggcccatttattacataaaacg

SEQ ID NO: 410704 - DNA, 522 bp, Oryza sativa
gagcaccattgtcacgcgactagcagaagccgagcgaccgcctcctcgatccatatcttccggtcgagttcttggtcgatctcttccctcctccacctcctcctcacaggttcttggtgtagcttgccactttcaccagcaaagtttcatgtctgatctcgacattcagatcccaactgccttcgatccctttgctgaggccaatgctggagactctggtgcggctgcaggatcaaaggactacgttcatgtacgcatccagcagcgtaatggccgtaagagcctgaccactgtccagggattgaagaaggaattcagctacaacaagatcctcaaagatctcaagaaagagttttgctgcaatggtactgttgtccaggacccagagcttggccaggtcattcaacttcagggtgatcagaggaagaacgtatcaaattttcttgttcaggccggcattgtgaagaaggaacacatcaagattcatggtttctgagcaactgccaaaaccattgccaagac

SEQ ID NO: 410705 - DNA, 460 bp, Oryza sativa
gcttatatccgcagcagctgctgcagcggcgtctgccaccaaaagcaatgctgccattgctgttaagccccctgtgatgcctgcagccaatgctacccaagcagcagtttttgctgtgcttacacgatcgctctcattgaagagcacttctgaagtaactagacaacctcaagctgccgttgacccttgtgcattttgcaagcttcagagattctcttgccattgccaggatcaactgacttcagtgatgtctacatacaccatcttactggctgttagagcctgaccactgtccagggattgaagaaggaatttagctacaacaagatccttaaagaactcaagaaagaatttttgctgctatggtactgttgttcaggacccacagcttggtccggttatttaactttcaggggaccaaggatagaacctattaaatttttttgttaagcccgttttt

SEQ ID NO: 410706 - DNA, 260 bp, Oryza sativa
ggagcactagggacaggtgcacgtgcacacccacgcgacgcacggtttcatacacggctcgccggttcttggtggggctgttccctactccacctagtcctcacaggttcttggtgtagcttgccactatcaccagcaaagttttatgtctgatctctacattcagatcccaacttgtctccgatccctttgctgaggccaatgctcgatactttggtgcggctgtaggatcaaaggactatgttcatgtaccgcatcca

SEQ ID NO: 410707 - DNA, 426 bp, Oryza sativa
caatatcattatattgcagcaatggcatcctcctcccttggactcgcctgtgttgtggtggcggctatggtgtccgccgtctcctgcgggccacccaaggtgccaccgggccccaacatcacgacaagctacggcgacaagtggctggaagccaaggccacctggtatggtgcgcccaagggtgctggccccaaggacaacggcggcgcctgcgggtacaaggatgtcgacaaggctcccttcctcggcatgaactcctgcggcaacgaccccatcttcaaggacggcaagggctgcggctcaagcttcgagaacaagtgctccaagccggaggcctgctccgacaagccccgccttatacacgtcaccgacatgaaccgacagcccatcgctgcctaccactttgacctctccggacttgccttc

SEQ ID NO: 410708 - DNA, 545 bp, Oryza sativa
gcttgtatcatttggttttgatctgaacgtgcaccatccgtacaagctcttggttgaagcaataaagaaattcaaggttgctcaaaatgcacttgctcaagttgcctggaattttgtcaacgatgggctacgcacttcactttgccttcaatttaagccccaccatattgcggccggcgcaatcttcctggctgcgaagtttctcaaagtcaagcttccatcagatggcgagaaggtctggtggcaagagtttgatgtaaccccacggcagttggaagaggttagcaaccaaatgttggagctctatgaacaaaaccgtgtggcaccaccaccatcacaagggaatgacactgaaggtagctctgcgagtgtggtcaatcaacgtgcttctgggaaagctccgggatcttctgaagagcctcccacccatgaaaatcacctagcgcccagacagtctagcacgccaggccaccagggctatgaccaccctcattctgagaagcagaactcaagccagagggtaccctagaatgatgcaaggggat

SEQ ID NO: 410709 - DNA, 383 bp, Oryza sativa
ctctcgttcatcatccacgacggcttcctggaggccatcgggcggggtaaccggtcgggcctcctcaccgccgccgactacaacaacctctgccagtgcgagaacctcgacgacgtcaagatgcacctcaccgccaccgagtacggcccctacctccagaacgaaccttcacccctgcacacaactacaattgtggagaagtgcactcttaaactggttgatgagtacaaacacatgatgtgccaggcgactgaaccactatccacattcttacagtatataacgtatggtcacatgatcgacaatgttgcacttattgttaccggaaccattgcatgagagagatgctaatgaactattggagatatgtccttcatttggga

SEQ ID NO: 410710 - DNA, 113 bp, Oryza sativa
ctcctcgtctcttttacccgctcttccccccgatctggggggacttttacagccgcagcgaacaaatcccgcgcgggttgggaagagcgagcacgtgaggagagcagaggtaa

SEQ ID NO: 410711 - DNA, 451 bp, Oryza sativa
gcgcttctccgattcgaagcgtgaagagaggagcggcgcgtggcgagaggagagagatggcccgtaccaagcagaccgctcgtaagtccacaggaggaaaggctcccaggaagcagcttgcaaccaaggctgctcgtaagtctgctcccaccactggaggagttaagaagccccaccgttaccgccctggaactgttgccctccgtgagattcgcaagtaccagaagaggactgagcttttgatcaggaagctgccctttcaaaggcttggtagggaaattgcccaggacttctagaccgactctgcgttttccagagcctgctgtcctttgccttcaggaggctgctgaggcataccttgttgccctttcctagcacaccaacttgtgcccttctatgccaagcgtgtgacccttatcccttcggtcttttcttttcttcccctattttt

SEQ ID NO: 410712 - DNA, 177 bp, Oryza sativa
ggccgccctttttttttttggctgccgcgtgcattttcgaaccaaactgtgcctctgagcgacttgcatgggctagagtgtcagtgctggccaacactatttctaggcatttttacagcgatatgtcaagcatgaaaaggatggagctgttcatgtggagcatcctctatgaagaaa

SEQ ID NO: 410713 - DNA, 99 bp, Oryza sativa
agcactatgattcccaaggttcagcagctcctcagagactacttttagggcaaggagcccaacaagggtgtcaaccctgatgaggctgttgcctatggt

SEQ ID NO: 410714 - DNA, 451 bp, Oryza sativa
gcagaattattcccctctcactcccactaccatggatccttgcaagttccggccgtcgagctcgttcgacacgaagacgacgacgacgaacgcgggagctccggtgtggaacgacaacgaggcgctgacagtggggcccagggggccgatcctcctcgaggactaccacctgatcgagaaggtggcgcacttagcccgggagcgcatcccggagcgcgtggttcacgcccgcggcgcctccgccaagggcttcttcgagtgcacccacgacgtcaccgacatcacctgcgccgacttccttcggtccccgggcgcccagacccccgtcatcgtccgcttttccaccgttatccacgagcgcggcagcccggagacgatccgcgacccgcgcgggttcgccgtcaagttctacccccgcgagggcaactgggaccttctaggaacaactttc

SEQ ID NO: 410715 - DNA, 123 bp, Oryza sativa
gttaccagtggtctccgcttccctggccagttgaactctgacgtcctgatgcttgctgtcaacctgatccctttcccgcggctacacttcttcatggttggattcgctcctcttgacttctag

SEQ ID NO: 410716 - DNA, 411 bp, Oryza sativa
ccataacagagacgacagccccaaatacttgacttgtccactatgattttcttgacaaacttaggtaccagataacattgagaaaagaaaaagaaaaacataacataccacctataacttaccatacttttaacctaacaaaattactctccgaatgctaaatgtgcgttggagttcttatgggcggaactgaaatctcaagggcacgagcagattgattttgctcggggaaaaaacccaagaaatctcctcccaagcacccacactcacaggcccatcacaccaacatgaataactttagcaagctcttaattcacacgcagaaatccacctgccggaacatatcaccacggccgaagtcgtagccgctgggtatctctgggaaatcctcgcagaagtcatcaccgatgt

SEQ ID NO: 410717 - DNA, 146 bp, Oryza sativa
gttctatatcgcgagcggccgctactgatcctgtaaagaggactgtttggacttttgggcaaagggctacacttgagctcacacacaactggggcacagaaaatgatcctgaattcaaaggttaccataacgggaacttagaccct

SEQ ID NO: 410718 - DNA, 231 bp, Oryza sativa
gccaagaactgcgccacccgagttccagaagaccaagctcatgacccgtctgacctacaccctcgacgagatcgagggcccgctcgaggtcagctccgacggaaccatcaagttcgaggagaaggacggaattgactacgccgccgacaccgcgcagctgccgggaggtgagcgtgtgccgtttctcttcaccatcaagaatttggtcgtcaccggctagctggagagctt

SEQ ID NO: 410719 - DNA, 527 bp, Oryza sativa
caaaaggattttaaggagccaagaacaccaagaacttgttggagctgagttagcagcaccaagcaagaaaccggatccaatccatccatccatccatagtttccaatggctggcaagtacatcgccgctggtcttgttggttcctttgccatctcatatgtttgtgatcattttatcgctgagaagaagatatttggaggcaccacaccacataccgtgtccgacaaggaatggtggcaagcaactgacaagaagtttcaagcctggcctcgcactgctgggccaccggttgtcatgaaccccatcagtcgccagaacttcatcgtcaaggatctcgagtcctaagattgtagtgggagcatatatgctgaaggttgcgccgtgactaagatggcgatggctgtggctacaaactacctacctatgccggactcccgaaccagtacgtgagtacttggtctcaataaaacagaactattttgcctagtgcagcctgaacagaaccttgagcatatttgctttagaca

SEQ ID NO: 410720 - DNA, 138 bp, Oryza sativa
ctggcatggatcccaaccaaggttgaccgcagtggagcatacgtcgcatggcaagctgccaagagcattgttgctagtggccttgctcgccgctgcattgtccaagtatcatacgccatcggtgtcccagagccactg

SEQ ID NO: 410721 - DNA, 173 bp, Oryza sativa
atctatggtgctggggaagagcggcatcttccaaggatactagcccttgttaagatgggattagcattcttcaagattggggatccaaatgtgaagtcagattgggtctatgtggataatcttgctcttgcactgaccttggcacgtatgggactcttccattatcttccccc

SEQ ID NO: 410722 - DNA, 356 bp, Oryza sativa
caaaatcgtatatgaaaaaaaaatctcccctcgaagcgaagcggggaattgtcttctcaagatgcagatctttgtgaagaccctcaccggcaagaccatcaccctcgaggttgagtcctcggacaccattgacaatgtcaaggccaagatccaggacaaggagggcatccccccggaccagcagcgtctcatctttgctggcaagcagcttgaggatggccgcaccctggccgactacaacatccagaaggacgccaccctccaccttgtgctcaggctcaggggaggcacgcagatcttcgtcacgaccttgactggcacgaccatcacccccgaggactacttctctgacaccc

SEQ ID NO: 410723 - DNA, 330 bp, Oryza sativa
ctcttcctatttccttcctccccacccacccccaaatccacgcggccgttgacgccgcgaaaccctaggcagccatagccatggctgcggccatcctcctccgccgcgtcccccccgcgcgggcccaggccacggcgctcatcgcggcgcgctcgatctcggactccacggcgccgctcaccatcgagacctcggcccccttcacctcccacatcgtcgacccgccctcgcgcgacgttaccaccaccccggccgagctccctcaccctcctcccgtgacacgtccgtgatgcgccggatggagacccccgcgcacttcccctcatttgg

SEQ ID NO: 410724 - DNA, 188 bp, Oryza sativa
  unsure (1)..(188): unsure at all n locations
gacacagtaataagaaggaagggggcttgtccaacaagcagaagaaactacaacgaaggatgaagattgcagaactgaaacagatatgcaatagacctgatgttgtggaggtntgggatncttcttctttctatttatcattactttttctattcgcatgtccttccttatctcttcttcctcttttc

SEQ ID NO: 410725 - DNA, 138 bp, Oryza sativa
caaggagtagattccaacaacattttatatctaagggaaggagatgttgatgacaagctggcgtgcagctatccaagcaaagaagggtggaaaggcagttattgtaggaggaggttacattgttttagaacttatttt

SEQ ID NO: 410726 - DNA, 187 bp, Oryza sativa
gcagatctgtgagcagcacatccgccgcgacaagggcgggggcttcatatagaactgcccaggccttgctcgccaacatggcagcgatgtatgctgtctaccatggtcccgaggggctaaaggcaattgccgaccgtgtacacggcctggctggtacctttgcccacggactgaagaagctcggaac

SEQ ID NO: 410727 - DNA, 303 bp, Oryza sativa
aattttcctccttcacctcctcctactccccccgaggggagcgttctggatcctcctgctcctccgccgccaccgccgccgcagataggagaagatggccgcacttgataccttcctctttacctcggagtctgtgaacgagggccaccctgacaagctctgcgaccaagtctcagatgctgtgcttgatgcctgcctcgacgaggaccctgacagcaaggtcgtttgtgagacctgcaccaagacaaacatggtcatggtctttggtgagaacaccaccaaggctaacgttgactttgagaa

SEQ ID NO: 410728 - DNA, 274 bp, Oryza sativa
ggcaaccatggatgcacactctgctttcatgtttctcctgactttgatccatcttcttttgcagatatcagctcgtgatttcctctcacctggctcctctctctcagtagagcgcagttctgatgtgctctactcaccagatggtactttcgcctgcgggttctacaacatttcccccaattcctccatcttcgcagtttggttctccaactcagctgaaaagacagttgtgtggagcgctcatcttgggcgtcctgtgtacacctggcgatcc

SEQ ID NO: 410729 - DNA, 392 bp, Oryza sativa
gtcttttctaccaaatttactggcatgcaggtaccggatgattggcatgaaacaagtacacttttggctgcattggagaagattgaatcatggatattttctcggatagtagaaacagtgtggtggcaggcactaactcctcacatgcaaactccggtggaaggatcgtcaaccccaaagactgggagagtgttaggtccttctttgggtgatcagcagcaaggcaccttttctgttaacctgtggaaggctgcattttcacgatgcattcaacagaatatgccccctccgtgctggtggacatgaatgtggctgtttaccagtattggcaaaattggtgatggagcaacgcgtatgccgtttaagattgctgattgtttaattgcattcct

SEQ ID NO: 410730 - DNA, 175 bp, Oryza sativa
gcggtttccttgtgcgcccaccacaacaaccactacgacggggccatgaacttcatgcaccgggacgaggaggtggactactacccgtcgcgccacgcgccgctccgccacgcgccgccgacgcccatcacgccgcgccccgaggtggggaggaggctgatggtctctattcaca

SEQ ID NO: 410731 - DNA, 216 bp, Oryza sativa
cttttctttgggcgcggagcgcgaaggacaaagggttgggttcttatgcttattcgcgggctatggacgaaagtagtgaagaaagagatagaggtgcgacattgactgtggctgcggcttatttggagaccaagaagtaccgtgtagttttgcttgactctcctggccataaagatttttgtaccaaatacgatatctggcgcaacgcaagctgat

SEQ ID NO: 410732 - DNA, 420 bp, Oryza sativa
ttacttgacatactctactactactagccagtaagctagctaactaactacgtggctatggcccccaccgtgatggcctcctcggccacctccgtggctccattccaagggctcaagtccaccgccggcctccccgtcagccgccgctccaccaactcgggcttcggcaacgtcagcaatggcggaaggatcaagtgcatgcaggtgtggccaattgagggcatcaagaagttcgagaccctatcgtacctgccaccactcaccgtggaggatcttttgaagcagatcgagtacctgcttcgatccaagtgggtgccttgtctcgagttcagcatggttgggttcgtccaccgtgtgaaccacaggtcctccggttcccaccttggctggctttgtctctatgtggcaccttcttccata

SEQ ID NO: 410733 - DNA, 251 bp, Oryza sativa
ttcttgaatgagaaggaggctaaagaaaaaggaaaaggatcatttgcttatgcgtgggctatggatgaaagtagtgaagaaagagaaagaggtgtgacaatgactgtggctgtggcttatttggagaccaagaagtaccgtgtagttttgcttgactctccaggccataaagattttgtaccaaatatgatatctggcgcaacgcaagctgatgcagctattcttgatgttgaagcttgcactggttcatt

SEQ ID NO: 410734 - DNA, 455 bp, Oryza sativa
catggacattgttgcttacacttcgatgatcactggttattcagaaactgtggattcaattgcatggaacgcatttgaaattgccactgatatgctgcagaacaacttggaagtaaaccgtgtgactctggtaagcttactgcaaatagctgggaatctgggagcacttcaggagggtaaatctctccattgctactccataaggagagcaattggtgtctcagatgatattctagagaccagcattgtgaacttttatactcgatgtggagcttatcagtcagcggctactgttctgcaaaattcatagggaactgttgcttcatggaatgctctgctttttggtcttaatagagctggaccagagtttaatgcaatccaagtatttgcctgtgatgctgcatgagcataatggcacttccgatttctgcactttttgcaaacttggctttcaa

SEQ ID NO: 410735 - DNA, 424 bp, Oryza sativa
agcagagcgaaaagagggtagcatacaggctatacatgaatagcgtccaaaaatacacgggactccgacccataaacccagtcactatccgacaccaatcaagcgcgacatcagggacactcgaacacccaagaatcggggcaggactcatgactaacagaacaaaaaaaaacatatggtctttttttttcgccaggaataggcggtattatggggggcaaggtgaatgtggaggactgggaagccaacacccttacttgcacttgaagccatggcacacggacaggatgatgatgaggatgagcgcgatgatgatgcccaggacgatcagcttgatcttcatgttttgtaaccacatttttcgccgcacctttgtaccctgctgtctgaaatcttgtgcctgagatctcaggttttcagtctt

SEQ ID NO: 410736 - DNA, 205 bp, Oryza sativa
tgatgatcatagatggggaggtgaaacttgaatcccagttctatttctacatggagacacagacggccttagctatccctgatgaagataactgtataaccctctatgtgtcggcgcaactacctgagattactcaaaatactgttgcgaggtgccttggcattccatatcacaatgtccgtatcatcacgagatgagtcggagg

SEQ ID NO: 410737 - DNA, 344 bp, Oryza sativa
tttgttcgtcaagatccccgacgacaagatgaagtactacgaggagcgcgccgtgatgtacgtcggcgacgacgtctcgccggacttctacggctgggtgttccccaagtgcgaccacgtcgccgtcggcaccggcaccgtcacccacatgcccgacatcaagatgttccaggccgccacccgccttcgcgccaaggaccggatcgagggcggcaagatcatccgcgtcgaggctcaccccatccccgagcacccgaggcctaagagggtggcggggagggtgacgctggtgggggacgctgagtgggtacgtgtcaaagttgctccggcgaggggttctactt

SEQ ID NO: 410738 - DNA, 378 bp, Oryza sativa
tggcttagctgtctgcagaagtatgacaacttggtaaactttaccaagcacctcaaggtccaattactggaagctgattctgattcatcagcaacaggattgggatcaactgatccatcatcatcctctacacccaggaaaagagcgtcttctggtcggagttataagccaaaacccagagctaagaaggaacgaacagaggaggaaaagaagttcaggcgaaaagcaaagcatttccttgcgacacagctcgttgcggttcttctattcctatcgctcatgggtggagccgattgctcagagcttgacgatgaggacggtgtagaccacgaagattaaattcctcctttgttgcaccgcacgaatcttttctgaagt

SEQ ID NO: 410739 - DNA, 335 bp, Oryza sativa
tttgttggacacagccagcccacgcaggcccgccgccgccgccgacatggacccttcggcgccgtccggtagctccgccgacgcctcggcgtcctcctcttcttccgccgtagaggacctcgccccgggcatggcggccatgagcctccaagaccggttcgagttgctgcggggcatcggcgaggagtgtatccaggaggacgagctcatgaatctgctgcagaaaaagcccgtccccatctgctacgacggatttgagcccttcggccgcatgcacattgcccagggcattgagaagacaatcaatgttaacaagatggtcagggctggatgca

SEQ ID NO: 410740 - DNA, 453 bp, Oryza sativa
atcttttgttcgtctccactcccctcccctcccggctctccggatcccccgcgcgccgccgtcgtcgcccgcccgccggtcgatacccctccgcggcagccatggctgagcagactgagaaggcattcctgaagcagccaaaggttttcctcagctcaaagaagtctggcaagggtaagaagccaggtaagggtggcaaccgcttctggaagagcattggccttggcttcaagactcccagggaagcaattgaagggacatacattgataagaagtgcccattcactggaacttgttctatcagaggcagaatcattgctggaacatgccatagtgctaagatgaacaggactatcattgttcgcaggaactacctccactttgtgaagaaaaatcagaggtatgagaagaggcattccaacattcgggtcaacgttttccatggcttcgtgt

SEQ ID NO: 410741 - DNA, 239 bp, Oryza sativa
gttcctgcctacgccggcgacgacctgcggcgtggtcggcgatgcagagcacatccatgatgaatgctgatgggttggatagatatgcactcagcaaagaccagttgcagcacattatgccgaaaaacacagaaagtgtacttgatatgccacacttgcaaagattataagctgacgattcagcttccaatcttggacaggttgcaaaccagtgacaccaaagttagggccgagggctg

SEQ ID NO: 410742 - DNA, 257 bp, Oryza sativa
ccggttgttcacaattgagccaggaccgatgagaaggggtagtagaacacatacacgatgaatgccgatcgttgatagaatcactcagaaagaccagctgcagacattatgccgaaaaacacatacagcgtacttgattgccacacttgcaaagattataagctgacgatccagcttccaatcttggacaggttgcataccagtgactccaaagttagggtcgaggtcagatccaaagtataacccctgatctaatt

SEQ ID NO: 410743 - DNA, 74 bp, Oryza sativa
gttggtccaagatgttcgggcgcgcgccgaagaagagcgacatcaccaagtactacgagatcctgggggtatct

SEQ ID NO: 410744 - DNA, 389 bp, Oryza sativa
gtgtctattaaacattgtcgtcgttactacatttactgtatgcttgccgtgacgaggatgatttcagtgttctttcacacataaattctgtaacttctagtgtagctaaaatatcaattgatgctactcctgaattggctggtgaaatcaaacatctttttatcatgcttcttctccctactgctgaaaaattagggtgggaccctaagaacagtgtatgccacctggatgcaccgcttataccagttcttctttctggccttgttcattcttggtccatttctgtctattatttttgttgaactcttcctctatttcttactctttttattcacatatttctttttactctctttttctcttttttttttttcttctactctctcttc

SEQ ID NO: 410745 - DNA, 199 bp, Oryza sativa
tttcgtatctcgacgcgtgcctcgcccaggaccccgacagcatggtggcgtgcgagacgtgcaccaagaccaacatggtgatggtgctcggcgagatcaccaccaaggccaccgtcgactacgagaagatcgttcgtgacacctgccgcggtatcggcttcttgtccgactacgtttaacttttctcttccgcctgcta

SEQ ID NO: 410746 - DNA, 375 bp, Oryza sativa
ctgttctcttgggttctgcagatatcacctatagggagattccagagagtgaactgcaatcaggttctctaaatgcagaagctggccaggcagtgccatctgtgtcattagtcaagaagaagtttcttggaaaatatgcaatatcagcagaagaattctctgaggaaatggttggggccaagtttcgcaacgtagcatacctcaaaggaaaagttccctcatgggtctggtgtcccttcttcttttcttctttctatttttgtacttcccctaatttttacctctctttctcttttctctttgatattttgcttcattttcactattcttctttttcctctcttatttatcttctattttttctctttttttttt

SEQ ID NO: 410747 - DNA, 418 bp, Oryza sativa
tttgtaaagccacgacacctgacattgtgcaacatggaaaactgatttgatgatccaatttcagtaaagcagcagatgagcctaaggtcattgatgctcttcaatagcccaaatgtcagatcaatagataatctcgtcgagtcagcatcatgcttgcgtgtcttggatctgagcaagacagcattaggtgctctcccaaaatccattggtaacctgcttcatttgaggtacctcaatcttgatgaaactcaggtcagagacataccctcttccattggctttcttataaacttggagactttgagccttcagaattgccagagattgcagagacttccttggaccgttcgggcattgctacagcttatatgcctttcgcttacaagaaacttttttaatcatggtccaaagggtgttg

SEQ ID NO: 410748 - DNA, 369 bp, Oryza sativa
tttcgttgccgccgccggtcgatccgtgttcttggctcaggcggcgtcaatggcggcggcgaatgggagcgcctgcggcggaggcggcgtggacaaggagaaggaggagttcaagcagatctacggggtgctcaaggaggagctgctcagggaccccgccttcgagttcaccgactcgtcgcggcagtggatcgatcgcatgttggactacaatgtacctggagggaagtgcaatcgtggtctctctgtggtcgatagctataagctgttgaagggcaccaatgttctaagtcaggaagacatgtctctcgcgagcactcttggttggtgcgttgaatggatttaagcttactttcttgtgcttgatga

SEQ ID NO: 410749 - DNA, 423 bp, Oryza sativa
aataaagaaagtaaatattccagtagtgtctccctctcccagctagcccaggaagcagcacagcctaacagctacaaaaatttccaaacatagttgcatacggaaaagagaaaaacatggaagccgtccttaaccacaattcaaatagaccccgtccttaccactcctcccaaacgagaaagttggtcatattaaaacaaaaacaaaaacaaacttttatccagaaccttacttcctaagacataatctagagaaggtcagcgacgttggccggcagctcctcgatggtcacattgtagaacctctggatgtcgaacagcatcctctcatcatcgcgggtgacaaagttaaaggcaacttccttcctgccaaaccgaccactacgaccaatgcgatggaggtagttctcaggctgggtgggca

SEQ ID NO: 410750 - DNA, 179 bp, Oryza sativa
tgggtgattcatggaagcgattcaagcgcctatgattctgaaggaaggttcgttgctgaaaagctcgaggagatattcgccaagcacgccaagaccgtgcctgatgctctgacatcggacgagttagacgagctgctccatgcgatcctgaagccccgtgactacactggatggttctg

SEQ ID NO: 410751 - DNA, 230 bp, Oryza sativa
ccctcctctcctcgtccctcctccccgccgccgccgcagcagatttaatcctcaatggcggccttcaacaagctcggtagcttcctcaggcacagtggcttgacaagcagtgcctcggccggctcttcccctgccatgttcaatgctgctcgtctgatgtccaccaagcttttcgttggtggtctttcttggaatactaacgacgattcgctgaaagaggcattcaccag

SEQ ID NO: 410752 - DNA, 235 bp, Oryza sativa
tgtctttcttctatagagtgagctatgatgaggaacttgcatctcgacttagatatgcaattgaagccaacaaactgagtgcagcagacagatatggtgtacttgatgacacatatgccctctgtatggctggcaaacagaagctagtctccttattgcatttgattgctgcgtacaaggatgaatccgagtatactgtgcttgtccgtgtcatatgattcaagtttgagcattg

SEQ ID NO: 410753 - DNA, 369 bp, Oryza sativa
cctttttagatctgatgtcatgaaaccactgaaaattgagcaactcatggacaggcaggttccaactctttctggaggggagctgcaaagggttgcgctttgtctttgtcttgggaagcctgctgatatttacctcatagatgaaccaagtgcccatcttgattcagagcagcgccttcttgcagcgaaggtcataaaaagatttatcctccatgaaaagaaaactgcttttgttgttgagcatgattttatcatggcaacctaccttgctgataaggtggttggtttttgagggcaaatctttttctcttccctttctatcacattttccttaaccccctggttccttatatatattccatatttttt

SEQ ID NO: 410754 - DNA, 219 bp, Oryza sativa
tcggctgttgctgctgcctgggcggacccgatggcggtgcttgcatgacctgtcaggagatgaccactgccacttacagcttccttggcgctgccaccaacaaggggtctggtgctgcttccggaggatcagagatgggggcggtgaactgcagctgcggttgcaacacctgcaagtgcggttccagctgtcgctgttccttgctgcatctgctacttg

SEQ ID NO: 410755 - DNA, 248 bp, Oryza sativa
ccaccctctcgccgtcgcagatccgatccaggaagagctggccgccgccgctgccatggcgctctccgtggagaagacctcgtcggggagggagtacaaggtgaaggacctctcccaggcggacttcggccgcctcgagatcgagctcgccgaggtcgagatgccggggctcatggcgtgccgcgccgagttcggcccctcccagtcgttcaagggcgcccggatctccgggtccctccacatgacca

SEQ ID NO: 410756 - DNA, 402 bp, Oryza sativa
tacattattaagtgccgaagattacatattaggagggccaaaagattttagtgtcgcttacatctcctcaccagaaattggattcttgaaaaacgtgggtgctaagctcaagaaaagcaacaccaagctaattttccggtttcttagagaagacgtcgctgagcataccaccaagaaaacgtatggagagatcctgaaagacctgaaattccgcaagggctttgcctaaaggattcttggcccccagggaatacattgggccattgggcagggaccagtatctgcggctgcctactagtttggtcaaggatgcacatgcccttgggcttgaagcctttcgcctctggatttgccaatgatgccttcatgaggtacaactacagctttgatccccgtgcagag

SEQ ID NO: 410757 - DNA, 389 bp, Oryza sativa
caaatgttatgattgagttcaatgagctagttccctttaggctgacacgcaatatgcaagctttcttctcaaatttcggtgttgaaggtctcattgtgtctgccatgtgttctgctgcccagtctgtggtttcaccaaaacaaagccagcatatatggcaccatttggctatgtttttccgtgatgaactgttatcttggtcatggaggaggccacttggcattccttctgttccagttgctgctggaatgattaacccgttggatttccagcaaaaggtgataaacaatgtggagcatgtcattacccgtatcaaattaatatcaccacattatcttgctgatgaggaggagaattcatttgagccaccttagttggtccaaagaggc

SEQ ID NO: 410758 - DNA, 214 bp, Oryza sativa
ctgttcttgaagcagcagagcgaggtagacatggcgggcggcaccatggacatctcgtgcccggcgctggccggcaaggccaccgcgaaggtgttcggcgaggggcgcattaccatacgcaagtggaccgcgaaacccaatcccgtctaatcccggagcctgggccggactccgaaacccacgccgctcttccacagggagggttacagggagg

SEQ ID NO: 410759 - DNA, 98 bp, Oryza sativa
gtgataacctggtgcggaagctcggggcggagcacggggggtttatgggccaggtgggcttcttctacagccacgagacgagccgcctgtcgctggag

SEQ ID NO: 410760 - DNA, 95 bp, Oryza sativa
gcgtagcagggttcacaaggcaggagaaaatgggggagatcttttaaagtaatggggggctatgccacctcgaagcagaagcttccgaagatgat

SEQ ID NO: 410761 - DNA, 221 bp, Oryza sativa
gttgttttgttccgtttgcttgagcttgcaaaggcaacagagccaaccatactagacaagctttgcgctgctctaaacatcaacaaaagaagtgtcgacagggatctcgatggttaccgaaacatacttttcaaattggcccaggctaatgaactatttaaggaatacctgtaatgggaaaagaagatatgtgagcttatgttcctagatcccattatttt

SEQ ID NO: 410762 - DNA, 205 bp, Oryza sativa
taatttgctaaaagtcaaactgtggctgggggtgggctaatatcagtatgctcacttgtggcaagatcatcttgacaaactttttgacctgtatgcctctggaaagctaaaggtttcccttgacccgaagaaattcgcgggtgtagcttctgcgcctgatgcggttgaatatcttcattctggccagagagttgccacggtcctc

SEQ ID NO: 410763 - DNA, 452 bp, Oryza sativa
  unsure (1)..(452): unsure at all n locations
agactatccgcgacccgcgcgggttcgccgtcaagttctacacccgcgagggcaactgggacctcctcggcaacaacttccccgtcttcttcatccgcgacggcatcaagttccccgacgtcatccacgccttcaagcccaacccgcgctcccatgtccaggagtactggagggtcttcgacttcttgtcccaccaccccgagagcctccacaccttcttcttcctcttcgacgacgtcggcatccccaccgattaccgccacatggacggcttcggcgtcaacacctacaccttcgtcacccgcgacgccaaggccaggtacgtcaagttccactggaagcccacctgcggcgtcagctgcttgatggacgacgaggccacgctcgtcggcggcaagaaccacagccacgccacccaggacctctacgactccatcgncgccggcaacttt

SEQ ID NO: 410764 - DNA, 283 bp, Oryza sativa
cgagtacttagggtgccaatgccaaggctcaggaggcgggttgaaactcgtttgaaggagttcacaaaacacatttgcaatgctgaccacatttaatgaagttgacatgactaatttgatgaagctgcggtctgattataaggatgagtttgtcaccaagcacggggtcaaattgggtctgatgttctgctttgtcaaggctggtgttacagcactttaaaaccaaccaattgttaatgctgtcattgatggggatgactttatattcatggtactttttttg

SEQ ID NO: 410765 - DNA, 198 bp, Oryza sativa
cacttctaatgagggtttggtcatctattctgttgcatatgttgatggcagccgtggacgtcggcccatagctcataggctcagctttgttgagatggttgttccttatggagatcccaatgaaccacattattgcaagaatgcttttgatgctggagaagatggtcttgggaagaatgctcattctcctaagagggg

SEQ ID NO: 410766 - DNA, 365 bp, Oryza sativa
tgtacctatatctgcttgaactcagtgaaaagaatagatggggtccttctacgggtgtgagcgaccttttgaattcccatctcttgagtatctttttattgaacatttaacagcactagaagagtgggttgaaatgacaggaacccatctggatactctgatgaaactaaggaagagtaccttgaaaatcctagtgatattggaatcaaatccaatgttaaacccaacatgaaggcacttgaaaatccataaaaagtcaaggattccattctttagtggaaagtttgatcaggtacgtgtcaacctgccgaatggggacatgggtaggtcacactggtgatattgaagccacagtagttgcttgc

SEQ ID NO: 410767 - DNA, 397 bp, Oryza sativa
tgtttacgccgtcgtcggccttcaagttcaacgggcgcgcgcttgagatcgagcgtgccatgtcaacaaccggcagtcccatgttcgtccccccccgcagcatcaaattctactcctacttcagggctctacagtgcacaacctagtactgctatgttcaggattactggagggtcttccacttcatgccctacctccatgagagcctcctcacacttcttcttccttttcgacgacgtcggtattcccacttatacctccccattggcggtctcggagtacaaatatctacaccttcgtcacccgcgacgccaaggccaggtacgttaagttccactggaagcccacctgcggcgttaggtgcttgatggaccacgaggccaccctcgtcggcggc

SEQ ID NO: 410768 - DNA, 192 bp, Oryza sativa
tatttgggggaacacctacaccttcttcacccggggggccaatgccagataccccatgttccactggaagcccacctgaggcgtcagctgcttgatggaccacaaggccacactcgtcagcggttagaaccatcagccctcgccatctatgacctctacgactccattcgccgccagctatcttcccaattg

SEQ ID NO: 410769 - DNA, 455 bp, Oryza sativa
tgttttcgagccattaccttgtctccccaccagagagggagagaacatctggtgaatacttggtaaagaatggcgtccgcaccttcgcttgcagtgagacagtgaagtttggccatgtcacatttttctggaacggaaaccgatctggatactttgatgaaactaaggaagagtacgttgaaattcctagtgatattggaatcacattcaatgttaaacccaacatgaaggcacttgaaattgcagagaaagccagggatgccattcttagtggaaagtttgatcaggtacgtgtcaacctgccgaatggtgacatggttggtcacactggtgatattgaagccacggtagttgcttgcaaggcagctgacgaagccgttaagattattttggacgcgattgaacaagtcggtggtatttatcttgtcaccgctgatcatggaaatgctgaggat

SEQ ID NO: 410770 - DNA, 336 bp, Oryza sativa
ctcatcattagcaaccaattcgcaccgatcgatcgagcgagcgatccagcaactagatcaacagtactagctaggaagcatggcccgtgcacagttggtgttggtcgccctggtggcagctctgctcctcgccgccccgcacgccgtcgtggccatcacctgcggccaggtcaacttcgtcgtcgggccctgcctgacctacgcccgcgggggcgccgggccgaaggcggtctgttgcattggcgtgaggagccttaaggcggcagtatgtacaaccttagattggcgtaccggctgctactgtcttatgaacgcggcccgtggtattaaggggtt

SEQ ID NO: 410771 - DNA, 352 bp, Oryza sativa
gttctagatcgcgagcggccccttttttttttttggtgggtttgttttaataacagcgccagacatgctatttatctcaatggggatgaggggcccctatgcttcgggaaaaataatgcaggcattctagaagcctcattacgtaagcactgcgctgcgcagcaatccttgagataataccaatgagttaagtgtactcatcgggatttggctgggttctaataagtgggagaccatcttttctccacacaattcggtcctcacatagggcagcaactgcctcaacataaacctgatgaccctcatgaaggactctcgtagcccaatgctctggagtattaatggcttgcac

SEQ ID NO: 410772 - DNA, 315 bp, Oryza sativa
aaagaaattgcacccattatggcaacgtactgggagaaggcagagttcccatttcatgccattcctaaactttcaagcctcggtgtagctggaggcacaataaagggatatgggtgcccaggactttcaataacagcaagtgctattactatggcagaaattgcacgggtagatgcaagctgctccacgttcattctagtacactcctcccttgcaatggtcacaatagctctttgtggatctgaggttcagaagcacaagtccttgccattccttgctcaacttactgctgtagggtgctgcgcttttggcaga

SEQ ID NO: 410773 - DNA, 426 bp, Oryza sativa
ctcttgtctccttctggcctgtgtcgtggcagcggccatggtgtctgcagtgtcatgtgggccgcccaaggtgccgcctggccccaacatcactgcggcctacggcaaacagtggctggaagctaggggtacctggtacggcaagccaaagggtgccggccccgacgacaacggcggcgcttgtgggtacaaggacattgacaaggctcccttcctcggcatgaactcatgtggcaatgaccctatcttcaaggatggcaagggctgcggctcctgctttgaggtcaagtgtttcaagccagaggcctgcttcgacaagcccgttatcatccacatcaccgacatgaacactgagcctatcgtcgcctaccactttgaacttttcgggcatgcttatggtgccatggctaaggaaggcaaggttga

SEQ ID NO: 410774 - DNA, 187 bp, Oryza sativa
tgaatctgttgtggtttacacaaggagggctcacaggaagtatgctttcgagtcatatatttgccaaagaatgtttggtggtttccaagaagagagcttctctgtgaaggctgttaacattactgtttccaatgagggtttcttccattcagttcctggcagtacgagccctggatccttcggatgt

SEQ ID NO: 410775 - DNA, 216 bp, Oryza sativa
ttgctgcctcctcctctcgtcttctccttcgggggggggagctacttaacttattcaaccatgggtaaggagaagacgcacatcaacattgtggtcattgggcacgtccactccggaaagttgaccaccacgggccatctgatctacaaggtcggaggcatcggccagggtgtgtccgacaggggccccagggtgacctacgcccacagctagagc

SEQ ID NO: 410776 - DNA, 443 bp, Oryza sativa
tggaggcagcacactgcaacttaagtttttctataggtcctagcaagctagcaatggctccctcggtgatggcttcgtcggccacctccgtggctcccttccaggggctcaagtccactgcgggcctcccggtgaaccgccgctccagcagctcgagctttggcaacgtcagcaatggcggaaggatcagatgcatgcaggtgtggccgattgagggcattaagaagttcgagactctgtcgtacttgccgccattgacagtggaggaccttttgaagcagatcgagtacctgctccgatctaagtgggtgccttgcttggagttcagcaaggtcggattcgtctaccgtgagaatcacagatcacccggatactatgacggtaggtactggaccatgtggaaactgcccatgtttggatgcaccgatgccacccaagtgctt

SEQ ID NO: 410777 - DNA, 443 bp, Oryza sativa
ttagtacgtgaagtagaagccattggagggaatgtctctgcatcagcctctcgtgaacaaatgtgctatacctatgatgcattcaaggcctatgtacctgagatggttgaagtgcttattgatagtgtgaggaacccagccttttttaactgggagattaaagagcagctggagaagatcaaggctgaaatagctgaagtttctgataatcctcaaggtttacttctagaggcactccattctgctggctattctggggcactggcgaagcccctaatggcacctcagtccgctattcataggttggacagtagtatccttgaggaattcattgctgaaaattacacagcacctaggatggtccttgcggcatctggagttgaacatgatgaactagtttcaattgctgagccacttctgtcggatcttcccagtgtgaaagc

SEQ ID NO: 410778 - DNA, 403 bp, Oryza sativa
ttgatatcttcgggttcgacccgctggggctatgggggcctgttgggaccggtgggttcatctagccacggtggctggcctacggcgaggtgttcaacggccggacggcgatgatgggcgtcgtcggcatggtcgccccggagctcctcggcaagctgggcctcgtccccgccgagacggcgatcccgtggtttcagaccggcgtgatccccctcgcgggcacctacacctactgggccgacccttacactctcttcgtcttcgagctcgccctcgtcggcttcgccgagcaccgccgcttccaggactgggacacgccggggtccatggggaagcagtactttctcggcctatagaagaccctcgtcggctccttgcagcctgttctacccctgggggcctt

SEQ ID NO: 410779 - DNA, 313 bp, Oryza sativa
agctatatgttggaagaagcatacaggcggcagcggggaggcatggccacacacgcagcgctcgcggcgtcccgcattccggccaccgcccggctgcacagcaaggcggcgtccaagcagagggtggacttcgccgacttctccggactgaggccgggatcgtgctccatcagccacgccgcgagggaggcgtccttctccgatgtccttggctcgcagctcgtcgccagggctaccggagagaacgccttgagggcgccggctgaggcgaagctcatgggtgccactaacggcttcggccgcattggccgta

SEQ ID NO: 410780 - DNA, 422 bp, Oryza sativa
ctttataccagggacaatgttgctgtgctgggtctgggagatttgtgcatgagcgtatgtatgatgagttcctggagaaggccaatgctagggctactaagcgtggggatggagagcccaacctaccagtgcttgggcagaagcatcatcaactggcaagccgatgtggagagatgcatagagtgggaagcccacagccgccgcgccaccgggctgacgcttcgcttccctcaccgaggcgggcgaaggagcatcggctgcccactcacttgctgtcaaggggcccacccatgacctgtcactgcaagcaggctgcctgtaggatcagccgagttagggaaaggattgactctgtccggtccagtttttctggagatggtgattttaaggactggctattcagcctggatgttcccaaagca

SEQ ID NO: 410781 - DNA, 344 bp, Oryza sativa
tgcctccgccgtctcgcgccagtgcgtctctgtgctggcgcggtgaacatggcggagcagactgagagggcattcttgaagcagcctaagggttttctctgtcctaagaaaaccaccaaggggaagaagcctggcaagggcgggaataggttctggaagaacattggccttgggttcaagacacccaggggagccatcgaaggaacctacattgacaagaaatgcccattcactggtactggatcaattaggggtcgtattatagctggaacatgtcatagtgctaagatgaacaggaccatcattgttccgaggaagtatctgcactttgcatagaagtacca

SEQ ID NO: 410782 - DNA, 280 bp, Oryza sativa
atcccaaatgttctcattgattgatagcgatatcatagaagcagcgacacgaattaagatttaaaaccaaccccaagaaggatcgcagatccaactccaccgaatcgatccaagaactccggctaatccaaccaaaccatgggcgatctcatttcaccaacacgacacgaacttataaaaagactaacaccaccaccaccttcttcttatttagggactcgacgacttaagacgacttgatactggcgaaaggggaaaggggaccccccagatctaggag

SEQ ID NO: 410783 - DNA, 225 bp, Oryza sativa
tcgtgctagagcggcaagcttgcatgcactacatagggggaggaccattacaccaagtgaggcgggtgtacatgctccgaagcatggaccgtgcacagatggagttggccgccctggaggcagctctgctcctcgccgccccgtacgccgccgtggccatcacctgcggtcaggttaactccgccgtcgggccctgcctgacctacgcccgcggcggcgccaggc

SEQ ID NO: 410784 - DNA, 150 bp, Oryza sativa
ggcgctcacacgccgtggctcggcgcgcattggggggagggcctcgtccgccctctccgccgcgcactccagggcttggatcctctgaccgcggcgagcatgtttgccggtgcgcggtgcattggcgagaggaaggtgaatggggaggat

SEQ ID NO: 410785 - DNA, 279 bp, Oryza sativa
gatcgcccttcctcctcctcctctcctccttgcggggtcgtctccctgatcagccgcagctcgttgccggccgttgttgcgcggccatggaggcgagcgccgggctggtggccgggtcgcacaaccggaacgagctggtgctgatccgggggcacgaggagcccaagccgctgcgggcgctgagcgggcaggtgtgcgagatatgcggcgacgaggtcggtcgcaccgccgatggtgacctcttcttctcctgccaccagtgcaggtttcccggtgtcg

SEQ ID NO: 410786 - DNA, 437 bp, Oryza sativa
tcagcgcgcatgtccgtgcactcagcatgtggcggcttcgcgacatcttgaacagcggacaaataaactccagtaagctcatccaaggggaacaccggaatggcatccagagcccaacctaccagtgcttggcagcaagcatcatcaactggcaagccgatgtggagagatgcatagagtgggaagcccacagccgccgcgccaccgggctgacgctcgccttcctcaccgcggcggcgaaggagctcggctgcccactcacttgctgacaaggccacaccatgactgtcactgcaagcagctgctgtaggatcagcgagtaggaaaggatgacttgccggtcagttttctgagatgtgatttaagactgatattagctgatgttcccaagcatgatacggggcttgctccaagatgtgaattttactttacttttg

SEQ ID NO: 410787 - DNA, 436 bp, Oryza sativa; identical to SEQ ID NO: 387180

SEQ ID NO: 410788 - DNA, 278 bp, Oryza sativa
caaaaaatcaacccaaccgccgccgcatcgccctggttggaacgatggccgcgtcggcgctgcaccagaccaccagcttcctcggcaccgcccctcgccgggatgagctcgtccgccgcgtcggcgactccggtggccgcatcaccatgcgccgcaccgtcaagagcgcgccccagagcatctggtatgggcctgaccgtcccaagcacctgggcccgctctcggagcagacgccatcgttcctgaccggagaggtcccgggagaccaccgatgggac

SEQ ID NO: 410789 - DNA, 384 bp, Oryza sativa
ggggcaaaaaacagttgatataggaaatagctgcgaggtcagttattttcgcccaagcaaaaatagtaccgcttaagttcaggacacaggtaatgcccaaaccaaaaggcctttttaaagagacatactgatcgaacattcatgaaaaggttgtaacgcttgcgggggggaacaaaaataatttggccttggggttgcccactcaacacgaaggattagggtattataaccataaccattgggcttggtgatagccttttaaggggcctctttgggaacaaaggtggcgaagccgaaccccccgcttggtccaggcttttgatcccccgcaccctaaccccgggtaactggcccaaatgggcggaaaaacttaaggtgggcggg

SEQ ID NO: 410790 - DNA, 246 bp, Oryza sativa
tcttctcctcctcctctcttccatcgccgctgctgggttccttcccctctcccacgagagatggcgtctcacattgttgggtacccccgcatgggccccaagagggagctcaagtttgccctggagtctttctgggatgggaagagcagcgctgaggatttggagaaggttgctaccgacctcagggccagcatctggaagcaaatggctgacgctgggatcaagtacatcctcagcaacatcttc

SEQ ID NO: 410791 - DNA, 429 bp, Oryza sativa
gtatcttaatgctgtgggatctgtcctgtctgggggggcaattattacaacctgcgttgctcaaatcatgacaaacacaattcagaagaaattcaaggtatcttcaacacagctgctgtaccaatcatgcccataccaagcattgaccttgttcatcgtcggccctttccttgatgggtttttgactaaccaaaatgtctttgcttttgattacacatctcaagttgtgtttttcattgtgctgtcatgcttgatatcagtctcagtgaacttcagcacttttcttgtgattgggaaaacctctcctgtaacttaccaagtgcttggccatctcaagacatgcttggttcttgcctttggttattgttttgcttcacgatccatttagctggagaaatatacttggaatcctcattgctgtgaatggga

SEQ ID NO: 410792 - DNA, 243 bp, Oryza sativa
cttatgatgaaaaattcttcccaacaaatgcagcaggttgctggagaagagaaaaacgagctgctgtattacttgagatcgctgtcacctgagaaggttgttgaactctcggagtcttcctgccctggtgtggaagaagctgtttactccgcggtacatgggctgctagcaactctctcccccaaaatgcatacgaatcgctctccgacctcagagaacatggcgggtggagctgtatatttt

SEQ ID NO: 410793 - DNA, 115 bp, Oryza sativa
taataatctagtctttcgacgagctctccctgctctgattactgctgatattgatcttggatctcaatttccaaccaagaacacacagacagagaatggaaggagaagaagattt

SEQ ID NO: 410794 - DNA, 161 bp, Oryza sativa
ttccatgcgtccgctgactgtgccgtgctcatgatggactccaccactggtggttttgaggctggtatctccaaggatggccagaacccggagcacgctctttttgctttaacttttggggtgaagcaaatgatcttgcttctgcaacaagatggatgcca

SEQ ID NO: 410795 - DNA, 259 bp, Oryza sativa
atccttctcctccggctcttcttcagtatcgaggggggtcttctcctcgtgcccaccaccaccaccgtagcaatggcgggcaacgggccgatcaacaaggaggacccgctcaactggggcgcggcggcggccgagatggccggcagccacctcgacgaggtgaagcgcatggtggcgcagttccgcgagccgctggtcaagatccagggcgccacccttcgcgtcggcctggtggacgtcgtcgcccaggccaaggacg

SEQ ID NO: 410796 - DNA, 146 bp, Oryza sativa
ggcgttttcgtactcgcctctctccgcgccctgctcgggcgcccgttgccgccgatcgtgttcgacggcaccgtcgtcgacatgagggagtgcatctcgatccacatcgggcaggccgggatccagggcgggaaaccgtgctggga

SEQ ID NO: 410797 - DNA, 321 bp, Oryza sativa
ggtattgttcgtgctgggggagatggcgaacatcacggtgctgaacttattgagtccctgagaagaatgcctatgcaggtttcttcaaagcaagaagtggtggatgctctagttaaagaacaattttctgtggatgttgcacggtgggtggctacaaatctccgacgaagcagtccattagggtcactatcgtcttcaagcttctcatggatttttgacctaaatggcatatctgacatgtacaagtcctatgaagagactaacttatgggggattgcagagaatggaccaaggggtgttcatattaatttccttaaagct

SEQ ID NO: 410798 - DNA, 456 bp, Oryza sativa
aacctttcccaaaattagccccgatccgatcgcttggtagccctgattcgaggtaaaaaaggggaggagaagatgagggagatcttgcacatccagggcgggcagtgcgggaaccagatcgggtccaagttctgggaggtggtgtgcgacgagcatggcatcgacccgacggggaggtacgccggcacgtcggacctgcagctggagcgcgtgaacgtctactacaacgaggcgtcgtgcggccggttcgtgccgcgcgccgtgctcatggacctggagccgggcaccatggactccgtccgcacggggccctacggtcagatcttccgtcccgacaacttcgtcttcggccagtccggtgccggcaacaactgggccaagggccactacaccgagggcgccgagcttatcgactccgtcttgacgtcgtccgaaggaggccgagattgcgactgc

SEQ ID NO: 410799 - DNA, 469 bp, Oryza sativa
gtttatttctcccaggacaaatcatggcgagtgggttatatggttgccaatcaattgtatgagctctgcgaggcagttggtcctgaacattctagggagcagttggtgccggcatatgttcgtctccttcgtgacaatgaggcggaagtgcggatagcggctgcagggaaagttactaagttctgtaggattttaagtcctcagcttgcaattcagcatattcttccttgtgtcaaggaattgtcatcagattcatctcagcatgttcgttcagctttggcttcagttattatgggaatggccccggtcttgggaaaggaggctacaatcgaacaacttcttcctattttcctttctttgctcaaggatgaatttcctgatgttcggctcaatataatcagcaggctcgatcaagttaatcaggttattggaattgatttgctgtcacaatcactgttaccggcgatcg

SEQ ID NO: 410800 - DNA, 462 bp, Oryza sativa
gaccccaaatgttctcattgattgatagggatatcatagaagcagcgacacgaattaagatttaaaaccaaccccaagaaggatcgcagatccaactccaccgaatcgatccaagaactccgcctaatccaaccaaaccatgggcgatctcatctcaccaacacgacacgaactcataaaaagactaacaccaccaccacctcctccttatttagggactcgacgactcaagacgactgatactggcgaaaggcgaaggggaacagcacagatctaggagagctggccgcagtcggcgatgacgaccggcttggcggtgctcccgccgcgggatcccaccttctcgatggccttgacgacgtccatgccctcgacgacgcggccgaacacgacgtgcttcccgtccagccaggttgagggcacggtgcagatgaagaactgggacccgttagtgttgggccc

SEQ ID NO: 410801 - DNA, 235 bp, Oryza sativa
tctgtagtgaaacagcagaaaaaatcaaacagggggaaaaaatattccccatctgtgaaattcgcaaaaccctagcgcggcggcgatgtcgaacacgagggtgttcttcgacatgaccgtcggcggagctcccgcggggcggatcgtgatggagctgtacgcgaaggacgtgccgcggacgggggagaacttccgcgcgctctgcaccggcgagaagggcgtgggcaagagcggc

SEQ ID NO: 410802 - DNA, 458 bp, Oryza sativa
cgtctgtctgcagcagaagtacacccagagcggcggggtgcgccccttcggtctctccaccctcatcgtcggcttcgacccctacaccgagaagcccgccctctaccagaccgacccatccggcaccttatacgcctggaaggccaacgccaccgggcgcaactccaactccatgcgcgagttccttgagaagaattacaaggacacctccggcaaggagaccatcaagcttgccatccgagccctccttgaggttgtcgagagcggtggcaagaacatcgagattgcggtgatgacacacacggatgggtctccgcgagctggaggaggctgagatcgacgagtacgtggctgagattgaagcagagaaggctgccgccgaggccgcgaagaagggcgccccgaaagaaacctgacctgatcatcatgattcagcaaagcataatctctcttagcat

SEQ ID NO: 410803 - DNA, 419 bp, Oryza sativa
ggtgtgagctacgagtacgtcgaggaggacatcttcaacaagagcgagctcctcctcacctccaacccggtgcacaagaaggtccccgtgctcatccacggcggcaagcccatctccgagtcgctcgtcatcgtgcagtacgtcgacgaggtctgggccgcggcgccatccgtcctccccgccgacccctacgaccgcgccgtcgcccgcttctgggccgcctacgtcgacaacaacatgttccctggaatggctggcgttcttttcgcggcgacggaggaggagagggcggcgaaggccgaggagacgctggcggcgttggcgcagctggagaaagcgttcgcggagtgcgcgggcgggaagggcgttcttcggcggcgactccatcgggtaccgtcgacctcgcgctcgggagcaac

SEQ ID NO: 410804 - DNA, 473 bp, Oryza sativa
aaagcacagccgccattactgctcctcttccattccactggggacgtacgagctctgcgcatcccttccattccattactgaccttggctgcgctgcagagggggtttggtggtgcggttgatttccggcaataaattctctagggggaggtatcggtcatggctgccgctgctgcaaggaggggctcatcgctgctctctcgctgcctgctgtccaggccctccgccgccgcctcgcctgctgtcccctctgcgctccgcagggcagatgggacacaagaattgttgctgggaatccttcagaggttcagcactgcagcagtagcagaggagcccatatcacccccagtccaagtgaactacactcagcttctcattgatggcaaattcgttgatttagcatctgggcaaactttcccaactctggacccctggaccggggagctgattgcccatgtggcttgaggcgatgc

SEQ ID NO: 410805 - DNA, 378 bp, Oryza sativa
gcttttgtgagagagagcgatacgaacaagagaaaagggttctccagacaccgcggcgggcttccccaccccatcggaaggaagaagacgaccagctcgcgcgctcggatctcagccatggagaaggcgatcgatcgccagcgcgtcctcctcgcccacctgctcccctcctcctcctccgaccaatcgctcctctccgcgtcggcgtgcgccgccggggacagcgccgcctaccagaggacttccgcctacggggacgacgtcgtcgtcggcgctgcctacaggacacccatatgcaaggccaagcgaggaggtttcaaggatacatacccagaggaccttcttactgttgttctaaaggctgttctggacaacact

SEQ ID NO: 410806 - DNA, 437 bp, Oryza sativa
tgtttgccaccgcgacgtcggggacgtgttcgtgcccctcgacgacctcctcgccggcgcgcacgacggcggcgagccgaggccggctagctaccaggtgcgccgccccatgtccgcccgcgcgcacggcacgctctacttctgctacaggttcaccgacgtcaagcatcccgccctcgaagccatcgaggccgcgaccgcgaccgcgacgagcagcgccaccaaacaagggcagtacgtgcccatgtacgcgcaggactctgatgagaaggcgactgagaagagcgtgtcgtcgccggtcaccgcctacccgccgacgtcgaacgccgtggtagcgcacccgccggtcgtgccgtacggcgcgccgtacggaggagggttcccaccgcatcagcagcagtacggttacgcgggtcagccggcgttcgcgtacaacg

SEQ ID NO: 410807 - DNA, 410 bp, Oryza sativa
atttgttgagtcgaggctgaacaggggaggggaggggacgagttgaacaaaccatgggaggggaggggattctggttgactattcaatatccatggcgagggggatttgcttcctgtctacctcctcgtccttgccatgtgccacaaaaccgccctgctgctcagtgtcctctgtcttaccctcgtctccgttctctcatcaatgccgaggtaggaaaacgagttgcgggtcaattagggcgctgcgggaggattggagggagagatccaaggccatcccttctggtggcgtctacccagccaaggaccactgcagccaatgtgggctttgtgacacctactacattgcgcatgtcaagaatgcctgcgcattcctaggagatggtatgttccgtgtccaggatttggag

SEQ ID NO: 410808 - DNA, 349 bp, Oryza sativa
ggtgctgattctcgagaagcttttagctgagggggaagaaagcaatgaagctgaagctagacctaaagttagacttgtagttcctaacagttcttgtggtggaatcattggtaaaggagggtcaacaatcaagtcattcattgaagactcacatgctggaatcaagatttcaccacaggataacaattttgttggtttgcatgatagactcgttactgtcacaggacccttggaccatcagatgcgtgcaatatatttgatattaagcaagttatcggaggacgttcactacccacctaatctgagttccccatttgcatatgcaggccttggtttccctagttaccct

SEQ ID NO: 410809 - DNA, 352 bp, Oryza sativa
ttataagcaaacaagggataggtttgccgttcagggcccacccagagccagcggactgcacctcgcagtccggcatggctggacagatgctaccgccgattgcgcttgttgctgtggccatctgtatcaccgcggcggcggcggcgaaggtgccggcgatatacgtgttcggcgactccacggccgatgtcggcaacaacaactacctgaccggcgccgccgtgccgcgggcaaacttcccgcacaacggcattgacttccccacgtcgcggcccaccggccggttcagcaacgggtacaacggcgtcgacttcttggctcttaacatgggattcaggcgcagccccccacc

SEQ ID NO: 410810 - DNA, 453 bp, Oryza sativa
aatggttttcctccaccaagatccccttcctcctcctggccgttcttcttctcctttccgtcgccttcccagcggaggtgatggcaggagggcacgggcgcggcggaagcagcggcggcggcggaggggtggccggcggcgggaacctgaggccgcgggagtgctcgcccaagtgcgcgggccggtgctccaacacgcagtacaagaaggcgtgcctgacgttctgcaacaagtgctgcgccaagtgcctgtgcgtgccgtccggcacctacggcaacaagggcgcctgcccctgctacaacaactggaagaccaaggaaggcggccccaagtgcccctaagatgcatgctttgtgtctttccttctttttttttaccctatgaataaaacctgctcctactaggtctacattgggggcactggctcactgacactggtttagcttatggatc

SEQ ID NO: 410811 - DNA, 520 bp, Oryza sativa
ggacacaatgattagggatcacttattcattatagttcttccatgctgctctaccacagcaaaacgtttcagacaccatcaaaccagacttaaggatacacattacaggtaaatagtacacaatgaaacgggacacgaccaaggaccagaccagacaaccatagctccattggggaagacaaataggcagacttgtgaaccctagaacagcagcagctccatggctgaggacttactggccaccacggaggcggagcaccaggtggagtgtggactccttctggatgttgtaatccgcaagggtgcggccatcctcaagctgcttaccagcaaagatcagacgctgctggtccggggggatgccctccttgtcctggatcttcgccttcacgttgtcaatagtgtcggacgactcaacctcaagggtaatggtcttgccagtcagggtcttcacgaagatctgcatcccacccctgagcctgagaaccaggtgaagggtggactccttctggatgttgta

SEQ ID NO: 410812 - DNA, 424 bp, Oryza sativa
catgatcatcacccttgaggtcgagtcgtctgacaccattgacaatgtcaaggccaagatccaggacaaggagggcatccccccggaccagcagcgtctcatcttcgctggcaagcagcttgaggatggccgcaccctggccgactacaacatccagaaggagtctaccctccaccttgtgctcaggctcaggggaggcatgcagatcttcgtcaagaccttgactggcaagaccatcacccttgaggtcgagtcgtctgacaccattgacaatgtcaaggccaagatccaggacaaggagggcatcctcccagaccagcagcgtctcatcttcgccggcaagcagctggaggatggccgcacccttgctgactacaacatccagaaggagtccaccctccaccttgtgctcaggctcaaggga

SEQ ID NO: 410813 - DNA, 373 bp, Oryza sativa
cattcttccagtaccctgatgttaaccacgccactgtgaagactcccagtggagagaagcctgtcagggaactcgttgctgatgatgagtggtttaatacggaattcatctctaccgatcagcagcgtggtgccggcatcattaaggcgaggaagtaatccagtgtcttatctgctgccagctttgcatgcgatcacatatgtgactgggttcttggtactcctgagggaacatttgactacatgaaaagggtcatcgtttgggttgtctggtgtaactggtgaatcttatctattacctgctcttggcatggcctaaggagatgagaagaaagttgtctggattttctcttgtctacaacaaagaaggtaaa

SEQ ID NO: 410814 - DNA, 498 bp, Oryza sativa
gcagatgtttctcctcgggggcgtgggcgcgatcctcgtcgtcgtggtcgtcgtcggcgtggtcgccaccgtcacccgctccggcaacaaggccggggacaacttcaccgtcccgggggaggccaacctcgccacctccggcaagtccgtcgagtccctgtgcgcgcccacgctgtacaaggagtcgtgcgagaagacgctcaccacggccaccagtggcaccgagaaccccaaggaggtgttctctaccgtcgccaagtcggcgctcgagtcgatcaagtcggcggtggagaagtcgaaggcgatcggcgaagccaagacgagcgacagcatgacggagagcgcgcgcgaggactgcaaggcccttctggaggactccgtggacgacctcaggggcatggtcgagatggccggggcgactcaaggtgctgttcagccgctccgacgacctcgagcactggcttcaccgcgtcatgacattcatggacacctgcgccg

SEQ ID NO: 410815 - DNA, 460 bp, Oryza sativa
tttatatttacctcctccacctcctcctcctccccccgatcggatcggcccggctcctcctcctccgccgccgccaccgccgccgcagataggagaagatggccgcacttgataccttcctctttacctcggagtctgtgaacgagggccaccctgacaagctctgcgaccaagtctcagatgctgtgcttgatgcctgcctcgccgaggaccctgacagcaaggtcgcttgtgagacctgcaccaagacaaacatggtcatggtctttggtgagatcaccaccaaggctaacgttgactatgagaagattgtcagggagacatgccgtaacatcggatttgtgtcagctgatgtcggtctcgatgctgaccactgcaaggtgcttgtgaacatcgagcagcagtcccctgacattgcacaggggtgtgcacgggcacttcaccaagcgccctgaggaga

SEQ ID NO: 410816 - DNA, 441 bp, Oryza sativa
gttcattggagcaattatggttagcccagaaatatcagatgttattcattctcagagcaataagctcggttcatttgctcatggatttacatactctggccatccagttgcatgtgctgtcgccatagaagccctgaaaatttatcaggaaaggaacattcctgatcatgtgaagcaaatttctccaaggttccaggagggagtcaaggcctttgcaggaagtccgattgttggagagatacgtggtgtagggttgatacttggaactgaattcgcagacaacaaatcgccaaatgatccattccctgctgaatggggcgtcggcgcgatctttggagcggagtgccagaagcgcggcatgctggttagagttgctggagacaacatcatgatgtcaccaccattgataatgacccctgatgaagtcgaggagctggtgag

SEQ ID NO: 410817 - DNA, 389 bp, Oryza sativa
ccgtgacctctctctctgtgtctccgccgccggcgcctccttcgctcgccgcatccgtcggaggcgagatgggcatcaagggtttgacgaagcttttggcggacaatgcgcccaaggcgatgaaggagcagaagttcgagagctacttcggccggcgcattgccgtcgacgccagcatgagcatctaccagttcctcattgtagttggaaggacggggatggaaaccctcacgaacgaggccggtgaagtcaccagtcatttgcaaggtatgttcaaccggacaataaggttgctggaggcaggaatcaagccagtatatgtttttgacggcaagcctcctgatctgaagaaacaagagcttgcaaaaggtactcgagagggaggatgc

SEQ ID NO: 410818 - DNA, 343 bp, Oryza sativa
ggaccaaccaggccggtgttttatctattgaagtagagcgagtacatggtgggatcctttgagggtgccttgactttaggaagcaaggagggtgtctgactaccgggagaaccacaggctttcaggatactatcatgggaaatattgaaccatgtgaaagcagctcatgtggaagagcagcgatgtaacgcatttgctgaaggcgctagaggaggcctataaggcctacccggaggcattggtctgaatgataactttggacagcttgaggcatgggccgacgactagctggattgcatacacgcccccatgctgccaggagcctgcatgcaactaagctaag

SEQ ID NO: 410819 - DNA, 460 bp, Oryza sativa
cccttctctcacattttccccaaataataatagaggaaggggaaaaacacatttgcagccacatcatccatggcctctctccgcaccattccggtgatcttcggcatcctcttctatgtccttcccagcactgccactgccaccgacgcaccggactacgtcgtccaaggccgtgtctactgtgacacgtgccgcgccgggttcgagaccaatgtcaccgagtatatcaagggtgccaaggtcaggctggagtgcaagcactttggcaccgacaaggtcgagcgtgcgattgacggtgtgactgatgagaccgggacatacaagattgagctcaaggacagccatgaggaggacatctgcgaggttgtcctcgtccacagcccccttgcaaactgctctgaaatcgaggccgaagggatcgtgcccgtgttttgctcacaggaatgtcggcatctgtgac

SEQ ID NO: 410820 - DNA, 475 bp, Oryza sativa
ggcgttaatggcgacgagcgggctgaggagctgcagcgcggtgggcgtgccgagcctgctggcgccgtcgtcgaacaggagccgcctgccggtctgcgcctacgccaccacctccgggcgcgtcaccatgtccgccgagtggatgccgggccagccacgccccgcccacctcgacggctcctctcccggtgacttcgggttcgacccgctgggcctcgccaccgtgccggagaacttcgagcggttcaaggagtcggaggtgtaccactgccggtgggccatgctcgctgtgcctggggtgttggtgccggaggcgctggggctgggcaactgggtgcaggcgcaggagtgggcggcggaacccggcggccaggccacgtacctcgggaacccggtgccatggggcacgctgccgacgatcctggtcattgagttcgtcgccatcgcctttgccgagcaccagcgcaccatggag

SEQ ID NO: 410821 - DNA, 463 bp, Oryza sativa
gcaattcttgagctcaatcagcaacaacatctatctgcttcttgcttagttaagtccttcgccctcccaagaagaagaagatgtcttgctgcggcggcaactgcggctgcggcagcggctgccagtgcggcggcggctgcggcggatgcaagatgttccctgatgtggaggccacagccaccaccaagaccttcgtcctcgctgctccatccaacaaggcgagctctggaggaatggagatggcggtggagagcggcgagaacggcggctgcggctgcaacacctgcaagtgtggcaccagctgcagcggctgctcctgctgctcctgcaactgaatctatcgttcgtcgtcgcccggctgcatgagggatttatcgtatgggatgctgctactggtcgatcagagctttgatcgaggccttaatttgcttgcattagtacccagcttatatgtaggcaggcc

SEQ ID NO: 410822 - DNA, 431 bp, Oryza sativa
gcttatattaccaaccctctgcctcccttccggcgacgttcgacgacgaatgcaagccatcctcgccgctgccatggccgcccagaccctctggttctccgccaccgacccttccgcctcccttttccagttcccttgctctgcccgccctttacactcgctccgcctcgccgccggtcccgcgggcgccgccgctgccagggcgctcgttgtggccgacgccaccaagaaggccgccagcgtgctcaagggcacctcccaggttgagggagtcgtgaccctcacccaggatgaccaaggtcctacaacagtgaatgcacgcgtgacgggacttaatgacggacttcaaggggtccaccctcacgagtttggcgatactacgaacgggtgcatctcaacaggaccacattttacccaaacatttgacgcac

SEQ ID NO: 410823 - DNA, 403 bp, Oryza sativa
agcatttacactgtggggcagtatgaatcacacattgcattcacccttcctgggctttaccgagttgtgcatggcatagatgtttttgatcccaagttcaacattgtctctcctggagctgacatgagtgtctacttcccgtacaccgaggctgacaagaggctcactgccttccaccctgaaattgaggagcttctctacagtgaagtcgagaacgatgaacacaagtttgtattgaaggacaagaacaagccaatcatcttctccatggctcgtcttgaccgagtgaagaacatgacaggtctggttgagatgtatggtaagaatgcacatctcagggatttggcaaaccttgtgattgtttgtggtgaccaccgcaatcagtccaaggacagggaggagc

SEQ ID NO: 410824 - DNA, 279 bp, Oryza sativa
cgtcttcttccctcctccctcctcgccgccgacgagctcccggtcatctccgccatggcgtcggagaagaagcagtcgaacccgatgcgggagatcaaggtgcagaagctcgtcctcaacatctccgtcggcgagagcggcgaccgcctaacccgcgcctccaaggtgctggagcagctcagcgggcagaccccggtgttctccaaggcgaggtacaccgcgcggtcgttcggaatcaggcgtaacgagaagatcgcgtgctacgtgacggtgtagagg

SEQ ID NO: 410825 - DNA, 376 bp, Oryza sativa
tttttcgagctcatggactcaggtatccatccgggcatcatagcgaacgatgaccttagaaggaaaggctaccagatggttctggagcagaccatgagggctatgaagaccatccagggcagcgattgagaagtactactagcgaaagaccatgaatatactgaccaactagaacgggctagtggaggtgtgcgatttgggacttgagcgagtgtgattcaaggaggccggtttaacaatataccggacggattatattgaaaccaggcgggaccggggaatttagttatgggtgtaagaggaggagagagagactcctgtgaacgatatttggaggattgggtgcatagatgttgaagttatcactgggagacca

SEQ ID NO: 410826 - DNA, 413 bp, Oryza sativa
cgctgtatatccctcgccgccggcgctaggctcgcgacggcgacgttgaaggcgccatccgaccccgccgtggccacccacccgcaggcgggcgccgccgcggcggcgtcctccagcagcggcctcaccttcaagctccaccccctcgtcatcgtgaacgtctccgaccaccacacccgcgtgaaggcccaggcggcgtgctccggcgacggggcctcgtctgcggcggcgggggggcagccgccgagggtgttcgggtgcgtgatcggggtgcagcgcgggcggacggtggagatcttcaacagcttcgagctcgtcctcgaccctgtctccgggaccctcgaccgcgcctttcttgagaaaaagcaggagctttttaagaagggtttctccgacttctatgtgctgggttg

SEQ ID NO: 410827 - DNA, 476 bp, Oryza sativa
  unsure (1)..(476): unsure at all n locations
gtttggagtctatgcatttagtaaacgggtgaacttgggtgccactagttcaggcagtggccgtggggactgtgtttacactactgttagccacttcaacatcatacactaccaatgtcatcaggaggctaaaagagctgatgctgcactgaagaatcctaaaaaggaatgggatggtgctaccctgagaaataatgagacactgtgtaattgtatctttcccttgagggggccatctgttcctcctgggcagtacacacgatgtctcgaccagtattgggaccaattgaattctctaggacgagcagatggaagtcgccttcgcttgttaacatatgacattgttctgatgttggccaggtttgcaacaggcgcttctttcagcactgactgcaaaggtggnggtagggagagcaactcgcggatttttccctttatgatccaaaaggcttctcatcttgtagatggaagtgcca

SEQ ID NO: 410828 - DNA, 392 bp, Oryza sativa
tgttgatgtatggcaatttagtggctggtgggaaggagttctagtcagtgcagacaacatttcagctgatagcctacaaatatattttccaggcgagaacttctttagtgtatgccagctaaagaatttaagaatttcgaaagattgggtcaagagccactgggttgatatagaaatgaaaccagatgtgttatcgaaaataccttcggttggggttcaaacaaggcaacctgataatctgacatctgcagagaggccggactccagaaattctgcaatgcttgaccaagagcttgcagccatacaaacaaactctagtgaagataaacaaacaggaggtgaccaggcagcagatgctagtttgactgatatggtctctgcttttgttgagg

SEQ ID NO: 410829 - DNA, 433 bp, Oryza sativa
gctctgtgaaggaggtcaataaagttatgcaacgtaagggtcacaaaagcgctgttacttgcctgtgtttcgctctgaattctgagcagattattacagcttccaaagatggtacaattcgagtatggaacattaatgtaagggaccatcttgatgaagaccctaaaaccttgagagttttgccaattcctctccatgattcaaaaggttctgtttgccagtatgatcacatgagtgtatctcctgatgagaaagttctggccacgacaagtggatcaacgctgcaatggttatgtgtggaaactggtgcagttcttgatacagctgagaaagcacatgaaggtgatataactggcattgcctgggctccacgaacaattccaaatggtggaactcctgcttttgttttagcgactgctggagtggacaaaag

SEQ ID NO: 410830 - DNA, 482 bp, Oryza sativa
tttttcctttctcctccacccccccccccaaacgacttaaccgccgacgacctcatcctcgtcggcgccgtcggattcaccagcgagggaggttgcggcggcggcggagagcgcgagggaggaaagcgggggaggtgaccgccagcgatggggcagcagtcgctgatctacgcgttcgtggcgaggggcacggtggtgctcgccgagtacacggagttcaccggcaacttcaccaccatcgcggcgcagtgcctccagaagctccccgcgagcaacaacaagttcacctacaactgcgacggccacaccttcaactacctcgtcgaggacggattcacatactgtgtagttgctgttgaatcagttgggcgacaaatccccattgctttccttgacagagtcaaggaagatttcaccaaaagatttggtggtgggaaagcagctactgctgcagcaaacagccttaaccgagaattcggatc

SEQ ID NO: 410831 - DNA, 410 bp, Oryza sativa
aacggggggagctgtggccacacctctgcccccacctactactcctctaggggtgcctcccaatcccctgcatggccaagaccaagcagggcaagaaggacgtcgaatcctacaccatcaagggcaccaccaagatcgtccgagtgggggattgcgtgctgatgcgggcgtcggacacggagaaggcgccgtacgtggggagggtggagaggctgcagacggacgggagggggagcgtgcggatgctggtgctggggtactaccggacggaggagaccaagggcgggaggaggcagatccatggcgccaaggagctgttcctatacgaccacttcgacacctagagcgcccacaccagtcagggcaagtgacgtcaccactccttcaagaactacaccaagctcgacaac

SEQ ID NO: 410832 - DNA, 486 bp, Oryza sativa
gtttctctctgttcttgctgcttgcttggtggtggtggtagctttcatgatggaggcgatggtggtggtggcgctggtgcttctcatgtcgtccagtctcgtcgcttcagattggtgcgtgtgcaggtcggatcagccacaggcggcgctgcagaagaccatcgactacgcgtgcggcgcgggcgcggactgcaactccatccacgagcaggggcagtgcttcaaccccaacaccgtggtggcgcactgctcctgggccgccaacagctacttccagaggaacagggccatgggcgccacctgcgacttcaccggcaccgccaccctcaccaccagcgacccaagtgtttctggctgctccttccctgctagtgcaagtggtgctggaacatcaaccactccgaccatgggaggcacaactggaacaatgaccccaggaaccttcacacctggaactggtatgggcacaaccaccggcaccggcat

SEQ ID NO: 410833 - DNA, 451 bp, Oryza sativa
tttcaaggaggctatgaagatgggtgttgaagggtaccataacttaaagtctgttatcaagaagaagtatgggcaagatgctactaatgttggtgatgaaggtggttttgctccaaacattcaggaaaacaaggagggccttgagcttttgaagactgcaattgaaaaggctggatacactggcaaggttgtcattgggatggatgttgctgcttcagagttctacactgaggagcaaacctatgatcttaacttcaaggaagagaacaatgacggttcccagaagatatctggagatagcctgaagaatgtgtacaagtcatttgttagtgaatacccaattgtctcgatcgaagacccatttgatcaggatgactgggttcactatgccaagatgaccgaagaaattggagatcaagtgcagattgttggagatgatcttcttgtcacc

SEQ ID NO: 410834 - DNA, 498 bp, Oryza sativa
gcgggcgggtggcattcaacgcccagagcggcacgtccatgtcgtgcccgcaagtgtccggcgtcgccggcctgatcaagacgctccatccggactggagccccgccggcatcaagtccgccatcatgaccaccgcgacggagctgggcaacgacatgaggccgatcatgaactcgtcgatgtcgccggcgacgccgttcagctgcggcgctgggcacgtgttcccgcaccgcgcgatggacccgggcctggtgtacgacctgaccgtcgacgaccacctgagcttcctctgcaccatcggctacaacgcgacggcgctggcgctcttcaacggcgcgccgttccggtgccccgacgacccgatcgacccgctcgacttcaactacccgtccatcaccgcgttcgacctggcgccggcgggcccgccggcgactgcgcggcggaaggtgaggaacgtcggtccgccggcgacgtacacggtcgccgtcgtgagggagc

SEQ ID NO: 410835 - DNA, 488 bp, Oryza sativa
cttgttgccgtcgaaacccaaaatcttctcttcccgtacgtgagaagcgccaggtcgtcgtcgccgccatgggcgtggaggtgtgcgtcaaggccgtcgtcggccacccggacacgctcggcgactgtccattctcgcagagggtgctgctgactctggaggagaagaaggtgccctacgagatgaagctcatcgacgttcagaacaagcccgactggtttctgaagatcagcccagaggggaaggtgcctgtgtttaacggtggtgatggcaaatggattcctgattctgatgtgatcactcaagtcattgaggagaagtacccaaccccgtctcttgtcacccctcctgagtatgcatcagtgggatcaaaaattttctcatgctttacaacgttcttgaagagcaaggatccaaatgatggttcagagaaggcacttcttactgaactgcaggcacttcaggagcatttgaagctcatggtccct

SEQ ID NO: 410836 - DNA, 304 bp, Oryza sativa
cttctcatcccagagcaagaagctcatctcctcctgctctcgcatggcagccatggccaccaccgcgtccagcctcctcaagacctccttcgctggcgcgcgcctgcccgccgccgcccgcaaccccaccgtcttcgtcgcgccgcgcaccggcggcgccatctgcaactccatctcgtcgtcgtcgtccactcccccctacgacctcaacgccatcaggttcagccccatcaaggagtccatcgtgtcccgcgagatgacccggcggtacatgaccgacatgatcacctacgccgacaccgac

SEQ ID NO: 410837 - DNA, 503 bp, Oryza sativa
accataccttgactggtacaagggccccaccttgcttgaggctcttgaccagatcaacgagcccaagaggccatcagacaagcccctgcgtcttccccttcaggacgtgtacaagatcggtggtattggcaccgtgcctgtgggtcgtgttgagactggagtcctcaagcctggtatggtggtgacctttggtcccagtggcctgaccactgaggtcaagtcggttgagatgcaccacgaggctctccaggaggctcttcctggtgacaacgtcgggttcaacgtgaagaacgttgctgtgaaggatctgaagcgtgggtacgtggcctctaactccaaggatgaccctgccaaggaggctgccagcttcacctcccaggtgatcatcatgaaccaccctgggcagatcggtaacggctatgctccagtgctggactgccacacctcccacattgctggcaagtttgctgagctggtgacccagattgacagaccatctggca

SEQ ID NO: 410838 - DNA, 409 bp, Oryza sativa
catacctgaagttccatcgtatggagcggcttcaggtgatctcagtggctgctggagtgatgcacaccactgttttaaccgcagatggtgctattttctactgggtttcatcggaccctgatttaagatgccgacagatattctctatgtgtggaaggaatgttgtgaacatctcagctggaaaatactggactgcattggctaccgcaggtgggtgatgttttctatgtgggatgcatagaaacatatggatgatctcccaatgtttactcgagtgcatggtgttaagcgagcaacgtcagtttgtgttggtgaaacacatatgcttgtgctgtctagcatataccatcctgagtacccaccccaacctaaaatccaatgcatgaaagccctgtttgaatggattggt

SEQ ID NO: 410839 - DNA, 537 bp, Oryza sativa
ggacacaatgattagggatcacttattcattatagttcttccatgctgctctaccacagcaaaacgtttcagacaccatcaaaccagacttaaggatacacattacaggtaaatagtacacaatgaaacgggacacgaccaaggaccagaccagacaaccatagctccattggggaagacaaataggcagacttgtgaaccctagaacagcagcagctccatggctgaggacttactggccaccacggaggcggagcaccaggtggagtgtggactccttctggatgttgtaatccgcaagggtgcggccatcctcaagctgcttaccagcaaagatcagacgctgctggtccggggggatgccctccttgtcctggatcttcgccttcacgttgtcaatagtgtcggacgactcaacctcaagggtaatggtcttgccagtcagggtcttcacgaagatctgcatcccacccctgagcctgagaaccaggtgaagggtggactccttctggatgttgtagtcagccaaggtgcggc

SEQ ID NO: 410840 - DNA, 480 bp, Oryza sativa
  unsure (1)..(480): unsure at all n locations
tcctcaccctggccgactacaacatccagaaggagtctaccctccaccttgtgctcaggctcaggggaggcatgcagatcttcgtcaagaccttgactggcaagaccatcacccttgaggtcgagtcgtctgacaccattgacaatgtcaaggccaagatccaggacaaggagggcatccccccagaccagcagcgtctcatcttcgccggcaagcagctggaggatggccgcacccttgctgactacaacatccagaaggagtccaccctccaccttgtgctcaggctcaggggaggtatgcagatcttcgtcaagaccctgaccggcaagaccatcaccctcgaggtcgagtcctcggacacgatcgacaatgtgaaggccaagatccaggacaaggaggggatccccccggaccagcagcgtctcaattttngtggcaagcaactggaggacggccgcacccttgccgactacaaca

SEQ ID NO: 410841 - DNA, 402 bp, Oryza sativa
ttcagatctcccccatttcaactccctcctcctgcactttcccccccgcatcgagcagcgaagcggcgatggcggaggagcagccgcgcgcggcggcggagggcggcggcgagacgctgatggagaagatcgccgacaagctccacatcggtggggacgggtcgtcgtccgactccgacgctgacgagcgcaagcagccgaagccctcggcgccgccggccccggccgaggtcgcaacggagtcgtttgttgattcggctgctgctgccgcggccgaggccaaggccaagggtgttccgcctcttcgggcgcgaggagcccatccacaaggtcctcgggggaggcaaacccgctgatgtgttcctatggaggaacaggaacatctctgccggtgtactaagc

SEQ ID NO: 410842 - DNA, 333 bp, Oryza sativa
cactgtagccgcctccgcctccgcctccgccgatccccattcattcatccggcgagcgagcgagcgaggagggtcgccgtcgctcgccctgctgcttccgccgcatccgttccctacttatattattttgaagagatgggtagatctccaaggggccggaacctcccagctcgtcgacgtggatcatcttcatccactagtgatataccttcctgctgctggaagatgaaaggaacatgcgagcaaaatgatttagcattggtctttgagaaaaaagaatggaaaggagcttcttgcccacgctgtctggagcttccacatgatgctgcactt

SEQ ID NO: 410843 - DNA, 358 bp, Oryza sativa
tagcttaatgagtttgacaaattcttcaacctgggattcttttgcaatcacagaaggttcaatgttgcaatcactcgtgccaaatctttgctaattatcataggaaaccctcacattatcactaaggatcggcattgggataggctcctgaggtattgtgcagacaatggttcttaccaaggatgcccacttccaccaccagaagagacccaagtctctggatttcgtgacagccaagacgaacctgctaggtggggttacaaccaacaacaagagtcatctgctaactacagctacaagcaagacccacacgactctggttccgaacatgtaaatggtttgccctccactgaaaatg

SEQ ID NO: 410844 - DNA, 277 bp, Oryza sativa
ggtcgccctttttttttatggaggagttccgtggggagttttaggagaagaaccccatgaataaatctgtcgctgctgtaggaaaagcagccggtgataggtggaaatccctgaccgaagcggacaaggctccctatgtagccaaggccaacaagctcaaggccgagtacaacaaggccattgctgcctacaacaagggcgagagcactgccaagaaggcacccgccaaggaggaagaggaggacgaccaggaggaatctgacaagcccaagtccga

SEQ ID NO: 410845 - DNA, 463 bp, Oryza sativa
tgcttaatatggtgcaaaggtgattggttctgcaaaggatagggatagaattccaggcattgacataactcttagtgagggtgacacatggatgtttgctggtcatcaagttcttgtaatggaaactcctggtcatacatcaggtcatgtgtgctaccacttccctggatctggagcaatatttacaggggacacattgtttagtttgtcatgtggaaagctttttgaagggactccacaacagatgtactcttcactccagaaaattatagcacttccggatgagacaagagtgtattgcggacatgaatatacattgagcaattcaaagtttgccttgagcatagaaccaggaaataaagacttacaggaatacgctgcaaatgccgttgatctccgcaggaaggatacacccaccggtgccaacaacaattggggagagagaagcaatggcaatcctttt

SEQ ID NO: 410846 - DNA, 210 bp, Oryza sativa
gttgagaggcagccaaggatacgatagcaaggaagagagagcgttgaagatgctgctgaccaccccgttcgtgtcgtcccctgtgagggtccagggcaatgggggcagcggcgcctcgccgtgggcgggcgcggcgacggcgctgaggatccaggcggcgaagcagctgacggggcgtgtggtgacgacgaaggcggacaagacggtggg

SEQ ID NO: 410847 - DNA, 426 bp, Oryza sativa
gctggctctgggttggccgtgccctcctgtcacacctagcgccgggtagaattcatgcttgttcatgctccaccaccatgcacatgaatgcatttgagcagaaacctggagaatgaagctggcctatcatgccgagctgacacacctcgatgaagtcgacgctgctgggtgccgcacaaccgaccggggggattattcggccctttaactctttcctttgccaggatgatatggtgaatcacattctgagggctcctctataggatttgacaggatggggaagaagcccatcgcttaaggcagacaagcaaggccatgatatataggcttgttagtcgtggtacaattgaggagcggatgatgcaacttacaaagaaaaaaatggcattggagcaccttagttgctgggcgtctcacgaaaggcac

SEQ ID NO: 410848 - DNA, 567 bp, Oryza sativa
cctcccatctcgttttctcgcgctcgattcgaatcccagcgcagggcaaaagcccacgcgcgaagcaaaagctcgccgcaaatggaggacgccgcggtcgaggaggccgaggtgagcggcggcgcggcggagttcgcgccggctctcgtcgccgcccacccgctcggccgctccgtcgccgtcgccgtcgggcccgagctccgcgtgttcgatctcaaggccagcagtgcagtttcattgtcagacaattctggcggtggttctcattcggatgctataagagctatctcgtttagtgcaaacggtgctctgttcgcatccgctggtgatgacaagcttgttaaggtctggaagactgattcatggtgctgcattcggaccataacttctgaaaagagggtcagtgcagttgctattagcaatgatggcacatatgtaacttttgcagataaatttggtgttatttgggtagctaccatggcggaaagtggtggagagcaggagccaactgataataaacctgtgtaatttttggcccttctgccgtattatactagcatgaatttc

SEQ ID NO: 410849 - DNA, 410 bp, Oryza sativa
gccgcgggaaggtattaaaatcgagagcgcccaaccaccgctgctctctacctgtctctgctgcatccgcccacgaggtgttcgacggaatgcgtgagagagacgccgcagcgggcgccacccctccccccatgtgggcctcctccctactccctcttccccctggccacgcgcgggaggggacggggggccgacgtcgccgcgacagcgacccgggcggtgggcgagggggagagcggtgtgatccacccagaatcgtgctgcgatgtcaagatcgaggacagctacatcgtgtccggcgacaactgcatcgccgtgaagagcggctgggaccagctcggcctcaagtccaacatgccgagcctgcacatccttatcaggaggctcacctgcattatcccgaccagcgc

SEQ ID NO: 410850 - DNA, 258 bp, Oryza sativa
gtgaggatgcagccatggcgtcttcgggggcaggggcggggtgcactttcctggggacgaggctggcggacccggcgccgcagagcgggaggatcgtggcgaggttcgggttcggcggcgggaagaaggctgcggcgaataaggcggcgaggccgtcggcgccgacgaccgacaggccgctgtggttccccggcgcggtggcgccggactacctggacgggttgctcgacggcgactacgggtttaacccgatcggcc

SEQ ID NO: 410851 - DNA, 438 bp, Oryza sativa
gtaatatatatgaaggttttcacagggaagttggtctttttcttggccattatcctcttcgaaggatgcttggtcagatctcaaagtgttccatatgactactcagcaaacattgagtgcgtgaaggagccggagaagcctctgtacggcggcggtatcctgaaggagaccgaggctaaggggtatgccagcggcaagaagcttctgtcggagaatagcaagagcgccgctccggtgaagggctccgccctcaaggtcgacctcaagaaggaccaccactacgccttgtccgtgtggctgcagctctccaagggggaaggcgacatcagggccgtgctggtgacccccgacggcaagttcaacaccgtcggcatgatcgcggccaagtgcggctgctggaccatgctcatgggcggcgccacctcctacgacgacggc

SEQ ID NO: 410852 - DNA, 460 bp, Oryza sativa
ggaaatgtgttgttattgacaaggagaacaatgtccaacaggctggtgagagataccggtcatttgaccctgccaggcaagatcgttttctccagcggtgggttgatgctctctcagatcctcgcattacacatgaactccgcggcatctggatctcctactggtcgcagtgtgatgcgtcccttgggcagaagctggctttacgtctcaacctgaaaccaaacatgtagatcggccaggaggaattcagtgggggtgcttatgttggacagtcaaacatgaactgtaatgtgtcgaccagcctttatcgtgaattataagtgatacggtgacatgtatacttggtgacgcaaggtgcgaaactgtatctggaatcacgaaaacatggctttgctgcgtccttgggaaagatattataaagactgatacaatgggtgctatatgtttgaacttgcctatt

SEQ ID NO: 410853 - DNA, 490 bp, Oryza sativa
atcgcgtttctttcatcctctcgcgcatcctcctccgacggcctgggttgggttttgggggcggttggagatgtcggactccgaggagcaccacttcgagtcgaaggccgacgccggcgcgtccaagacctacccgcagcaggctggtactattcgcaagaacggtcatattgtcatcaagaaccgcccatgcaaggttgttgaggtctccaccttcaagactgggaagcatggacatgcaaaatgccactttgtggccattgacatcttcaatgggaagaagcttgaagatattgtgccctcctcccacaactgtgacgtcccccacgtgaaccgcactgattatcagctgattgacatttctgaagatggatttgtcagccttctgactgaaagtggaggcactaaggatgacctgaggctccctagtgatgaggctctgcttactcagatcaaggatggattcgcccgggggaaggatctgattgtt

SEQ ID NO: 410854 - DNA, 317 bp, Oryza sativa
ttctgatttcattgattgctatcctgctcctcctgctgggttccctatatctctagagaaatggaggacaacctaccagccaatgtccgggagtatcaagaactcgccaaaaaagcggtgccaaagatggcttatgattacatcaatgggggagcagaggatgagcacacactgagggagaatatcgcaacatacacaagaattatattacgatctcgcgttcttgtggatgtgagccagatagacatgtcaacaacttttattaggatacaccatgcgtgcacccataaattggggctccactcgggggcacaaaa

SEQ ID NO: 410855 - DNA, 555 bp, Oryza sativa
gttggctcattgtcatggactgctgtagttttcttcacagggtgggttgagctcattggttttgacaatagcagttcagcagcgctaaacagcatgtttgctatcggttgtgccagtggatcatttctaggcggagtaattgcagaccgtctgtcaaaatactatcctgattcagctcgcatcatgtgtgctcagtttagcgccttcatgggtatccctttctcttggatcctccttacagtcattcctcagtcagtcgactactggtctgcttttgctgtcactctcttcttgatggggattaccatcagctggtgcgctacttgcgcaaacaaccccatgtttgcggaggtagtccctcccaagcaccgcacgatgatctatgccttcgaccgcgcgttcgagggttcatttgcctccctggtgctcctgctgttggcatggtcactgagatgatctatggctacaacgcaaagaccgtcaatctggaaaatggatcggtagcaagggcgtttgccctctccaggggctatcgacaacgatgattgtcctttt

SEQ ID NO: 410856 - DNA, 552 bp, Oryza sativa
  unsure (1)..(552): unsure at all n locations
cgacattggagctggatttgggcatttcgctattgcaacgtgagggctgtgtactaattggctgagaaaattaaatccagttgttgctgcgagatcactcgtgaacctggtcctgtcaagggaggatccactgtgattgcctttgcacaggatcctgacggttacatgtttgagcttatccagaggggtccaacacctgagcctctttgccaagttatgcttcgtgtgggtgaccttgatcgctccatcaagttctacgagaaggcccttggtatgaagctgctgaggaagaaggatgtacctgactataagtataccattgccatgttgggctatgctgatgaggataagacaactgttattgagttgacatacaactatggtgtcacagaatataccaagggcaacgcatatgctcaggttgctattggcactgaagatgtctacaagagtgctgaggcttgtgagttggttacaaaagaactagggggaaagattttgcggcagccaggtccactaccagggctcaacacanagattgcctttttcctt

SEQ ID NO: 410857 - DNA, 388 bp, Oryza sativa
gcacaaactggtccttgttatcaacaacactccaacagtcatgctgatacaggtagcaatgcatagcggatttacagccaaacccagacagtactatcataagcacaacgcatgtgccagaatttattcttgttcatagagcggaaaccgcttctttattacattgcactggcattacctacataaggtttgcgctttgcctcctagcacaaaacttgggccatctctcatcttcactggagttccttcaggaagtcggcgttatcaaccaaaaccactttccagccatcagggtcaaggaaagaggcaatctttgtgttgagccctggtagtggacctggctgccgcaaaatctttccccctagttcttttgtaaccaacttaacag

SEQ ID NO: 410858 - DNA, 457 bp, Oryza sativa
gccgccgtcgcatgccgtccgccttgctcctcctcgccgggagcttggtcctcgccgtctcctctccccacgcgcagatctaagcctagggttagggtttgtgtagctcgcagcgatggcgatcaagaggaccaaggcggagaagaaggtggcgtacgacaagaagctctgccagcttctcgacgagtacaccaaggtgctcatcgccgtcgccgacaacgtcgggtccaaccagctgcaggagatccgcaagggcctcaggggcgactccatcgtcctcatggggaagaacaccctcatccgccgctgcatcaaggtggacgccgacaacacccgcaacaaggagttcctcgagctcatgccccttctcgccggaaaccgtggcctcacttcaccaagggtgacctcaaggaggtccgcgaggaggttgccaagtacaagggtggagctcctgctc

SEQ ID NO: 410859 - DNA, 311 bp, Oryza sativa
cggaactacccgttgagctcaagcatataaataaacccgggccagggggaggtggaagacgaagatgaggaacaagctgggcacccgcttccccgcggcgcggatcaaaaggatcatgcatgctgatgaggacgttggcaagattgcactagctgtccctgtattagtatcgaggggcctggcattgttttcgcaagatgtaattgaccgaacttacgaaattacactgcaaagtggtgcaaagacatggaactccttccaccctaaagcaaggtgcgaggaggtgcacggacttatgacttcctaactga

SEQ ID NO: 410860 - DNA, 503 bp, Oryza sativa
ggcaacaaaaatgcctttaaggcacttattgctgcagagtgacactggagtcaaggtcgagctgaccaagaattttgagatgggtgtctcaaacaagacccctgagtttctcaagatgaacccccttgggaagattcctgttctggagactcctgaaggtgctgtttttgagagcaatgctatcgcgcgctatgttgctcgcttgaaggacaacagctctctttgtggttcttctcttatcgactattctcacattgaacaatggatggacttctcagcaacagaggttgatgccaatattggaaggtggttgtacccaaggcttggttttggcccttatgttcctgtgcttgaggaatttgctattacttcattgaagaggtcattgggtgctctgaacacacaccttgctttaaacacataccttgttgggcattcagttactctagctgatattgtgatgacatgcaacctatattatgggtttgttcggatcttgatca

SEQ ID NO: 410861 - DNA, 413 bp, Oryza sativa
agcaaactctcctcatacgacagagagagcgtgacagcgggaggggtttcggaggcgggagcgggcgacggcggcggcggcgggcgccagcgagcggcgaagggcgcgctggagatgaaggagaaggggtcgagggcggcggtggacgagcgctacgcgcagtggaagtcgctcatcccggtgctctacgactggttcgccaaccacaacctcgtctggccgaccctcttctgccggtggggaccccagtttgagaaggctacctacaagaatcgtcagccgttttacctttcagagcagaccgatgggactgtccctaatactctgggtattggcaactgtgaagttgtaaaaccaagggttgcagctgctgacatatatcccagtccaatgaggaagcacgatcacctttt

SEQ ID NO: 410862 - DNA, 392 bp, Oryza sativa
gtctactttaccctttctctcgccgtcgcagatccgatccgggaagatttcgtcgccgccgctgccatggcgctctccgtggagaagacctcgtcggggagggagtacaaggtgaaggacctctcccaggcggacttcggccgcctcgagatcgagctcgccgaggtcgagatgccggggctcatggcgtgccgcgcctagttcggcccctcccagccgctcaagggcgcccggatctccgggtccctccacatgaccatccagaccgccgtcctcatcgagaccctcaccgcccttggcgccgaggtccgctggtgcttctgctacatcttctccacgcaggaccacgccgccgccgccatcgccagggacttctccgccgtgttcgcctg

SEQ ID NO: 410863 - DNA, 412 bp, Oryza sativa
atgaagttatctgatccatttgatccacaaacagaatgagggttgggtggaggttaccccgaaaactctggctgatgttaaaggtggcacactgatctcatatgaagacaagggtcagctcctggagattgcacaagttcctgatgcacatgtgaatgaattcaaatccatcgagaaattcaagatcttcaacacgaacaatctatgggtgaacttgaaggctatcaagcgccttgttgaggctgatgcactaaagatggagatcattccaaaccctaaggaagtggatggagttaaagttttttagttggaaacagcagctggggcaataatcaaggtctttgatcacccattgggatcaatgttccaaggtcccggttcctaccagtgaagggaacttcagatttgcagc

SEQ ID NO: 410864 - DNA, 464 bp, Oryza sativa
gtaaaactttgttgacatttgccatcgttaccgggatgggtcatacttaaatctgtctggtgtcccacatgcagaattactggtgatggaagcgataacatgcttaaggcatctcaagacactaataatgggcaaagggcagctgggagaagcattttttcagttgttgtctgagtgcccattactgactactctgacagttagtgatgcatccctcgggagtggcattcaagaagtaactgttaatcacgatggattacgtgaacttcaaattttgaagtgtcgtgcacttcagaatatctgtcagatgttcccagcttcaaatactctcattgaggcgaactggcatggctcatgtatcactcaacttgccccagttggttgaattgggatttcagacctgccataaactttctgataatgccatttccccaagctgctacagcttgtccgctgttagcatc

SEQ ID NO: 410865 - DNA, 611 bp, Oryza sativa
ctcacttcaccgttgcaatggcctaactgctgctcttcggcatgctccttccttcccgttccacaaggaagagaacttctggttgcttctagcagatgctgcatcgaatgaagtttggttatcccagaaggtcagcttcatggatgagactaccgctataactgcagcatcaaaagctatacaagagacccaagaagcactaggtgcaagtgcaaaggaaatagggattgcgattagagaggcagtcgacagggtgaagaaaggcagtaggttggtaatgggcaagttccaagccccggccgagggcactcacaacctgacttccttctgtttgtgcgacgcatggataggatgtgacaccaagaccagcttgaagttgaaggtcctgaagcgcagccgggcaggaacaagaggtcatgtggctgaagaaggcccagtggcagaggatggtattgaggaagaagaagaggaggaagaagaggagtacgacgactacgagagcgagtacagcgatgacgaggaggatgagaagagcaaaggaaagggtaaggtcgcgaacggagtagcccaccaaaaggcaaactccgatatagattctggcagtgatgatc

SEQ ID NO: 410866 - DNA, 460 bp, Oryza sativa
gcatattaaagcctcccatcaacttcttgcacacaccctccctttggctttcatctgcatctattcagttgcagattgagagccaaagacattatcttgattctatcaggagggttgtgctagcgaattcttgttagcaacaaattgacatattgctcggcacatccccaccgagaataccaagatgacgttctctggtacacaggacaagtgcaatgcttgtgacaagaccgtgcatttcattgatctccttaccgcggacagtattccctaccacaagtcttgcttcagatgcagccactgcaaaggcacactttcgatgtgcagctattcgtccatggatggggttctttactgcaagacccattttgagcagctattcaaggaaacaggcaccctcaagaagaacttcccctcaggtacaaaggcaaacagtgaacaggctaagattcccagcaag

SEQ ID NO: 410867 - DNA, 553 bp, Oryza sativa
  unsure (1)..(553): unsure at all n locations
gtcgcattgttatttacaagacagcgtactactcctttgaccttcctgtggccaatgctttgctcttatctggcgcaaaacttgaagacttcagtggtctaaaggatatacttattgaaatgggcatatattttcagatacaggatgactacttggactgttttgctgaccctaacaccataggcaagattggaactgacatcgaagatcataagtgttcctggttaatagtacaggctcttggtcatgctgacaacaatcaaatagaagtactacataggaactatggcaagaaggattcaagttctgtttccgaagtaaagaggacttacgcggcgcttgatttgaaagatatcttctccgagttcgaacgtcgatgctacaaccacctggtcacctctatcgaagctcagaaggatcatgcagcacgggagatcctgaaatcatttctgaagaaaattcatcaaaggaagaagtggtaataagttataacaattatgacctgtatgagcctattggtacatttaaaaatgatcngaatctatcttcccat

SEQ ID NO: 410868 - DNA, 184 bp, Oryza sativa
ccggattttacgttcagagggcgcagttataatccgtgggaaggtttttgttcttgtaaaggtgtagaaaatagctaacgccatgaggtggcagacaagattgactgatcatgagggtggccctcatgtgcctgagaagatactctttgcggcttaaacattactgggctgctgaatgctatat

SEQ ID NO: 410869 - DNA, 292 bp, Oryza sativa
attatagtttgacgtcgccgccgatcacccgcgccttcgacgagctgggggcctttgacctcgccggatctccccgatggccgagaccttcaccgacctccacaccgccgacgggctcaaagccctcgagcagcacctgtccggcaagacctacgtctccggaaacgcgatcagcaaggacgacatcaaggtgtctgccgccgtgccatcaaagcctggagctgagttcccgaacgctgcttgctggtatgataccgacgctgcggccctagcttcaaggctccctggcaag

SEQ ID NO: 410870 - DNA, 290 bp, Oryza sativa
  unsure (1)..(290): unsure at all n locations
cgcaagcaattaagataaatattaagaaaattgtttaaaaaatatgatataatatttgtagccccccgactcactagtcaacggcgaaccagttgatgtagtgaggcagaggaaaaggaaaatatcatatagaagaaaattcatgatgacttagcctttgtaactattttcccttggtgatggcagagtgtggccaatattgggaacaaaagtcgtccaatcaataacaaatgaagaccaccagcttgactgacaactaaangcctgtcgaccggtgaaaagcgaaaaag

SEQ ID NO: 410871 - DNA, 551 bp, Oryza sativa
ctcgccttctccgccgccgagcgcctggagcagggtcagccatggccgtaggtaagaacaagcgcatctccaaggggaagaagggatccaagaagaagaccgtcgatccctttgctaagaaggactggtatgatatcaaggccccgtcggtgttcaatgtgcggaacatcggcaagaccctcgtgtccaggacacagggtacaaagattgcttctgagggcctaaagcatagagtgtttgaggtctccttagctgatctccagaacgatgaggatcaggcgtacaggaagatcagacttcgtgctgaggatgtgcaagggaagaacgtgctcaccaacttttggggcattgcgtttactaccgataagctcagatcacttgttaagaagtggcagacactgattgaggctcatgtggatgtcaaaccaccaaccgcttcatgctgcgtctgttctgtatcggcttcaccaagcggcggccctaaccgggtgatgaggactttgtatgctcaagcaagtaagtccaaacagattcctcgcaagatggttgaa

SEQ ID NO: 410872 - DNA, 381 bp, Oryza sativa
gcgaagatgactttaggctgcttgtgtacgagctcatgggtcgaggaagtctagaaaaccacttattccgaaggacagctactccactatcctgggctactaggatgtcggttgcattaggggctgccaaagggtcagcttgcctccacaatgctgaaaggccaatcatctacagggatttcaagacatcaaatattctgctggactcagattatactgctaaactctctgactttggcctggcaaaagctggcccagaaggcgatcaaacccatgtatcaacacgggtgatgggaacatatggttatgctgcccctgaatacgtgatgactggtcacttgactgctagaagtgatgtctactgcttcggtgctgtccttc

SEQ ID NO: 410873 - DNA, 197 bp, Oryza sativa
gaattatccaaaggttttactcaacacaaagaagtggggcatgtttaagaagccagtcctgggtggcaaccgcttatgtaagagacattggcctcggctttaagacccccagtgaagcaaccgaagggacatacattgaccactaagtgcccattcactggaactgcttctatcaataggcagaatcttcgcttgaa

SEQ ID NO: 410874 - DNA, 393 bp, Oryza sativa
gcagcattttgattttgaagcagcagagcgaggtagacatggccggggccactttggccctctcgaccgcggcgctggccggcaaggccgccgcgaaggtgttcggcgaggggcgcatcaccatgcgcaagacggcggcgaagcccaagcccgccgcgtcggggagcccgtggtacggcgccgaccgcgtgctctacctcggcccgctctccggcgagccgccgagctacctgaccggcgagttccccggcgactacgggtgggacaccgcggggctctccgccgacccggagacgttcgccaagaaccgggagctggaggtgatccactccaggtgggcgatgctcggcgcgctgggctgcgtgttcccggagctcctcgcccgcaacggct

SEQ ID NO: 410875 - DNA, 408 bp, Oryza sativa
tccgactctggcgctgaccatcgcaccgacagggacgcctttgactggatacagctcgtccaccggtaagggaggagagacggcggcccgagccacggtacacagcaacagtggtgggtgaggcttgcatcaccgtgcttgcttggagaactccacctcagaagcccaggggcggtcatgaccgattgagaaggctcctgcacacggaggaaccagagcaagggaatgcttgcagtacacttggagcagggtgactgtattattgatggaggaaatgagtggtaccagaacactgagaggagggtgaaggcaatggaggagcgtggtctcctctatcttgggaagggtgttttcggaggaagaggagggtgccctctatggtccgcccttgatacctgttggttcatt

SEQ ID NO: 410876 - DNA, 461 bp, Oryza sativa
gttagcacagcatattacaaaaggaaatgaagatgggttgtttattagttcagtggcttcttgttcaaatctgtgggctttaataatggatgctggcactggatttacttctcaagtatatgagctttctcaacattttcttcacaaggaatggataatggatcagtcggagagaaacttctatatcacttcattagcaggtgcaaacaatggcagttctctggtggtcatgtcaagagggacgcaatatgcccaacaatcctacaaagtaagcgactcatttcccttcaagtggataaacaagaagtggaaggagggtttctatgtcactgctatggccactgcaggaagccggtgggcagtggtcatgtcccggaatgctggctttacagatcaggttgtggagcttgacttcctgtatccaagtgagggaatacatcggcgttgggacaatgggtttc

SEQ ID NO: 410877 - DNA, 481 bp, Oryza sativa
ggggcatttgagtttggcattcctcctgaaaacatcatggcgaagctacttttttgaggaacatctggagagtatgctggattcgatcccactgaacccactacacgaagtgggggtgaagcactagcagcccatcaaattatacagggtagatttagttcatgaccattcggtatggcatttatcacttgttgccagattatttatcttctgcatctgttcagaaccatggatataagacacttgttatgattggagatggtgcaactgatcttgaggtatggaactgaaatgctcctggatattatatacgatgtaaatatgattctttggcaagagaccaactaccgggtgcagcaaagatgtaagcggataactgctttatttgttatattgctgagatattgcactccctttgggcagtgtgggtaataagttgcatgagagttagcatctaccaaaaagaaatgcgttacaaata

SEQ ID NO: 410878 - DNA, 223 bp, Oryza sativa
cttccagcctttcttcataggaatggaagctgcgggtatgcatgagactacattcaactccatcatgaagtgcgacgcggatattaggaaggatctatatggcaacatcgttctcagtggtggcaccactatgttccctggcattgctgacaggatgagcaaggagatcactgccttggctcctagcagcatgaagatcaaggtggtctctcctcctgaaagg

SEQ ID NO: 410879 - DNA, 444 bp, Oryza sativa
tttccattttgatcttggcaagcgttgcgccaaggactgggatgcctgtgcccgcttcgccaagtggcgtgccgacctcaagattggccccaacgagccatcgtagctttccattgacctgaatgctcagggtcttgctcgctatgccatcatctgccaggagaacgggctggtgccgattgtcgagcctgagatccttgtcgatggctctcatgacattgagcgctgtgcctatatcaccgagaaggttctcgctgcctgctacatggccctcaacgaacaccaatgtcctcctggagggctccctcctgaagcccaacatggccaccccaggatctatatccaagatggtttcccctcagctcatcgccgagaacaccgtccgccccctccagaggactgtccctgctgccgggcctgccattgccttcctttctggtggac

SEQ ID NO: 410880 - DNA, 485 bp, Oryza sativa
gtagaatatactttctccttccttgtgcgtgagcgtgagtgacaatttgatgaaccgcgggttggcgcagcggcgaacctgctgttcctggagagccccgtgggcgtgggcttatcgtacgcggcggtgaagccgcaggaggtgtacagcaccataggggacaacatgacggggcacgactcgcacaccttgctgctccggtggctcgaccggttcccggaatacaagacccgggacctcttcatcgtcggcgagagctacgccggccactacgtcccggagctcggcgtcaccatcctcgacaacaacttgctcccgcacgcgacccccatcaagctaaaaggaatcgccatcgggaacggcatactggagttcgcggctgagcaaacgcagcttgaccagtacctgtggcagcacgcgttcatattggactcggcgcacgcgctcatcacgcagagctgcaagtaccccgacgaccacccgtc

SEQ ID NO: 410881 - DNA, 538 bp, Oryza sativa
cgttctttatttttcgccgacagaccgcgtgtccatggggggggtttctttaatacccacgccggtttccacgttgtatcgcggcggggccggcgggctcctgtttgcttccttccccgttctccgtttcttcctcgcgccgcatgctatggcagagcaagctggaaccccatgtactcctataagcccccaagcgattagtggtgcttttgttcagcaatattaccacattttacatgagacaccagatcaggtctataaggtctattaagacgcacgttttgtcggtcggcctgattctaatggaggcatgcaatatgtctcaacaactgctgatctcaacaaaataatcctgcctatggacttcagcaactactgaacagagatcgtgactgcagatgcacagttatctcaccaggacggtgtgcttactgctgatcctggacctctgacttctgaaggcatatgccgtagattacacattcattctttcttgccccacatgaatctggtggctttgccgctcccaatgtatttt

SEQ ID NO: 410882 - DNA, 450 bp, Oryza sativa
aaaatcttctcttcccgtacgtgagaagcgccaggtcgtcgtcgccgccatgggcgtggaggtgtgcgtcaaggccgccgtcggccacccggacacgctcggcgactgtccattcttgcagagggtgctgctgactctggaggagaagaaggtgccctacgagatgaagctcatcgacgtccagaacaagcccgactggtttctgaagatcagcccagaggggaaggtgcctgtgtttaacggtggtgatggcaaatggattcctgattctgatgtgatcactcaagtcattgaggagaagtacccaaccccgtctcttgtcacccctcctgagtatgcatcagtgggatcaaaaattttctcatgcttcacaacgttcttgaagagcatggatccatatgatggttcagagaaggcacttcttactgaactgcaggcactcgaggagca

SEQ ID NO: 410883 - DNA, 541 bp, Oryza sativa
catggtctccacgctcgcctggagctccgccgcctggtgcggcgtcccttactcccgcctgccgccgcgccgctccccgtcgctggtcgtcgtcgcccagggcaaggtcaagaagtatcgccaggtcatactgacagatgacatagcagaggtggggaagaaaggggacacgcttaaagtgagggccgggttctaccgcaacttccttctgccaaagggcaaggcaacgctgctcaccccagaagtactcaaggaaatgcaagtagaacaggagaggatagatgctgaaaagaagcgggtaaaagaagaggcacagcaacttgcccgtgtttttgaaactattggggcattcaaagtgccacgtaaaggtgggaaaggaaaacagatatttgggagcgtcacagcacaagatcttgttgacatcataaagtcacaacttaaaggggatgtcgacaagcgtctcgtgacagtgccagaaattcgtgaattggggaatacattgcagagattaagctttaccctgaagtcacagctcaagtaa

SEQ ID NO: 410884 - DNA, 500 bp, Oryza sativa
caagaagcaattcttgagctcaatcagcaacaacatgtatctccttcttgcttagttaagtccttcgccctcccaagaagaagaagatgtcttgctgcggcggcaactgcggctgcggcagcggctgccagtgcggcggcggctgcggcggatgcaagatgttccctgatgtggaggccacagccaccaccaagaccttcgtcctcgctgctccatccaacaaggcgagctctggaggaatggagatggcggtggagagcggcgagaacggcggctgcggctgcaacacctgcaagtgtggcaccagctgcagcggctgctcctgctgctcctgcaactgaatctatcgtcgtcgtcgcccggctgcatgaggatttatcgtatggatgctgctactgtcgatcagagctttgatcgaggccttaatttgcttgcattagtacccagcttatatgtaggcaggccttgccttttgctctgacgcctaaatataaccgtcg

SEQ ID NO: 410885 - DNA, 465 bp, Oryza sativa
cgctgactgaacgaagcttacctagctactcgatcgagtcatccatcagtctagatagatatggcggctttgaacttcaaggcggtggccgccgtgatggtgatggcgatggtggtggcggcgcctggggcgtcggcggcgataacgtgcgggcaggtggggtcggcgatcgcgccgtgcatctcttacgtgacggggaggggtggcctcacccagggatgctgcaacggcgtcaaggggctgaacaacgccgcccgcaccaccgctgaccgtcaggccgcctgccggtgcctcaagaccctcgccggcaccatcaagtctctcaacctcggcgccgccgccggcatccccggcaagtgcggcgtcaacgtcggcttccccatcagcctctccactgactgcagcaaggtcagctagatcgattaatcctgcgtagaccgaccgatcgatatatcgatcgatgct

SEQ ID NO: 410886 - DNA, 456 bp, Oryza sativa
taggtctggagagtggagaggaagaggaatcctggtcagtcctcaccttcatatgtcagaacacaggcaatcggccctagctgcaatccaacaagatgggcatgcctctgctgctgctgctgctgatcctcgtcgctgctggcccccaggcaggcagagctgcaaagccaatcccaaatctccagctcatgaccaaggagggcggcagttcaagaatcatccaggacgacatcataaaggcaatcaacaagcatcccaatgctggctggacggctgcacggaatccatactttgcaaactatactactgcgcaattcaaacatatccttggagtgaagccaacaccgcatagtgtgctaaatgatgtccctgtcaaaacttatccaagatcgctgatgcttccaaggagtctgatgccaggtctgcatggtcacagtgtaacacaattgggaccat

SEQ ID NO: 410887 - DNA, 404 bp, Oryza sativa
tcatcgagatagatgtggctactttctcaagtcgtagtcgattagagacatgatgagacaccgtcctggctcaacctgattacagggttgctggtagaaatgcagttgaagcatgatttgtatggcgctgacatccatggagctcatggttattgccatcaattgtgtttctaaaagaccaatgtataattcgttctgacaaatattgtgggagcttagagaatcgctgccggtttgcgctagaagtggtccaagccgtaactgatgaaattggagctgacaaggttgggataaggcttgcaccctttgccagctattcagaggcagcagactcaaacccagaagctctaggcctatacatggcaaatgcactaaacaagtttgggattctctattgtcacatg

SEQ ID NO: 410888 - DNA, 232 bp, Oryza sativa
gccccggcccgggccaagggccttccgtccattttcggcagggaaccttcttcggccttggtctgaaccggtgggaagaagatcaagaccggcgccggtttcgagaccaatgtgacctattcatatcatgtttgccaaggtttggctgaaaggcccgcgctaggggtcttccaatttcgtggccaagaccggcgcaaacattttacggttacagcccattcaatattgagct

SEQ ID NO: 410889 - DNA, 466 bp, Oryza sativa
atcgcacttcacttaaggtatgagaaggacatgctctcatttactggttgcagccacaacctaacacataaagaggcagatgagctgagagaaatgagactcaacgtgcggcactggaaagagaaggaaatcaacagtagggagaggagactccaaggacgctgccctatgactcctcgtgaagtagctcttttcctcaaagctatgggctatccttccagcacaaagatctatattgtagcaggtgaaatatatggtggacatagcatggattcattaaaggctgaatatccaaacatatatacacattatagtctggcaacggtagatgagttagagcctttcaagctataccaaaacagattagctgccttggactataatgtagccgtccaaagtgatggttttgtgtatacgtatgatggaaatatggctaaagcagtacagggtcacagaagatttgaag

SEQ ID NO: 410890 - DNA, 345 bp, Oryza sativa
ctggaagagcattggccttggcttcaagacccccagggaagcaattgaagggacatacattgacaagaagtgcccattcactggaactgtttctatcagaggcagaatcattgctggaacatgccacagtggccagaagaacagaactatcattgttcgcaggaacttacctcattttggtcaggaatatcagaggtatgagaaggaggatttccacatttccggctcacgtcttccccatgcttccgtgtcaaggagggtgaccatgtcatcattggccagtgcaggccgctgtcgaaaactgtgagggttaaccgtctgaaagtcatcccagctggatccacc

SEQ ID NO: 410891 - DNA, 466 bp, Oryza sativa
gctcctcctctcacattttccccaaataataatagaggaaggggaaaaacacatttgcagccacatcatccatggcctctctccgcaccattccggtgatcttcggcatcctcttctatgtccttgccagcactgccactgccaccgacgcaccggactacgtcgtccaaggccgtgtctactgtgacacgtgccgcgccgggttcgagaccaatgtcaccgagtatatcaagggtgccaaggtcaggctggagtgcaagcactttggcaccgacaaggtcgagcgtgcgattgacggtgtgactgatgagaccgggacatacaagattgagctcaaggacagccatgaggaggacatctgcgaggttgtcctcgtccacagcccccttgcaaactgctctgaaatcgaggccgaaagggatcgtgcccgtgtttcgctcaccaggaatgtcggcatctgtgacac

SEQ ID NO: 410892 - DNA, 398 bp, Oryza sativa
atccatccatcagagatcaggtagaacagtgagagtgaggtgcagaaaaatttgagctgaagctgaggatggcaacatccatgatcacctcgccgctggtggcgccggcccgggccaagggccttccgtccatctcccgccggggatcctccttcgccatcgtctgcagcggtgggaagaagatcaagaccgacaagccctacgggattggaggtggcatgtcagtcgatattgatgcatctggcaggaagagcacggggaaggtgtgtgtaccaattcgttgacaagtacggcgcaaacgtcgacggctacagcccaatctactcgccggaggaatggtctcccaccggtgacacctacgttggtggaaccaccggtcttctgatctgggcccgtga

SEQ ID NO: 410893 - DNA, 529 bp, Oryza sativa
agggatagaataaccagagacataggaggtttcatttcttcttctcaaagtagtgtagcatctttccttctttcaccattacataagcttaagcaataacagataacaaatcctcctcctcctctaggtaaaatattcaaacacaatacccttataagtacttattattaggaaagtagcgtgcatgggcataaatggcagcggggggcaggttaagaatcacaatgctgagcagcgaggaaacaaaacaccataatgggacagagcaaaagcctccgaaagggagcttttaggcagaaggcttctcccacttgaggggcttcaccacctcccaggtgaagtctgggtcgtcccttcgaagtgaccgtaagccgccgtcttgaggtagcgtccgttgccgcctttcttgaggtcaaggttgatgatgatcatgccaggcctgaagtcgaagttctccttcacaatcttgaggatctccttgtcagggatcctgccagtgccgtatgtgtcgaccaatacggacagtggc

SEQ ID NO: 410894 - DNA, 345 bp, Oryza sativa
caccaaggctaacgttgactatgagaagatgggcagggagacatgccgtaacatcggttttgtgtcagctgatgtcggtctcgatgctgaccactgcaaggcgcttgtgaacatcgagcagcagtcccctgacattgcacagggtgtgcacgggcactttaccatgcgccctgaggagattggtgctggtgaccagggacacatgtttggatatgcaactgatgagacccctgagttgatgcccctcagccatgtgcttgctaccaagcttggcgctcggcttactgtggttcgaatgaatgggacctgcgcatggctcaagcctgacaggaagacccatgtgac

SEQ ID NO: 410895 - DNA, 466 bp, Oryza sativa
ggcaagctgattgcattctatgatgacaaccacatttccattgacggagacacagagattgcattcactgaggatgtgagtgctcgctttgaggctcttgggtggcatacaatctgggttaagaatggaaacgatggctatgatgagattcgtgccgccattaaggaagcaaaggcggtaactgacaagccaacactaatcaaggtgaccaccacaatcggttttggatcacccaacaaggccaactcatacagcgtccacggaagtgctttgggtaccaaagaggttgaagcaaccagagagaaccttggatggccctatgagccattctttgtgcctgaggatgtgaagagccactggagccgccatgtgcctcaaggtgctgcttttgaggctgactggaatgctaagttcgccgagtatgagaagaagtacccagaagatgcagcgacctttgagagcattg

SEQ ID NO: 410896 - DNA, 428 bp, Oryza sativa
gaaaaagacccccgcgtcgcccacacgcaggcgacatgggggcgaaccctaccaccggcgccgaccaccctagtaccctcccctacctcgccgtcggcggagctcaccgccggcaaagccggccggcgagctaggaaggcagcggcggggctttctccgcagtggtgccccctctcaggcgcgggggagtgacagactccttagagccgacacacacagtgcgtgctgttagacgacgcaggcatgcccaccgagtaccgccacatggacggctgggtgcgaaacacgtacacactggcaacccgagacgccgagggcaggaacagcaagtcccactggaagcccacctgcagagtcagatgatcgatggacgaccaggccacgctcgtctgcaggatgacgacaggcacgccacccacgacctgtac

SEQ ID NO: 410897 - DNA, 213 bp, Oryza sativa
gctgctgctgctcctcccgttcttcgagcgagggcgtgggaacccgaaccgtggccttggtgctcctagcgggcgggcggctccaagccctcctccccgttcaagcagaggagggattgcagcggatcgcgctcaataagcgcccgatcgacgagaacagtcttgtagccgggctactataccgccaggaaggggcgcgcacagatgggcctc

SEQ ID NO: 410898 - DNA, 421 bp, Oryza sativa
cgcatttcccgggtggccccccacgcccgctttgtgcaagagaggagagggcttctgcaacggggacggcttgggcggcgaacctggaggacgtcccgttcatggatctgatgaacgagctgctacgccggatgaagtgcatctccaagcccgacatgcgcctgatcctcgtaggtccacctggctctggaaagggaacacaatcgcccattattaaggatgagtactgcttatgccatttagctacaggtgatatgctgagagctgctgttgctgctaagactcctttaggagtcaaggcgacagaagcaatggacaagggagagcttgtttctgatgacttggctgttggaattattgatgaagccatgaagaaaccttcatgtaaaagggcttcattcttgatgggctcccacggaca

SEQ ID NO: 410899 - DNA, 140 bp, Oryza sativa
tgttgggaaattaaactgggagggtatatttcacaaatagggaaagacgcatggacaccacacggctactatgctcgcttcccatgctagcgcaggggcccatcaccgggagcaaccgtatatccatatacaaaatataa

SEQ ID NO: 410900 - DNA, 376 bp, Oryza sativa
ttttgaatagatcaaatcgaatagatagaaatagtgaatttgaatggagacacctattctatgatggattttaacttaccctctattttcgtgcctttagtaggcttagtatttccggcaattgcaatggcttctttatttctttatgtgcagaaaaataagattgtctagaaccgacgggaccgaattttctcaatgtatttccacacaggatcataatacggatcttttgtagtgtaagtaatataatatggcatgttatgtggctctttctacacacaaatgcaaacccgctatggatggggattatggatgcggatataggctacgagcataaatgcatgcatatgcggaaccgggtatagcgagttttttt

SEQ ID NO: 410901 - DNA, 442 bp, Oryza sativa
  unsure (1)..(442): unsure at all n locations
ggggtttgcgcgccctctccagggcccagattgactctgttctggatcttgcacggtgcaccattgtgtccgagctgtccaacaaggactttgactcctatgtcctctctgagtccagcctgtttatctattctgataagattgtgattaagacctgtgggactacaaagctcctgctcacaattccaaggattcttgagcttgctgaagggctttctatgccacttgctgctgtgaagtactcccgcgggatgttcatcttccccagtgcacagcctgctccccacaggagcttctctgagngaagttgctgtcctcaaccgctactttggccatctgaaatctggtggtaatgcttatgtgattggaagatccagcaaagcctggccagaagtggcatatctactatgctactcagcacccggagcaacctatggttacc

SEQ ID NO: 410902 - DNA, 464 bp, Oryza sativa
actggacatactctactactactagccagtaagctagctaactaactacgtggctatggcccccaccgtgatggcctcctcggccacctccgtggctccattccaagggctcaagtccaccgccggcctccccgtcagccgccgctccaccaactcgggcttcggcaacgtcagcaatggcggaaggatcaagtgcatgcaggtgtggccaattgagggcatcaagaagttcgagaccctatcgtacctgccaccactcaccgtggaggatcttttgaagcagatcgagtacctgcttcgatccaaggtgggtgccttgtctcgagttcagcaaggttgggttcgtctaccgtgagaaccacaggtctcccggatactacgatggcaggtattggaccactgtggaagctgcccatgttcggctgcaccgatgccacccaggtgctcaaggagctcgaggaggc

SEQ ID NO: 410903 - DNA, 370 bp, Oryza sativa
gtctgggatgaggatgcccccatggaaattgaggacgaagaggccacaaagccagaggggtggctggatgatgagccagaggaaattgatgatccggaggctaacaatgcctgagactgggatgatgaggaggatggagattgggaagcaccaaagattgacaaccccaagtgtgaagaggctcctggttgtggtgagtggaagaggccgatgaagcagaaccctgcttacaagggctagtggcatgcgccttttattgacaaccccaactacaaaggaatctggaagccccatgagattcccaaccctgagtacttctagcttgacacgcctgactctgatccaatttgcgctattgggatttgagatc

SEQ ID NO: 410904 - DNA, 270 bp, Oryza sativa
tttgatcgattcgatgcgcatctacttcgcgggggccgtctacctcaatgcgcgtcagcggctcgaacatcggcctcatcatggacgtcggcaacggcaacctctcgagcttagcttccagcccctccgccgcagccggttgggtcagggacaacatccaggcctacccgggcgtttgcttccgctacatctccgtcggcaacgaggctcaaggttgagacacccgctaacatccttacggccatgcagaacgtcaacagcccgctggtg

SEQ ID NO: 410905 - DNA, 571 bp, Oryza sativa
agtacacaattctgtaaattgctataacgcgctctgtccacaagcaaaatcatgtccaccaaatatataatatcccagtacacaattaggaaatagaatgaaaggaaaataacttattggttgttattacccaaggggacaaacctacactacacctgaaattgaacaagaaaaaacagccgttgtacagtagtacaagacgccaatggctctgagcatccaactccttttgtgttttaactgtttacatcaggaagtccctggggtcagtgacgtatccggtgagggctgaagccgccgcggtgaacggcgaagccaggtagatctgcccttccttgtgccccatcctgccggggaaattcctgttcgtcgtcgacacacacaccataggttcattcatgcgagcatatgtatcacgaggaccacccaaacaagcaccacaactagggctagctggtgtatcacaaccagcctcctcaaatatctgtgagcaagttttgccaccggctcctggtacagggatgctataaatgtccatccacaccttttgtgtcgcccgaacgagaaaagt

SEQ ID NO: 410906 - DNA, 251 bp, Oryza sativa
tgagacgtgacaagggacagacggagaagaggggtccaaacggcttcctcgtcccattgccaggtcattacctgtaatgtgctgtgctgttgagatgccaacatgcctcatacattcgtggacgtacccttggcatcgccgtaggccggtcagttccgtgtcaagactctattcaccgagctgtgacacaacctccacttctcctgatgctgcaaggatcctgatggcctatttacttgcattcttggcca

SEQ ID NO: 410907 - DNA, 225 bp, Oryza sativa
ggaaagagagatggaattgaaagagaaatttgagaagaaccttcaagaagcagcagataagtatcaaaacactaacctgtacctgaagaacttggatgatagtgttgatgatgataagttgagggagctgttggctgagtgtgggtctaatacgtcatgaggggcaatgcgagactcaaatggtgaaaaaactagggcccaaaatggcgcgtttttttgtgatta

SEQ ID NO: 410908 - DNA, 456 bp, Oryza sativa
  unsure (1)..(456): unsure at all n locations
ccaaaatcgcagagaaaaaaaaatctcccctcgaagcgaagcgtcgaatcgccttctcaagatgcagatctttgtgaagaccctcaccggcaagaccatcaccctcgaggttgagtcctcggacaccattgacaatgtcaaggccaagatccaggacaaggagggcatccccccggaccagcagcgtctcatctttgctggcaagcagcttgaggatggccgcaccctggccgactacaacatccagaaggagtccaccctccaccttgtgctcaggctcaggggaggcatgcagatcttcgtcaagaccttgactggcaagaccatcacccttgaggtcgagtcgtctgacaccattgacaatgtcaaggccaagatccaggacaaggagggcatncccccggaccagcagcgtctcatcttcgctggcaagcaagctgagggatggccgcaccc

SEQ ID NO: 410909 - DNA, 413 bp, Oryza sativa
cttcccttctcttctccatcgcatctaccaccgagcgtgcaaggagggggggtgaaaatggcttcctcgacccagggccaggtcatcacctgcaaagcggcggtggcatgggaggccaacaagccgatgacgatcgaggacgtgcaggtggcgccgccgcaggccggcgaggtccgtgtcaagatcctcttcaccgcgctctgccacaccgaccactacacctggagcggcaaggatcctgagggtctatttccttgcattcttggtcatgaagctgctggaattgttgaaagtgttggggaaggagtaactgaggtgcagcctggggaccatgtcattccttgttaccaagcagaatgcagagaatgcaagttttgcaagagtggaaagaccaacctctgtggcaaagttcg

SEQ ID NO: 410910 - DNA, 410 bp, Oryza sativa
gtgaggtacaggtcgtgggcgccggatagacaggagaggttcatccgccgcttcgccggcgagctcgcgcaccccaaggtctcccctgagctccgcgccatctgggtcaactacctctcccagtgtgatgagtcgttgggggtgaagattgcgaataggctcaacgtgaagccaagcatgtgaagaaactaaggcacaagaatgcatcatctcttgttaattaattggagtactaccaacaaataaggccagacaatgtcagatgcacgcatcttctgttgtcgttgggccatcttttgtatgcatcctattgttaattactaggacatgatatccaagtgatcatctgcaaggctacagaaattctgtaatacgataaattaaaagaaaccaaaatggagcctgcatat

SEQ ID NO: 410911 - DNA, 343 bp, Oryza sativa
ttcactgcctgaaccaagaacactgccctcctccacacgacatggcttctcaagaagagaagacgagcgtcaagtcggaggaggcctcgtcggcggcggaggagcagccacctcaagctgcagctccgccgccgcgcaggggtgtgccgccggccaaccccttcgacttctcaaccatgatgaacttgctcaatgatccgagcatataggagatggcggagcacatcgccacggacccggcgttcacggagatggcggagcagctgcagaagacgttgcagtagccgccggcgcgttgggcggcacatgaggctgcagacgctgcagctccggctctggaccc

SEQ ID NO: 410912 - DNA, 439 bp, Oryza sativa
ctctcctcaccaccatcacctcctcctcctcctgctcttcctccgcgcgcgcgagatccagggagagggagagggagagatcatggcggggacggtgacggtgccgtcggcgtcggtgccgtcgacgccgctgctcaaggacgagctggacatcgtgatcccgacgatccgcaacctggacttcctggagatgtggcggcccttcttccagccctaccacctcatcatcgtgctggacggcgacccgaccaagaccatccgcgtccccgagggcttcgactacgagctctacaaccgcatcgacatcatccggatcctcggtcccaaggcctcctgcatcttcttcaaggactccgcatgccgctgcttcggctacatggtctccaagaagaagtacgtcttcaccattgacgacgactgcttcgttgccatggaccct

SEQ ID NO: 410913 - DNA, 371 bp, Oryza sativa
cggaatcgagcgccgtgctctcgcgacgccgccgccgccgatcgatcgatggacgccgaggccggcgtcggcggcgccgaccagctgccgtggaggcaacactacaggaatttactgcttttagcataccagagttttggtgttgtttatggggacctaagcacatcacctctttacgtttataaaagtacattctcaggaagactacgtcgatatcaagatgagcaaacagtctttggtgttcttgccttgatattttggaccttcacacttattcctttgctgaagtatgtcactattgtattaagtgctgatgacaatgctgaaggtgggccgtttgctctttattcgctgctttgcaggcatgcgaa

SEQ ID NO: 410914 - DNA, 455 bp, Oryza sativa
ggacatactctactactactagccagtaagctagctaactaactacgtggctatggcccccaccgtgatggcctcctcggccacctccgtggctccattccaagggctcaagtccaccgccggcctccccgtcagccgccgctccaccaactcgggcttcggcaacgtcagcaatggcggaaggatcaagtgcatgcaggtgcggccaattgagggcatcaagaagttcgagaccctatcgtacctgccaccactcaccgtggaggatcttttgaagcagatcgagtacctgcttcgatccaagtgggtgccttgtctcgagttcagaaggttgggttcgtctaccgtgagaaccacaggtctcccggatactacgatggcaggtattggaccatgtggaagctgcccatgttcggctgcaccgatgccacccaggtgctcaaggagctcgagga

SEQ ID NO: 410915 - DNA, 418 bp, Oryza sativa
aaagaaaagaaaggctttcgtctcggtgggcaaaagcgcgagggcaaagcgaaggtatagcatctagtaggcgatggcgagctccggtttctcatggacgctgcccgaccaccccaagctccccaaggggaagacggtagccctcgtcgtgcttgacggatggggcgaggccaacgccgacaagtacaactgcatccatgtcgcccagacgcccgtcatggattcgctcaagaatggtgctcccgagaggtggagattagtgaaggctcatggaacagctgttggtcttcctagcgaagatgacatgggcaacagcgaagtgggtcaccatgctcttggtgctggtcgcattttttgctcagggtgctaagcctgtggaccctgctcttgcctctgggaaaaattatgatggagaggg

SEQ ID NO: 410916 - DNA, 383 bp, Oryza sativa
gcacaacttgctcgggatgttcctttctctgctatatgctggtcaacactggagccgattcgaagaaagctgcttggtatcgtcggagaagaaggtgatgcagctagtgtgctgggtgcaaactttgcagctggctttgtagcaggtagtcttgctgctggtgctacatgccctctagatgttgctaagacaaggagacaaatagagaaggatacgcaaaaggcaatgagaatgaccacaaggcaaacattagctgatatttggagctctggaggtatgaaaggcttgttaccggtgttggtccacgtgtagcacgagctggcccatcagttggaatcgtcatttctttctacgaggttgtgaagcttgctcttcatcaaagg

SEQ ID NO: 410917 - DNA, 277 bp, Oryza sativa
atcccatgtcgacgccgtctcgacgaccacggcaccactacagccgacggtgccgaagcgggactacctccctagcctagactgagatctccgggctcactacgaggaactaccgctttcagcataccaaagttttggtgttgctttatggtgacctaagcacatcacctctttacgtacataaaagaacattctcaggaagactacaccgatatcaagatgagcacacagcttttggtgttctcgccctgataatttggacctacacactttattc

SEQ ID NO: 410918 - DNA, 185 bp, Oryza sativa
cggacgcgtgggctctcgtgctcctcttcctgatggcgatctcgaaggcttggatctcgctgctgctcgcgctcgccgtcgtgctgtcggcgccggcggccagggcggaggaggctcctaaagcggacgactacgcccacaggaacgagctctccagggccaacgaagcaccggcgcatcagcaa

SEQ ID NO: 410919 - DNA, 533 bp, Oryza sativa
ataagcaaaaactgactgctagtattattttcccatcacatccaatccagaaacttaaaaagccatataagttcaggcaacatataactgtgattgtatcacagcagaattataatggtggctcaggaggcagccagatgacaactctgaaacaaaactcaaatatttaacgagaactagccaccaagaggtgatcgattataggcgcgaagctctaagactcatagatccaagggtgaaggttgctcctccactcagctaaaccttcagggaaccagagagcgatctccttcttcccgttgtccacggagtcgctcccatggatgacattcctgccaacttccacggcatagtcagcacggatggtgccgggggctgcctcccagggcctggtggccccaatgatcctgcggccagtggcaacaacatccttcccttcccaaaccattgcaacgacggggccagagatgatgtactccaccaacccagggatgaagggcttgtcggaaggtcggcatagtgctgctggcaaa

SEQ ID NO: 410920 - DNA, 418 bp, Oryza sativa
ctcctctcctctccgcatcctcctcatcgcctgcgcttctgcttttttttttcttttttctctcgttgatcggtttgttcgatcagatcggttctttggagagatggagcagtccttcatcatgatcaagcctgacggcgtccagagaggcctgattggagacatcatcagcaggttcgagaagaaaggattctacctgagggggatgaagttcatgaatgtggagaggtcctttgcacagcagcactatgccgacctttccgacaagcccttcttccctgggttggtggagtacatcatctctggccccgtcgttgcgatggtctgggaaggagaggaatgtttgttgccactggccgcaggatcatttggggccaccaggccctgggaggcagcccccggcaccatccgtgctgac

SEQ ID NO: 410921 - DNA, 449 bp, Oryza sativa
caaacgctgtgaatgcggtcacatggggtgttggccctggcaaggaaatagtccagccaactgtcgttgactcagccagctttatggtttggaaagacgaagctttcgaaatttggtcaaagggttgggcttgcctgttccctgagggcgactcatctagggagatactagacaaggtccagaagagctacttcttggttagtcttgtggacaacgactacatcaacggtgatctcttcgcggcgttcaaggagatttgatgacatcttatagtctgcaacctctcgtgtctgaattcctatctttatcaagtgttattgcttccacgactataggacagctttcgtcgaaagcttttgctcatgtgatctcgaaagattcatctagtctgatttttcgggacttgattcggttttattggattcatccacatatatcataaaaaatga

SEQ ID NO: 410922 - DNA, 445 bp, Oryza sativa
ttcatccatccgcgcgcggtgcgtagtatcgagaagagaagggggggagggcaaagcgatggctccgatgaagctgtacgggtcgacgctgtcgtggaacgtgacgaggtgcgtggcggtgctggaggaggccggcgccgagtacgagatcgtgccgctcgatttctccaaaggcgagcacaaggcccccgaccacctcgccaggaacccctttggtcaggtgccggctttgcaagatggtgacttgttcctctgggaatcacgtgcaatttgcaagtatgtatgccgcaagaacaaaccagagctgttgaaggatggcgacctcaaggagtcagcaatggtggatgtgtggcttgaagtggagtccaaccagtacactcctgcactgaaccccattctttttcagtgcctaatccgtccgatgatgtttggtgcaccccccgac

SEQ ID NO: 410923 - DNA, 267 bp, Oryza sativa
tgatgaacgcctattgtgaccgtcagtctgtggatatgaatgctattgcattcctatttgatggtcgtaggctccgtggcgagcagacccctgacgagctcgagatggaagacggggacgagatcgacgccatgctccaccagactggaggctgcctgcctgcctagaagcttaggagttcttgcagcctcgtaaaattgtgcctttagtaggctcaatatctagaagtacatgaaaaaaaagaagcctaaaagaacttgcgaggct

SEQ ID NO: 410924 - DNA, 375 bp, Oryza sativa
cgaaagccacccacactctcgtgctcctcttcctcatggcgatctcgaaggcttggatctcgctgctgctcgcgctcgccgtcgtgctgtcggcgccggcggcgagggcggaggaggcgccggcggcggaggaggaggcgccggcggcggaggccgtgctgacgcttgacgcggacggcttcgatgaggcggtcgccaagcacccgttcatggtcgtcgagttctacgccccgtggtgtggacactgcaagaagctcgctccagagtatgagaaagctgcacaagagctaagcaagcacgatccaccgattgttcttgctaaagggtgatgccaacgacgagaagaacaagccacttgctaccaagtatgagatc

SEQ ID NO: 410925 - DNA, 391 bp, Oryza sativa
cttggtttgcctctatgccggcatcaacatcagtggaatcaacggcgaggtcatgccaggacagtgggagttccaagttggcccgtctgtcggcatttctgccggtgatcaggtgtgggttgctcgctacattcttgagaggatcaccgagatcgccggagtcgtcgtctcatttgaccccaagcccatcccgggagactggaacggtgctggtgctcacaccaactacagcaccaagtcgatgaggaacgatggtggctacgagatcatcaagtccgccattgagaagctcaagctcaggcacatggagcacatctccgtctacggcgagggcaacgagcgccggctcaccggcaggcacgagatccgcgacatcaacacctttagtggg

SEQ ID NO: 410926 - DNA, 449 bp, Oryza sativa
ggccttctgaaagtccaaatccaaggtcaagggtgcccgctgcagaggcggctccttatgtcccagctgggcacttgcgtatgccttgccatagcatggctcctccagtcacagtcaggacttctatccctgttttctctgctccacctctcccacccccaggtgcgcggacacaacagcttcctcctctcatgagccacccgccgccaattcgaatggcttccccggttcgcatcaggccagctcctcctctttttactccttcagcagtccaagggccgaaacctatgatgcctgttcagataaaggatgtgcaacaccaacaaataaaggaaacccggtcacctgtgatgcctgttcaggtgaaggatgcacaaaaccagcttcttaagggatccctttcacctgtgatccctggtcagattaagggatgacaatcccagccaccg

SEQ ID NO: 410927 - DNA, 457 bp, Oryza sativa
ttggttgtccaactctcagcagagcataacgtaggcattgtgtcagtgagaaaagaattgcagtcaatgcacccggaagataggcatattgttgttctcaagcacaacgtttggcgtgtaaaaggtctaattcaggtctgcagatcaattggtgatgcctatctcaaaagatcagagttcaaccgggaacctttgtatgcaaaattccgcctccgggaaccttttcacaagcccatactaagttcagaaccatcgattagtgtgcaacccctacaaccacatgatcaatttctcatatttgcatctgatggtctatgggagcacttaaccaatcaagaggccgttgacattgttcacagtagccctcgcatggaagtgctaggaggctcataaaggctgctttgcaagaagcagcccatgaaagagacatgaggtactcagatctcaagaagattga

SEQ ID NO: 410928 - DNA, 316 bp, Oryza sativa
tgttagttccagccatggcagcagacaagggagggaaggtgttcggcatgtgggcgagccccatggcgatccgtgtggagtgggctctccggctcaagggcgtcgactacgagtacgtcgactaggacctcgccaacaagagcgaggcgctgctccggctcaacctggtgaccaagaaggtgcccatgctggtccacaacagcccgtcatgtggctagaccaccatcatcgtcgatgtcatcaacgaaagatggtagctccaataccttataatgccctacaaggactttaaaagtgctatccaccgattgttttt

SEQ ID NO: 410929 - DNA, 278 bp, Oryza sativa
cttttcttgagctcaatcagcaacaacatctaggtccttcttgcttagttaagtccttcgccctcccaagaagaagaagatgtcttgctgcggcggcaactgcggctgcggcagcggctgccagtgcggcggcggctgcggcggatgcaagatgttccctgatgtggaggccacatccaccaccaagaccttcgacctcgctgctgcatccaacaaggcgagctctggaggaatggagatggcgtgcgagagctgctacaacagcctttatgtgcctg

SEQ ID NO: 410930 - DNA, 383 bp, Oryza sativa
cagggttcagggaggtggcggcgtacctgttggatcatgataacttcgcaaatgttcctccgacggcgttggtgaagatcacacactcaattttccatatcaattgtccggtgaacggcggcagtccagctcatgatcagaagcagcaggtttccagcaagatcgcttcgtttcagcagttcatcgcgcatgacttcgatgccagtgatcatggcacgtcgagcttcccggttgctgctgttcataggatcggcatactggatatcagaattttcaacactgacaggcatgctggtaatgtgctggtgaggaagcttgatggtggcaccggtcgctttggttgtcagacggaattgtttccaatttgatcatggcctgtgctt

SEQ ID NO: 410931 - DNA, 427 bp, Oryza sativa
gacagaaccacaagttgcatctttagatgcaacaaacatcgagtgttcaatatcaaggcaaggagatttctatgtgataaatggaacgaaatggtggaccagtggggctatggatccaaggtgccaaattcttgtattaatggggaagacagatttttctgcacctaaacataaacagcaatcgatgattttagttgatgtcaaaatacctggagtgcagataaggagaccgttgttagtatttggtttcgatgatgcacctcatgggcatgcagagattacttttgagaatgtgcgcgttccagccacaaatattctccttggggaaggccggggttttgagattgctcagggaagactaggccctggaagattacatcattgcatgagactaataggggcagcagaacgtggcatgaatttgatg

SEQ ID NO: 410932 - DNA, 374 bp, Oryza sativa
tcggacgcgtgggttcctctgctcctcttcgtgtgccccccccccccctctcttgtctccccccggccggggaagaaattttgcccccaaaataattttctgcacggacgatcaaagaaagggcaaaatttttctgcgcctccggttgaaggaagccgtgatccatgtcggacgagactggccggaccattccaaagttcggcgcatgggacgtcaacaacccggactctgccgacggtttcacggtgatctatagccaacccagggatgagaagaagggccccgacaacgtggacgccagcaccaggtaaaactttgacatgaaagactccaagttctattagtgcacagagaagattaacccctaccaccgt

SEQ ID NO: 410933 - DNA, 461 bp, Oryza sativa
ctccggaagatcgaaaagcttggtcttgacatgaacaatcttgaagcaagagacagttggggatgggaattcctagatgcattgagcaactgcacgcgtcttaagatgctctcactgcaccaaaatctactgcaaggtgtcctgccgaattctgttggcaacctctcctctagcatggacaaccttgtgttgagtaacaacatgctttcagggttagtgccctcgagcataggaaatcttcataggttaactaagtttggattggatttcaacagttttactggtccgattgaagggtggattggaagcatggtaaatttacaggctttatacctagacagcaacaacttcactgggaacattccagatgccattggcaacacctcccagatgtcagaattgtttctttcaaacaatcaattccatggtctcataccatccagcctaggaaaacttcgaca

SEQ ID NO: 410934 - DNA, 257 bp, Oryza sativa
tttaccttctcctccggctcttcttcagtatcgaatcctctcttctcctcgtgcccaccaccaccaccgtagcaatggcgggcaacgggccgatcaacaaggaggacccgctcaactggggcgcggcggcggccgagatggccggcagccacctcgacgaggtgaagcgcatggtggcgcagttccgcgagccgctggtcaagatccagggcgccaccctccgcgtcggccaggtggccgtcgtcgtccagtccaag

SEQ ID NO: 410935 - DNA, 177 bp, Oryza sativa
ttgttgagcagcgtgaaatcttgggtcagattagaaagaagaaggcattgctcatccaagagcatagaatgaagaagaggactgcagaaagccgtcctattgttcctagaaagtttgacaaagacaggacattcacaactaatagaatgggtcgttaacttttcattcattgggttt

SEQ ID NO: 410936 - DNA, 147 bp, Oryza sativa
tctagcgatggttccagggaacagccgatgctgtcaggcatttcctgtggctatttgaggatgcaaggctcaaacgcatagagaacatactaattctatctggtgatcatctgtataggatggcttatatcggtttttctcaccttc

SEQ ID NO: 410937 - DNA, 484 bp, Oryza sativa
ttaagagataagatctgtagagctatacaatatggctcgaaatttgtgagtaatggacaaccagggcctgcacagaatgttgacaagtcgactagtctagctcgtaaagttttccgactttttaagtttgttaatgatctgcatgctttgattagtcctcctgccaaaggaactccactacccctgatcttacttggaaagtcgaagaatgcactgctatcaactttcctctttctggaccaaattgtatgggctggaaggacaggaatatacaagaacaaggagcgagcagaattcctcagcaagatagcattttattgcttcctgggttctaacacatgtactagtattattgaggtagccgagcttcagcggctatccaagtcgatgaagaaactagagaaggagcttaaacaccaggagctgttaaagaacgagcaataccagatgaaactgcagaagtgcaacgagaggcgtctcgctc

SEQ ID NO: 410938 - DNA, 222 bp, Oryza sativa
tttttgaccaaccatgtgtggctccagaccctgggaggtgcatactataggtacttacagtgacaagagccatttgatcaagaaggatgtcccctgtgagactgatcagctgactgatgagcacacttagatcatccatgctgatgctgcgtgcaccatacttattgacaatgttgagaagctatcttgcagcttctacctgcactgggattttcttgcctt

SEQ ID NO: 410939 - DNA, 239 bp, Oryza sativa
ggcttgtcgtacgcgccgttcccggtggggtgcatgttccacagcgagggggggctcaagagcttcgagcacccgatgaaccggctgaaggcgatgccgcgggtggacagcgagggcgtcatgtgcggcgccaccttcaaggtcgacaccttcaccaagatcaactccatgccccgcgtcggcagcgccaccaactgggccggcacctgggacgacgctgccgtctgatgatggcgctc

SEQ ID NO: 410940 - DNA, 488 bp, Oryza sativa
tggatagagggcaaaccaggtatacatgattgattttggactggcaaagaaataccgggacacttcaacacaccagcacattccatacagagagaacaaaaatttgactgggacagctcgatatgctagtgtaaacacccatcttggaatcgaacaaagcagaagggatgaccttgaatctcttggatatgtactcatgtacttcttaagaggaagtcttccatggcagggtctaaaagctgggaccaaaaaacagaagtacgagaaaattagcgaacggaagattgctacatcaattgaggctctctgtcgcggatacccttgtgagtttcaatcctacttccattactgccgttcactacgttttgaagatttgccagactattaatacctgaagagattgttcagagaccttttcattcgagagggaatttcagttgattacgtttttgactggaccattctaagtaccagcagtcacagataac

SEQ ID NO: 410941 - DNA, 488 bp, Oryza sativa
tcggacgcgtgggcgcacgttgccaccacaggctacgcaaaattctctcccttcctcctccaccacctccactccgacgatcctcctcctgatcctgtgccggccggcgatggcgtaccggttgctggagctcacgctggtctccgcgagcgacctcaagaaggtcactctcttctcgcgcatgcatgtctacgccgtcgcctccatctccgggagcaacgtccccatgcccatgcacggcacccacgccgaccgcaacggcggcagcaaccccgcgtggaacaccgtgctccacttccccgtccccgcccgcttcgacacccgcggcctcgccctccacgtccagctccgcgcccggcgctccttcggcggccaccgcgacgtcggggacgtgttcgtgcccctcgacgacctcctcgccggcgcgcacgacggcggcgagccgaggccggctagctaccaggtgcgccgccccatgtcccgccgcg

SEQ ID NO: 410942 - DNA, 473 bp, Oryza sativa
  unsure (1)..(473): unsure at all n locations
ctctgagttgatagtttaagacggaggatggcagacggcttggatttccaactgatcaggcaaacattcatggatgctactgagtttctttcaccccaaatgggaacagaggatttattgcttttacatgcatactgggccaaattagagcgtactcttggaaatgatctagctgcagctcgtggtgtttgggaaaatactctcaagaaaagtggttctgttttggaagtctggcagcactacattgcaatggagatagaaaccgagcatattcatgaggctaggtcactttataagcgctgttataccaaaaggttttctgggtctggatcagaggagatatgccatgcgtggataagatttgaaagggagtgtggcacgttagaagattatgaccttgctgtaaaaaaggttaacccttgtttgaaggagcttatgatgttcaaggcacagcangaggtttaggttgacac

SEQ ID NO: 410943 - DNA, 367 bp, Oryza sativa
tattagcaatccattccgatccatcaaatttctcgtggagaccgtagagagagagagaggcgccaaccatggacggcatcatccacaagatcgaggagaagctccacatgggcggaggcgagcacaagaaggaagacgagcacaagaaggagggggagcaccacaagaaggacggggagcacaaggaaggcgtggtggagaagatcaaggacaagatcaccggcgaccacggcgacggcggcgagcacaaggagaagaaggccatgaagaagatgaaggagaagatgcacggcaaggtgggccacccgcgccacggggacagtagcattattagctacagcgtctgagccgtcgtgctgccccaccg

SEQ ID NO: 410944 - DNA, 212 bp, Oryza sativa
  unsure (1)..(212): unsure at all n locations
tgcntgctcatcgccatctctctcagctctcacggctcactgcatcaatggccgcggccaccatggcgctctcctccccggtgatggcccgcgcggcgccgtcgacctcctccgcgcttcttcggcgaggcgcggatcaccatgcgcaagaccgccgcgaagcccaagccggcggcgtagtctgtgagcccgtggctctgctccttctgtct

SEQ ID NO: 410945 - DNA, 466 bp, Oryza sativa
tcttaaaaaaaaaaggaaaaaaaaacaaaacacaccaagccaaataaaagcgacaatgggatcgctcaccaccaacatcgtcctcgccgtcgccgtggtggcagcgctggtcggcggcgggtcgtgcggcccgcccaaggtgccacccggcccgaacatcacgaccaactacaacgccccgtggctccccgccagggccacctggtacggccagccctacggctccggctccaccgacaatggtggcgcgtgcgggatcaagaacgtcaacctgcctccctacaacggcatgatctcctgcggcaacgtcccaatcttcaaggacggcaggggatgcggctcatgctacgaggtgaagtgtgagcagtcggcggcgtgcttgaagcagtcggtgactgtgttcattatggacatgaacctccagctcatctcggttgtccacttttatttcttccggcatggtctt

SEQ ID NO: 410946 - DNA, 487 bp, Oryza sativa
  unsure (1)..(487): unsure at all n locations
cggacgcgtgggcgcacgttgccaccacaggctacgcaaaattctctcccttcctcctccaccacctccactccgacgatcctcctcctgatcctgtgccggccggcgatggcgtaccggttgctggagctcacgctggtctccgcgagcgacctcaagaaggtcactctcttctcgcgcatgcatgtctacgccgtcgcctccatctccgggagcaacgtccccatgcccatgcacggcacccacgccgaccgcaacggcggcagcaaccccgcgtggaacaccgtgctccacttccccgtccccgcccgcttcgacacccgcggcctcgccctccacgtccagctccgcgcccggcgctccttcggcggccaccgcgacgtcggggacgtgttcgtgcccctcgacgacctcctcgccggcgcgcacgacggcggcgagccgaggcccgctagctaccangtgcgccgtcccatgtccgcccgcg

SEQ ID NO: 410947 - DNA, 486 bp, Oryza sativa
ttaaccgacgaaacccgcacccactcctccggccaccgacgccgcagccggcggcgcagagaggggagatccacgccgccgcgatgggccgcaagcgcgcgctcctggtgggcatcaactacccaggcaccaaggctgagctcaagggctgccacaacgatgtggaccgcatgcaccgctgcctcgtcgaccgcttcggcttcgacgaggatgacatccgcgtcctcctcgaccgcgactcctccgggacgcagcccaccggcgccaacatccgccgggcgctggcgcagctcgtcggggacgcgcgccccggggacttcctcttcttccactacagcggccacggcacccgtctgcccgccgagacagggcagaacgacgacaccggctatgacgagtgcatcgttcccagcgacatgaaccttatcacagatcaagatttcagagaacttgtgcaaaaggtgcccaatggttgcttatttacca

SEQ ID NO: 410948 - DNA, 314 bp, Oryza sativa
agcagcacgcctcctgcaccaccgctccataattccctggacccacgcatccttcttaacatgttatactaaatggtgatgtcgcaggtacttttgggaaagccattgcaagtttacaggtggaagcttctgatttggcaaacttcctcaccatggaccgaaatgggggttacagaggttctaaaactctcctaagatctgaactgtcagagaagcaggagctatgctttttctgatgcctcatcgctttggcagaagcttattgtattctccccgtaatgcatattttctgtattatagttcattatttcatc

SEQ ID NO: 410949 - DNA, 281 bp, Oryza sativa
gccttcaggagattcccaaccaattgctgatcagcctattgagtgggtaaaggttactttatctgcggttccaggagttaacatggatgatgttgatgacaatgaaccaacgcggaagaaggaccatcgccgcgttccaagtacaattgccatagaggaagtcaaggctgcagcattaaaaggagaagctccacctggtcttccactgaaaggagtcggccagaatgctcaaaatatagaatctaaggcaactgatggtggagatcctaatccaactgatg

SEQ ID NO: 410950 - DNA, 175 bp, Oryza sativa
tcgttgagccgattcctctctagtggtcgcgcctggtgtgttcgccgacgacgccggcgtcgcgtcagccatgggtgggctcgaggagatcaagaatgaggccgttgatctggagaacataccgatcgaggaggtgtgagaggctttctgatgtatctgacaaggggcatttact

SEQ ID NO: 410951 - DNA, 324 bp, Oryza sativa
tttttgatcagaggaaggtcggcctccctatgcgtttgaatgccatcactgtggggtaaatgcaaaggctacacctatgatgcgtcgtggacctgatgggccaagaacattatgcaatgcctgtggcctcatgtgggcaaacaaggggatgttgagggacctatcaaaagcacctcccacacctattcaagttgtggcattagttaatgatggtaatggaagtgctgctgctcctaccaccgagctagaaattcctgcaccagccactgtcaatggccacgaatcatcaacgtgagtatagcgatgtttgtcttgtggaggatc

SEQ ID NO: 410952 - DNA, 456 bp, Oryza sativa
ttctccatccgttctgaaggctttgtggccgagttctcctcccccacctcctcctcctcctcctcctctgtagccgagctgaggccaacgcgagtagtgacattctcctgcaatggggtgcaagtcgtgcgagaagcccaggccgaactaccggaagggcctgtggtcaccggaggaggaccagaagctccgcgactacattctccgccatggccacggctgctggagcgcgctccctgcgaatgccgggctccagaggaacgggaagagctgccggctgcggtggatcaactacctgcggccggggctgaagcacggcgtgttctcgccggaggaggaggagacggtgatgagcctccacgccgcgctcggcaacaagtggtctaggatagcacggcatctacctgtgagaacagacaacgtggtgaagaactactggaattcttacctgaagaa

SEQ ID NO: 410953 - DNA, 401 bp, Oryza sativa
tgttttttttataatcaaatcacaaacatatcatatacatagacccataaactagcatagttcatggtcccaaaagcacaagagtgctccggtgctcccccacaaacttctccggcccatgtggcctgattcggggggttacaatgtaacaacaaaagttacaagacaccacctccctgctgttctacaatataatccttaaattgccttgccaaattttaaaccaaggctacaacaatgcagaaaaaaaaatgcccaactccatgataacttatttatgtctactggacctatgggagaaagcaaaggcctaagcgggtgctaattaataagcagccttagaatagccaaagcctcttctcttttactatagcaaagagggcttccttcttcttcacctt

SEQ ID NO: 410954 - DNA, 135 bp, Oryza sativa
gacattgaaggtagtgtgatcttcttcctgttttgtaacaatggcctcacgcagtagtgccctgctcctcctcttttcggacttttgcttccttgcccggcgagccgtcgtttactacgtatattgtcatatcac

SEQ ID NO: 410955 - DNA, 371 bp, Oryza sativa
ctgcaaaagatcttgcttctcgagatgttgtttcaagatctatgacaatggaaatcagagaaggccgcggtgttgggccattgaaggaccacatctatctgcatcttaaccatctgcctccagaagttcttaaggagaggcttcctggtatttctgaaactgctgctatttttgctggtgttgatgtcaccaaggagcccatttctgttttgcctactgtgcactataatatgggttgggatcccaacaaattaccatggagaggtagtgactatgaagggtgacaattctgattctgttgttcctggtttgatggctgcgggagaagcagcatgtgcatttgttcatggtgcatatcgtctgggtgcaaa

SEQ ID NO: 410956 - DNA, 446 bp, Oryza sativa
  unsure (1)..(446): unsure at all n locations
taggaagagcacggggaagggtgtgtaccagttcgttgacaagtacggcgcaaacgtcgacggctacagcccaatctactcgccggaggaatggtctcccaccggtgacacctacgttggtggaaccaccgggcttctgatctgggccgtgaccctcgccgggctcctcggcggcggcgccctcctcgtctacaacaccagcgccctcgccggctaaatttcacccaaatccagtctatgtatgtaacaccaagctgggtgtctgcatattcatctgtaatctaagatagccttcctctgaatgcgatgtgatgatgcccactgcttaatcaaactgcattgtgattaatctatgtaacactgtacttgcatgatgatgatatactacacttgatacttgaatttggagattaattgttgataccaaatacatagattacattnna

SEQ ID NO: 410957 - DNA, 442 bp, Oryza sativa
ttcttgatccattgataaatggacattacccgcagataatgtaagatcttgtgaaagataggctgcccaagtctcactcctgaacaagctagattggtcaagggctcggctgactatattggcatcaaccaatacacagctagctacatgaagggccagcaattgatgcagcagacaccgacgagttactcagccgattggtaggttacctatgtttttggaataactgtaaacccatttgaccacaggtatctttataaatggctctaactaacttaccttgctcttattattcgtttttttctttcaatttacagtttttattattttatttttacattttatatacattttatttttatcattttcatttcattatctttatcatatctatatttcttatttacttttttctaattattttatcaattttttttttttt

SEQ ID NO: 410958 - DNA, 154 bp, Oryza sativa
aagtgaaacagcaaaaaaaatcaaacaaggggaaaaaatattccccatctgtgaaattcgcaaaaccctagcgcggcggcgatgtcgaacacgagggtgatcttcgacaatgaccgctggaggagcttcggcggggcggatcgtgatggagctg

SEQ ID NO: 410959 - DNA, 194 bp, Oryza sativa
tgcatatctctctggggaatgcatcgaatgtatggccacttcagacaatgtggtccgtgctggtttgactcctaaatacaaagacatacaaactctttgctcaatgctaacatataaacaggcattccctgaaatcttgttaggcgctcctgtgcactcacacttaaaggttaacaacccttcattttatgaat

SEQ ID NO: 410960 - DNA, 484 bp, Oryza sativa
tgtgctttctccttcccctccgagcaccgccgccgtcggcgccaccgccaccgtagcctgaccgctcggtctccggcaaccagacaaaatggtgagagtcagtgtcctcaacgatgctctgaaaacaatgtacaatgctgagaagcgtgggaagcggcaagtgatgatccgacccttattaaaggttatcatcaagtttctcatcgtgatgcagaagcacggctacattgttgatatagagtttgatgttatactatccgttctttctaagtattgttgctactttttttatccgttattcttaattttgtcatactttttctctattattttctttttttttattttttttatttacttattatttttttttttatcctatcacatcactctttttctttattttttctactctttatattttaataattttcctcttctttttatcttatttttttttatatattttttcttatactttctt

SEQ ID NO: 410961 - DNA, 360 bp, Oryza sativa
ggcgccgccaacatgcggtgcctctccacggtctcctccgtgtcggacgcggcgcgcgccgtgatgtcgaacgagccggcgaccgtgctgggcaacagcggcagcagcggcaacggcggcgtgatggcggcggaggagatgctgcggcggtacgagatcggggaggagctgggtcggggggagttcggggtgacgcggcggtgccgggacgcggtgacgggggagcggctggcgtgcaagtcgatcagcaagcggaagctccggagcagcgtggacgtggaggacgtgcggcgggaggtggccattatgcggtcgctgtctgcgcacgccaacgtggtgaggctccgggaggctttttag

SEQ ID NO: 410962 - DNA, 472 bp, Oryza sativa
  unsure (1)..(472): unsure at all n locations
ctcccctgccaaaccagtctcccccaaatctcctttgcgtcctctcgattcctcagcaaccatgtcggcctactgcggcaagtacaaggacgagctcatcaagaacgctgcctacattggcactcctggcaagggtatccttgctgcagatgagtccactggcaccattggcaagcgctttgccagcatcaatgtcgagaacgttgaggagaaccgccgctctctccgcgagctgctcttcaccacccctggtgccctccagcacctaagtggtgtgatcctcttcgaggagaccctgtaccagaagaccaaggacggcaagcccttcgtcgatgtcctcaggangttggtgtcctccctggcatcaaggttgacaagggtaccgttgaggttgccggcaccaacaaagagaccaccacccagggccacgatgatcttgacagcgttgcgcccagtactacgaggccggtgc

SEQ ID NO: 410963 - DNA, 339 bp, Oryza sativa
gttttgccaaccgcttgttcttgcctctttggaaccgtgacaatattgataatatacagattgtattcagggaggactttgggactgacgggcgtggtggatattttgatcaatatggaatcattcgtgacatcatccagaaccatttgttacaggttttctgtttggttgcaatggaaaagcctgtctctcttaagcctgagcacattagagatgagaaagtcaaggttctgcagtccgtgaaccctataaagcatgatgagtgttgttcttggacaatacgaggggtacaaggatgaccctacagtgccagatgacttaaaacacctcaattttgta

SEQ ID NO: 410964 - DNA, 405 bp, Oryza sativa
gaatttcctaaatgctcgcttctggttgccaaagaccctgaggacagaacagatactgtgattactgtatatggtgatgccacacctgtttcagaccaagaaaaagatgcagtacgaagtgcatacttacgaagacatcctgaggcattttgggttgattttggtgacttccgttttctgcacatcaagccaaaagccgtgcgatatgtgtctggggttgcaactgccatccttggttctggagaattcagtgctgttgagttcaaggaggcaaaagtggacccaatatctcaattctcaacccctattacgagccacatgaataaggatcattctgatgatacaaagcttattgtgcaatacttaaccactgctaaggtggactttgcttacatgcttgatgtg

SEQ ID NO: 410965 - DNA, 175 bp, Oryza sativa
tccctttttttagttgagcttgaagcagcagagcgaggtggacattttcgtcgtcaccatggtcctttcgtcccaggcgctggccgacaaggtcgtcgtaaaggcgttcgtcgaggggcgcatcaccatgcgcaagtcggtggcgaagcccaagcccgccgcgatggagagcccg

SEQ ID NO: 410966 - DNA, 206 bp, Oryza sativa
tttgagtttcaggaatcgacaattggagcggcatttttttcacagaccttagcagttaatgacgaaaccgtgaagtttgaaatctgggatacagctgggcaggagagatatcacagcttggctcccatgtactataggggtgcggttgctgccatagttgactatgacatcacgaattcggtctctttcacccgtgcaaagatatg

SEQ ID NO: 410967 - DNA, 351 bp, Oryza sativa
gtcctcgtagcaaagccatggactgccaccgaaacgaatcccagagagaactggaaatgggcacaaagcctcacttcgtggtcatcccatggctggccaccagccacatgatacccatcgtcgacatcgcctgcctcctcgccgcgcacggcgccgcggtcaccgtcatcacgacgccggccaacgcgcagctcgtccagagccgcgtagaccgtgccggcgaccagggcgcttccaggatcacggtcaccacgatccctttcccggccgccgaggccgggctaccggaggggtgcgagagtggaggaccacgttcccttgtccgtcattgatgcctatcttttttttgac

SEQ ID NO: 410968 - DNA, 479 bp, Oryza sativa
tcctattccaaaacgaatccccaatctcgtgcgcgccgtcgttcgccgtggcctcccccgtgcgccgcccgccgcttcgcatcccggtgagaagaaaagagaggaggggaaatggagatacagtcatcagggaggccaatcgatgtgctcatggagaaggttttgtcagtgaacatcctctcctcggactacttcaaggagctctacaggctgaagacttaccacgaggtcattgatgagatctacaatcaggttgaccacctagagccatggatgaccggcaactggcgtgggcccttcagcgccttctgccttctttacaagttcttcaccatgaagctcacggttaagcagatgcacggcctggtgaagcaccctgactcgccttacatcagagctgttggatttctttacctgcgatatgttgcggaaccaaagacgttgtggagttggtatgaaccctacattaaagatgatga

SEQ ID NO: 410969 - DNA, 467 bp, Oryza sativa
tccgtgttgtccatccattggaaaagatccccatggaacaattggttgacagagattttactgaaagcgagcctataaagcctactgctttggatgataccccttttacacatgtcgaagacttgaaatccttggaggtgctagctacaaagctgaagagtgcaaccgagtttgctgttgatttggaacacaaccactataggtcttttcagggtctgacctgcctgatgcagatttcaactagaactgaggactttatagtggacactcttaagcttcgcaaatatcttggtgattacttaagagaaatttttaaagacccaacaaagaaaaaggtaatgcatggtgcagatcgtgatataatatggcttcaacgggactttgcatatatgtatgcaacctttttgacacaggccaggcttcaagaatcttgcagatggaccgcaacagcctggagcatcttttgc

SEQ ID NO: 410970 - DNA, 196 bp, Oryza sativa
tttagcaagcccgggcccccagccccttcgggttctccttccaccagcagaaatctgccaattgcagtaccggcaattccccttgatgaaataaagggaataaccaagaacttcagcagtgatgctctcatcggagaaggctcgtacgccagagttttctttggtgggcaaagagattttctgagatctgtggtga

SEQ ID NO: 410971 - DNA, 332 bp, Oryza sativa
gtcgtatgaggctaagtttcattttgttgcatcttcttcatgtaccattctaaacttgctatattctactcctttctcgcacctcttcaaccactcgaaatgtaagagaccaatgttttatagagatgctggaaatcgtttgaataacttgccagcatttggtgtttggtggatataccttaccttaggaaacataattatcaataccttacgttgtttcccccagaacaaaaataaacagaatgcttggatggcgaactgtaaaagatggagtgatagggccatacatatggaaatcatacagggtagggtatgaataaatcctgcaagtt

SEQ ID NO: 410972 - DNA, 403 bp, Oryza sativa
catgaatcatggaccactggtaattgagttactgggtaagcgccagcgccacacatacaaggtctgaaatctctgaaagtacctgatacatgagcatacagaaagaccatcaaactgacaaatttcatgcggccaatatacacacgcgattgcactactgatccaaattaatcaaccttttttattttctttttaacccatctcatccataataacgtagaaacaccagagatccatgcagattacattgcatccatccaagatgagaatgatcaaaaaaggtttgggttgtatccgttgctgcaggtggcgaggttgtagtaggcgaccatgtgaccgagggagccccaggctaggacttccacaaggtttaagccgacgggatcgttggaccggatcaggc

SEQ ID NO: 410973 - DNA, 510 bp, Oryza sativa
cgcaaacaaaaaacacttgtgtggcactgacttagttgggttttcagaagaggatgaagcgaaaattgttttggagaataatttgttctttgcaggggcaaatctggaaataaaactaaagaaggaatttgatgctgaaacagaatctaaaaaagaagcatatgaaaaggcacatcctaagaaggacgagcagaatgaaggctatcctaaaggcctaattgtggccttcaaattgaagagaatcacggttgatggtggggtgcaacaaaacagtgcagacaatgatactgccactgaagaagaaactccaaagtccatgaagaaaacatcaactggggaatctgaagagaggactaccgtgaacagtgatatggaggaacagaagtcattagacgacatgactgaagcgaaagatgtgaacgcttgggaagctacagaatctggtgacaagtgcccagttgatgccttgcttgaaagtgaaacgaatgttgatattgaaacattgatcaa

SEQ ID NO: 410974 - DNA, 301 bp, Oryza sativa
aggtagtgtgcggtgtgccgtactacaatcaaatgttgagatcttgaggaggccattgtgtccagtgttctgccaagaggagcccgaatagctggagggatggtgggtgtattgttaagctgtggagggtgacttttatgttgaaacttcctttgctgtatgttccatgcctgtaccgcacctgcatccattcaacctcatattcacaactgatgtaatcatgataaaattgaatgtgtcaatgatggtcgaatcgtatgccattatatgcgaattgactgttggttctattgttatgatc

SEQ ID NO: 410975 - DNA, 521 bp, Oryza sativa
cattgttgcagtcaccaaatccctttcaaggtcaaaaggaatagggtccaatattacacctttgacatactcaaatccccgtagcttgttctttgctgcaacagattgcagctctttcaggatatgctctttaaggccttcagacttgcatatttcagcaaaagaacccttgcagccatttgattctgcccacttcatggtgttctcttcatgtggattaactactgccactaacattgatctgaagctgtccccatatacccagacatcttcaacggctggagggaaaacatatactttctccaggtattcaactgcaacatactccccttgtgacaacttgaatatatttttctttcggtcaattaccttcaggattccatctgagttcatctctccaatgtcacctgtgtgaaaccatccatcagccatgacctcattcgtgagctcaggatttttatagtatcccggttaagaagtttcctcggacgcatatttcaccacgggaaggagtaccaagt

SEQ ID NO: 410976 - DNA, 494 bp, Oryza sativa
ctcgacataagagctccctggcttctctgtaggggggtcactttggtctatggagggggggacgaagaaagttttcacagatcaggtggaggatggaaagcccaggaaggacggccggccggcggtagggccagtgttcaggagtgctctgtcaaaggatggatttccgccacttgagcctgacatgaaaacatcatgggacgtgttcagggtcgcagcaggctagtacccagataatcggatgctcggatggcgtcctgtaaaagatggagcgatagggccatacatatggaaatcatacagggaagtgtatgaagaagtcctgcaagatggatctgctttgcagcagctgggggtgaagccagcttccccgtttggaatatatggatcaaactgccctcagtggatagtagcaatgcaagcttgcatgggttccgtttaatctgtgtccactctacgaaaccttaggtgccagatctgttgctttattattt

SEQ ID NO: 410977 - DNA, 355 bp, Oryza sativa
cgctgcatgagggggtttggtggtgcggttgattgccggcaataaattctctagggggaggtatcggtcatggctgccgctgctgcaaggaggggctcatcgctgctctctcgctgcctgctgtccaggcccttcgccgccgcctcgcctgctgtcccctctgcgctccgcagggcagatgggacacaagaattgttgctgggaatccttcagaggttcagcactgcagcagttgcagaggagcccatatcacccccagtccaagtgaactacactcagctcctcattgatggcaaattcgctgattcagctttcggctaaactttcccatctctggacccctcgtaccggggag

SEQ ID NO: 410978 - DNA, 447 bp, Oryza sativa
aagaaggggggaagatttcccaaaaacggacatatatacccccggggatgaattagtataggaaaggaattcaaagctcgccggccggagagggccaattgtcgagcatgtcgaggcactccttggggcgggaccccggggcgggggggccaccccccttgacgggggccaaggggaggttggggtccaaaaccgggggaaaaccggcaacctggcggggggaggaccacggactccaggcgggcaccacgttggagcccaacgtccggaaccactggtgggggccaacaaacgccatgtccagggcgggggccccggtgtacaccaaccccctgtaaccccccttcgtgagctctcattggtaagggatgggccttaccaacttctgccggaagagcggaaaccccaggcaatggatccaggaggaaagggagcccttcggggttc

SEQ ID NO: 410979 - DNA, 311 bp, Oryza sativa
agcgcctgcgcctgggcctacccgttggagtgctgggacagcggttactggatgtcgtacctgtgggcggacgacccggaggtgcgcgccatgctgggcattcacgagggctccatcgcttactggagccgctgcacggcgctgatgctcttccggcacgacgtggacagcgccattccttaccacgcggagcttacgcagtgcggctacagggcgctggtgtacaacggtgaccacgactctgtacatgactgtttttggcacgcagtactggatccggtcgctgggctacaacgtggagaccgcctgga

SEQ ID NO: 410980 - DNA, 327 bp, Oryza sativa
ctttgctcctttggctgacatggcttctactctccctgggctccatctacctccttgacctcctcgcacactcacgacgctgcctcccgccgggaccccgaccgctgccgctgatcggcagcctccacctgctcggcgaccagccacaccgatcgctcgccggtctcgccaagacgtacggccctctcatgtcgctccgccttggcgctgtcaccacggtggacgccttctcgtcggaggtcgcccgcgagttcctgaagaagcacgatgccgtcttcgccacccggtcaacccccgacgccactggtgaccacgcgtggtactcct

SEQ ID NO: 410981 - DNA, 521 bp, Oryza sativa
gccgccgagctacctcaccggcgagttcccgggcgactacgggtgggacaccgcggggctctccgccgacccggagacgttcgccaagaaccgggagctggaggtgatccactcccggtgggcgatgctgggcgcgctcggctgcgtcttcccggagctcctcgcccggaacggcgtcaagttcggcgaggccgtgtggttcaaggcgggctcgcagatcttcagcgagggcgggctcgactacctcggcaacccgagcctgatccacgcgcagagcatcctcgccatctgggcggtgcaggtggtgctcatgggcgccgtcgaggggtaccgcatcgccggcgggccgctcggggaggtcgtcgacccgctctaccccggcggcgccttcgacccgctcggcctcgccgatgacccccgggcgttcgcggagcttcaggtgaaggagatcaagaacggccgcctcgccatgttcctcatgttcggctttttcgtccagccattggcaccggcaagggccc

SEQ ID NO: 410982 - DNA, 517 bp, Oryza sativa
gccgccgagctacctcaccggcgagttcccgggcgactgcgggtgggacaccgcggggctctccgccgacccggagacgttcgccaagaaccgggagctggaggtgatccactcccggtgggcgatgctgggcgcgctcggctgcgtcttcccggagctcctcgcccggaacggcgtcaagttcggcgaggccgtgtggttcaaggcgggctcgcagatcttcagcgagggcgggctcgactacctcggcaacccgagcctgatccacgcgcagagcatcctcgccatctgggcggtgcaggtggtgctcatgggcgccgtcgaggggtaccgcatcgccggcgggccgctcggcgaggtcgtcgacccgctctaccccggcggcgccttcgacccgctcggcctcgccgatgaccccgaggcgttcgcggagctcaaggtgaaggagaacaagaacggccgcctcgccatgttctccatgttcggctttttcgtcaggccattgtacccgcaaggg

SEQ ID NO: 410983 - DNA, 443 bp, Oryza sativa
caaaccttaaccccggaggagagggaggagcagccatggccgtgggcaagaacaagaggatctccaagggcaggaagggcagcaagaagaagaccgtcgatcccttttccaagaaggattggtacgacatcaaggcgccgaccgtgttctccgtccgcaacatcggcaagaccctcgtctccaggacccaggggaccaagattgcatctgagggtctcaagcatcgtgtctttgaagtctccttggcggatctttagaatgacgaggatcaggcttacaggaaggttagacttcgtgctgaggatgttcaggggaggaatgtccttacgaatttctggggcatgagtttttaccacggacaaacttaggtccttggtcaagaaatggcaaacattgattgaagcccatgtggatgtttaagcccacagataactacattgctc

SEQ ID NO: 410984 - DNA, 428 bp, Oryza sativa
attttctggatagccaagctgagtacgatgaatcatccggagaggatcaggatgccaaggtttcaccatccgctgaggatgaagaagctggcaagaaagctgaggatggcaggtccaaattgtcagacgaacagaaagtgaaacagcagagaccacataagattcagatatggtcggaaataaggccctccttaggccacattggggagatgatgagcttgcgtgtcaagaagaagcaatcttctgcagataaggagaatgcagcgaatgaactccaatctgcaaataatgaagaaatcaaaccctcagaggactccgatgatgagttctatgatgtagagaaagttgatcccaaccaagaagggcctgtagctgatagtgctgatgctgattcaagcatgaaatgtgatgcgaattcagaagggcat

SEQ ID NO: 410985 - DNA, 547 bp, Oryza sativa
cctcctcctcgcgctcccccgattcgaagcgtgaagagaggagcggcgcttgcgagaggagagagatggcccgtaccaagcagaccgctcgtaagtccacaggaggaaaggctcccaggaagcagcttgcaaccaaggctgctcgtaagtctgctcccaccactggaggagttaagaagccccaccgttaccgccctggaactgttgccctccgtgagattcgcaagtaccagaagagtactgagcttttgatcaggaagctgcccttccagaggcttgttagggaaattgcacaggacttcaagaccgatctgcgtttccagagccatgctgtccttgccctccaggaggctgcggaggcataccttgttggtctcttcgaggacaccaacctgtgcgctattcatgccaagcgtgtgaccatcatgcctaaggacattcagctggctatgaggattcgtggtgagagggcttaaaattccctcggcgactcctttgacaaatgaagcatgcctcgtaatgttagtagggggtttaatcttttgct

SEQ ID NO: 410986 - DNA, 528 bp, Oryza sativa
agaaccgatcagctttggtgttcgatcgatcaagacgaggcgggggcggggctgatcgagatggcggcgccgccggcgaggtcggtgagcgtggcggacagggcgctgcgaggggtggcggacctgatcaagctgctgccgagcggcacggtgttcctcttgcagttcctcagcccgctcgtcaccaacaacggccactgcgccgccgcctacagcagggtcctcagcgccgccctcctcgcgctctgcggcgccttctgcgccttctcctccttcaccgacagctacgtcggctccgacggccgcgtctactacggcgtcgtcaccgccagggggctccgcacgttcgccgccgatccggacgccgacgcgcgggacctgtccgggttcaggctccgcgccggggacttcgtccacgccgcgctttcgctccttgtctttgccaccatcgccctccttgacgccgacaccgtggcgtgcctttacccggggcttgaggtcagcgagcgcaccaatgatgggccagct

SEQ ID NO: 410987 - DNA, 533 bp, Oryza sativa
acccattagaagagtttaataccatgatgcaaattttataacgcatactcattctgcatagaccatgtactgaaatatggcgcacctatcaatctatactgcatgtatcacgttatgctggatctatataaagctgctctgcatcgctcattataaattgagagtgagcgattgttgcttgaccttaaccagaccagagaactctaagagcctgagctgctccagaccatttgctttcatgggaacatgtgtactgatactgtctatatatatctcaacaacaggtttgatgacacaaatccagaagccgaaaagaaagagtatatcgatcacatacaggaaatcgtacactggatgggatgggagccctacaaagctacatatacaagtgaatattttcaggctttatgtgagcatgcaggtgagttaaaacgaaaagggctagcctatgtggaccccagaccgcacaagaaataaggatacagggaaagaaatgaatgtccatggaggatagacccatgaagatcctgaac

SEQ ID NO: 410988 - DNA, 481 bp, Oryza sativa
catccacagagatattaagcctgacaacctgcttctcgacaagaatggtcacatgaagctgtcagattttgggctgtgcaagccaattgattgttcaaagctctcaacattgaatgaagatgaaccgatgggtgatgacaatttgagggaatcaatggatatcgatagctctttctctgaaacaacaaatggtagaaggtggagaagtcaacatgaacaacttcagcactggcagatgaacagaagaaaactggcattctcaactgttgggacaccagactatattgctccagaagttctgctaaagaagggatatggaatggaatgtgactggtggtctttgggtgcaatcatgtatgagatgctttgtggttatccaccattttattctgatgatccaataaccacatgccgaaagattgttcactggagaaaccatttgaaatttccagaggattcaaaggtgtcttctgaagcaagg

SEQ ID NO: 410989 - DNA, 539 bp, Oryza sativa
aaccaaatatgttcatatgatattttgccgggacatgacttgtttgcccactcacaaggagaaaatagaacaagaagcaaagtcaagtaggtaaaagacatgtactaattttgttattccttatgccgaagcaatattggatcaaaaatattctccacaatgtcgtggagcttgattgattatatggaatggtgatatgatctctctttgtgaactctgcatcctttcgctcaaaggtcctcggggccattgatatccttgttctcgatcactgctccatctgggatttccagtttgacaccaggttgggctgtgatggtcaccttgcccttcaatgtgatgctagagccaaaccaaacatcaccggaaaccttcaaggtgtcaagctcaacaatgctggggattgacttgaagcgaccaaggaaacacccgaccttcttgaactctggacccagttcaattgagggattcgatgggtttgttctgggcgggttgcgtgtacaaagccatcaaccaaggtatatagatcagactgtact

SEQ ID NO: 410990 - DNA, 520 bp, Oryza sativa
ctcatcagatcagcgtgaagcagcggcaagaacacaaaaatggcggacgagaagctcgccaagctgcgtgaagccgtcgccggcctctcgcagatcagtgacaacgagaagtccgggttcatcagcctcgtcgcccgctacctcagtggcgaggaggagcatgtggaatgggcaaagatccacacgccgacggacgaggtggtggtgccgtacgacaccctggcggcgccgccggaggacttggaggagaccaagaagctgctcaacaagctcgccgtgctcaagctcaacggcggcctcggcaccaccatgggatgcaccggaccaaaatcggtcatcgaagtgcgcaacggattcacattcctcgacttgattgtgatccagatcgagtccctcaacaagaagtatggcagcaatgtcccactgcttctgatgaactcattcaacacccatgaagacaccctgaagattgttgagaaatacaccaattcgaacatttgagtccatactttcaatcaga

SEQ ID NO: 410991 - DNA, 445 bp, Oryza sativa
tatgccacttgctgctgtgaagtactcccgcgggatgttcatcttccccagtgcacagcctgctccccacaggagcttctctgaggaagttgctgtcctcaaccgctactttggccatctgaaatctggtggtaatgcttatgtgattggagatccagcaaagcctggccagaagtggcatatctactatgctactcagcacccggagcaacctatggttacccttgaaatgtgcatgaccggactggacaaggagaaagcttcagtctttttcaagacttctgctgatggtcacacatcatgtgctaaggaaatgacaaaactctcgggcatctctgacattatcccagagatggagatctgtgaccttgacttcgaaccctgcggctactccatgaatgcaatccatggctcagcgttttctaccattcatgtgaccccctgt

SEQ ID NO: 410992 - DNA, 412 bp, Oryza sativa
gtcaattgggtatatgcaagtactcaaagagaggatacatcaggccattttaatatttttgttggcgatctttgcccggaagtaacagatgctgctttgtttgcttttttcgctggatttaccagttgctcagatgctagggtaatgtgggatcagaaaactggacgatccagaggttttggttttgtttctttcagaaatcagcaggacgcacaaaatgccataaatgaactgaatgggaagtggctcggcaaccgtcaagttcgttgcaattgggcaacaaagggtgctaatgctggtgaagagaaacaaaatacagactccaagggtttgatagagttgacaaatgtgttatcagaaggttgaaaggttaatgcaaatgaatatggtcctgaaaacaacccacagttca

SEQ ID NO: 410993 - DNA, 456 bp, Oryza sativa
gttcaatcatatcatgtgcattagagaatatagtaaaagataatcggtgttcattgtcaatgccgtagcttcgccatgacaactccaatcatagggcagccaaaaatgaacaaagggcagtaggtattgaaattgttgcacccaaaaagaatagttcccaagtacaagacaaccagtatgacaagggtgcttcttaagcaggagttgcctgcctcctagaagaggcaatcagatctcgtaattccacgtgctctccgctattagctttggcgctttgctttggtcagacagatcaaatgacgctgcgaccttgaaggaggcaccgatcttggagtccctggtccagtcgagggcgaggagcttggtggaggcttggtaggaggccttgatggcatcccctccttgaaacttgcgggtgaaggaaaagttccaggcgttgttagcggtgtcgaagca

SEQ ID NO: 410994 - DNA, 288 bp, Oryza sativa
gcggagagagactctctctctctccatcaggcgttaactgagctcgtacggccggcgctggcgaagaaggcgacggaagaagatatcaccgaattccacaggataaatgccgctttctgcagcagctgggttgagatgggggaagaaatcaagaacggagaggagggaccagacatggctgcaccgggcgaggaggagcaggagcaggggaggaaaggcatcccgtctctgctctcctccagggaggagaacattttcttttacattactcagctgaatggatggaca

SEQ ID NO: 410995 - DNA, 400 bp, Oryza sativa
cgacggtatggctttcttcttcttgaggatgtcgcatctcaagacccacttagtgtttcggttgcaattcttcaccaggttaacattttgcctgagatgtatcaagttgggtacacaaaattgttctttcgaactggccagattggcaaacttgaagacactcggaaccgtactctgcatggtattttaagggttcaaagctgtttcagagggcatcaagcccgtcgccatgcaagggaacgaataagaggagttttggctcttcaatcatttattcgaggtgagattgcaagaaaaatgtattcgtctctggcaaggaaacacagggcagccattattttacagagaaatctaaaatgctggcttgcaagaagatatttcgttaacataccgaaggctt

SEQ ID NO: 410996 - DNA, 488 bp, Oryza sativa
cagcaattgcactagcatctgttagatttcttactggtctgcgtgtttacctcgataacccagcaaaagtaaagcgcatgctacttcctaccaaagtatccaccagggctggtggaaagaaagatgtttcaaagtgcgactcgagttccacaagcctcatcagtttgctgatgggagttagtgtcttgaagcaggctatcatagacttgcttcttgatataatggttgagtgctgccaaccttcagaagaaagaccagcatatgtctcatcctcagcaagttccaaaacttctcctgactcgaatggggctagctctccaccagagctcaatgttgaaggtgaactgacagaatgtgctttcagtaataagtatgaaaggctgaaacctggcaatgatgatatccatcataggctttctgtacaaacacagataagtgtacaaatgatattcctgccagagttttagaacagtcctgttcttcccctg

SEQ ID NO: 410997 - DNA, 469 bp, Oryza sativa
aggttcaaatccaacttattcataaagcatactgctgtcccacaggaaactgtttcataaaactaacatatcatacggactcgatggtccattaaaccagacacaagtagacatcagcaccacaaatacttgacgaacagaggctcgggatgaccaggcacatcggcagctccaccaaactggctgattactgaccaccacggaggcggagcaccaggtggagggtggactccttctggatgttgtagtcggcgagggtgcgtccatcctccagctgcttgccagcgaagatcagacgctgctggtctgggggaatcccctccttgtcctggatcttggccttcacattatcaatggtgtcggagctctcaacctccaaagtgatggtcttcccagtcaaggtcttcacgaagatctgcataccaccacggagacgaagcaccaggtggagggtagactccttctggat

SEQ ID NO: 410998 - DNA, 342 bp, Oryza sativa
cgaaatatttctccccaatctcgcgaggctctcgtcgtcgaatcgaatcctctcgcgtcctcaagatgcagatctttgtgaagacattgaccggcaagactattaccctcgaggtggagtcctctgacaccatcgataattgtcaaggctaagatccaagataaggagggcatccccccggaccagcagcgtctcatcttcgctggcaagcagctggaggatggcaggacccttgctgactacaacattcagaaggagtcgacccttcaccttgtcctccgccttccgtggtggcatgcagatctttgtcaagactttgaccggcatgactataaccccttg

SEQ ID NO: 410999 - DNA, 302 bp, Oryza sativa
gcgggtgggacggtgatccacaactgcacggtggcgccggacccggacctggagaagttcacggacaaggtgatgacgtacctggtgcgggcgtggaaggagtactcgcggaccatcttcgagcagaacgagatcggggcggaggtggatcctgtggggtggctggagtggaacggcaactttgcgctggacaccctttactacgcggaggttgacaaccatggacccggcgcctacatgagcaagcgcgccaagtggaagggcgtttattacataacctgctaggaccgtttgaaggagtt

SEQ ID NO: 411000 - DNA, 397 bp, Oryza sativa
agccaatccactgaccatgatcactcctatgtggagtatcctcaagaagcagagtacaaggaagaattccggccaccgtctcctgctccgtcttatactgaaaaggatgtcctctcatctatggtaagacgactaggcgagttggaggagaaggtgcaggcgctcgaaacgaagccatccgagatgccatttgaaaaggaggaattgctgaatgcagccgtccgccgtgtggatgcattagaagccgagttaatctctacaaagaaggctctctatgaagccctgatgcggcaggacgagctgcttgcgtacattgacaagcaagatattgatcaagtttcgtaaaaagaaatttgcttttagctcaacgacgagttaattctccatacacagagct

SEQ ID NO: 411001 - DNA, 503 bp, Oryza sativa
cctgaccatggtgtgccacatgacagtgcttttgtacgaaaaattttgaaaagattatatggcattccaaaagagcatccaatagtagcacattgcagtgcaggtattgggagaactggtgcttatatcaccatccacaacactatagagaggattttacttggtgacatgtctgctttggatctttctaaaactgtcaaaaaatttagatcccagcgacctggaatggtccaaacagaggatcaatacaagttttgctatatggcagttgtctctgagctgaacgacctgctatcaaatttaaaacactgaatcatttttatggaacaatcagtgccctgggtatctctgacagattgtcgcccttcaactccctcaattcttaagcctagctaacagcattcatgtatgctgatgatgtacagcatgaagacctgaaaattcatgctttagcatgaaggcttcttttactttctccacaccaagaatccccgtgtatgatc

SEQ ID NO: 411002 - DNA, 575 bp, Oryza sativa
cggacgcgtgggcgcgattcggagggaaaccctagctagctcccgctctcgatcccgcgcccgccaccgctctcggcaagatgttcctcacgaggacggagtacgaccgcggggtgaacaccttctccccggaggggcggctgttccaggtcgagtacgccattgaggccatcaagttggggtcaactgcgattggattgaagaccaaggatggtgttgtccttgctgtggagaaacgtgtgacctcaccactactggaaccaagcagtgtggagaaaatcatggaaattgatgagcacataggctgtgccatgagcggccttattgctgatgctagaacattggttgaacatgctcgtgttgagactcagaatcataggttctcatatggggagccaatgacagttgaatctactacacaagctatctgtgacttagctctgcgttttggtgaaagtgatgaagaatcaatgtcacgaccatttggaggttctctccatattgttgtcatgatgagaacggacccagcttgtactacactgccccataggacccttttggcatgccatgccaag

SEQ ID NO: 411003 - DNA, 441 bp, Oryza sativa
gcgccggcgccgccacttccctctcgcatcttctcgcgctcaggggccaggtaagcgaagatgtacaccgcgaggaagaagatccagaaggagaagggcctcgagccctccgagttcgaggactccgtcgcgcaggctttctttgacctcgagaatggcaaccaggagctcaagagcgagctcaaggacctgtacatcaacaatgcagtccagatggatattgccgggaacaggaaggctgtggtgatccacgtgccgtaccgtctgcgcaaggcattcaagaaaatccatgtcaggcttgtcagggagctcgagaagaagttcagcggcaaggatgtggtaattgttgcaacaaggaggaatgtgaggcctaccaagaagggctcggcttgtcagcgccctcgcacaagaactcttactgctgttcatgatggtatcttt

SEQ ID NO: 411004 - DNA, 459 bp, Oryza sativa
ataaattccaccaaccccccctcttctcgtctctcgccttcgccaccttcgaatcgaaactaatcccccacacctccgcgtgcctccccccaatctcgagcgcacggaagccgccgccaatggcgctcccgaatcagcagacggtggactaccccagcttcaagctcgtcatcgtcggcgacggcggcacgggcaaaaccacctttgtgaagaggcatttgactggcgagttcgagaagaagtatgagcctactatcggtgtggaggtccaccccttggatttcttcactaactgcggcaagatccgcttctactgctgggatacagctggtcaggagaaatttggtggactcagggatggttactatattcatgggcagtgtgctatcataatgttcgatgtacttctcggctgacgtacaagaatgcccaacttgtcaccgggatatatgcagggtc

SEQ ID NO: 411005 - DNA, 353 bp, Oryza sativa
agacggtcgttggtgtacgtctacttccgctgcttcgacggttgctttcaccattgacgcctcgctcaccatggacatgggcgactacaatggtaaaggtggacgcctggtacgacaacgagtggtgctacagccaacgcttggtctatctggcgcatttgattgcgagcaagaggaccggcgcggttgttcatgtctatcgacgatccacttggaggactttttgatggacaactaggatacctgatgagtgcaaattgttcgaaaactaagaccattgatcaagtacggacttgcgtaagagcagaaatataatactttatataatgtaacgaaatacacacattaactga

SEQ ID NO: 411006 - DNA, 475 bp, Oryza sativa
tcggttacgagtgggagcggaagctccgcgacgtcaagatccgcaaggaggacatgaaccgcctcgtcatgaacttcctcgtcaccgagggcttcgtcgacgctgcggacaagttccgcgtcgagtccggcacccaaccggatattgacctggccaccatcacggatcggatggaggtgaagagagcggtgcaatcagggaatgttcaggaggccatcgagaagattaacgatcttaatcccacgattctggacacaaatccccaactgtactttcatctgcaacaacagaagctaatagaattgattcgtgcgggaaaaataaatgaagctttggagtttgcacaagaagaactcgctccaagaggcgaagaaaatcaagtctttcttgaagaaatagagaaaactgtagcacttttgggttttgaagatataaagaactgtccatatggggaactattggatggttcccaacg

SEQ ID NO: 411007 - DNA, 514 bp, Oryza sativa
tctttcacaccaccagctttgctcccgctagttcccgctgatcgatcttttttcgggagggcgttgcttgctcggatcggcggccatggctgagcccgctggggaggcggccccgcaggcggacggcgtctcggaggaggtggcggcgaggccgagggggtttaggcttcttggggaggacaagtccgtgcaccaggctctcggcggtggtaaagctgctgatgtacttttgtggaaagacaagaagatctctgctgcagtgataggtggcgcaactgtgttgtgggttctctttgaagttgttgattaccatttcctcactctgatatctcatgtcctgatcggagtactggccatcttgttcttatggtccaaggcaaccatcttcatcaagaagagtccacctaatattccagaagtgaagatatctgaagatcttgctgtgaatgttgcactagcactgcgcactgacattaaccaagcacttcacttgcttcgggagatttctctaggg

SEQ ID NO: 411008 - DNA, 526 bp, Oryza sativa
  unsure (1)..(526): unsure at all n locations
tcgtctcgcgttccctcccctctcccctccggccatggcgtccaagcggatcctcaaggagctcaaggacctgcagaaggatcccccaacctcctgcagcgctggccctgtgggagaagatatgttccactggcaagctacgattatgggtccagcagatagtccatatgcaggtggcgtcttcttggtttctattcacttccctccagactatccgttcaaaccgcccaaggttgcatttaagacaaaggttttccacccaaacatcaacagtaacggaagcatctgccttgatatcctgaaggaacagtggagccctgcattgacagtgtcaaaggtactcctctcaatttgttctctactgacggacccaaacccagacgacccgctagtttcggagattgcgcacatgtacaagactgatcgggccaaatatgaatcaactgcgaggggctggacccagaaatatgcaatgggcttgacgacgtangccgatagtgttctctagcgatatatgttatcttgg

SEQ ID NO: 411009 - DNA, 524 bp, Oryza sativa
tcgttcccatcgcgccgccacctctccccaaccctagctagctccccctccttccccggcggcgacatcgacgatggcggcggctgcggcaggcggcggcgccccgcgggcgctctcccagcgggagcaggacatccagatgatgctcgcggcggacgtccacctcggcaccaagaactgcgacttccagatggagcgctacgtctacaagcgccgatccgacggcattttcatcattaaccttggcaaaacctgggagaagcttcagctggctgccagagtgattgttgccattgagaacccacaggacatcatcgtgcagtctgctaggccttatggtcagagggctgtcctcaagtttgcacagtacaccggagctcatgccattgctggcaggcacactcctggtacatttaccaaccaactgcaaacctcattcagtgagccacgtcttctcatccttactgaccccaggacagatcatcagccaaataaggaggctgctcttggaaacatccccacta

SEQ ID NO: 411010 - DNA, 515 bp, Oryza sativa
gtggtttcttctctgggcaatgtcagttacgcatctttggttaggtatcaataagttacattgaaactgcggcaaccactatgaagagacaggacgatctcaagcactactacttcacttgcacatgtccccgttgtgttaaggtttttgatttcattgcttactattcttggatgtcctatgggaagctgacacattcttgataatgaagtgttctctagctataattttttccccaaccttacaggattctgaggaagatgcgctccttgagggatacagatgcaatgaccaaaagtgtgatggatttcttctgcctaatgcaggaaacaaaggttatacatgccagaaatgtagcacttctagagatggggaagagttacaaaagatggctagcgatgtactactattatctgacaaagtctcttccttagtttcatctggaatagataacagtgaggtaggttctatgtacaagaccattgaagagctagagcggaagctttaccatcctt

SEQ ID NO: 411011 - DNA, 512 bp, Oryza sativa
tttttcccggcggcggcgcagcagaggatatcagccatggtgaagtttctcaagcccgggaaggcggtgatcctgctgcaggggaggttcgcggggcggaaggcggtgatcgtgcgggtgttcgaggagggcacccgcgaccgcccctacggccactgcctcgtcgccggcctcgccaagtaccccaagaaggtgatccgcaaggactcggcgaagaagacggcgaagaagtcgcgcgtcaagtgcttcctcaagctcgtcaacttcacccacctcatgcccacccgctacaccctcgacgtcgacctcaaggaggtcgccgcggggcccgacgcgctcgccaccagggacaagaaggtcgccgcctgcaagtccgccaaggcgcgcctcgaggaccgcttcaagaccggcaagaacaggtggttcttcaccaagctccgcttctgagctctctcctgcggcggcggcggcggcgatgggatggtactggtgcacggccatctcatcctttt

SEQ ID NO: 411012 - DNA, 477 bp, Oryza sativa
ccgccctcgccgacctcgtcgccggccgccgcatcaccaccgacacctccccccatcgccgcctgtgagagttgggtggtggagcgagcgtggccgacaggggacgcggaggggcggcggcggcggcgattgttcgcgggatgagcagcttccgcggtaccatcttcgtcgactcctgtggtgggaagaggctcgagtactggcggacgcatgtcgtgaggcccaagggcgcgcacaaggccaccatcgtctggttccacggcctctgggacaacggagccagctggtctcaactactggaaacccttcccctttccaatataaaatggatttgccccaccgggcctacaaggccagtggcagtttttggtgggttcccatcaactgcatggtttgatgttgctgatctttcataagacgcttctgatgatgttgaggggctggatgcctcacctgcacatgttgcaaacttattat

SEQ ID NO: 411013 - DNA, 403 bp, Oryza sativa
  unsure (1)..(403): unsure at all n locations
ttcgtgctcctcttcctcatggcgatctcgaaggcttggatctcgctgctgctcgcgctcgccgacatgctgtcggcgccggcgtccagggcggaggaggcgccggcggcggatgaggaggcgccggcggcggaggccgtgctgacgcttgacgcggacggcttcnattaggcggtcgccaagcacccgtacatggtcgacgagtactacgccccgcggtgtggacactgcaagaagctcgctccagagtatgagaaagatgcacaagagctaagcaagcacgatccaccgattggtcttgctaaggatgatgccaacgacgagaagaacaagccaagtgctaccaagtatgataaaacatggcacagcacaccggaacatattcaggaaccagggcaagaac

SEQ ID NO: 411014 - DNA, 504 bp, Oryza sativa
tgcgccggctggtgccgccccggcattcccggcgcgacccacgacgccgctgctcctatctactcactaatgttgcacaagctgccataactgacgttgttgcgggcgagatccaaggggggagggttatctgccatggcgaacgataccagaccactaccacaccctgggggtgagatgcagaccctctctgcctcgccgtagatcaatgaacgtgctatgacactgacggcgaatcacctacttgccagacgatgaatgctgagaacccagatgcgaagataaatatgaggtgctacgagaggcgtacctaggtttaagcgatccttcacaaaggcaggctaatgataagcatggaacgtgaagggcttgctgaagattaacataatggatcctgatactggctttggaaagcaatttggaagtgactattatgactatgatgttggacagcgagaactggcatacatagcctgaggggaagtctaggaaaacttatgctgt

SEQ ID NO: 411015 - DNA, 458 bp, Oryza sativa
ttcttggtacatccttaaagttgacgtttgaggggacaaatcagttggtatatccagagacttggttctttgtgcttatagtggccacttgtgtgctaacacagatgaattacttgaacaaggtctgtttgttaatgcccttagggcactgataccataggtttgtgatatttatatgttctttgtcaaagtactccagctagtcagggattgattaataaagcgccaaatttgaatataaagaattattgctatatcatatactatgtcaaaagcagtattatgtcactcttatcaacaactgaacaatagaatgcttttcacaaatttgtggagatatgttttgttggtatcatgtaaacctatttagattagtcttacttcaccattccattctagctactggttctattggtgttatcaattctatgacttctgctttgcattatctggataac

SEQ ID NO: 411016 - DNA, 517 bp, Oryza sativa
tttttgaactgcctgttgaaattattgatacccgtctgatccaagcccgtgatatccttgaagatctgctgaagcctgtggacgagtctcaggacttcttcaagaagcagcagctccgggaactcgccatgctcaatggcaccctccgtgaagaagggatgcaaagatctggctcatcttcccctttccacaacagccttggaatgaagagggcgaagacaagggggtaagtgagcaagtgttcatgatgggaggaccaatcgtctattctgagaccgatgctgaagtatgcctatggggttgccttgctggctgatggcccaaaaacggtctcgcaccgccagcatcggagcggcccgtacttgataataccatatatctggagttgtgtattcctgctaccgcctaccgaggggtctggttatggcaacgtagggtgttgggctatatattgggatgtgcatggtttggtggtagctatgtggcttgtgtattgctatgaactgatatctggggt

SEQ ID NO: 411017 - DNA, 499 bp, Oryza sativa
  unsure (1)..(499): unsure at all n locations
tcaacacctagattcccttccctggtggttgatcgatcgatgcgcccagcccacatggccgcgtgccgatcgccatcatgacattgccatggcggtgatcgccgccgccggaggggagggggacgcgggcgtcatcgcgcatgtggtggtcgacgtcgacnagagttgtgcggcggcggcggatgatgatgatcgcagccggcgcccgagcacgggctgcaggatttgccacctcggcggcggcggcgacggcgagatggcggcggagagcgggagcgggcggctggtgaggctcgggtgcggctgccgcggcgagctggcggcggcgcaccggcgttgcgccgaggcgtggttctccgtcaggggcaacaggcgctgcgagatctgcggcgagacggcggagaacatcaccggctggggcggcggaggcaaggagttcatgaagcggtggcacgcgacggcgggcgtcgacgtcgaaggctcctccaaggcatgcagc

SEQ ID NO: 411018 - DNA, 439 bp, Oryza sativa
gacgggcgcaaggccagtccatggcgatggctagggtgcgtgcacggcggtgcggatgccgtgatcacatcacatgatggcggcgatttgccaaatcggcaagtcatcaatccgattcgcttagggatttgccaaggttctaattttggggatttttttgatttagggtttctgaaatcatgccaagtgtggtatttttgtatgttgtatattgaagttctcatggtgtaaccagggttgcatttaccgcggtaaaccgcgcggttaccgcgcttaccgcgggggtacggtaaggggtaaaccgcggtaaccgcgtcaaattcaaataaatttgaaaaataatttgaatttttgataaattttgtacggtttgtcgcggtttgtcacggttaccgcggttaccgtgcggtaaccgtgctagtgtagcgagatgtgagag

SEQ ID NO: 411019 - DNA, 521 bp, Oryza sativa
taaggaatcagaacacatatcctcatctcatgggtctgcagacacctacttctccgttgggaccaccatcaatttactcggctagtggaatgtatggatacaatgggagttcatatgggtccggcctatggtatggatcacacctgtatggttctggattgtacgggggatggaatgcactgtcggatggcaaatacaatcccagaggaagaggtaatggatcctatggttatatccatggaaatcaggatgggtttaatgagctaagaagagggccaagaagtggtcttttcaataaccaacagggagttggagctactgttgcacctgtgaagggacaagagctttcagccagcgatagctcgctttctgtcatgaaggatcagtataaccgggctgattttgtggaaacatactcagatgctaaattcttcatcatcaaatcatacagtgaggatgatgttcacaagagcattaagtacaatgtttgggctagcacatccaatggtaataaaaagctt

SEQ ID NO: 411020 - DNA, 423 bp, Oryza sativa
gaaggaggaggatgtccggctgggagccaacaagttctcggagaggcagccgatcggcacggcggcgcagggctccgacgacaaggactacaaggagccgccgccggcgccgctgttcgagccaggggagctcaagtcgtggtccttctaccgcgcagggatcgccgagttcatggccaccttcctcttcctttacatcaccgacctcaccgtcatgggggtcaacaactccacctccaagtgcgccaccgtcggcatccagggcatcgcctggtccttcggcggcatgatcttcgccctcgtctactgcaccgccggcatctccggcggccacatcaacccggccgtcaccttcggcctcttcctcgccaggaagctgtccctcaacaaggccctcttctaacatggtgatgcagtggctcg

SEQ ID NO: 411021 - DNA, 486 bp, Oryza sativa
ttcgtcccgaggaagggcggcgacccaccccccccaatcgccaaaaccctaactccgatccgatcgagctctgcttcccatggcgactgccgcgagccaggcgagcctcctgctccagaagcagctcaaagatctcgcgaagaaccccgtggatgggttctcggcggggcttgtggacgatagcaacgtgttcgagtggcaggtcaccatcatcggcccgcccgataccctgtatgatggaggctacttcaatgcaataatgaccttcccccagaattatccgaatagtcccccatcagtaaggtttacctctgagatgtggcatccaaatgtttatcctgatgggcgcgtatgcatttctatccttcatccacctggcgaagatcccaacggttatgagcttgcgagcgaacggtggacacctgtgcatacagttgaaagtatagttctgagcatcatttcgatgctctctagtccaaatgatga

SEQ ID NO: 411022 - DNA, 506 bp, Oryza sativa
tcggaacacccgtgagacagcttttgctatcaggaagttgcctctgggcaaggccaagaggtaccttgaggatgtgattgcccacaagcaagctatccccttccgtaggtactgcggtggtgttggccgcactgctcaagctaagtcacgccattcaaacggtcagggacgctggcctgccaagtctgctagattcattctggatcttcttaagaatgcagagagcaatgctgaggtgaaaggtctggatgttgatactctttatgtgtcccacattcaagttaaccaggcccagaagcagaggcgccgtacctaccgtgctcatggacgcatcaacccttacatgtcctccccgtgccacattgagcttatcctgtcagagaaggaagaaccagtgaagaaagagcctgagtctcagatcgcagccaggaaggcctagagaaggaagctttgccccccttctgcctgtttgttagatcagattattatatagcctgtggcttttg

SEQ ID NO: 411023 - DNA, 519 bp, Oryza sativa
gtggaagaaggagagaaacatctagagtgaataagaaagatggggttcgtccgtgccctgttcctgctggcgatggtgtgcgtggcggcgcacgcgaaggactaccccaaggaggagggcgcgaaggcggaggggccggccgccgcctcggggggcggcggcggcggcagcacccacgacttgctgaagctgggcggcaagggcgacggcaagacggacagcaccaaggcggtcaacgaggcgtggacggcggcgtgcgctggcaccggcaagcagacgatcgtcgttcccaagggcgacttcttgacgggtcccctcaacttcaccgggccatgcaagggcgacatcgtcatccagctcgacggaaacctgctcagctccaccgacctcgccttattcaagtcgaactggatcgagatcatgcgcctcgaaagcctcgaaatcagcggcaagggccagctcgacggccagggtgccgccgtctggagcaagaactcctgcgccaagaaatacgactgc

SEQ ID NO: 411024 - DNA, 511 bp, Oryza sativa
atttagaaagcaatttgcccatcttgaagaaaatggtggaaatggcccggtaattccaatggatagaaagcacacttctcttcccaggtctactattgttcactcaactccaattcctgccaaggaacagccccgcattggcccatcaagggataaaccatctgatgaaccctatagcaatccccgggaatttgacagattttctggcaatgccccgaggacctcacaagctccacaaagagtgccaacagcaagaccaggaagagttgttggtccagtattgccttatgaaaatggtgccacaaaggattcctatgacgcacggagattggcaatgaactcagggtatcctccccagcaacaaatccctcaagcttacggttattatcagatacccggtaagtcagcttgttctgagccgtcgcaggccgaaaggtatacgctgcaccagcaggcctacacttgcgcaaacagtgccactgtgactgatgttgctctggacatgagagca

SEQ ID NO: 411025 - DNA, 509 bp, Oryza sativa
tttctctcctccctcgccggcctcgtcgccggtcgccgaatcaccaccgacacctgcctccatcgccgccggcgagagttgggtggcggagcgagcgctgccgccaggggacgctcaggggcggaggaggcagtcattgatcgcgggatgcgcaccttcggcggcaccagctccatcacctacggtgatgggaagaggctcgagtacgggctgacgcatgtcgtgaggcccatgggcgcgcacaaggccaccattgactggctccacggactcggtgacaacggagccagctgggctcaactactggaaacccttgcccttcccaatatacaatgggtgtgccccaccgcgcctacaaggtcagtggcagtttttggtgggttaccatcaactgcgtggtttgatgctgctgatctttcagatgacgctcctgatgatgttgagggtttgtatgcctcatgtgcacaagatgcctactcattattacctgagccagctgcgtcaaactt

SEQ ID NO: 411026 - DNA, 510 bp, Oryza sativa
tttgtcttaccatggtgtaaattttgtgattgcacatgatggatttactttatgtgaccttgtttcttacaacttaaagcacaatgatgctaatggagaaggtggctgtgatggatgcaatgacaactttagctggaactgtggtgttgaaggagaaacaaatgatctgaatgtgttaagtctgcgttcaagacaaatgaaaaacttccatgtagctttaatgatttctcagggcaccccaatgatgttgatgggcgatgaatatggtcatacacgttatgggaacaacaatagctatggacatgatacttgcattaataatttccaatgggaacagttggaacaaagaagagatggccatttcaggtttttctcagagatgataaagtttcgtcacagcaacccaatattaagacgagacaggtttcttaataaaaacgatgtcacctggcacgaggattgttgggagaaccaggaaagcaaatttttggcattcacagtacatgatca

SEQ ID NO: 411027 - DNA, 486 bp, Oryza sativa
tgcagagaaaggcgtcttcgtactcgcctctctccgcgcctccgcgcttttcctcctcctctcccctctctcccttctccgccgccgtcgcagcatcaacccaatccgccgccatgagggagtgcatctcgatccacatcggccaggccggcatccaggtcggcaactcgtgctgtaagctctactgcctcgagcatggcatccaggctgatggtcagatgcccagtgacaggactgttggcggaggtgatgatgctttcaacaccttcttcagtgagactggtgctgggaagcatgttccccgtgctgtatttgttgatcttgagcctactgtgattgatgaggtgaggactggttgctaccgccagctcttccaccctgagcagctcatcaatggcaaggaggatgcagctaacaactttgcccgtggccactacaccattggcaaggagaatgttgatctgtgccttgaccgcatcaggaagc

SEQ ID NO: 411028 - DNA, 503 bp, Oryza sativa
tgatctcaagacgtcgctcgagaagctgggggggttcgagatgaccaacttccacacggccgtggacaacctccgcacctggttcagcgccgccctcacctaccagggcacctgcctcgacggctttctcaacaccaccaccgacgccggcgacaagatgaaaagcgccctcaacagctcgcatgagcttaccaaggacatcctcgccgtcgtcgaccagttgtccgccacgcttggcaggctcaacatcgggcgccgccgactgctcgccgacgacggcatgccggtgtggatgtcggagggcgggaggctgcagttgttggaggctgacgggcccgaggccgggcccgaggagttcaagccggacgtgacggtggctgcggacgggagcggcgacccgaagaccaacggctaggcggtggccaaagtgccccccgaaaacatggagcggtacaccatctacctgaaggtcgggacctacaaagagttcgttgtcggggggc

SEQ ID NO: 411029 - DNA, 514 bp, Oryza sativa
tatctgcactggtctccagggcttccttgtgttcaacgctgttggaggaggaacgggctccggtctcggttcccttctccttgagcgtctctctgtggactatggcaagaagtccaagctcgggttcaccgtgtacccgtcccctcaggtctccacctctgtggttgagccatacaacactctcctctccacccactccctccttgagcacaccgatgtcgctgtcctgctcgacaatgaggccatctatgacatctgccgccgctccctcgacattgagcgcccaacctacaccaacctcaacaggcttgtgtcccaggtcatcttcttactgactgcctccctgaggttcgatggtgctctgaatgtggatgtcaacgagttccagaccaacctggtgccctacccgaggatccactttatgctttcctcctacgccccggtgaactcggccgagaaggcctaccacgagcagctctccgtggcggagatcaccaacagcgccttcgagccc

SEQ ID NO: 411030 - DNA, 511 bp, Oryza sativa
tgttcttctcgtcctccccctcccaggggatcgccggagaggaatcgcgcggaggaaaaaaaaagaaaagggcttccccgtcgtctaagttaaaaggaagccatggagcacaaggagactggatgccagcagccagaaggcccgatcctttgcatcaataactgcggcttctttggcagtgcggctaccatgaacatgtgctcaaagtgccacaaggagatgataatgaagcaggagcaggccaagctggcagcctcctctatcgacagcattgtcaatggtggtgattccgggaaggaaccaattattgctggtcacgctgaagtagctgttgctcaagtcgaggtgaagacgcttgttgcgcagcctgctgagattgctggtcctagtgagggggtcacggtgaaccccaaggggagggaaggaccaaatcggtgctccacttgtcggaagagggttggtcttaccggattcaactgccgatgtggcaacttgtactgcgcaacgcacc

SEQ ID NO: 411031 - DNA, 525 bp, Oryza sativa
atctcacttcactctctttctcttctcttcacttcaccaccgccacctctctcatcggatccctgcagaggaggagagggcagtggcggcgaaaggcgacatgggctcgctgtcctctctcgccgccgcggcggtgtttctctccctcctcgccgtcggccactgcgccgccgccgacttcaacgccaccgacgccgacgccgacttcgccggcaacggcgtggacttcaactccagcgacgccgccgtctactggggcccctggaccaaggccagggccacctggtacggccagcccaacggcgccggccccgacgacaacggcggcgcgtgcgggttcaagcacaccaaccagtacccgttcatgtcgatgacctcctgcggcaaccagccattgttcaaggacggcaagggatgcggctcttgctacaagatcagatgcaccaaggaccagtcgtgctccggcaggtcggagacggtgatcatcaccgacatgaactactacccggtggctccgttccactt

SEQ ID NO: 411032 - DNA, 520 bp, Oryza sativa
gtatttggcccaagagttgggctaactcttcaagaaagcgtaaggataggattgctgctttctcaaggaggagaatttggttttgtggtgttttcgttggcaaacaggcttggtgtcctaccacttgagttgaataaactgctcatcattgttgttgtactgtctatggcgctaactccattactcaatgaaattggaagaagggcagcagggatcatcgatgagaaatcagaaacaaaagaaaaaccagctgagatggtgaattatgatgccactgaacctattgtgattcttggttttggagaaatgggaaaggtccttgcaaagtttttgtctgcaccattatcttttgggcttgacaaagatgcggaaggttggccatatgttgcatttgatctaaatcctgctgtcgtaaagtcagctagaaaatcaggctttccagtgctatatggagatggttcacgccctcttgttctgcaatctgccggcgtatcttcttcgaaagcttgcatggtcatgt

SEQ ID NO: 411033 - DNA, 457 bp, Oryza sativa
tctttcacagcgagtgcaagcatgatagcggtgaagcgggtgaactgcttccaccgggaagggtacggcgccggcgactgcggcgcgtctgggagcacgtacatggtggtgttcggcgtcttccaactcctcctctcccagctcccctccctccacaacatcgtctggctctccgtcgtcgccgtcgccacctccttcggctactccttcatcagcctcggcctctgcgccgccaagtgggcctcccacggcggcgccgtccgcggcaccctcgccggtgccgaccttcgacttcccccgcgacaaggccttcaacgtcctccttgccctcggcaacatcgccttctcctacaccttcgccgacgtcctcatcgagatccaggacacgctccgcttgccgccggcggtgaacaagaccatgaagagggccttcttctacggcctttccatgaccacc

SEQ ID NO: 411034 - DNA, 513 bp, Oryza sativa
tcgatgagttcttctctggcatgccatggcttgctcttcctttgggagacgaaaggaagcaacaattgagtaagatcttcaaaatcactgggatcccttcgcttgtcgccattggtcctgatgggaagacagtgaccaaagatgcgaagaccccactggtggcccatggcgccgacgcttttccattcaccgaggagaagcttcaggagctggagaaggagaaggagaagaagatcaatgacatggcaaaggggtggcctgagaagctaaagcatgatctgcacgatcatgagcttgtgctgactcgctgcaccacgtatggctgcgatggatgcgacgagatgggcgactcatggtcctacaggtgcaaggaatgtgacttcgatctgcatcccaagtgcgcgctggaggagaagggcgatgtggagatgggagaggagaatgctgaggctgcccccgctgggtatgtgtgcgagggagacgtctgcagaaaggtctaaaggagtttgtttg

SEQ ID NO: 411035 - DNA, 507 bp, Oryza sativa
gtcgtcttcgtactcgcctctctccgcgccctcctccgccgccgctcgccgccgttcgtctccgccgccaccgccgccgccatgagggagtgcatctcgatccacatcgggcaggccggtatccaggtcgggaacgcgtgctgggagctctattgcctcgagcatggcatccagcctgatggacagatgcccggtgacaagaccgttgggggaggtgatgatgcttttaacaccttcttcagtgagactggtgctgggaagcatgtcccccgtgctgtcttcgtcgatcttgagcctaccgtgattgatgaggtgaggactggtgactaccgccagctcttccaccctgagcagctcatcagtggcaaggaggatgcagccaacaactttgcccgtggtcactacaccattggcaaggagattgttgatctgtgccttgaccgcatcaggaagcttgccgacaactgcactggtctccagggctttcttgtgtcaacgctgttggag

SEQ ID NO: 411036 - DNA, 467 bp, Oryza sativa
cgtaactgccgggaccgaccacgcctttgttcccttctactcgcctgtgttgtggtggcggctatggtgtccgccgtctcctgcgggccacccaaggtgccaccgggccccaacatcacgacaagctacggcgacaagtggctggaagccaaggccacctggtatggtgcgcccaagggtgctggccccaatgacaacggcttctcctgcgggtacaaggatgtcgacaaggctcccttcctcggcatgaactcctgcggcaacgaccccatcttcaaggacggcaagggctgcggctcatgcttcgagatcaagtgctccaagccggaggcctgctccgacaagcccgcccttatccacgttaccgacatgaacgacgagcccatcgctgcctaccactttgacctctccggccttgccttcggcgccatggctaaggatggcaaggacgaatagctccgtaaggc

SEQ ID NO: 411037 - DNA, 496 bp, Oryza sativa
tttattagtacatggccaatggcagcctcgagaaccacctcttccgacgttcatgcaacctctcatggacgacccggatgaagatcgccttggacgtggcgaggggcctcgccttcctccacggaggcgaccggccgatcatctaccgcgacttcaagacctccaacattttgcttgacacagatatgaaggcgaagctgtcggatttcgggctggcgaaggaggggccgcggggagggaagacgcacgtgtcgacgagggtgatggggacgtacggctacgcggcgccggagtacgtcgccacgggccacctcaccgcgatgagcgacgtctacggcttcggcgtcgtcctgctcgagatgctcgtaggccgccgcgcgctcgagccgccggccgccggctgcagcaagtgcaacctcgtcgactgggcccgccccatcctcatccggcccaagaagctggagaggatcgtcgaccgccggatggcgctgccggc

SEQ ID NO: 411038 - DNA, 521 bp, Oryza sativa
ttctttctcaggcagaaacagctattaaaaaactatatggaagagaaaaagttgctgaagttatgtatgacctaaaagctgccagccaaggttcttctgagccagatgctggctggttggatcttttcagcaaacgctattggaaagttgttagtgtgggcgcagctatgttcttgttccaacagcttgccggtataaatgctgttgtatattactctacatcggtgttccgcagtgcaggcattgcatctgatgttgcagcgagtgcccttgttggagcagccaatgtttttggtacaatgattgcatcttctctgatggacaagcaaggaaggaagagccttctgataacaagcttttctggcatggctgcctcaatgttacttctatcattgtccttcacgtggaaggctttggcaccttattcaggccctcttgctgttgctggcactgttttgtatgtgctggcttttgctcttggagctggcccagttccagcattgctccttcctgaaatattt

SEQ ID NO: 411039 - DNA, 445 bp, Oryza sativa
tcgtttttccactacgcactagtagtagcactctggtattctcccatggcgactgcaaccgaggaggttgccgctgcggctgctgccgccggcgaggcgccgccgccgccgccgccagcggtggtagaggaggtgaaggaggcggtggaggcacccaatccggaggaggcgcctaatgctgatgagggggaggagaagaaggcggagggtgagaaggagaaggagaaggcgaagaaggagaggaaaccgagggcgaggaagccccgatcggcggggccacaccacccgccctacttcgagatgatcaaggaggcgatcatggcgctggacgggaacggcaaggcgggatcgagcccgtacgcgatcgccaagtacatgggggagcagcacatggtggttttcccggcgaactaccggaaggtgcttgccgtgcaactgcggaact

SEQ ID NO: 411040 - DNA, 522 bp, Oryza sativa
tcgttcgggcgaaacgccaaacgaaacgaggcgctgccctgccaccttcgcctcacgaacgccagcctcgctgtttcccctccctctcgcaccgctcgttcccgtttgccttctttctctcctcccccccgttcagcttcccgttcaggttcaggcaatcacgcctcctctcctctcctctcctctccttcttcactccactccaacgccccacgccctcccccgctttataagggggagctccacatcaccacccttcccacaccatcgcggcagccaccgcatctttcctcctctttccctggagccatttcctcccctaaagggcccttccttttcttgatctctcttctatcttcgatccatccatccatccggccatccttcctaggtgaatttcaacgatgcagttcagcagtgtgtttcccttagagggtaaagcatgcgtgagcccaataaggagaggtggtgagggctcagctagtggtagattgaagatcggggacagtagcagcatcaagc

SEQ ID NO: 411041 - DNA, 506 bp, Oryza sativa
tcgtttcatcctccccaaccactgcatccgggtcggcgtcctcctcctcctcctcctcctcgcagaatgcaacgggcaattcaagctatcgggtcacatggcagtctcctcaagtctgctgttctgcgacacatcagtgctccaaaaccatctattttacctgctgtatattcacgctccatgtcagtttcatctgctcaaatagaggagagtggatttgagactgccactgtggcagatattttgaagtctaaggggaagagtgctgatggatcttggctctggtgcactactgatgactctgtctatgatgctgtcaaatctatgacgcaacacaatgttggagctctggtggttgttaaacctggacaggataaatcaattgctggtattgttactgagagagattacctcaggaaaatcatagtgcagggacgatcttccaagtcaactaaagttggagacatcatgactgaagagaaccagctgatcacggtgaagcctga

SEQ ID NO: 411042 - DNA, 481 bp, Oryza sativa
tcgttcttgatgagggaattgcagtcaaggcttctgaccttgacattgcctcaatctttggcatgggattcccaccgtataggggaggaatcatgttctgggcagattccattggtgcaaagtacatccatgacaagttggaggtgtgggcgaagcggtatagcgacatcttcaagccttgttcctaccttgcagaaagagcagcaaatggggttcctctgagtgcaccagctaagcaagtcaaggcccgactatagatgaacatcctgctttcctatcaactgcggaaactatgcagaataatagaacacacgccaatggggcatttatggtctgtagaatagcccatccaataataattagaataggattcttgaagagttatgtgtaatctgtatgacgcctccaaagtcttgaaccattactgcgacagtgttttgagttcagacattctttaaaatgtttcatgtgccaatggttt

SEQ ID NO: 411043 - DNA, 507 bp, Oryza sativa
tcacttctcaccaagtcaaagtttcttcctcgcgaccggcggcgagcggcggcggcggcgatgtctgggagaggcaagggcggcaaggggctcgggaagggcggcgcgaagaggcacaggaaggtgctgcgcgacaacatccaggggatcacgaagccggcgatccggaggctggcgaggaggggcggcgtgaagcgcatctccgggctgatctacgaggagacccgcggcgtgctcaagatcttcctcgagaacgtcatccgcgacgccgtcacctacacggagcacgcccgccgcaagaccgtcaccgccatggacgtcgtctacgcgctcaagcgccagggccgcaccctctacggattcggcggctaggcgaggcgatgcgaggccacgcgattggatagggattcgattagtgccatgttcttcagttcgtcgtagtagcctagcctcttctcctgtagctgttgtttcatctcgtctcctgttccttcattaattagggat

SEQ ID NO: 411044 - DNA, 513 bp, Oryza sativa
tgtttttggaccttgtaagtatgatgcaatgatgcattcaacagtagttttgtacattgaaatttctatgactgtaattctgtatcgccattgtaatttgatgttgagctcttatggttgccgacaattttgtgaaccgtttctttcaacagctggagcaaaagcaaattgcaggtcattgttggaacagtatgcatccaccccccccccctcgtctatgcccccctctcctctctctctctctctctctctctctctctctctctaacattcaagttttgtattaatttatgtaggtggcgtttggaatgggaatcaacaagccagatgtcaggtttgtgattcaccacagccttagtaaatctatggaaacatactaccaggaaagtggaagggcagggagagatggactaccttcagaatgtattctgtattatcgacctggtgatgttccacgccaaagttcaatggtcttctatgaaaactgtggcctgcaaaatctttatgacataa

SEQ ID NO: 411045 - DNA, 459 bp, Oryza sativa
tttgtattagcaaacatgcacatatacaaagagcaggtggctgaaccatccactggcctgatgatgccagagccagcacctgttgcttcccccggctccggacgctcaggtggctcaggctcggtgggagctgagaagattgagagcaggggaaagattgagatcaagcgcatctagaacacgacaaaccgtcaagtgaccttctgcaagcgccgcagcgggctactcaagaaggcgtatgagctctccgtgctctgcgatgccgaggtcgccctcgtcgtcttttccagccgtggccgcctctacgagtactccaacaacagcgtgaaggaaactattgagaggtacaagaaagccaacagtgacacctccaacgccagtacagttgcagagatcaatgcccagcactaccagcaggaagctgctaagctgtaagcacagatcacccacctgagaact

SEQ ID NO: 411046 - DNA, 500 bp, Oryza sativa
tctttcaaatcgaatagatagaaatagtaaatttgaatggagacacctattctatgatggattttaacttaccctctattttcgtgcctttagtaggcttagtatttccggcaattgcaatggcttctttatttctttatgtgcagaaaaataagattgtctagaaccgacgggaccgaattttctcaatgtatttccacacaggatcataatacggatcttttgtagtgtaagtaatataatatggtatgttatgtggctctttctacacacaaatgcaaacccgctatggatggggattatggatgcggatataggctacgagcataaatgcatgcatatgcggaaccgggtatagcgagtttttttaagtggatcaacaaatactttttgaatagaaagtcaatgtatctaaccaattattttacaggagtatctagttggcgaaggcgatttcagaatcaaaaaaagtaaagtcaaaatcatttaacttattctct

SEQ ID NO: 411047 - DNA, 495 bp, Oryza sativa
  unsure (1)..(495): unsure at all n locations
ttgctcacgttgccaccacaggctacgcaaaattctctcccttcctcctccaccacctccactccgacgatcctcctcctgatcctgtgccggccggcgatggcgtaccggttgctggagctcacgctggtctccgcgagcgacctcaagaaggtcactctcttctcgcgcatgcatgtctacgccgtcgcctccatctccgggagcaacgtccccatgcccatgcacggcacccacgccgaccgcaacggcggcagcaaccccgcgtggaacaccgtgctccacttccccgtccccgcccgcttcgacacccgcggcctcgccctccacgtccagctccgcgcccggcgctccttcggcggccaccgcgacgtcggggacgtgttcgtgcccctcgacgacctcctcgccggcgcgcacgacggcggcgagccgaggccggctagctaccaggtgcgccgccccatgtncgcccgcgcgcacggnacgctctac

SEQ ID NO: 411048 - DNA, 517 bp, Oryza sativa
tcgtttccgccgtcgcttctcctcggggcgcagccatggtggccgcaaagaagacgaagaagtccacggacaacatcaacaacaagctgcagctcgtgatgaagagcggcaagtacacgctcggctacaagaccgtcctcaggaccctcaggaactccaaggcgaagctagtgatcatttctaacaactgcccacctcttcggaagtcagaaattgagtactacgctatgttggccaaggtcaccgtccaccatttccacggaaataatgtcgatctggggacagcctgtggtaaatacttccgtgtttgctgcctcagcattattgatcctggtgactcggatatcatcaagaccacgggtgagcagtaaggatgagcggttccgctggcgcttcagatgctgtcacactgagctgttctagacattgtagttgttgctggacttgatttggtctctttcgtgtatcgaacagcttttaccagtcaaaccaagtttcgggggacattgttctttgg

SEQ ID NO: 411049 - DNA, 521 bp, Oryza sativa
tcgttcctcaaaaaatacgatggaaggtttaaagatatatttcaggagaactatgaaacaaaatggagagccaagtttgatgatgcaggaatatggtacgaacatcggctgattgatgatatggtggcctatgcccttaagagtgaaggtggctatgtttgggcttgcaagaactatgatggagatgtgcagagcgatctaattgctcaaggttttggatcgctaggtctaatgacatcagttctggcgtgccctgatggtagaaccattgaagctgaagctgctcatggtacagtcacacgccattacagagttcaccaaaaaggaggcgaaactagtacaaatagcattgcttcaatatttgcttggacaaccggactaggacatagggcaaagctcgatgacaataaaagactgttagattttgtacaaaaacttgaagctgcttgtgtgggaatagtggaatctggaaagatgacaaaggatctagctcttctgtacatgggccaaatgttagccga

SEQ ID NO: 411050 - DNA, 507 bp, Oryza sativa
attcttgaagaaggagaagaaggagaggagcagccatggcgtcgtcggtggcagcggcggcgagcacgttcctggggacgaggctggcggacccggcgccgcagagcgggaggatcgtggcgaggttcgggttcggcggcgggaagaaggcggcggcgaataatgcggcgaggccgtcggcgccgacgacggacaggccgctgtggttccccggcgcggtggcgccggactacctggacgggtcgctcgtcggcgactacggcttcgacccgttcggcctcgggaagccggcggagtacctgcagttcgagctggactcgctggaccagaacctggccaagaacaacgccggcgagatcatcggcacccggttcgagaccggcgaggtgaagtccaccccgttccagccctacaccgaggtgttcggcctccagcgcttccgcgagtgcgagctcatccacggccgctgggccatgctcgccaccctcggcgccctctccgtcgagt

SEQ ID NO: 411051 - DNA, 492 bp, Oryza sativa
ttttgtgagaattcttaattcatgagttgtagggagggacgtatgtcaccacaaacagaaactaaagcaagtgttggatttaaagctggtgttaaggattataaattgacttactacaccccggagtacgaaaccaaggacactgatatcttggcagcattccgagtaactcctcagccgggggttccgcccgaagaagcaggggctgcagtagctgccgaatcttctactggtacatggacaactgtttggactgatggacttaccagtcttgatcgttacaaaggccgatgctatcacatcgagcccgttgttggggaggataatcaatatatcgcttatgtagcttatccattagacctatttgaagagggttctgttactaacatgtttacttccattgtgggtaacgtatttggtttcaaagccctacgcgctctacgtctggaggatctgcgaattccccctacttattcaaaaactttccaaggt

SEQ ID NO: 411052 - DNA, 512 bp, Oryza sativa
ttcagagactcgtgctatccagaggagcactacttcccgacattgctggatatgcaagaccccgaaggctgcaccgggtatactctgacaagggtgaactggacggatcaagtcgagggccaccctcacacataccggcctggggaggtgtctgcaagcctgatcaaggagctgaggaaatcaaatgggacatactcgtacatgttcgcccgcaagtttgctcccgagtgccttgagccactgatggagattgcagactctgtcatcctacgtgactaatccagcaacaacaccacatttcagggtgtcggaatttgtacactgaggtgaatgagggttgtgatgtgatgaacaagcacagagtgtccatctatgcccttgaactactacgtgaggaacaacatatcccctctgttttgttattcagagattttccagcaattgaatgcgctgctgggaggtgaggatggtatgactacaaattgtccctacgtgagtatcctgtatgaatg

SEQ ID NO: 411053 - DNA, 520 bp, Oryza sativa
ttaactttatcatgcctatggttcagcaaggacaacagccgcagcgtccggctggtaggcgtgctggtgctggtggaatgcagcaacccatgccaatgggtcagcaacagatgatggctaggggcggccgtggctatcggtatcctacaggacgtggcatgcctgatcctgcaatgcatggtgttgggggtggtgtgatgccatctccatatgagatgggaggcatgcccatgagagatgctgctgcgtcacagcctgtacctattggagcattggctactgcactggccaacgcagcccctgatcagcaaagaatgatgcttggtgagaacttgtatcctcttgttgatcagctggagcatgagcaggctgcgaaggtgactggcatgctgctggagatggaccagactgaggtgctgcacctgctcgagtctccagaggctctcaaggccaaggttgcttgagccaatgaggtccttcgcacggccccgcagatccagacgaacgcgacgcctgaaca

SEQ ID NO: 411054 - DNA, 495 bp, Oryza sativa
  unsure (1)..(495): unsure at all n locations
tttaaatccaatgcatctcgtgcttctgccactcgtagaaagttctacttcttgcagaaatctctgcttgtctcttctttgcttgcggttgttgcagcagatgttgttggagcagggccaaaccagcagtgttttccttcctcctgtggtgatcttggcaacatatcctaccctttccgtcttgcaagcgattcacgcccgtgcgttggtactcttcgcccatggtacaacctctcatgtagcagtggcagggctaccattcagatcaacacacggacgtactatgtcaccagcatcaactatactggtgagatcttctcggntgtggatgccaccttgcaggatgatgatacaaacggcaccagctgccctcttcctcgctctgatcaccttccttacatcgattactggcctccctatttgggggaaagttcaaccgattcttatggttttgtctatttggccactgcttcagacacttgggcatgctttgtg

SEQ ID NO: 411055 - DNA, 488 bp, Oryza sativa
gttgtttgtgtagttgtacttggcaaagttgggaggaatgttgcagctggaatgacgggtggccttgcctatattctagatgaggatgatacactcgtcccaaaggttaacaaggagattgtgaagatgcagagagtgaatgctccagccgggcagatgcagctgaagggcttgattgaggcttacgttgaaaaaacaggcagcgagaaaggtgccacaattttgagagaatgggaggcatatctgccactcttctggcaactggtaccaccaagtgaagaagactcacctgaagcttgtgccgagtttgaaagagtacttgccaagcaagcaacaacagtacaatcggcgaagtgatcaactgcaattcccaagtgatcagattagacaacaggatggtgttctttggtactttccaggtgattttttcctgggaccgcatcaaggaaaacaaaataacaactggcatacttgtgaagcaccgaagt

SEQ ID NO: 411056 - DNA, 475 bp, Oryza sativa
ttgatccctcttccagtcaagaaaaaaggaagattacaccaacaaacaaactagctagccaatggcctctttgtcctctttccggctcgccgtggcggtggcggcactgttggttgttggctcctgtgccactgagctcaccttcaaggtcgctgagggctctagcgccaaaagtctagagcttgtcactaatgttgccatctctgaggtggaggtcaaggagaagggcggcaaggactgggtggcgctcaaggagtcgtcgtctaacacctggacgctcaaaagtgagtcgccgctcaagggccccttctctgtccgcttccttgtcaagaatggcggctatcgtgtcgtcgacgatgtcatccctgaaagctttacagctggctctgagtacaagagtggaatccaactctaagtaacagacatgtgtactcttgttgggtcacatgcgaaatatgaacatctaaataatcct

SEQ ID NO: 411057 - DNA, 484 bp, Oryza sativa
ctggacatactctactactactaggcagcgagctagctaactaactacgtggctatggcccccaccgtgatggcctcctcggccacctccgtggctccattccaagggctcaagtccaccgccggcctccccgtcagccgccgctccaccaactcgggcttcgacaacgtcagcaatggcggaaggatcaagtgcatgcaggtgtggccaattgagggcatcaagaagttcgagaccctatcgtacctgccaccactcaccgtggaggatcttttgaagcagatcgagtacctgcttcgatccaagagggagccttgtctcgagttcagcaaggttgggttcgtctaccgtgagaaccacaggtctcccggatactacgatggcaggtattggaccatgtggaagctgcccatgttcggttgcaccgatgccacccaggtgctcaaggagctcgaggaggccaagaaggcctaccccgatgcct

SEQ ID NO: 411058 - DNA, 458 bp, Oryza sativa
tcggttgagagctccagattggaatctcgagagagggaggaagggggaaatggcggactgggggccggtggtggtggcgacggtgctgttcgtgctgctgacgccggggctgctgtgcacggtgcccgggagggggcgggtggcggagttcgggagcttccacaccagcggcctcgccatcatcgtccacgccgtcctctacttcgcactcctcaccatcttcctcatcgccatcggcgtccacatctacgccggctagctatgtactactcctttcactgattgattttggtggattggttggttgtctggtgaattggggatctcgcgtgtgtgtttgctgtactagatgtcatactgtcatgtcaggtcgcttgtgttgtactagtacggcagaatcaaagggtgtgtagtaattctcttttgttcatctgattagtactagtactactaatttt

SEQ ID NO: 411059 - DNA, 431 bp, Oryza sativa
tcgtttctaatagaatactatggacgggtcggagggatatcttacgacaactatgaaacaacatggaaagccacgtttgatgatgcacgattatggcccgaacatcgtatgatggatgatatggtggcctatgccctcaagagtgaaggtggatgtgattgggctactatgaactatcacgaagatttgccacgtgacctaatggactcaaggcttttgatcgatcggactaacagacactatttctgcagagccctgatcggcagaaccattgaagctgaagctgatcatgggacagacacacgccattatagagaacacctgccacgaagcaaatcttgagcctatagcattgctggagtgaatgctcggacagccggactcgtacatctggctaaggtcgatgacaattaatgactgttcgatcttgt

SEQ ID NO: 411060 - DNA, 507 bp, Oryza sativa
gtgaacggcacggccgtcggctctggccttgcatcgaccgtgctctttgaggccaacgtccttgccatcctcgccgaggtcctgtccgccgtgttctgtgaggtcatgaccggcaagccggagtacaccgaccacctgacacacaagctgaagcaccaccctggacagatcgaggctgccgccatcatggagcacatcttggaaggcagctcgtacatgaagctggcgaagaagctcggcgagctcgacccgttgatgaagccgaagcaggacaggtacgcgctccgcacgtcgccgcagtggctcggcccacagatcgaggtcatccgcttcgccaccaagtcgatcgagcgcgagatcaactccgtcaacgacaacccgctgatcgatgtctcccgtggcaaggcgcttcacggtggcaacttccagggcacgcccatcggcgtgtccatggacaacacccgcctcgccctcgctgccatcggcaagctcatgttcgcgcagttc

SEQ ID NO: 411061 - DNA, 478 bp, Oryza sativa
agtaccgatcataatatcataaactcattagattctaacatacaattaattgatagtcaaagtgttgaagtttggctaaatcttggcctaaacattaaacattttatgacatggggaaggacttaatttatgcaaggtcaaaatctaattaatgacctatattaagaagggtatatggttataaaaaggaaaaatggggtgcatgggccagcacatacatgcatcattccacacttgccactacatgggatagatggtaaaagcggggcttggtgaaaaaccaccttttttttgcgggtttgaaaacgaccttaggggcccccttgggcggactggcagggggcaacctttttgaccctggtggcgagcgcatcgggccccgcggcgaccttcttgaggtcgacgtaaagggtgtagcgggtgggcatgaggtgggtgaagttgacaagcttgaggaagcacttgacgcgcgactttt

SEQ ID NO: 411062 - DNA, 432 bp, Oryza sativa
gaagttaaaacccacactttataggtgaacaatgaattttccatatcaccagttcacagttcttgtcccgatgcgagcccttcagggcagcttatatcccaatgttgaattaacaaagctattctaaatttagagattgtctacttagtactatcctatttgaacattgttgcaacattgttacattctatttgccatcacgatgacctggagcttcacaataaaatggttactcaattattgttcatctccagccgagagcctaaaagaagcttcagcccttacttcttctagcttgcccaaaagttccttcatgaactcggatttagtcccatgcgttatgcgaagtatatctgctgccctggttaaagacatcagagcattctttgtgtactcaagcaacccatgaagctttccgaagtatagaactgt

SEQ ID NO: 411063 - DNA, 443 bp, Oryza sativa
cgttctttttttttgttttctctcacattttgctacactagcacggttaccgcacggtaaccgtggtaaccgtgacaaaccgcgacaaaccgtacaaaatttatcaaaaattcaaattatttttcaaatttatttgaatttgacgcggttaccgcggtttaccccttaccgtacccccgcggtaagcgcggtaaccgcgcggtttaccgcggtaaatgcaaccgtggttacaccatgagaacttcaatatacaacatacaaaaataccacacttggcatgatttcagaaaccctaaatcaaaaaaatccccaaaattagaaccttggcaaatccctaagcgaatcggattgatgacttgccgatttggcaaatcgccgccattaagtgatgtgatcacggcattcggaccgccctgcacgcacccttaccattgccatggact

SEQ ID NO: 411064 - DNA, 502 bp, Oryza sativa
acaacgagatagcccaagctagtaatatgcaggttgcagagcaccaacaaaatcttcgtgttcagagctcacgacagcatcaccatttttacaaagaaaatggagaccaaatcaaacagcaaattttatccagaacgatacgcgtcgtctaaaatcttacaaaaatgaataaacggacacgagagacgacacctccaaaaaaccagaaattgcgtctgtcaggtgtactttttttttcctttttgtacttttgcagtcttcagttcgatgttgctgctccctgccgtgggctggtttccacctgtaggctgttttcacgatggtacagagacttcgcaccctggaatattgtcccaagctttttcaatgctcttgctcgtaacttcagaacatcttttgggacactggcgtctttcaaaactgcttggcaaacatgtgtaagtgttgactcaatatcaaccacattaattttccataggtaactaagcatggcatctttttt

SEQ ID NO: 411065 - DNA, 549 bp, Oryza sativa
  unsure (1)..(549): unsure at all n locations
ctgttatgaaaagttcattacgacaattatgactaattggcagcattccaaaatattcctcaacgttgacactccatgccacacaatacaatcgaaatttctagaataggcaacatttccgagcatctcggagacaagaccaacatcaccactcgaatgacactgagggggaaatatacaggggaagaagcaaaaatgctatctttaggtagtcgtttgacgacagacagttaagtgtagtgcacctgttgtagcactcgcttactcccccttgtgctccttatctttcagagcatttcctgtgatttacgaacaatgcgtctaacctttttcttgaaatcgtccctcttttctctccaatccttagccgcttcaatatttgctggagactcatcatttggactagagagcatcgaaatgatgctcagaactatactttcaactgtatgcacaggtgtccaccgttcgctcgcaagctcataacccgtgggatcttngccaggtggatgaaggatagaaatgcatacgcgcccatcaggataaacattg

SEQ ID NO: 411066 - DNA, 533 bp, Oryza sativa
aaagaaaatccaaacacctccaagatttgcgttttgcgaacatagtaatagattcagtacacagagataacggttttgacaaagtatgagctagtagtattccgaatttccgataggccaaacaagcggacaaccagccaaaattttcactcagccaaaagccacaggctatataataatctgatctaacaaacaggcagaaggggggcaaagcttccttctctaggccttcctggctgcgatctgagactcaggctctttcttcactggttcttccttctctgacaggataagctcaatgtggcacggggaggacatgtaagggttgatgcgtccatgagcacggtaggtacggcgcctctgcttctgggcctggttaacttgaatgtgggacacataaagagtatcaacatccagacctttcacctcagcattgctctctgcattcttaagaagatccagaatgaatctagcagacttggcaggccagcgtccctgaccgtttgaatggcgtgacttagcttgagcagtgc

SEQ ID NO: 411067 - DNA, 550 bp, Oryza sativa
aaacataaaattgaacaaacgcgcatattataagtgacgaagcggtctcacataaaacagggcacacaggttacaacaacgagggttgtaagcccattaagccccaaacatcagatcaccacaagcaaatgtctcgaagacacacgcacacggcaacaggataactccacactggcagatcatgggatagcagcagttatcaatcaggccttgacacacagaacatcaagcccccagacgacgacgactcctctagtactcgtcaccatcatcgccatcctcattctcgtcggactcagcgccaacctcctcgtagtccttctccaacgcggcgagatcctcacgggcctcagagaactcaccctcctccatgccctcacccacgtaccagtggacgaaggcgcgcttggagtacatgaggtcgaacttgtggtcgatgcgggagaacacctccacgacgctggtggagttgagatcatgcacacggccctctgcaccttgggaggtcgccgctgggacgagctgggcggctgtagtgatgccgacttga

SEQ ID NO: 411068 - DNA, 274 bp, Oryza sativa
gtaagtaagtgtgtgtagtttttgttattaaaagagaaagataagacatgataaaagataagtagataaattatgaagggggtaagatttcccataaacggacatatatacgcacggcgatgaattagtatagtaaagtaattcagagctcgccggccggagaggtccatctgtcgagcatgtcgaggcactccttggggcggtactccggggcggtgtggccaccgcccttgacggtggcgaaggtgaggttgtggtcgtagaccgtggtgaa

SEQ ID NO: 411069 - DNA, 515 bp, Oryza sativa
aatatccacaaataccaatgtatcatccagcccaaacatattataagcaaaaccaggagacgattgttttattatactcatcacataggattcacatcccaaacattcaggcacgattcaaccggcacagagataaaaagaagccaggggaaacaaaacaactcctttagacctttctgcagacgtctccctcgcacacatacccagcgggggcagcctcagcattctcctctcccatctccacatcgcccttctcctccagcgcgcacttgggatgcagatcgaagtcacattccttgcacctgtaggaccatgagtcgcccatctcgtcgcatccatcgcagccatacgtggtgcagcgagtcagcacaagctcatgatcgtgcagatcatgctttagcttctcaggccacccctttgccatgtcattgatcttcttctccttctccttctccagctcctgaagcttctcctcggtgaatggaaaagcgtcggcgccatgggccaccagtggg

SEQ ID NO: 411070 - DNA, 434 bp, Oryza sativa
gctatataccgcgaacttggattttaaagatgccacaaataagggtcacataaacaacacaagccacagaagtgaaagctacaagcaaaccctgcataatcgaaaagcaaatgatgtggaaaaccagacacacaaactgatagatggaagcccacacggacagatcatgggattgcagcattaatcaagcattgccaaggcaccaggcaagaaccctgaacatctgtagaactcgggacactcattaccctcggaaccatcgtcgaactaggaggcgacctcctggaagtgcttctccagcgcggtgaggacctcaagtgcctcggagaactccgccttctgcatgcccgcgccgacgtaccaggggacgaaggcccgcttggaggacatgaggccgaactagatgtcgatgccgaagaacaccacgaccaccc

SEQ ID NO: 411071 - DNA, 375 bp, Oryza sativa
acgacaaaccacgaacttggatattaaagatgccacaaagaagggtcacataaacaacacaggtcacagcagcgaaagctacaagcaaaccctgcataatcgaaaagcaaatgtttttcaaaaccagacacacaaactggtagatagaagcccacacgggcagatcatagggtagcggcagtaataaagcattgcccagggaccacgcaagaacccctggacctttttaggactcgggaccctcataaccctggggaccataggggaaatcggagccgacctcctttgcagacgttttccagggcggggagggcctcgggggccttggagaaatcccccttctccatgcccttggcgacgtaccaatggaccaag

SEQ ID NO: 411072 - DNA, 451 bp, Oryza sativa
gaaaaaaaaaaaaagaatttgacccgtttgttgatcataagggaaagttgggggcgccaaaacattttattactacagctttttggggatttgctacaggagttttttcctcccttggaaaaagaaacccaaaccttttttacaacgcaacacacacaccggacacagagggtttgatcgatcgaagcaaacgagacgacgagggggaacttcttcttgggaggggacaacccctaggttttacagggatacagcgcgcggggggaacgggggggaaaacggcggaaaaaatcaggcgctggccttgggggcctttttggaaatggcggaccggatggatttgggcggttgaattggttttgggggggggggcttcctcgcctttttggcccggcttgggcgggcggggggaaccccttttttggcctccgccgaccacccgggttttttg

SEQ ID NO: 411073 - DNA, 416 bp, Oryza sativa
aaaaagaaaaagggggggactcataaaaaggggtgaaactcccaacatttgaaaaaaaaggtggaagggcaaaccccttcgaaaaagttaacggaaaccacaccttttcttttacccccattttggcaaaaaagcaggacttgggaaaacgactaaaaggattacacacgggcccagacacaagaccattaccactggtcattgcacacgatttttattttagcaacaaagggagaggggaaaaggccacgggggcaaacttttccaacttcacaaataacggggacaaccaatggagttccagcacaccggatttaccaggggacgattttccagggctggggggggcccttgcaccactttcaaagggcgaagggggggccctcggggacccccccggggtccttgtccccggg

SEQ ID NO: 411074 - DNA, 558 bp, Oryza sativa
acgacaaaccacgaacttggatattaaagatgccacaaagaaggttcacataaacaacacaggtcacagcagcgaaagctacaagcaaaccctgcataatcgaaaagcaaatgtttttcaaaaccagacacacaaactgatagatagaagcccacacggacagatcataggatagcagcagtaatcaagcattgccaaggcaccaggcaagaaccctgaacctctctagtactcgtcaccctcatcaccctcgtcaccatcgtcgaactcggagccgacctcctcgtagtccttctccagcgcggcgaggtcctcgcgggcctcggagaactccccctcctccatgccctcgccgacgtaccagtggacgaaggcgcgcttggagtacatgaggtcgaacttgatgtcgatgcgggagaacacctcgacgacgctggtggagttgggatcatgcacacggccctctgcaccttggccaggtctccccccgggacgacgctgggcggctggagttgatgccgcacttgaaccccgtggggcaccagtccacgaacttga

SEQ ID NO: 411075 - DNA, 378 bp, Oryza sativa
cgaccgccctcggaggaacccacattgccctccgccgccgccgatggggcggctagtagcgggacaacatctggcgctggtgctggaacgggaatcaactcgaactcggtgctggtggcgctgctggactcgcattacacggagctggcggagctggtggagaaggccctgctgctccagacgctggaggacgccgtcggcaagcacaacgtcaccatcttcgcgccgcggaacgaggcgctggagcgtgaccttgacccggagttcaagcgctttctgctcgagccgaggaacctcaagtcgctccagtcgctggtcctttttcacggtcttcccggccggcttcccttcgggtcctggtccgccggcttccacccc

SEQ ID NO: 411076 - DNA, 507 bp, Oryza sativa
  unsure (1)..(507): unsure at all n locations
accaacagatctgcacctgcttttttattccaagctatatactgtagtaaataaacagtcttgtttgtatggtacaaagcacaaacaccacttgtggtgggtacctttaggatagttctacttgctcttttggcatagaagaactaagctacacggccatgatttaatcatcaaagtagttataagtagaagtctgacgaataaaagttcaaacttcttatttcgagcaaaatatcctcctccacctccattgttgtatggagtatgcatacaatctttaccagattttatcagagcaccgtggttgatagctgcgcataccaatgcttcaatcgctcttattcaaagtaaaaatgtataaactttgtatcatgggatcctaacatgtcccctgccgttgccctattcattccttcataacttggatgttactgacaatcttgttcttaaatnctaagnaacagcatcgatgaactcaacagcctaagatacttatctcggctacat

SEQ ID NO: 411077 - DNA, 433 bp, Oryza sativa
ggggaaaaagggatgaaggatacaattttttaccagatttggggttatttacacatgaaatggaccaacgacccttcaaaaagggggtggtggtacttaactggggggaggttattaggtatttaggacaaaaattttaacgagggaaaaactgtttggactaaaaaattttttttgaaaatccggtttcctgggaattttccttgagttttttgccatggggaaaaaaagagcttggatgtcctaaccccttaaaaaaagaaccactggactggatttggaggttcagggtttaaaaatttgggggataagggaggttttctatttgaacttcccgtccttgatgggggggtttttaaggaacaccaagattcccgaccttatgtagaaccctttctaaaggcgataacttttttggaaaaccttgttgttt

SEQ ID NO: 411078 - DNA, 449 bp, Oryza sativa
gtcaccaactagaacaatgcaggttgcaaaacgttcacatagcacggcaagagattgcaactgaatttagagggtaaatcactgcagatttcctattccattcgaacgaacgaaccagtagttcatacatccctaattaatgaaggaacaggagacgagatgaaacaacagctacaggagaagaggctaggctactacgacgaactgaagaacatggcactaatcgaatccctatccaatcgcgtggcctcgcatcgcctcgcctagccgccgaatccgtagagggtgcggccctggcgcttgagcgcgtagacgacgtccatggcggtgacggtcttgcggcgggcgtgctccgtgtaggtgacggcgtcccggatgacgttctcgaggaagatcttgagcacgccgcggttctcctcgtagatcagccccgagatgcgctttacgcc

SEQ ID NO: 411079 - DNA, 430 bp, Oryza sativa
agcaatccatatgataacttataaagcaaaataaaagatccgagcaaacaaaatacccaatccacgcgcattgcctaaatgcctagttcaactaccaataaaactaaaactccaataaaccaagtaaccaagtcgttttcaattctagatagataagataactgagatatggatcaaaaattgctgtcgccgttatgcttaggaggaaacgacgccgttattcagcgacagagaagcaagctgctgttcaggcgtcgcgttcgtctggatctgctgggccgtgcgaaggacctccatggctttagcaaccttggccttgagagcctttggagactcgagcaggtgcagcacctcagtctggtccatctccagcagcatgccagtcaccttcgcagcctgcttatgctccagctgatcaacaagaggatac

SEQ ID NO: 411080 - DNA, 379 bp, Oryza sativa
accatcagacctgctcttgcttttttatcccaagctatttgctgtacataataaacccacttgtttgtattgcgcaaagcacaaaccccactggtggtgggtacctttgggatcgttgtacttgctcttttggtgtaaactaactaatattcacggacatcagaaaataataaacgatggtatagagttgaagcctcgctacttaaaatgcaaacttcttaatttgagcacaaaatgcttctacacatgcattgcctggagcagtatgcctacgatctggaccacggttttttaagactccgcagtttatagctcgaggtaccaatggtataattgctcttaattaaaggcaaaaacgttaaactttggatgatgggag

SEQ ID NO: 411081 - DNA, 509 bp, Oryza sativa
aaaataaaaatatatagcatattatatattgatatatcatcaacatagcccaaaacaaagctgcatactattattataggcagcaatccaccagcgcgatgcttgatcttagcttagttgccaccagactcctcgcaacctgggggcttgtaggcgatgaagctaatcaactgcacctgcctgacgttgtcgaagccgatgatacggacaaaggcattggggtaggccttcttggcctcctcgagctccttgagcacctgggtggcatcggtgcagccgaacatgggcagcttccacatgggccaatacctgccatcgtagtatccgggagacctggggttctcacgggagacgaacccaaccttgctgaactcgagacaaggcacccacttggatcgaagcaggtactcgatctgtttcaaaagatcctccacggtgaggggtggcaggtaccatagggtctcgaactttttgatgccctcaattggccacacctgcatgcacttgat

SEQ ID NO: 411082 - DNA, 471 bp, Oryza sativa
gacctgaaaattgagttgttaatgaatccgctttattcgctgactctatatgatatttctttttctttgaaggaaaaattttataacaaggtttgagaccttgcatctattcctcttttttctatactagtagaatttcattgcattgagttctttcttagatctagatggggtggaatagagaaatagaaaaaagtcctttcggatgaaaatggaagaattttacgccatatatcccacttggacaaattagaagcaattttcttttatcccaatttgttccttcctttagataaatactcaaaatccccttacaataatgcaattttgaagggaccttttccctcgtgttgaaaaaactaggcttctttcattgctttttcattcaattaatttcaaaaaattcaattggtcctcaaaatacttccattggtatgcgcaagaaataagccaattcggcagctttttgtt

SEQ ID NO: 411083 - DNA, 530 bp, Oryza sativa
gacctgtaaattgagttgttaatgaatccgctttattcgctgactctatatgatatttctttttctttgaaggaaaaattctataacaaggtttgagaccttggatctattcctcttttttctatactagtagaatttcattgcattgagttctttcttagatctagatggagtggaatagagaaatagaaaaaagtcctttcggatgaaaatggaagaatattaccccatatatcccacttggacaaattagaagcaattttctcttatcctcattggttccttcctttagataaatactcaaaatccccttacaataatgcaatttcgaagggaccttttccctcgggttgagaaaacttttcttcttccaattcttcttcattcaattcatttcaaaaaattcaattggtactcaaaatacttccattggtatgcgcaagaaataagccaattcggcagctttttgttcaatttctcgtgagtaaaaaacttttcatcagtacgagtcaagggaatggccccctggc

SEQ ID NO: 411084 - DNA, 417 bp, Oryza sativa
tttattttttttttttttttttgatcgatgtacaagtggatgcattaattaatcatcttgggtgttcttatactacaaatcaccaccatgcaagtcgccattaaccaccaacccagctttcctaatttaagtagtaaatcaacaaaaggatgacctctcctctctccataccctcccagcttgctcgtcatcacaaaactaaacagcgcgcgcgaacgcacaccaacgcatcgatcccgtttgaattgcgcgcgaaagaacttaaattaagaggatgaggagaaggtgtcaaaaatggtgagtgtggagccggtcgttgaggtgggtggcccaattgttgaggggccccttgccggaggcggaggtctgcacggcaaaacccaggaaggcgaccaatggcaggcggccgtgcttgat

SEQ ID NO: 411085 - DNA, 520 bp, Oryza sativa
gttttcgtctcttccccgccatcaacgtcaacgactccgggaccaattgcaagtgtgagcggttatatccgtgccgccactctctccctgatggtctcatgagggctaccgatgttatgatcgctggcaagggtgccgtgccctgcacgaatacgccaatgaggcaagggctgtgctgatgctctcaagcaggctggtgcccgtgtcattgttactgagagggaacacactcgccaagggcaggcccttatggagggtctccaggtcctcaccttggaggaagatgtctaacaggctgacatctttgtgaccaccactggcaacaaggacatcatactggttgaccacaagaggtagatgaagaacagccccatcgatggtaacaaaagtcactttgacaatgagattgacatgctcggccttgagacccacctctgtgtcaagcgcatcaccatcaagccttaaacccgaccgctgggtctttcctgagaccaacaccggccatcattgtccctgctga

SEQ ID NO: 411086 - DNA, 467 bp, Oryza sativa
gttgttgttgcagacacatgcaagaagctacaaagactcagagttgtgcgaggagatgatgatccaggtttgcaagaagaacaaggaggagtctctcaagtcgggttgacaactgtagccgtaggatgccgtgaactggaatacatagctgcctatgtgtctgatatcacaaatggggccctggagtctattgggactttctgcaaaaatctttgcgacttccgtcttgtcctactcgatagagaagagaggataacagatttgcccttagacaatggtgtccgtgcactgctgaggggctgcacgaaacttcggaggtttgctctatacttgagaccagggggactttcagatacaggccttggctatattggacagtacagtggaattatccaatacatgcttctgggtaatgttggggaaacagatgatggactgatccggtttgcattgggtgtgagaacctg

SEQ ID NO: 411087 - DNA, 391 bp, Oryza sativa
  unsure (1)..(391): unsure at all n locations
gccggtcccggttcgcagtttcgggctaggcgtacgtacttgctttgcagctactacaacctcctgcagcagagccccgatgtcgtccaccagttctacaacgacgccagcaccatggtccgcgtcgacgacctggctggaaccaacaccaccgacagcaccatgatggatatacactccctcattatgtccttgaatttcacccaaatcgagatcaaaacagccaactttctcaactcatggggtgatggtgtgctagttatggtatctggtcttgtacagacccaggagtacagccaccaagggaaattcatccagatgtttttccttgctccccaggaaaagggttactttgttctcaatgattattnccatttcgttgacgaagagc

SEQ ID NO: 411088 - DNA, 427 bp, Oryza sativa
  unsure (1)..(427): unsure at all n locations
gttttaccgtatctgagcctcttgctttgctgatctcctcgagtaattctcgctgaaatgaagctagaaaacatgaaggctgtgaagagtccgattatgtgtgtgctggtgctaggcttagtcctgcagcaagagaacganttcaaggtggaaagnnctaagaagctnngctgctccaaaccccaccacggcaagggaaacaatctattaatgcaatgcccgtttttgcgccttggcacaagggaaagatgttctaaactctctggctgcaaaattgttgatgggaaatgcaagccgccttacattcaccacaccctttaccccgaatctgaggaatcggatgtacttgacttctgtatgctaggatgtacttcgtccatgtgcagcaacatgaacactnttgctgacaacgaagaagggaacgttg

SEQ ID NO: 411089 - DNA, 539 bp, Oryza sativa
gtttcccccaaaaccagcggcgccaccacccaccttcccccatggcatcggcggcggcgagatccggcctccgctcgctggcggcgcgcgccaaggcgaccgccgcccccgcggcgaggcgccgcatgtcctcctccgcccacgacgacgcccatgagacggccaagtgggagaagatcacctacgccgggatcgtcacctgcaccctgctggcggcgtacaacctctccaagggccacccccacttcgacgagccgccggcgtacccctatctgcacatccgtaacaaggagttcccatggggacccgatggcctatttgagaacaagcaccattaagtactgaacagcgcaccatcagaagcccagtgaatgcttaagaaaaattctctggttgttccagtgattcttgttttcagtgaaacctatttttcttgcaacaaagaaataagaatgacaaaactcttgtgttgataatcaggatttaactgtgttgttagttgctacctggtttcttcattcacagcagtgatcatatgc

SEQ ID NO: 411090 - DNA, 507 bp, Oryza sativa
  unsure (1)..(507): unsure at all n locations
tcgatttatgatttggattattggagaatatgctgaaaggattgacaatgctgacgaacttcttgagagcttcttggaaacattcccagaagaaccagcattagttcaattgcagttactaacggcaactgttaagttgttccttaaaaagccaactgaggggcctcaacagatgatacaggctgttctcaataatgcaacagttgaaacagacaatcctgatttgcgcgaccgagcttatatatactggcgacttctttctactgatcctgaggcagctaaagatgtagttttggcagagaaacctgtgatcagcgatgattccaaccagcttgattcttctctcctagatgatctgctagccaatatttctaccctttcatcagtttatcacaagcctccagaagcatttgttagccgcgttaaaacagctcctagggctgatgatgaggagtttgctgatacagctgaaacaggatattcggagtcaccatctcnagggtgtga

SEQ ID NO: 411091 - DNA, 470 bp, Oryza sativa
tcgatttcctgcaaactaaagctactcttcagtgggattgcatttcgaccgagctagagagatttatagctaagccaatggcatcacaggttgagagccaccgtgccggcgcggagatcgtcagtggagacggcgtcagcaggaagaagtccatcgagctgctggaggagctcggcctccccaagggcctcctgccattggaggacatcgaggagtttggctacaacaaggaaacaggattcatgtggctggtgcagaggaagaagaagatcgagcacaccttcaagaagatcaagcagaccgtctcctacgccggcgaggtcacggcgttcgtcgagaaggggaagctgaagaagatcaccggcgtgaagaccaaggagctgctgctctggctcagcgtcgtcgaggtctacgtcgccgatgcctcgccggagaaggtcaccttcaagactggaactgggcttttgata

SEQ ID NO: 411092 - DNA, 262 bp, Oryza sativa
tttatttatggaagctacactggtaggagagacacctaacaactttatcccaaagactagaactgggctcacaggttcattgtcatgtggacagatagcttcagcaagatctttctcaagcagtgcagacctgccaccacataaggaaatagggatgccatcactctctcctacaatgaccgaggggaacattgcaaggtggctgaagaaggaaggagataaggtctcacctggtgaagttctttgtgaggtggagactgat

SEQ ID NO: 411093 - DNA, 284 bp, Oryza sativa
tcggctctgttcatgatgttgttcttgttggtggctccactaggatcccgagggtgcagcagctcctgcaggatttcttcaacggcaaggagctttgcaagaacatcaacccagatgaagctgttgcttatggtgctgctgtccaggctgccatcttgagtggtgagggcaacgagaaggtccaggacctcctcctgttggatgttacccctctctctctcggtttggagactgctggtggtgtcatgaccgttttgatcccaaggaacaccaccattcccacc

SEQ ID NO: 411094 - DNA, 447 bp, Oryza sativa
atttatatgtggcttcttccttccagatcagtgtaggtctggctgggtctaccaacaagacagttaagttgcctaagaacttcactcttaaggccccaggtcctgggtacacgtgcgggcgtgctatgattgtcaggcctactaaggttttgaccggggatgggcgcagagcaacccaagctctaatgacatggaatgtgacctgcacatactcccaatttcttgctcagaagactacttcctgctgtgtatctctctcatcattgtataatgacacaattgtgaactgcccaacatgcttttgggggtgccaaaacaaatgggacaagtcctggaagctgtgtaaatgagaattcaccttatttacaatctgccattggtgggcctggcaaaaggaaccggcagagctttgggcaatggacttctcacatgtgcccgatcagaatc

SEQ ID NO: 411095 - DNA, 403 bp, Oryza sativa
cttattttagtgatgtaaagggtgttgatgaagccaaagctgaacttgaggaaatagttcactatcttcgagatcccaagcgttttactcatcttggtggaaaactgccaaaaggtgtcttgctggttggccctcctggcactgggaagaccatgttagcgagggctgttgctggggaagctggtgtccctttcttctcatgcagcggtagtgagtttgaggagatgtttgtaggtgtaggagctagaagagtcagggacctttttgctgcagctaaaaaacgttctccctgtatcatattcatggatgaaattgatgcaatcggtgggagcagaaatccaaaggatcaacagtacatgaggatgaccttgaccagttgcttgtcgaactggatggctttaag

SEQ ID NO: 411096 - DNA, 452 bp, Oryza sativa
tctcgttgacccgctctaccccggcggcgccttcgacccgttcggcctagccgatgaccccgaggcgttcgcggagctcaaggtgaaggagatcaagaacggccgcctcgccatgttctccatgttcggtttcttcgtccaggccatcgtcaccggcaagggccctctcgagaacctcgccgaccacctcgtcgaccccgtcaacaacaacgcctgggcgtacgccaccaacttcgtccccggcaagtgaagtgggggaccgtagcttagcagtggttaattgtggttggatggatttgtggccagcgagttcgttgtctttgggttggggaagatgggtttagtgcgacgagatgatgatcgagttggtgtcgtgtacactaagaagatgaagaagaagatgatgttttttgccgaggacatctttagcgttcgtttctttgatgaagggc

SEQ ID NO: 411097 - DNA, 509 bp, Oryza sativa
tcgctttatctctagagaaatggaggacaatctaccagtcaatgtccgggagtatcaagaactcgccaaaaaagcgttgccaaagatggcttatgattacatcaatgggggagcagaggatgagcacacactgagggagaatatcgcagcatacacaagaattatattacgacctcgcgttcttgtggatgtgagcaagatagacatgtcaacaactttattaggatacaccatgcgttcacccataattgtggctccaactggggggcacaaattagcacatccagaaggggagaaggctacagcaagagctgcagcatcatgtaacgccataatggttctttccttttcttccagttgcaagattgaggatgttgcctccagttgcaatgccattcgcttttatcagctatatgtgtataagaataggaatgtttcagcaacattagtacggcgggccgagagttgtggattcaaggcacttcttttgacagttgacactcctatgc

SEQ ID NO: 411098 - DNA, 539 bp, Oryza sativa
  unsure (1)..(539): unsure at all n locations
ttgggttgtgtgtgatgagcatggcattgaccctaccgggcggtacacaggcaactcagatctgcagttggagcgtgtcaatgtgtactacaatgaggcctcctgcggtcgctttgtgcctcgtgctgttctcatggaccttgagcctggtactatggacagtgtccgcactggaccctatggccagatcttccgccctgacaactttgtgttcgggcaatctggtgctggtaacaactgggccaagggacactacactgagggtgccgagctaattgattctgttttagatgttgtgaggaaggaggctgagaactgtgactgcctgcaaggattccaagtatgccactctcttggtggtggtactggatctggtatgggtacacttttgatatcaaagatcagggaggagtaccctgaccgcatgatgctgacattctcagttttcccctcaccaaagtatctgatactgtggttgagccatacaatgctacactctcagtccatcaagtggntgagaatgctgatgagtgtatggt

SEQ ID NO: 411099 - DNA, 467 bp, Oryza sativa
ttcgtttaatcaaacaaaaagaaaaaatattccccatctgtgaaattcgcaaaaccctagcgcggcggcgatgtcgaacacgagggtgttcttcgacatgaccgtcggcggagctccggcggggcggatcgtgatggagctgtacgcgaaggacgtgccgcggacggcggagaacttccgcgcgctctgcaccggcgagaagggcgtgggcaagagcggcaagccgctgcactacaaggggagcaccttccaccgcgtgatcccggagttcatgtgccagggcggcgacttcacccgcggcaacggcacgggaggggagtcgatctacggcgagaagttcgccgacgaggtgttcaagttcaagcacgacagccccggcatcctgtccatggcgaacgccgggcccaacactaacgggtcccagtttcttatctgcaccgtgccctgcagctggctggacgggaagc

SEQ ID NO: 411100 - DNA, 538 bp, Oryza sativa
  unsure (1)..(538): unsure at all n locations
tgcatacccccccacctcgagctctagggtttcgcggatcgaggggcgccgcggctagggtttgggtggggggtgcctgcgcgatggccgctccggcggcggagtcggcggtggtgggggtgggggtggattcggcgacgagcgcggcggtgagggatggttttgcggagctggagcggcagcagcagctgctcgcgacctgcacgcgcctgtaccagcagctcacggagcacttcggctcgctggagcgccgtctcgccgcgcgctccgagacgctccgcaccaagcgccgcttactcgacgtgcgcaccttccgtaggctcgaggcgctccgacgccgggaggccttcatcgacggctacgtctcgctcgcgctctcccggctcgattccctcgacaagggcgacgcggngacgaccggctccgtcttcgacgacgccgcttgaatcgccgaggggctcaggtcgctctgcgccagcatggacttcggtcggttctttacctttgatgtcgcgaggcgcaaggaggtggacgcgct

SEQ ID NO: 411101 - DNA, 539 bp, Oryza sativa
gcctcgcccggccgttccggtatggaaggctcggctcgacccacgcgtttttctttcccacacccgtctcgccgtcgcagcgcgcggaggctacccctcccccgcggccgtcaagatgcagatcttcatgaagaccctgacggtgaagaccatcacgctggaggtggcgtcctaggacaccatctgcaacgcgtaggtcactatccaggacaaggaagggatccccccggaccagcagcgcctcatcttcgccggcaagcagctcgaggatggccgcaccctcgccgactacaacatccagaaggagtccaccctccacctcgtgctccgcctccgcggcggcgccaagaagcgcaagaagaagacgtacaccaagcccaagaagatcaagcacaagcacaagaaggtgaagctcgccgtgctccagttctacaaggtggacgacgccaccggcaaggtcaccaggctcaggaaggagtgccccaacaacgactgcggcgcgggcaccttcatggccaaccacttcgatcgccactact

SEQ ID NO: 411102 - DNA, 394 bp, Oryza sativa
gccaatctttctttcccacatcctcctccgccgccggctgcttcccaccggctcccgatctccgaggcaagcagcgccgcacccggccgccgccgccgccgccatggcgttcgagaagatcaaggtcgccaaccccatcgtcgagatggacggtgatgagatgaccaggatattctggcagtctatcaaggacaagcttatctttccattcttggatctggacattaagtactatgacttgggagttctccaccgtgatgcaactgatgacaaggtcaccgtggaggctgcagaggctactctcaagtacaatgtggctattaagtgtgcgacgattacttcagatgaggctcgggttaaggagttcaacctaaagcaaatgtggaagagcccc

SEQ ID NO: 411103 - DNA, 501 bp, Oryza sativa
attctgattcagtttatatatggtcaaattttagtaagtatgaagagatatgcccaccccaagtagaagagctctgctatatttctgacaatacatacactaaggatgaggttttgaaaatggaagcttctgtcctgaaatacttgaagtttgagatgactgcacctacaacaaaatgctttttgaggagatttctacgagctgctcaagtatgccatgaggctccagttttgcatcttgagttcctagctaattacattgcggagctatcacttctggagtacagcttaatttgctatgtaccgtcacttatagctgcgtcttctatttcttggcgaagtttatccttaagccaacagagaatccttggaattcaacactttcattctacacacaatacaaaccatccgacctatgcaattgtgcaaaaggactacaccggcttttttggttggccctggaggcaacctttgagcagttagagaaaaatacagtcaacac

SEQ ID NO: 411104 - DNA, 405 bp, Oryza sativa
gtttctgtccctcatcatcaacaccttctactccaacagggagatcttcctccgcgagctcatctccaactcctccgatgcattggataagattaggttcgagagcctcacggacaagagcaagctcgatgcgcagccggagctgttcatccacattgtccccgacaaggctagcaacaccctgtcgatcatcgacggtggtgtcggcatgaccaagtcggacctcgtcaacaacctcggtaccatcgccaggtcggggaccaaggagttcatggaggcgctcgctgctggtgctgatgtgtccatgattgggcagtttggtgtcgggttctactccgcctaccttgttgctgagagggttgttgtgaccaccaagcacaacgacgacgagcagtatgtgtggga

SEQ ID NO: 411105 - DNA, 493 bp, Oryza sativa
tttcgttaagcctcttttggatctatccattcgggtcaccgtggcagttcggtaattttggcggagaggaggaggaggacgacgacgacgacgacgtgatgggtctcctcgacaagctgtgggacgacaccgtcgcggggccccgccccgacaccggcctcggccgccttcgcaagcacgccgccgtccgccccgccgtcgtcaagatcaacgacccgacaggggacgcggcgatggtggtcgtcccgccgacgacgccggccggggcggaggaggcgccggtgaaggtgacgcgcagcatcatgatcaagcgccccgcggggtacccggcgtcgccgaggagcgcggacagcacgccgtcggcctcccccgtcggatccacccctcccatctcgccgttcgccggcgccggtggtcgcttcagaaggaaattatcgttcgacgcatatgagagggcaacaccctgggacaaccagtcacccttctccctttg

SEQ ID NO: 411106 - DNA, 454 bp, Oryza sativa
tcgcgttagctagctaactaatcttccccttcgtctgcggcattattccacttggacgaacactagctcaccggccggccatggcgtcttcttccgttctgatcaagctgctcgtcgtcgtcggctgcgccgccgcggcctccgcggcgacgctcaccgtgggtggtagctccgggtggacgcttggccagaactacgatacttgggcaagtggccaaaccttcgcggttggagacaagctcgtgttcagcttcgttggggcgcacacggtgacggaggtgaacaagaaccattaccacaactgcgccgtcgcaaggcactcgatcagctcgaccagcacccagcccagccaccctcgacctcgccgccgccggcatgcactactacatctgcaccatcagcggccactgcgccggcggcatgaagctggccatcaacgtccgcagcggctccg

SEQ ID NO: 411107 - DNA, 467 bp, Oryza sativa
ttggtttatcaaggctgtttgggctccttactatacagttcacaagattatgcaaggtcttcttgatcagtatacggtggccgggaattctaaggcccttgatttggtggtcgggatggccaattacttcagtgaccgtgtgaagaatgtcatacagaaatacagtattgagaggcattgggcttcactcaatgaggagagtggtgggatgaatgatgtgctctatcagctctacacgataacgaatgatcagaagcatctgactctggcccatctttttggatagccaatgtttctttgggttgcttgcagttcaggccgacagtatttcaggcttccattccaatacacacattccagttgttattggtgcacagatgagatatgaagttactggtgatcttctttacaagcaaattgcaacgtttttcatggataccatcaattcttctcatagctatgctact

SEQ ID NO: 411108 - DNA, 392 bp, Oryza sativa
ctttgatgtgggttggcttctcctccccctctttaccttttcctcctcggttcggttccgtggttcgtctagggtttagtgggttgagatggcggcgccggatgtcgagtaccgctgcttcgtcggcggcctcgcctgggccaccgacgaccgctccctcgaggccgccttctccacctacggcgagatcctcgactccaagatcatcaacgacagggagacggggaggtcacgtgggtttggcttcgtcaccttctcctccgagcagtcgatgcgcgacgccatcgagggcatgaacggcaaggagctcgacggccgcaacatcaccgtcaatgaggcccagtcccgccgctccggcggcggaggcgggggctacggtggcggctgtggcg

SEQ ID NO: 411109 - DNA, 534 bp, Oryza sativa
ccttctttttctcctcctcttcctccgcgcgcgcgagatccagggagagggagagggagagatcatggcggggacggtgacggtgccgtcggcgtcggtgccgtcgacgccgctgctcaaggacgagctggacatcgtgatcccgacgatccgcaacctggacttcctggagatgtggcggcccttcttccagccctaccacctcatcatcgtgcaggacggcgacccgaccaagaccatccgcgtccccgagggcttcgactacgagctctacaaccgcaacgacatcaaccggatcctcggccccaaggcctcctgcatctccttcaaggactccgcatgccgctgcttcggctacatggtctccaagaagaagtacgtcttcaccatcgacgacgactgcttcgttgccaaggacccatctggcaaggacatcaatgctcttgagcagcacatcaagaacctcctcagcccgtccaccccgttcttcttcaacaccttgtatgatccctaccgcgaaggcgctgactttgt

SEQ ID NO: 411110 - DNA, 445 bp, Oryza sativa
gttataatggacaggggcacagatgctcgtaactttctgttgggaaatgtgattccattacgactaggctatgttggtgtggtaaaccgcagtcaacaggatatcaaatcagatctcagtatcaaggaagctctggcgcgcgaagaaagtttcttccgtaatcatccagcgtataatggtcttgctcagtactgtggtataccacaattagcaaagaagttaaaccagattttggtccagcatataaagactgttctgccaggattgaagtcacgtataagttctcaattgacaactactgctaaggagctttccttttatggtgatccagtcgagtccaaggctggtcaaggtgctaagcttttgaacattctggcaaagtactgtgaagctttctcctcgatggtggagggaaaaaatgaggacatatcaacaattgagcttt

SEQ ID NO: 411111 - DNA, 514 bp, Oryza sativa
tcgctttctctgtgtcatgtcgtcgtcgtcgtcggcagctcgcaccctcctctcgccggcggcgcctcctgtcccgcgccgcggcgtggtgcgtcccgcgaggtgctccgggggcggcggcgcggcggcggtggagacggccgcgtcgggggcgaaggtttgtacggtgagcaaccgcggggactccctggcgatatgccgggtgctcaacggcatgtggcagaccagcggcgggtggggccgcatcgaccgcgacgccgcggtggacgccatgctcgcctacgctgacgccggcctctccaccttcgacatggccgaccactatggaccagcagaggatttgtatggccttttcatcaatagagttcggcgtgagcggccacctgagttgcttgaagaaatcaaggggctaacaaagtgggtaccacctccggttaaaatgaccagaagttatgttgaggataatattaacagatctcgaaagagaatggatgtttctgccttggacatgctg

SEQ ID NO: 411112 - DNA, 473 bp, Oryza sativa
tcgctttctctctctcggtgtttccccttcggccttctcgtccgccccttctctcctccaccatccgcctcaccggcgtacggctccgacgagatggccgccccgctccggcggagcctcccctccctggggcgcacgctcctctcgccgtcccccgcgcccgcgcggatgctctccgcggcggcgtccgacgccctcgtcgagatcaagccaggcgagatcggcatggtctccggcatccccgaggagcacctccgccgcaaggttgtaatatattcacccgctaggactgcatctcagcagggttcaggcaaagtcgggaggtggaaaatcaactttgtgtcaacccaaaagtgggagaacccattaatgggatggacatctactggagatccatatgctaatgttggtgaagcagggcttacgtttgacagtgcagattcagcaaaagcatttgctgaaaagcatggatg

SEQ ID NO: 411113 - DNA, 537 bp, Oryza sativa
gtttccgtcgccgcagcctcctcctctcgtcttctccttcgagttgttagctacctccttattcaaccatgggtaaggagaagacgcacatcaacattgtggtcattggccacgtcgactccggcaagtcgaccaccacgggccatctgatctacaagcttggaggtatcgacaagcgtgtgattgagaggttcgagaaggaagccgctgagatgaacaagaggtccttcaagtacgcgtgggtgctcgacaagctcaaggccgagcgtgagagaggtatcaccatcgatattgccctgtggaagttcgagaccaccaagtactactgcacggtcatcgatgcccctggtcaccgtgacttcatcaagaacatgatcacgggtacctcccaggctgactgtgccgtgcttatcattgactccaccactggtggttttgaggctgttatctccaaggatggccagacccgtgagcacgctcttcttgctttcactcttggagtgaagcagatgatctgctgctgcacaagatggatgc

SEQ ID NO: 411114 - DNA, 281 bp, Oryza sativa
gctgtgttgcagaggatatcagccatggtgaagtttctcaagccctggaaggcggtgatcctgctgtaggggaggttcgcggggcggaaggcggtgatcgtgcgggtgttcgaggagggcacccgcgaccgcccctacggccactgcctcgtcgtcggcctcgccaagtaccccaagaaggtgatccgcaaggactcggcgaagaagacggtcaacaagtcgcgcgtcaagtgcttccttaagctcgtgaacttcacccaccgaatgcccacccgttacac

SEQ ID NO: 411115 - DNA, 488 bp, Oryza sativa
gtttatgatctgctgctgcaacaagatggatgccaccactcccaagtactccaaggcccgttacgatgaaatcgtgaaggaagtctcatcctacctgaagaaggttggctacaaccctgacaagattcccttcgttcccatctctgggtttgagggtgacaacatgattgagaggtccaccaaccttgactggtacaagggccccaccttgcttgaggctcttgaccagatcaacgagcccaagaggccatcagacaagcccctgcgtcttccccttcaggacgtgtacaagatcggtggtattggcaccgtgcctgtgggtcgtgttgagactggagtcctcaagcctggtatggtggtgacctttggtcccagcggcctgaccactgaggtcaagtcggttgagatgcaccacgaggctctccaggaggctcttcctggtgacaacgtcgggttcaacgtgaagaacgtcgcggtgaaggatctga

SEQ ID NO: 411116 - DNA, 411 bp, Oryza sativa
ggaacaaaccccagggccaacgggtacagatttcccaccggaagtctcactgtaaacacaggccaagtctacctcctgttggaacgccaaaattgcatatccagtatccagcctaaagataaaaataaccatgttgcatacatagataaggagacattctccccagtaacagaagaaaagcctagttcatcctccggatgagctcgttgatgtagtcctcacggttgccggcatcaccacccttgacataggggttccttttcttcttgaggccaccgagtggtgccttcaacttgaagggccacaggaagttgttggcctccttgaagtgtggaccgacagtcatgatcttgtggacaagatcctcaatgcagatgatgtcatgcttccccaagccctccttaatgactt

SEQ ID NO: 411117 - DNA, 538 bp, Oryza sativa
  unsure (1)..(538): unsure at all n locations
tcggtttaagaagcggaagcgggaggagcagtgggcggtggacaggaaggagaaggcgctcaccgagaagaagaaggccgtcgagagccgcaagctcatcttcgcccgcgccaagaagtacgcccaggagtacgacgcgcaggagaaggagcttgtgcagctcaagcgtgaggctcggatgaagggtgggttctacgtcagccctgaggccaaacttctgtttgtggtccgcatccgtggtatcaatgccatgcaccccaagaccaggaagatcttgcagcttctgcggttgaggcagatcttcaatggtgtcttcctcaaggttaacaaggcaaccattaacatgctgcgcagggttgagccatatgttgcatatgggtacccaaacctgaagagtgtcagggaattgatctacaagaggggttacggaaagctcaacaagcagaggattcctcttcagaacaacaaagtcattgaggagggcttggngaagcatgacatcatctgcattgaggatcttgtccacgagatcatgact

SEQ ID NO: 411118 - DNA, 526 bp, Oryza sativa
tcgcatatatctcccgtctcgtcgtcgccgcctccgctccttgcgccatctcgcggctgaacaggggaggggcgccgatctccattggcgagcagagcagggcgcgggaggggaggggatcctgaaaacacttggtttcccaaatgaagcacatattcaagataattgctatgctggtggcagtctcagctatttggattgcccttcttgaaaccgcgactgttcctcgaagttatacttggttgcttcccatctacttggtagtggcacttggatgctatggcctttttatggttggatttgggcttatgttcttcccaacttgcccgcaagaagctgtactactacagcaggatatcttggaggcaaaggaattcctatcaaagaaaggtgttgatgttggctctgaataatgtcaagatcgatgatagatgacttgaggctagtttggggacaactgtgtgctcccttatatgagttgttttgggggctttatagctaggtatatgtcacttcgtaatgatca

SEQ ID NO: 411119 - DNA, 546 bp, Oryza sativa
tcggtttgggctataagaaatggtgtggatccaatacctgtcaatagtgggcttggtggtgcctactatttcagaaacagcaaaggtgagaatgctgccattgtgaagccaaatgacgaggagccatttgcacccaacaatccaaaaggttttacagggaaagcccttgggcagcctggccttaaaagatcggttcgagttggtgagactggttttagagaggttgctgcctaccttctggattatgataactctgctaatgttcccccaacggttcttgttaagatctctcatcctgtatttaatgtgaatgaatgcgtcagttcagccaacatgaaggcttctaaggactatccaggggctgtaagcaagattgcatcatttcagcagttcattcctcatgattttgatgccagtgaccatgggacttcaagctttcctgtctctgctgttcataggattggtattcttgacattagaattttcaacaccgataggcatgctggaaatcttctggtcaggaagttactggaccaggaaaatttg

SEQ ID NO: 411120 - DNA, 534 bp, Oryza sativa
ttcggttgctgcgcgcttcggggccgtgcgggctcgtcgtcaccgacgcgctcgagcccgactgccccatcatctacgtcaactgcgggttcgaggaggccacgggataccgcgcggaggaggtgctcggcaggaactgccgattcctgcaatgcagaggaccctttgcgcaaaggagacatcccctaggtgatgccatggtggtttctgagattcgcaaatgcatagacaatggtaccgaattgcgtggtgatttgctaaatttcaggaaagatggctctccattgatgaacaagttacacctgacccctatatatggagatgatgagaccataactcattacatgggcattcagttcttcaccaatgctaatgttgatttgggaccattgcctggctcattgacgaaggaacctgtcagatctacaagatttactccagataactttttgccgcccatatccactggaccagggcagagcaacttctgccgggaatattctagcctgttccaggtgactgatgaagtactct

SEQ ID NO: 411121 - DNA, 549 bp, Oryza sativa
ttcggctttgggcattgagaacctgttggtcctcttgatcggtggtatcccaattgccatgcctaccgtgctctcggtcaccatggccattggttcccacaagttgtcccagcagggtgctatcaccaagaggatgactgccatcgaggagatggctggcatggatgttctgtgcagtgacaagaccggaaccctcacccttaacaagttgagcgtcgacaagaacctcgttgaagtgttcactaaaggtgttgacaaggaccatgttttgttgctggctgcaagggcatctaggacagaaaaccaagatgccatcgatgctgccatggttggtatgcttgctgatcccaaggaggcaagagccggtatcagggaagtgcacttcttgcccttcaacccagttgacaagaggactgctctaacatacatcgatgccgatggcaactggcaccgtgccagcaagggtgctcctgagcagatcctgaccctgtgcaactgcaaggaggatgtaaagaggaaggtgcatgctgtgattgacaagtatgctga

SEQ ID NO: 411122 - DNA, 526 bp, Oryza sativa
gttacgtttaccctattggacatttgttcggcaccatggacatcagtgacccggcgagaccctgcttcctggacatcgacaccggcagcaccctcacctggctgcagagcgactacccctgcattaattgcaacaaggtaccacacgggttgtacaagccagaactaaaatatgtggtgaaatgcaccgaacaacggtgtgccgacctgtacgctgatctgagaaagccgatgaaatgcgggcccaagaaccaatgtcactatgggattcagtatgttggtgggtcatccattggcgtgctcatcgtcgacagcttctccctcccagcaagcaatggcaccaatcctaccagcatcgcatttggctgtgggtacaatcaggggaagaacaatcacaatgtgcccacaccggtaaacggcattctcgggctcggtagaggaaaggttacgctgctctcacagctcaagtcccagggggtgatcaccaagcatgtgttgggccattgcatcagcttaaaaggaaaggg

SEQ ID NO: 411123 - DNA, 534 bp, Oryza sativa
atttacatataagattagaagaaagcaagcaacaatggcgtcagctccggccgcctcttccgcagtgctcctcgtcgtggtcctggtggcgagcctcgccgccggcggcgccaacgcggcgaccttcaccatcaccaaccgttgctcgttcacggtgtggccggcggcgacgccggtgggcggcggcacgcagctgaacccggggcagacgtggaccatcaacgtgcccgccgggaccagctccggcagggtgtggggccggaccgggtgcagcttcgacggcgccggccgcggcaggtgcgccaccggcgactgcggcggcgcgctgtcgtgcaggctgtccgggcagccgccgctgacgctggcggagttcacgctggggacgtccggcggcaaccgggacttctacaacctgtcggtgatcgacgggtacaacgtcgccatgagcttctcctgcagctccggcgtgacgctgacgtgcagggagaggagctgcccggacgcgtaccagtaccccttcgacgactccaagct

SEQ ID NO: 411124 - DNA, 414 bp, Oryza sativa
ccgttcgcgtcagcttcgaaccccactgcaagcaaacagcgtctcccccccttcccgatccgacggcggcgacggcgatccatgccatgtcgcagccggacgccgccgccgacgacccctccccctccccgtcccccaacccgccgccgccgcccgtcgcgtggccggaggacggcgcgctgacgcgggagtgggtggcggagctcacggcgacgctggactggtgctcccgcagcctccccgcggaccggctccccgacgtgcttcccgcggcgctcgtccagcggctcgtccttgcggactccgtcatcctgcaccgggagctcaacctcgtgcgggtggacccgtggtccgaccaggccctcgtcgtggtcggagacgtccacggtcagctccacgacgtgatctttctgc

SEQ ID NO: 411125 - DNA, 499 bp, Oryza sativa
tcgggtcgacgctgtcgagtaccggagtaggggagctcgccggagtaagctcttctcaggctgtgcgggggtggcggagggcggcgcggcgcggcgagggggcatggacacgatgaggggggcgctggagcgggcgaggatgctggtggggatggaggtggacgaggagtcggtgccggaggagcagtccttcttcgacgacgtcacccgcaactgcgccctcaccaccacccagaggctgtacggcttcgcgatatgcttggctgccggattgacgtgcaccttcttgacaatgcttgttttcttcaatcctgtgaaattcggggtaacattcacccttggcaatttgatggcacttggaagtacagcgtttcttataggtcccaaaaggcaatttgacatgatgcttgattctgggcggatatatgcaactggtggatacattgcaagcatcataattgctctgttctgtgctctctttgtgcacagaaggctgctg

SEQ ID NO: 411126 - DNA, 542 bp, Oryza sativa
ttggtttgacccaccctcaagctccaagctccaagaaccatggccgccacctcgctgtcgccgccgaccgtggccgggctgcggctggcgccgtcgccgcgcgtgcggtcgccgtctgtggcgttcagggcggcgccggcgaggaggaggtcggtggcggcgagggcggagctgagcccgtcgctggtgatcagcctgagcaccggcgtctccctgttcctggggcggttcgtgttcttcaacttccagcgggagaacgtggcgaagcaggtgccggagcagaacggcaagacgcacttcgacgccggcgacgagcgcgccaaggagttcgccggcctgctccggtccaacgaccccgtcggcttcaacctcgtcgacgtcctcgcctggggctccctcggccacatcgtcgcctactacatcctcgccacctgcagcaacggatacaacccaaacttcttctgatcattctcatcttggatggatgcaatgtaatctgaatggatctctggtgtttctacgtgattatgtatgagatgggt

SEQ ID NO: 411127 - DNA, 539 bp, Oryza sativa
acgcctaactttgttttcaacaaaatatgcaaatctgtagtggtatccccaatttgttctgttcattctattcagacgatagatattttgcagtcttttgtacaaccacttgagctgctgttaagccatccaagtgcattcttgttcattagtgccttgcaggatacagttatttcgcatagaaataaaaaattctaacgatactaaaaaatagggggttccatcgattatatggttcccttttaaacggcgaggcccatgtatccgtgctccaggatagagggttcatgtggcactgctatagagatttcaaagcacagtcccaagatttgcttgtcatcaaagttttactgtgaacaagttgcctagtagattctgaatccttcaaggcaattcatactctggctcctagattctgaggttgatatgcaaaaacaaacatataagcattggccatgatttcccagaagaatctttgctaagctgtaagtgcaacgtgaaagatgcaggcacctcagattgcattttatcactttatg

SEQ ID NO: 411128 - DNA, 441 bp, Oryza sativa
gggctagacgtacgcctgcattttatgaacgacgaggggaagctgtaccgctgacacaccatcaagaactgcacacacgcctgccccaagggcctcaacccagcgaagcacatggacacaatcaagaagctccagctcgaggcctgagtgagcagtatatctctcttcatgagatgaaactctgtcgaaaaattgtaatcagccagcctcttgtttctctgcctttttagtccatcgcctgacgaataattgctggaacgcaggattcccttctgggcctccgatctgatgacttccatttccatcagatggagggagcattgtagggagtgaataatttgctaccgtattttacgttttgttctgtatctaattcgggttgttgttcaccgtccattccattatgtcgtgcggtttatgcatgaagtaattcatggattt

SEQ ID NO: 411129 - DNA, 466 bp, Oryza sativa
  unsure (1)..(466): unsure at all n locations
gtctcttcatccgtctcgcatccattcccccgcctcccgccatttcaacccgcccccaattccaaaaccctcgcctcctccaacaacgcgcccccaaaccctaaccctaggagagggcgcggcggcggcggcggcggggggcgagatgccgaaggctacggcggcggaggaggaggagttccgggcggaggtggaggagcggctgatcaacgaggagtacaagatctggaagaagaacaccccgttcctgtacgacctcgtcatcacccatgccctggagtggccgtccctcaccgtgcagtggctccccgaccgcgctgagcccgctgggaaggaccactccgtccagaagatggtgctcggcacccacacctncgacaacgagcccaactacctcatgctcgcccaggtacagctcccccttgacgacgccgaggccgacgcgcgccactacgacgacgaccac

SEQ ID NO: 411130 - DNA, 516 bp, Oryza sativa
tttttatatgggatgctgtaatcctggggacacttccaggccttgcaggggatggaaccattattgatccactagaacagcttcgatcaagtaatggaacagtggggcctattgttgaggcattctcatttcttgcaattggcacatcatacattggatttgttctaggactctcagacttcatagcagacttgcttaaactaccaagtggacagaacaaacctctgccgtaccttgtgactttgctcccaccgcttgttctgtcattgcttgatccagagatatttttcaaggcattggactttgcaggaacttatggaagtctagtactttttggagtttttccagcagctatgtcttggtcagagaggtactcagatgatctggaagctccagtacccaccatagtcccgggaggaaaattaccctctcatttgtcatggggggtgccttgctcgtatttttttcagagattttaaaggacataatgcagttgcagggactacactgacactt

SEQ ID NO: 411131 - DNA, 543 bp, Oryza sativa
tcgtttattgaagacggtgttgcaaggaatcctcctttcatccgagggggagaagcttaattctatgaatttgcttttatacatggctccaattgctgttattctcttgctccctgctaccatcttcatggaggacaacgttgttggcattacaatagaactggccaaaaaggacaccacgattgtttggttgctgctgttcaattcctgtttggcatattttgtcaatttgaccaatttcttggtgactaagcatactagtgcattgactctacaggtcctaggtaacgcgaaaggtgctgtggcagttgttgtctcaattctaatattcaggaatcccgtatctgtaaccggaatgctcggttacactcttacagttataggcgtaattctttacagtgaatccaaaaaacgcaacaagccctgaatattttagaatgccgtaaatatggctgtcctttctcattccggtggatgcccagggctaatatatgacggggaactacattgggaacattgcaacaaatcctgcactgtatggag

SEQ ID NO: 411132 - DNA, 542 bp, Oryza sativa
  unsure (1)..(542): unsure at all n locations
gttttacgcatctttgtggaagagcttggtgctgctgaaagctcattgttgaactgtgttccgaaggaagactttggagggggccatccagatcctaacctcacctatgcaaaagaacttgttgaccggatgggccttggaaaatcctcaaatgctgaacccccagaatttggtgctgcagctgatggtgatgctgatcgcaacatgattctgggtaaaagattcttcgtaacaccttcagattcggttgccattattgcagccaatgctgttcagtcgattccttacttttcttctggccttaagggagttgccaggagcatgcccacatcagctgcccttgatgttgtcgctaagaatttgaatctcaagttctttgaggtgcctactgggtggaaattttttgggaacttgatggatgctggaatgtgctcaatttgtggtgaagaaagctttggcactggttctgatcacattcgtgagaaagatggtatntgggctgttctagcatggttatctattcttgctttcaagacaaggac

SEQ ID NO: 411133 - DNA, 296 bp, Oryza sativa
ttgctactggacatactatactactactagccagtaagctagctaactaactacgtggctatggcccccaccgtgatggcctcctcggccacctccgtggctccattccaagggctcaagtccaccgccggcctgcccgtcagacgccgctccaccaactcgggcttcggcaacgtcagcaatggcggaaggataaagtgcatgcaggtgggggccaatggggggcataaagaagttcgagaccctatcgtacctgccacaattaaccgggagggacttttggaagcaaatcgagt

SEQ ID NO: 411134 - DNA, 538 bp, Oryza sativa
  unsure (1)..(538): unsure at all n locations
tgcgttgacgcagctccaaatcggaaccctaaccctagtagtcctcctcctcccgcgctcgatccgaggtcgtcatcccgctgattccgaggctctctactgcggcggcggcggcgatggaagagcataggcttggcggcggcggcggcggaggcggaggcggggggaggccgccgatcccgggggcggcggggaggaagcttccggggctctcgcggcacgcctcgttcgtgaggagtcctgcaaacagtacaaaatctggaactgagaaaacttttgaaaacatggatgctgttgcatatatgcctgttgtaaggtctggaggttgggctgatattgggtcaaggcacacaatggaggatgtctttatttgttctgataacctcatgaaagagtttggagttgaaagttttgaagatggtccgagcgcattttatggngtttttgatgggcatggtggaaagcacgctgctgactntgtgtgcagcaatttggcaaggtttatcgttgaggatgaggattttccaagggagataga

SEQ ID NO: 411135 - DNA, 485 bp, Oryza sativa
ccttcctttttcctctcctcccccccacggcggcggcggcggcggcggcggcaggatggcggattcgacggcgaggacggtgaaggacgtgaaccctcatgagttcgtcaaggcctactccgcccacctcaagcgctccggcaagatggagctccctgagtgggttgacatcgtgaagactgcgaggttcaaggagctccctccttatgatccggactggtactacacgagggctgcctcgattgcaaggaagatctacctgaggcagggtattggtgtaggtggcttccagaagatctatggtggccgccagaggaatggctcacgtcccccgcacttctgcaagagcagcggcgctatctcacgcaacatccttcagcagctgcagaagatgggcatcatcgatgtcgaccccaagggccggagactcatcaccttccagggaaggcgtgatctggaccaagtggcccgaagaagttgatgta

SEQ ID NO: 411136 - DNA, 372 bp, Oryza sativa
cattataaattaccaacgcaagggatcttatcaatgttttggaggaggccataagaggtgcatacccaattctgataattgctgaggatattgagcaggaggctcttgctactcttgttgtcaacaagcttagagggtcattgaaaattgccgctatcaaagcccctggttttggtgagcgcaagacccagtacttggatgatattgccattctaactggagcaactgtaatcagggatgaagttgggctgtcacttgacaaggcagacaaatcagttttaggaacggctgcaaaggtggtccttaacaaagagtcaacaacaattgttggtgatggcagtacacaagaagaagtgacttaaaaggttgcac

SEQ ID NO: 411137 - DNA, 476 bp, Oryza sativa
tcggtttcgttgctgacgaagaagatcgtgaagaagcgggtgaagcagttcaagaggccgcacagtgaccgctacattggcctcaagacaagctggcgcaggccaaagggtattgactctcgtgtcaggagaaagttcaaaggatgcaccttgatgcccaacattggatatggttctgacaagaagacaaggcactaccttcccaacaagttcaagaagtttgcggtgcacaatgtctctgagctggagctgcttatgatgcacaacaggacatactgcgctgagattgctcacaacgtctccacccgcaagcgcaaggagatcgtcgagcgcgctgcgcagctggacatcgtggtcaccaacaagcttgccaggctccgcagccaggaggacgagtgaaattttctgcagtttttcgtgcttatggctgcattgttcgtagggcagtgccttggtaccttaaaaatatccatttt

SEQ ID NO: 411138 - DNA, 444 bp, Oryza sativa
atttgctgctaaagacgttgaattctgcgaatggaagggagacatcctcgcaatcgcagagacagagaatgatctggtcaaaggatcagactccaaattcgagaatgcggtgttgaagaagctcgacggtcagctcggcggcctactgtcggaggcatcaggaggaggaggatttcaccggcaaagctcgggcaatacagcggtgcgtccgctctcccggggcacggcttcaagagggtgggtctgatcggccttgggcagaacgccccctacaccacaacggtttgcaagggcatcggggaatccgtcgcgcaagatgccaagtttgctcaagctagcagcgcggttattgattttgcttcagggggtgggatccaggaagattataagctgactgatgcggcagccattgcttcacgaactgtgcatgggctgcacgaggac

SEQ ID NO: 411139 - DNA, 498 bp, Oryza sativa
ttgctgtcgcgtgggacccaatcccctcctcatccactccgctctgcggccatggccgcctgctgctcctccctcgccaccgccgtctcctcctcctccgccaagcccctcgccggcatcccccccgccgcgccgcactccctctccctcccccgcgctcccgccgccaggcccctccgcctctccgcctcctcatccagatccgcccgggccagcagcttcgtcgcccgcgccggcggtgtggacgatgcgccgctggacgggaacaaggcgcccgacttcgatgcggaggcagtcttcgaccaggagttcatcaacgtgaagctgtccgactacatcgggaagaagtacgtcattctcttcttctacccgttggacttcaccttcgtctgcccgaccgagattaccgctttcagtgacagatacgatgagttcgagaagttgaacactgagatcctcggtgtttcaattgacagggtgtcctcccatcttgcatgg

SEQ ID NO: 411140 - DNA, 426 bp, Oryza sativa
tcgggttaacgggctcacgctcttctgccccgtggacgccgccgtcgacgccttcctgcccaagtacaagaacctgacggccaaggggaaggcggccatcctcctctaccacgccgtgccggactactactcgctccagctgctcaagtccaacagcggcaaggtcagcacgctcgccaccgccagcgtcgccaagaaggactacagctacgacgtctccaacgaccgcgacagcgtcctgctcgacaccaaggtcaactcggcctccgtcaccgccaccgtcaaggacgccgacccgctcgccgtctacgccatctccaagttcctgcagcccaaggagctcttcaaggtcaccgaggacctggcaccggcgcccgcgccggagggccccaagaagaagaccaagatgaagaagccgtccaccac

SEQ ID NO: 411141 - DNA, 461 bp, Oryza sativa
tttgtgacataaaaaaaaagaagtcaaagaggaaacctctttttgtgaagaatggagctgtcgtcgtttgccgtgttcaggtcaataatttgatttgtatcgagaacttctctgagtttcctcagcttggaagatttacgctccggactgaaggtaagacagttgctgtaggaaaagttgttgctgttccacctgctgggagctcaacatttaatgtttagaccttccagagcttgaggacaaatagaaggttccttgcctcaggtcaaactgttgactagtccggataagttggagcttctgcacaaaagagggaattggcgcaagaactgagttggagcgttgattactgatttcgtggcgttcgtggggtttcctcaattcagcatctgatcccatttccatttttttactacttacaaatttcatagtggtggtggcgagtctacaaatttcatagt

SEQ ID NO: 411142 - DNA, 421 bp, Oryza sativa
tttctcttcctctacatcacggtggccacggtcatcgggttcaagcaccagtcggacccgggcgcgaacgccgccgacgccgcgtgcagcggcgtcggcatcctcggcatcgcgtgggcgttcggcggcatgatcttcatactcgtatactgcaccgccggcgtgtccggcggccacatcaacccggcggtgacgttcgggctcttcctggcgcgcaaggtgtcgctggtgcgcgcggtgctctacatcgtagcgcaaagcctcggcgccatctgcggcgtcgggctcgtcaaggggttccagagcgccttctacgtgcgctatggcggcggggccaacgagcttagcgacgggtactccaagggcaccggccttgccgtcgagatcatcgggacctttgtgctcgtgtacaccggttttt

SEQ ID NO: 411143 - DNA, 527 bp, Oryza sativa
ttgggacgtctccgccatggagaacaacttggccgcccacgccgccggcggcgaggacgacggcagcctcttcggcgccggcgccgacctgcccgccatggagctccccacctgccccgccgactttgacgggttccagaaggagaccaaggagatgctgaagcacaagaagggaacgaccacgctcgcgttcatcttcgacaagggcgtcatcgtcgcctccgactcccgcgccagcatgggcggatacatatcttcgcaaactgtgaggaaaatgattgaaataaatccgtacatgcttggaacaatggcaggaggtgctgctgattgccaattttggcataggaacttgggcatcaagtgccgactccatgaagctcgcgaacaagcggaggatctctattgctggtgcttcaaagcctttggccaacatcctgtactcctaccgtgggatgggactgcacattgggacaatgattgctggatgggatgagaagggtcccgggctgtcctatgttgatagtgag

SEQ ID NO: 411144 - DNA, 470 bp, Oryza sativa
ttgaagaaaatagttccctgctccactatctgacgaacctatgtgctatagtgggaggggttttcaccgtctccggcatcattgactcgttcatatatcacgggcagaaggcactcaagaaaaaaatggagctaggcaagtacagatgatttacctgaaacatggactggccctcatgttccccaagttcccaagttccgtggcttgtaaaggatccattgcttaagacctgaagacgttgctttgctggaaggttttgctaaggccatcagaattgacgatattgcacattagttgatcaaaaactcgtttacatgtaaaaaaagacaatatcatagcgttgggcctgggggagtgctttgatgtctcaatgagactctctttgagtggccaaaactggcgaaatgagatggatagattaaattcaataaaataaattttcttattctctttttcctatctcttctaca

SEQ ID NO: 411145 - DNA, 475 bp, Oryza sativa
cgggccggggctggtggtgccggggatctactactccgacgacaagatgctgcagtgcagggtgttcgcgtacgccgacacgcagtgctacaggctggggccaaactacctgatgctgccggtgaacgcgcccaagtgcgcccaccacaacaaccactacgacggcgccatgaacttcatgcaccgggacgaggaggtggactactacccgtcgcgccacgcgccgctccgccacgcgccgtcgacgcccatcacgccgcgccccgtggtggggaggaggcagaaggcgacgatacacaagcagaacgacttcaagcagcccggggagaggtacaggtacggggcgccggatagacaggagaggttcatccgccgcttcgtcggcgagcttgtgcaccccaaggtctcccctgagcttcgcgccatctgggttaactacctctcccagtgtgatgaagtcttgggggtgaagatt

SEQ ID NO: 411146 - DNA, 501 bp, Oryza sativa
ttgccctccaagatcttcttggatgcccaaaggctgggcatggcgttctccgggtggtgacaagggccgcaaactctatgttgtcacctgtatcatcccctacagcagaagatgcacgatctccatctgctgctgtgatgatgacgacaaagtttgcagatcttccaagggttgtgacatcggaaaagaaagaatatccagtggatccgtcccttcctgatatcaagaacagcatctatgcttccgatgagttccgcatgtactcatttaagatcaggccatgctcgcgggcgtactcacatgattggactgagtgcccgtttgttcacccaggggagaacgcacggcgtcgggaccctcgcaagtatcactacagctgtgtgccatgccctgactctagaaagggagtttgccggcgtggtgacatgtgtgaatatgctcatggcgtgttcgagtgttggcttcatccagcacagtaccgtactcgcctttgcaaggatg

SEQ ID NO: 411147 - DNA, 298 bp, Oryza sativa
tttgaggtcgccgggcgcccaccattgccgtcgcgtggcgaggcatgaagatcctagtggcggtgaagcgggtggtggactacgccgtcaaggtgcgggtgaggcccgaccggacgggcgtcgagacggcgagcgtcaagatgtccatgaacccattctgcgagatcgccgtcgaggaggcgctccgcctccgcgagtccggcgccgtcaccgaggtcgtcgccgccaccgtcggcccctcccagtccgtcgacaccctccgcaccgtgctcgccatgggcgccgaccgtgccgtcca

SEQ ID NO: 411148 - DNA, 422 bp, Oryza sativa
tatcggcttcacgctcaagaaattgctcattcactggatcttaggaaatatgatggaattgtttgcgtcagtggagatggtgtacttgtagaggtggttaatggtctgctgcaaagagaagactggaacacagcaataaaaataccattaggcatcatcccggcaggtaccggaaatggaatggtgcaatcacttgtgcattttgctggtgaatccttctttgtttataacgctgtgcttgcaattatcagaggtcacaagcgtccccttgatgttacctctgttgtgcagggaaagacaaggttttttagtgtcttgatgcttacttggggtctggtagctgatatcgatattgagtcagagaagtacaggtggatgggcagtgctcgtcttgacttttattcccttcttcgtgtggtgag

SEQ ID NO: 411149 - DNA, 496 bp, Oryza sativa
ttcttatcgactattctcacattgaacaatggatggacttctcagcaacagaggttgatgccaatattggaaggtggttgtacccaaggcttggttttggcccttatgttcctgtgcttgaggaatttgctattacttcattgaagaggtcattgggtgctctgaacacacaccttgcttcaaacacataccttgttgggcattcagttactctagctgatattgtgatgacatgcaacctatattatgggtttgttcggatcttgatcaagagtttcacctccgagttccctcatgttgagcggtacttctggacaatggttaaccagcccaacttcaagaaggtcattggtgatttcaagcaagcagagtctgtgccttccgtttcagaaaaaggctgctccccctaaggaatcaaaagctaaggaggccaagaaggaggctccgaaagaggcccctaaaccaaaagttgaggcttcagaggaagaggaggcac

SEQ ID NO: 411150 - DNA, 506 bp, Oryza sativa
agaaggataaggtcgctaggaagtatgatcaattcgtagtagttacagaaattacagatttttcacaggaggctggcattcagtcgcatgccattgttgtcaacctgccattttcatgagcctcctatgaaacgaaggcgtacacttacagcttgacagactactcgcacacagggaggatcacgagcaaaaaaagaggagggaataaacaaccgttgcaaaattagtaaacagaaactccagagatccgtgtatcaccgtatgtgtttggctcgtttcgtagtcctagttgtcctctctattttcgtctggcggcggcggcgccggttgctcttcgggcaccatttccggcaacacctcctgggactcgctcttcttcttcaagtgattgtagctccctttctccatgaacagctgcccgaagtgtattttgcagtacaacaccccgttgagcgccgcgtaagaagaggtggtcaggatgcagcctccatgagagcacttgaagc

SEQ ID NO: 411151 - DNA, 468 bp, Oryza sativa
tctagatcaccggccacgagaccaccacgagtgcacgactacttgaggatggcgagcccaacaacaatggtgggagtggcaacctcggcgcatctccacaccaccaccaccggccggctcagctgcgcctgtgcaccaccgacgaggggaacaaggcggcggcggctcgcggtggcggtgcgggtgcgggtgcgggtgcgggcgtcggcgtcggaggcgatggcgacggagaagctcggcgtccgtgtggagcgcaacccgcccgagtcccgcctttacgagctcggagtccgcgagtggcccaagtgggggtgcgagaagagcaagtccccgtggacgtactctgccaatgagacgtgctacctgctgcaagggaaggtgaaggtgttcccggacggcgccggccaggatttcatggataccgcggcgggggacctggtggtgttccccaggggatgagctgcacct

SEQ ID NO: 411152 - DNA, 414 bp, Oryza sativa
tttgatgggctcatgaataaggaagagttgcaacttgcattgtttaaaaaccaaaggaaggaaaatcttttcgctaatcggatatctgacctttttgatgcgaagaaaaggggggtcatcgactttggtgactttgttcgagctttaaatgtatctcatccaaacatcccaatggaagagaaaattgatttttccttcaagctatatgatatggacaacactgggtttattgaacgaaaggaggtaaaacagatgttgattgctcttctaggtgaatcagaaatgagattatctgatgagatcattgagacaatccttgacaagacgttctcagatgctgttacttatcaggatgggcgattatatagaacctagtgtgagaatattgtctcaaggaattcctctttatttgaa

SEQ ID NO: 411153 - DNA, 484 bp, Oryza sativa
tctttagggggcgggcgtgcgtgcgtcgtcgatcgtcgacagtcgtctcttgccaccatgtctttcaccggcacgcaggacaagtgcacggcgtgcgacaagaccgtccacttcatcgacctcctcaccgccgacggcgtcccgtaccacaagacctgcttcaagtgcagccactgcaaagggattctctcgatgtgcagctactcgtccatggacggcgtcctctactgcaagacccactttgagcagctcttcaaggagacggggagcttctccaagaagttcgcgccaggttgcagatctacagacaaggaactggcaagggccccaagcaagatatgttcagcgttttctggaactcaggataagtgtgcagcctgccagaaaacagtgtacccactagaaaagctaactctggaaggtgagtcataccacaagagctgcttcagtgctctctggaggctgcatctgacccctcttctac

SEQ ID NO: 411154 - DNA, 512 bp, Oryza sativa
cacgacgatcccaaataactaaacatagagaaaagatgcatgcaggtcacgacgatcccaaataactaaacatagagaaaagaaacataagatccctaagcatagattacacatatctccccactgttcaaaatgttacacataagatggcgcgaataagcaatcagtggggagaccaagcaatacatttcttgcatttagcaacctactgcaagaccagactaaattatcaagcccatagagctacaagcttctaaacacacaaatgctaattaaatacacaggcagctaaacccagttccttcagttcatctctcacgaagtcggattataacgaaggcactgctcgtagtagctaataagcagcaagggattatttgctttcaattctttgtcgtccaccatgacttcctgcccatcagacctgagtgctttgaatgtaattgaaacttgctgcacatcgttgttcacagctgctgcaaatcgcactggcttgatgatcttgggatatg

SEQ ID NO: 411155 - DNA, 483 bp, Oryza sativa
ttttgaatttgttcatttcctgaaaaatcccaagaaatatgaagaactgggagcaaaaataccaaagggtgctcttcttgttggtcccccaggcacaggaaagactctccttgctaaagctactgcaggagagtctggtgtgcccttcttgtctatttctggttcagacttcatggaaatgtttgttggtgttggaccatccagggtgcggaacttatttcaagaagctcggcagtgttcacctagtattgtattcattgatgaaattgatgcaatcggccgtgctagaggccgtggaggcttttctggtggacatgatgagcgtgaaagcacattgaaccagttacttgtagagatggatgggtttggaactacatctggtgttgttgttcttgctggtaccaataggcctgacatcctggataaggctctgctaagaccaagaagatttgatcgtcagataagtattgataaaccagacat

SEQ ID NO: 411156 - DNA, 491 bp, Oryza sativa
tctctgaccttttctatggcattccctggtcccagggaacacttgggtttcttgtttccgctgagatcaaactcattcccatcaaggaatacatgaggctcacatatactccagttaaagggtcactgaaggagatagcacaaggttattgtgattcgtttgcaccacgagatggtgatcctgcaaaggtcccagactttgttgagggaatggtgtacacagaaaatgagggtgtcatgatgactggtgtttatgcttccaaagaagaggcaaagaagaagggcaataagatcaactgtgtcgggtggtggttcaagccttggttttaccaacatgctcagacagcactcaagaagggtgagtttgtggagtacattccaacaagagagtactaccaccgtcacacccggtgtctgtactgggaggggaagctgatcttgccattcggcgaccaattctggttcaagttcctcttgagctgctgatgcccc

SEQ ID NO: 411157 - DNA, 491 bp, Oryza sativa
tttatgcaagaatttaaggaaactggagataagagatagcccgtttggtgatgctgcactcttggggaattttgctaggtacgagacaatgcgatccctttggatgtcatcttgcaatgtcacgttaaaggggtgccaagtccttgcgtcaaagatgccgatgctcaatgttgaggtcataaatgagcgggatggtagcaatgaaatggaggaaaaccatggagatctgcctaaagtggagaaattatatgtgtaccgcacaactgctggggcgagggatgatgcaccaaattttgttaaaatcctatagagctagctgagagtagcaaggaatcctcttatttcataagatggtcggcggaatctgggaggaggccggggccgcggcaacagtggtaagctcttcaagtgtctcctcctctcctttgcagggacaggaaaaaccacgttggtgtgccttccttatctcggagcatctggcctgggatcat

SEQ ID NO: 411158 - DNA, 490 bp, Oryza sativa
tgagagagagactccccctcactccttccccgacgacctgctcgatccgatccaatccgctcctctccagtccagatcggaaggaagccaggaatggggcacccccacccccacccttacgcgccggcggagcttcacctcccgggcttcgtgcctctccaactgtcccaggcccaaatcctcgtgccctacctcgccacctccctcttcctcctcctcgccgtctggctcatctccgggagatgcagtcgtaggctttccgacaccgaccgctggctcatgtgctggtgggccttcaccggcctcacccacattatcatcgagggaacctttgtctttgctcctaatttcttctccaaccaaaacccttcttacttcgatgaagtttggaaagagtacagcaaaggtgactccagatatgtcgccagagaccctgctactgttacagttgaaggaattacagctgtcttggaaggccctgcttcactcc

SEQ ID NO: 411159 - DNA, 495 bp, Oryza sativa
tttggttcaccctctgaaggtttctctggaggaattgtacaatggcacatcaaagaagctctccctttctcgcaatgtgctctgctccaagtgcaatggcaagggctcgaaatctggtgcttccatgaagtgctctggttgtcaaggttctggtatgaaggtccaaattcgccagttggggccaggaatgattcagcaaatgcaacatccctgcaatgagtgcaagggaactggtgagaccatcagcgacaaggatagatgcccaggctgcaagggtgagaaggtggcgcaggagaagaaggtttttgaggcggtggccgagaagggcatgcagaatggacagaagatcaccttccctggtgaggctgatgaagcgcccgatactgtcactggagacattatcttcgtcctccaccagaaggagcatcccaagttcaagagaaagggagatgacctcttgtacgagcacaccctgaacctactgaggccctttgt

SEQ ID NO: 411160 - DNA, 484 bp, Oryza sativa
ttggatcggctgaccaagaagatcatagatgagcatgcgaaggccctcaaggagagtggtgccaagcagcactttgtggatgctctgttcactctcagagaacagtatgaccttagtgacgacacagttattgggcttctatgggacatgatcactgccggaatggacaccacagtgatatcagtcgagtgggcaatggcagagctggtcaggaaccccagggtgcagaagaagctgcaggaggagctggaccgcgtcgtcggccgcgaccgcgtcatgtcggagaccgacttccagagcctcccttacctgaacgccgtcgtcaaggagtcgctccggctgcacccgccgacgccgctgatgctcccgcacaaggccagcacgaacgtcaagatcggcgggtacaacatccccaagggcgccaacgtgatggtgaacgtgtgggcgatcgccagggaccccaggtgtggagcaacccgttgag

SEQ ID NO: 411161 - DNA, 506 bp, Oryza sativa
tgtcccctgaccgccgtggtcgccgcggctgcggctgccgctgcggcgggggactcgacgtcggccggcgtattccacggcgagtgcttcgtcgtgggggataacatcgacaccgaccagatcatcccggccgagcacctgaccctggtcccgtccaagcccgacgagtaccgcaagctcggctcgttcgccttcgtcggcctccccaccgcggcctacccgacgccgttcgtcgcccccggcgaggagaccacccgctacgccgtcatcatcggcggcgccaacttcggctgcggctcctcccgcgagcacgcgcccgtcgccctgggcgccgccggcgcccgcgccgtcgtggccgagggctacgcgcgcatcttcttccgcaactccgtggccaccggtgaggtctacccgttggagctagcggacactggagcctggaaggagtgcaagaccggggatgtggtcacggtggaacttgataattgcgtcatgatcaccacaca

SEQ ID NO: 411162 - DNA, 484 bp, Oryza sativa
ttctcatacagttttcaaggccatgagaagacacagggttgagcctgatctctgttcttacacaacaatggtcttagcttatgtgaatgcttctgacatggatggggctgagaaattcttccgccggattaaagaggacggtttgaagccaaatgttgttgtttatggaactttgatgaagggctactcgaaattaaataatgttgagagagtaatgagagtgtacgagagaatgcggatgcagggtgttgaacccaatcagactatttatactaccatcatggatgtgcatggaaggaactctgattttggaaatgctgtcatctggttcaaagaaatggaggctcgtgggtacccagcagacaagaaagcaaagaatatccttctttctcttgccaaaactcctgaagaacaagaagaagcgaatgaattgacagggaattgtgcaattcagctggaagcaaaacccgatggaacaacatat

SEQ ID NO: 411163 - DNA, 449 bp, Oryza sativa
tttcattgggagcataacatggaataaattaatggtcaaagtatgttattgaacaccgtgtaaaaaatatatcccttaaaaaatacatgccttcagtaataataggttcaaagtatgttattgaacaccgtgtaaaaaatatatcccttaaaaaatacatgccttaagtaataataggttcaaagtatgttattgaacaccgtgtaaaaaatatatcccttaaaaaatacatgccttcagtaataatagcagtcaagcaacatgctttggggttgttctccatttaagaaattgaggtggtctataacttgggcagtgtaaatattgaagcatcaatgacagatatgcgcaatggaacaccaccacatcagttttcttccgttgctttgtataccctataccatttttgaagatcactattataccaaaccaactgctaacattttttt

SEQ ID NO: 411164 - DNA, 475 bp, Oryza sativa
tgcatgcgattcgctcctatcctccggaacccgcgccgccgccgcctcctccgctccgtaaaccctagcctcgccgccatgtcgccgccggccgccgcctacctcgccaccgcctccgatcccgacgaggacctctgcttcaccaccgaatcggtcgcgcccgcggaggagaccgccccgcccttgcccgccactccgccgccggtgtccgcggaggagagggtggagcgcgcgtgggcgcactggaggcggctgggctccccgaagatggtggtggcgcccatggtggacaactcggagctccccttccgcatgctgtgccgccgctacggggcgaccggggcatacacgcccatgctccactcccgcatcttctccgagaacgagaagcacagggccatggagttcaccacatgcaaggagggaccgccactctttgctcagttttgtgcaaatgatcctgacatttcgttac

SEQ ID NO: 411165 - DNA, 449 bp, Oryza sativa
tctaagaaaaccgagcaagctcagctcaactgtcacggtgtcacctgtcagcgcccacaactgctcgctccgtcctccaaagcccgcgagatccaaagccgaacgccactagctagctgagagagaagcgccggccggcgagggggctagcgcgcgggaatggcggcgggcggaggcggcggctacagggcggaggacgactactactacctgttcaagacggtgctcatcggcgactccggcgtgggcaagtccaacctgctgacgcgtttcaccaagaacgagttttgccttgagtccaagtccaccatcggggacgagttcgccacccgcagcatccaggtcgaccgcaaggtcgtcaaggcccagatttgggacaaccgcggccaggaaagataccgagctttacaagtgcctattacagaggagcaataggtgcactgcttgcc

SEQ ID NO: 411166 - DNA, 481 bp, Oryza sativa
tctcccaccgcctcctccaccccctcctcctccccccgcagagccgaaaccctaactccgccgatctctccaggtgcccaaggggagggaggggatggcggcggcaccgggggcgggagggcagggcggcggcgggatggacgccgtcctcctcgacgatatcatccgccgcctgctcgaggtgcggacggcgcgcccggggaagcaggtgcagctctccgagtcggagatccgccagctctgcactgtatcccgagaaatcttcctcagccagcccaatctcctcgagctcgaggcgcccatcaagatctgcggtgacatccatggtcagtacagtgaccttctaaggctttttgagtatggtggttttcccccagaagccaattatctattcttaggtgattatgttgatcgaggcaaacaaaagttggaacaatatgccttcctcctgcatacaaaaaaagtccccggggattttttt

SEQ ID NO: 411167 - DNA, 447 bp, Oryza sativa
tgagaggaggcggcccgtccggcgtcgaggtgggcggcggcggatgggggactccggcggctccgtcgtgtcgatcgacgtggagcgcatctccttcggcggcaaggaacatcatatacataccaatcatggacccgtatctgttgcggtgtatggtgaccatgacaagccggctcttgttacttatccagatattgctttaaatcatatgtcttgcttccaaggattgctcttctgccctgaagctgcttcattgttgcttcacaatttttgcatttaccatatcagccccccaggacatgagttgggggcagctccaatttcgccaaatgctcctataccatctgttgatgatttggctgatcaggttgcagatgttctcgatttctttgggttaggttccgtaatgtgcttaggtgtcagtgcgggtgcttacattcttactct

SEQ ID NO: 411168 - DNA, 372 bp, Oryza sativa
tttcgtccatggatggggttctttactgcaagacccattttgagcagctattcaaggaaacaggcaccttcaagaagaacttcccctcaggtacaaaggcaaacagtgaacaggctaagattcccagcaagctgtcctctgtgttctgtggaacccaggacaagtgtactgcctgcaagaagactgtgtatccattggagaagatgaccatggagggtgagtgttaccacaggacctgcttcaagtgcgcccatggcggctgccttctgacgaacgccttctacgcctcgcacaacgggatcctctactgccagaaccacttctggcagctgttcaagaagtccggcagctacgacaaccttgtgaagcccg

SEQ ID NO: 411169 - DNA, 485 bp, Oryza sativa
tctgatgggaagatttgatctttcccacagggtagttctcgcaccactgacaaggcagcgatcctatggtaatgttcctcagcctcatgccattctgtactatcagcagagaacaaccaaaggaggccttttgattgctgaggccactggaatctcggacactgctcaagggtacaaagatactcctggtatttggacaaaggagcaagtggaagcgtggaagccaatcgtagacggcgttcatgccaaaggaggaatatttttctgtcagatttggcacgtaggaagagtctctaataacacttttcagcctaatgggcaggctccaatttcgagcaccaataagtcactaaaacctgcagtaagagccaacggcatagatgtggctactttctcaactcctaggcgattagagactgatgagatcccttttgtcgtgaatgattacaggggttgctgctagaaatgcaattgaagcaggattt

SEQ ID NO: 411170 - DNA, 495 bp, Oryza sativa
tttgtcaacaaggctcttaacatggtctgctgctgggtggaagatccaaattcagattcattcaagcggcatcttgcaaggatacctgatttcctgtggctttcagaagatggcatgaaggcacagagctgggaaacagcatttataattcaagcgttttgtgctactgatcttgtaaatgagtatggttcaactgttaggagagcccacgagttcatgaaaaattcacagattatgaggaatcatcctggtgaccaaagttactggcatcgccatagatcaaagggttcatggactctttcgtcagcagacaatggatgggctgtgtctgacactacagcagaagcgctgaaggctgtactgttactggaaaagatctctagcaacgtggtcggggatccaattgaaatagaaaggctgcatgatgctgttgattgcctcctatctttcgtgaacaaagatggtaccctttctacatatgaatgtaaaagaact

SEQ ID NO: 411171 - DNA, 424 bp, Oryza sativa
accaacagatctgcacctgcttttttattccaagctatatactgtagtaaataaacagtcttgtttgtatggtacaaagcacaaacaccacttgtggtgggtacctttaggatagttctacttgctcttttggcatagaagaactaagctacacggccatgatttaatcatcaaagtagttataagtagaaagtctgacgaataaaagttcaaacttcttatttcgagcaaaatatcctcctccacctccattgttgtatggagtatgcatacaatctttaccagattttatcagagcaccgtggttgatagctgcgcataccaatgcttcaatcgctcttattcaaagtaaaaatgtataaactttgtatcatgggatcctaacatgtcccctgcccttgccctattcattccttcataactt

SEQ ID NO: 411172 - DNA, 351 bp, Oryza sativa
tttttcctaaaaaaataggggggaaggtttatagatttttttcatgagaactatgaaacaaaatggagagccaagttagatgatgcaggaatatggtacgaacattggctgattgatgatatggtggcctatgcccttaagagtgaaggtggctatgtttgggcttgcaagaactatgatggagatgtgcagagcgatctaattgctcaaggttttggatcgcttggtctaatgacatcagttctggcgtgccctgatggtataaccatttaagctgaagctgatcatggtacagttacacgccattacagagttcaccaattaggaggcgaaactagtacaaatagcatt

SEQ ID NO: 411173 - DNA, 475 bp, Oryza sativa
  unsure (1)..(475): unsure at all n locations
tgcgtcttcgtactcgcctctctccgcgccctcctccgccgccgctcgccgccgttcgtctccgccgccaccgccgccgccatgagggagtgcatctcgatccacatcgggcaggccggtatccaggtcgggaacgcgtgctgggagctctattgcctcgagcatggcatccagcctgatggacagatgcccggtgacaagaccgttgggggaggtgatgatgcttttaacaccttcttcagtgagactggtgctgggaagcatgtcccccgtgctgtcttcgtcgatcttgagcctaccgtgattgatgaggtgaggactggtgactaccgccagctcttccaccctgagcagctcatcagtggcaaggaggatgcagccaacaactttgcccgtggtcactacaccattggcaaggagatngttgatctgtgccttgaccgcatcaggaagcttgccgacaactgcactggtc

SEQ ID NO: 411174 - DNA, 411 bp, Oryza sativa
gtccaacccgacgaggcccgtccgccgcatgctcgtcttcgggctcggcctgatgttcatccagcaagccaccggcgtcgactgcgtcttgatgtacagcccgcgggtgttctagcgcgcgacacttacgagaaagagccactggctggccgcgtgcatggcggtcttccggtgcaagatcctgttgatcctgatcgcgacgctcctaaatggaccgcgtgtgtcagaggccgttccagctcgccagcggcagctggatgggcatcttgctgttcaccctggccacgtgcctgctcatgatggaccggcggccggagggccaggcgaacgctcttggcgccttaagattctctcgaagctttcgttcagggcgttctttgccttcgggcttggccccgtcccttgggtgtc

SEQ ID NO: 411175 - DNA, 365 bp, Oryza sativa
aagcaaaatcttcactgttatcatggcgtgcacttgtacaaactacaaacaccctgttctttcaagggcagactacatcagggtatacaatctcctcaaaacaagcatcatatgctactaccggttgcgtcaagttacaggttacagatctctactcgaaacagcgcgaagttcgtagcagaaaggctatggtagcataggcgttcgtggcgcctgcttacgtgaaggtgtcctccctatcaccttctgcgacctcgccctcgtcgatgttgctgaactcgaggaaatgcgttggccgatggtccttgtgatagaagtcccggggcgtgccaagcttcatgttgtacttcatcagcgggtcgtgc

SEQ ID NO: 411176 - DNA, 506 bp, Oryza sativa
ttgacgcgtgggcaatggtgctatttttattttcaatccaagaactggtcaactatttctgaaggtcatccacacaagtgtatgggctggacaaaagcgtcttggacaactggccaagtggaaaacagctgaagaggttgctgcattagttcggtcgcttcctgtagaagagcagccaaagcaaatcattgtgacaaggaagggtatgttggatcctttggaggtccatctgcttgacttccctaacattgtgatcaagggcagtgagctgcagctgccattccaagcttgtttgaagattgagaagttcggtgatcttattctcaaggccacagaaccccagatggttctttacaacatatatgatgattggttgaaaagtatctcatcattcactgctttctctcggattgtgcttatattgcgtgcacttcatgtcaataatgagaaggcaaagatgctgctcaagcctgacaaaactattgtttactgaccacattatattt

SEQ ID NO: 411177 - DNA, 367 bp, Oryza sativa
gcactggtcactgctccaagcagcaccagcctaacagttcaaaccaaattggctggaggcttcgacaagctgctactcgacagcctttacgaagacgagacgaggcggcggcagatcgccggagtcacctacaccggaaggattggaggaggagcacccaaccctttcgacaccaacgatccatttgctacggggagcagctttttgcccccatcccatgtccagtttgtagtgcttggccagcagccactgcagtactaccacgctgagcaccaggcccactacataccagcctgatatttccaggatcatgaacgtcgccatcacatgcctgttgcgacccattattgacaagattagattttac

SEQ ID NO: 411178 - DNA, 339 bp, Oryza sativa
tttcgctcgccgccgatcggatcgcgtggggggatcattacatctctgcagagatgaaagagatcctgcacatccaaggcgggcaatgcggcaaccagatctgtgccaaattttgggaggtggtgtgtgatgagcactggattgacccttccgggcgttacacatggcactcatatctgcagttggagcgtgtcaatgcttacctaaatgaggccctatgcggtcgtttttgtgccttgtgctgttctcatggacctttagcccttttactatggacagtgtcccaactggaccttatggccagaacttccccccatgaaactttttgttcgggcaatc

SEQ ID NO: 411179 - DNA, 502 bp, Oryza sativa
ttataatcctccccttccttgcttgcaatcctagcaagctccaagatcgcggcaagctagcctcgagggaggcccgcctgcccgggcctcgggctccgggggcccggttcttgaggtttcttggtcgtggggtcgaggaggtggtgggtggtggtggctgcggcttggcgcgatgaacaaccacgcggcgggcgggagcacgagcaacggcggatccggggtcgacggggatggcggcggcggtggcggcgcggccaggaggaacaccaagatgcccaagtattccaagttcacgcagcaggagctgccggcttgtaaaccaattctaactccaaaatgggttgtatcggtgtttttccttgtcggcgtcatcttcgtaccagttggtgttgtttcgctgctagctgcacaaaatgttgttgagatagttgatcggtatgatgatgcatgcgtgccaaccaacatgactgataacaagcttgcttacatcaaaaaccaaaca

SEQ ID NO: 411180 - DNA, 442 bp, Oryza sativa
gctgttttgatcgatccagcaactagatcaacagtgctagctaggaagcatggcccgtgcacagttggtgttggtcgccctggtggcagctctgctcctcgccgacccgcacgccgtcgtggccatcacctgcggccaggacaactccgccgtcgggccctgcctgacctacgcccgcggcggcgccgggccgtctgcggcctgctgcagcggcgtgaggagcctcaaggcggcagcaagcacgaccgcagaccggcgcaccgtctgcaactgcctcaagaacgcggtccgcggcatcaaggggctcaacgccggcaacgccgtcagcatcccctccaagtgcggcgttagcgttccctacaccatcagcgctttcatcgactgctccagggtgagctgagccatcgatcagagagacggatcatatatatacagcagcgcg

SEQ ID NO: 411181 - DNA, 400 bp, Oryza sativa
tcgtgctgttacttccccctcgccgagagagctgggagggttttcgctgccgaatttttttttaattcggggggagagattcgaagaggcggcaccatgttggtctaccaggatctgcttaccggtgacgagctcctgtcggattcgttcccctacagagagatcgagaacggtatcctctgggaagtcgctggcaagtgggtcgttcaaggagctattgatgtggacattggtgccaacccatcttctgagggtggtggtgatgatgagggttgttgatgaccaattttggtatggtggtcgacattgttgacacattctgtttttaggagctacctacttttgttatgacgctgttttttgccctttatgtaacgcttccttaaaaacctttttcttt

SEQ ID NO: 411182 - DNA, 285 bp, Oryza sativa
ttttgggcaatgatgacagtaatcttcttctgggctgcatataagacagactttttcccgagaatatttcatgttgaaagcttttgaaatgacagctcaagatgattttcaaaaaacttggctatgctgttacctacaggtagcaccttagcaagctttattttgtcacagggccccgccgttgccatttgggggtgcccctggatttttgggagcctctgggtttttgggtgcaccaccgcataccggcgcaccggctgcaactgcctcaagaacgcggaccgc

SEQ ID NO: 411183 - DNA, 428 bp, Oryza sativa
aggttggaaatgcaactatcaaactggaacttttgagataaagcaattatcaaacacaagacattattttgtctcacagacctctgctttgctcatcaaagaaccccttttgttcacttgaagcatactagcctttttctggacatgacacccttgcagaagaaagaacatccgcgccgggttttctttttattcctgtccctctgctttggtggaggcttgattactaccttgatggcagcatcaaacacagcttttacattctgctgtgtctttgagctgcattcgatgtaacacgttgcgccaatgtgcttgcggagttcctctccctgtgctgtagtcacaggcaccaagctaggatggtcaagcaagtagtgtttattttacgaagaaccaatttggttccaaacaaaaaaattggcacccct

SEQ ID NO: 411184 - DNA, 490 bp, Oryza sativa
tctccctctctctctctctagcctccaaccatcgcttcacctgctcctctctatcaagttctctcccctctcttgctgtctctgcttgctgctgctgctgctcgattcggccggcggccatggcgtccagcgcgtcgcggttcatcaagtgcgtcacggtcggggacggcgccgtcggcaagacctgcatgctcatctgctacaccagcaacaagttccccactgattacgtacccactgtttttgacaatttcagtgcaaacgtggtggtcgacggcaccacggtgaatttgggtctctgggatactgcagggcaggaagattacaacagattgaggccgcttagctaccgtggcgccgatgtctttgtgcttgccttctccctagtgagccgagctagctattgagaatgtcatgaagaagtggttaccagagctttagcattatgcaccaagggtgccaattgtgttggctgggcccaattggatct

SEQ ID NO: 411185 - DNA, 466 bp, Oryza sativa
tctgcctgtattctcaacgatctgaaggcctgttggcctggattgttgtgaattgggctgagaaagtccctttgaacctgaacaggataatgcctgcgaagggagtgtgcatttctacttttatgtttccagggaactctcaacacaacccctttttggtgggagatcgagctatccaatatgttcctgaacgtgtgagctcagcagctggatatacctgtttcttacaactgaggtaacatggtaataatacttcatttggtaagtggcatgctgacatttcttcaacaggagaggatttctgcagataccacttcgtaatgtcccataactgatttagtcatacatttattatccgtgttaatttgcaaagcgttggccatgtcctatgcaatttgaatttaaaccatttatttggccatatttattaaagtttaaaccattttaaaccttcttatggacattt

SEQ ID NO: 411186 - DNA, 497 bp, Oryza sativa
tctagtaatgaacttgatattctagaaattcgctacggtgagctccttccgtatgttgacaggtttgtcatccttgaagctaatgccacattcactggcatcccgaagtcactctctttcttggaaaatatcaatcgctttgcattcgctggctccaagattgtgtatgacatgcttcctgtcatggaaatggatcccggttctcaccgtcagcccttccatgttgaggccggccaccgtcgtgcgcttaatatgctgctgcgaagatcaggcattgctgtgggggatgtattgatcatggctgatgctgatgagatccctagccctgagacggtgcagttgctcaagtggtgtgatggaataccgcaagtcatgcatctcgagctgaagaactatatgtactcctttgaatttcctataaactacaacagctggagggccacagcacatgtgttcactgagcatacattgtaccggcacttccgtcagagcaacct

SEQ ID NO: 411187 - DNA, 464 bp, Oryza sativa
gctgtagaaacaaacccctctcactcccactacgatggatttttgcaagttccggccgtttagctcgttcgacacgaagacgacgacgacgaacgcgggagctccggtgtggaacgacaacgaggcgcttacagtggggcccatggggccgatcctcctcgaggactaccacctgatcgagaaggtggcgcacttcgcccgggagcgcataccggagcgcgtggtccacgcccgcggtgccttcgtcaagggcttcttcgagtgcacccacgacgttaccgacattacctgcgcctactttcttcggttcccgggcgcccagacccccgttatcgtccgctttttcaccgttattcacgagcgcggcaggccggagacgatccgcgacccgcgcgggttctgcgtcaattttacacccgcgagggcaactgggaccctctttggaacaaatttccccggttttt

SEQ ID NO: 411188 - DNA, 414 bp, Oryza sativa
tgttttaaccctagccgccgccgccgtcgccgccgccgccgccatggccacccaaacccgccccctcgtctccgtcaaggccctggagggcgacatggccaccgacaacagcagcagcctcgccctcgccgaggtgttccgcgcgccgctccgccccgacgtggtccgcttcgtccacaggctgctctcctgcaacaagcgccagccctacgccgtgtcccgccgcgccggccaccagacctcggcggagtcgtggggcacggggcgcgccgtgtcgcgtatcccccgcgtccccggcggtgggacgcaccgcgccgggcagggagccttcggcaacatgtgccgcggcgggcgcatgttcgcgccgaccaagacatggcgcaagtggcaccgccgcgtcaacgttcaccttcg

SEQ ID NO: 411189 - DNA, 424 bp, Oryza sativa
tctgacgcgtggggctgtttttgagagcaatgctatcgcgcgctatgttgctcgcttgaaggacaacagctctctttgcggttcttctcttatcgactattctcacattgaacaatggatggacttctcagcaacagaggttgatgccaatattggaaggtggctgtacccaaggcttggttttggcccttatgttcctgtgcttgaggaatttgctattacctcattgaagaggtcattgggtgctctgaacacacaccttgcttcaaacacataccttgttgggcattcagttactctagccgatattgtgatgacatgcaacctatattatgggtttgttcggatcttgatcaagagtttcacctccgagttccctcatgttgagcggtacttttggacaatggttaaccagcccaacttc

SEQ ID NO: 411190 - DNA, 566 bp, Oryza sativa
tgttgcggccgcgcccgggaggcgcggcggcgcggcggggagggtctcgttccgcggggtccctgctcccatggtggcgatcagggcggaggcggctgccgtcggggaggacgagcgcgtcatcctccggcaccttcgccaagctcaaggagcagggtgaagaccgcattcattccattcatcactgctggtgaccctgacttgggcgacttacagcgaaagccgttgaagaattcttgatgcttgtgggttcgggatctgattcgaattggtgcgtgcctttacttctgacccatttggcctgatgggccccgttcattcaaggcttctggctacaacgtgcacttatcaaaaggtcaccacattttgaggatgtttatcttctatggtaaaggaggtgattacctgggctgtcctgccctgtagcgcttttttcacatattataacccgattctgaagcgtggcattgcaaacttcatgactgttgtaaaagaagccggggtccatggtctttgggtacctggtgttcctctggagagaccaattttttggggggtgaagctgc

SEQ ID NO: 411191 - DNA, 484 bp, Oryza sativa
ttcgccgccgccgcagcttcctcctctcgccatctcccgtcctctccttcaagtcagctacctgcttaatcaaccatgggtaaggagaagacgcacatcaacattgtggtcattggccacgtcgactctggcaagtcgaccaccacgggccatctgatctacaagcttggaggtatcgacaagcgtgtgattgagaggttcgagaaggaagccgctgagatgaacaagaggtccttcaagtacgcgtgggtgctcgacaagctcaaggccgagcgtgagagaggtatcaccatcgatattgccctgtggaagttcgagaccaccaagtactactgcacggtcatcgatgcccctggtcaccgtgacttcatcaagaacatgatcacgggtacctcccaggctgactgtgccgtgctcatcattgactccaccactgggggtttttgggctggtttctccaaagatggccagacccgtgagcacg

SEQ ID NO: 411192 - DNA, 383 bp, Oryza sativa
ttcctctctcgtggtgtggtgtggacaagagaggaaggaaagatggagggcggcgtttggggggaggtggaccacctcgccggcgagagggccaccgcgcagttcgacgttgaacacatgaaggttgcctgggctggctcccgccacgccgtctatgtcgccgaccgcatggcgcgcctcgttgcttccgaccccgtgttccgcaaggataacaggactatgctccccaggaaggagctgttcaaggacacactcataaaggcagcccatgcgtggaagcgtatcgtcgagctccgtcttacagaagaagaggcaaatttgctaaggctatacgtggaccaacctggttatgttgatctgcactggggcatgtttgttcctgc

SEQ ID NO: 411193 - DNA, 489 bp, Oryza sativa
ttcttcgattcgattcgattcgatcttctccacctcgtcgccgtcgaacgcaactcggatcgggaggataatggaccagccttctaatggcttcgccgccggaggtctttttcttcgtcacattgatgggcaaaatgcctctcccccttctgtcattgtgattggtggagggatttcaggcattgcagctgctcgtgcgctgtctaatgcttcgtttaaggtcacactattagagtcacgggaccgacttggtggccgtgtgcatactgactattcttttggctgcccaattgacatgggagcatcttggttgcatggtgtatgcaatgagaattcattggcaccactgattaggttgcttggccttagattatatcgcaccagtggtgataactctgtgctatatgaccatgatctggagagctatgctctctttgataaggatggtcgtcaagttccccaggagatagtgacaaaaagtcgggaaac

SEQ ID NO: 411194 - DNA, 435 bp, Oryza sativa
ttttccttcaactaaacttggatgagatgggcgtcttcggacagcagccagcggtgggcgctccgccggctcaggggtacccgtggttggactcgtccccgccgccggtgtaccctgggtgcggatactcaccgacggagcgtgggtaccatgctcagggataccctccacattaggtgcacctgtcgtagaagggctacgcgtcgccgcacgctgcagcacactgctgacgctataacaggagctccaccacagggggccttacttaacgaagggatgctagggtgcactatgaatgtgctgactgttggaggctctcttatgatcaatgatgctccagctgacaaaggtggtaaatcggacacgaacgctgggattgatgtgggagtattgctcctttgaaaaaaaacttatggtactgctggtgatggcatg

SEQ ID NO: 411195 - DNA, 481 bp, Oryza sativa
gcgatagtaatttggccacattagagtagctgctggtagcaaaaaggttgacataatagttatctttcacagtaccacatcgattgaaaggagaatacttggaggcgcgacagtttcctacaatcaaaccagaccaaaacattatactgataaaacagcctactcgtcctcctggctacggagccttgcaagcttgttggtgaccacgatgtcgagctgcgcagcacgctcaacgatctccttgcgcttcttcgtagagacgttgtgggcaatctcggcacagtaggtcctgttgtgcatcatgagcaactccagctcagagacattgtgcaccacaaacttcttgaacttgttggggaggtagtgcctggtcttcttgtctgagccgtaaccaatgttgggcatcaaggtgcatcccttgaactttctcctgacacgggagtcaatacccttgggcctgcgccagcttggcttgaggcat

SEQ ID NO: 411196 - DNA, 118 bp, Oryza sativa
  unsure (1)..(118): unsure at all n locations
gagcataaggcaaagctgcgagcgccagaacattttattactacaagcttcttggcgaaatgctacgagctactttatactccctntgcaaagaagaaacaccaagacctgtaattac

SEQ ID NO: 411197 - DNA, 474 bp, Oryza sativa
gcaggaacagcatcactctattccatgcatccattgattaactgaaaacccaatagcaatacagcatggactacgttacacactgtagcttgcagttcaacggattgaaatccagcgtacagtagtagccccccaggcaattgcaacagctacgtcaaaagcatgagtagttgcttcaaagaatggaagcaaagataggtacaaccagatccgtatcatagtgtgtcttcttgacattcttcctataacagcaagacagggaacaaacaatgtcaaataataaacgatggaggccgagaaggcgaacgtctcctcaggagccgcagcatgcaaatccagaagctgctggtttgtcggcaccctgatccgtcttgttgttaatcttgattgtcttgtcctcaggcttggagtcggtctcagcaagcctctgcttaatgtcacgtgcaatggagaaaaaaacttgctccacgttga

SEQ ID NO: 411198 - DNA, 478 bp, Oryza sativa
gaccatataaaatcagggactacatatcactagatcaggagaattgttacgttacggtacatgaatttaaagtacaaagacacagatgatcatcataaatctcgctgttaaaaattaagatacacgggtacatcaacctccggtgcagatgcagacattctgcaatgccaaactggctaagtatcagatgaaaaagacaaggatgatgcacagtaatcagcttgtccacaatgcaagacatgatttttgaagttagattatccgaacgatgccatctcgtatcattatcctgtttgcatcttgcatcctctccaaaatgaattctacttgacgtctattgtaaggtgcagctgcctctctattaacagtttgctcaatttcgtcaattgatatttgatcgagatgatttgccaacacatgctgaccaagaatcgcctcaaatgcttcaattctctccgcaggaacatcctgatcattc

SEQ ID NO: 411199 - DNA, 408 bp, Oryza sativa
atatcaatatccaaacggcagcttttcacataaataaaataaccgatagctcaagggtgagaatcaaaaaccgaaagaaattggttttttgagcagagtgcaaaacataaacaaaaatgcctgttgcaaattgcaagactacaggtaaacttaaatgccataaggagtttgtttggcagcataagatgaaactactgggataaggctactttttcactcgtcatccttttcctcgtcatcatcatcagcaccagctgaggagttgagagcattcaatttttcgacgagactggccttcctttgctcgtaggttagcttcttgagggtgtatcttttgtgggtagccggttccttcttggtcgatttggccatggtaggaacaccgcggatggcaagatggaccttttt

SEQ ID NO: 411200 - DNA, 432 bp, Oryza sativa
gatgacattagctactataataagtgcaaagcaaacaatttgtaagggcaccgagcagataaactgtctagaatacaaactacacggcagatctgtgacaaggttgatccaattctaacagagatccctcatttcaagtctggacacttttagaacacagaggtagctggaaacatgagcatcaagaggtgccatgacaaaaacgcgcagcttcaagcgatttacagcttggctggctgcctgttcttcttcttcacaccagacttggcaacctggaggctgcggtacactgagctaagccttgcaagagccggcttggtcagatctggcctgtagtagttgtcactaacctggttcttgacagccttagccatcttgcggaactccttgcgcatcacagacttgtggtagagcttagctggggcattctgc

SEQ ID NO: 411201 - DNA, 445 bp, Oryza sativa
caagaaaatcatcgaaaggatgatacttttatatagaacacaggtaacgaattacagagcaactaatccccctgtccatcatacacaagtgcaccttcttagttttagcatcggtacaagcacaattaagcatctaattcagatcctactagagatcaacgcaacacctaggcatcctagaacactactactactacacaacatatcatccatccatccactgcatccacatccaccgccgccgccatcgccgggaagcgtcagaatctagttgtcatcgtcgccggccgccgccttggcgctgccgccggccttcttggggaggagcaggttgtggatgttgggcatgacgcctccgctggcgattgtgaccgtgccgagcaggcgggatagcttcttctcgttgcggacggcgagctggatgtggcggggcactatgcgggtc

SEQ ID NO: 411202 - DNA, 468 bp, Oryza sativa
  unsure (1)..(468): unsure at all n locations
gacaaaacaaaattgaactattatatcatctagtagtaaaaagagtttgtatatagtatctcaatgcaagcccatctgccgggggtggttaatggacacaagatagatgggggatgaactctagcgattagcaccgcaccgacactggaaatccgctcaatcatcatcatccaggtaaattattgttgtggcctagcacattataaatagtatataataaatatatatattggagattctctgttaatcacacggngtatgactgctggatggtctcaagatccaagcccttctgcttcaccaccgactccatccgccccttcagggtggtcagctctctcaaccttgcgatttcggctctcctacgggcctcttctgcaagctggttgagatcgttgtagcttgccatgtcgcggaagacagccgcggtggcggctggctggagcccatggatggtcctctgagcag

SEQ ID NO: 411203 - DNA, 481 bp, Oryza sativa
  unsure (1)..(481): unsure at all n locations
ggaaggccttgaaacaaaacaaacttttataaataaaaatcagtcacagtggaatgttgatcccgtaggagatctgcaaattgttgcgttcgaattctaggattatcaaagacagcatctccgcagagtgaagatcaccacatggcaaccattaccacctgctaccgtctattctgaactcaaaattgaaacaaatcacagctcaagataggacagccatcacatctgatactctcaagacaatgtagttggtgccatcagctcccttgaactcactgcctgcgtacttggagtacatcacagtgctgcccgctgaaactgacaatggctgcctcttgccttcatcatcaagagggcctggaccaacggctacaactgttccgattgatggcttttncttagtggtttcagtgagaataaggccaccagcagttttgtcttcagncttagnaaccttgatgagaacccggtcattaagggg

SEQ ID NO: 411204 - DNA, 471 bp, Oryza sativa
ttttttttttttttttcttttttttttttttttttttttttttttttttttttttttttttttggaatctttcgaaatatcaaaaataacttttttggcactgaaaaaaccccatggatgctgctaactcacaatgatatgggggctaaaggaaatgtaccgttgctgcacaatacaaattttgggggatgtaaaactaacagggtccaacacaaatgaaaaatagcaggggattcacaagccgtagttaagctaaactgtcgaaaactttttttccggggaaaaactttggcagctgcctccacggttttttcgatgccctgggaggggtgtgccaagctgggaaaacctgcctaaaactgggatggggctaggtacacacctttttaaagcatgccccggtagaacctcccaaacttgggggtgtcactttttttggggtcaccaaagttgtgaactgggccagcggtg

SEQ ID NO: 411205 - DNA, 472 bp, Oryza sativa
  unsure (1)..(472): unsure at all n locations
aaggcgcgcaaaaagagaaggtttcatcagtttttagtaatgctcacgatcgatgacacaacgacatcaaattcaggcaggcatttttgctcccagaaaaaaacttccacgctcacattccagcgtgtctaattaaataaacgagttatgaggtcatggcaaacaacccccagttactcctcgagtcgagccgtccaagttactcctcaagccgtccgagtatgtcgtgctctctgaaaagaaggtactctttctcagcaagcttcacttcagttcctccatactcaggtagcagaacggtgtcaccttctttcaaagatacagggatcagtttgccatccctgtcacgttcgccaggaccaacagccactacttttgcagaattcagctgcttggtggtctccgggaggaggatgccgccggcgctcttgttgggctgcagcagnttttncaccagcacccggttcatcga

SEQ ID NO: 411206 - DNA, 499 bp, Oryza sativa
  unsure (1)..(499): unsure at all n locations
agatccaaacatggtgttgaactttgcttataacgtttaatataatcatttgcgttccttcaaatcacgcttgcgccacgcaacatcaaaattaagcgttttgtgggagcatgtccacccacatctgaccgtggggaattattgctcaaaccctacgagcaaatctaaagcaccatcttcacaaaatttacggaaacgaagtggttctattcccatctagtagggctccactggtgcacggaatttggctccggcatagacggcagcagcaccaagctcctcctcgatcctaagaagctggttgtacttggcaaggcgctcagatctgcaaggagctccagtcttgatctggcccgtggataaaccaactgccagatcagcaatgaatgtatcctcagtttcaccactcctgtgactggtcatcacaccccagccagcacgttttgacatcttgacagcctcaatgctctcagtaacagatccaatttggntaccttaa

SEQ ID NO: 411207 - DNA, 422 bp, Oryza sativa
  unsure (1)..(422): unsure at all n locations
ctgacgaattcttttattttttgtgatgcaagtacaacaaaacccactctcacaccacaaagtcacaagagtccatgtaaaccgagagacccccttccaccgaccttacaaacttgcggtttatctaccgtgctagattcacctagcaggctagcccgatcagtactcgccctgttcctcgtcgtcgtcctcgacttcggcgccgacctcctcgtagtccttctccagcgcggcgaggtcctccctggcctcggagaactccccttcctccatcccttcgcccacgtaccagtgcacgaacgcgcgcttggcgtacatgaggtcgaacttgcggtcgatccgcgagaacacctccgccaccgccgtgttgttgctgatcatgcacaccgncctcctcaccttcgccaggtcccctcccggca

SEQ ID NO: 411208 - DNA, 500 bp, Oryza sativa
  unsure (1)..(500): unsure at all n locations
cgataaatattgcttcacttgtacaaagtacagataaaaatacattgatacatgacacggagagagccatgcacaccacttatttggacacacagagggcaaggctgcagagaaaatcaagcaacacaagctgaactcacggccccacctgtcagcctctcactggtcgaggccggagactcttgtgaaaaacagcaacaccacgcatgcagaagaagacaaattattacacacacaaatcgacgacacggcggccggcgacgtacggcgaggtcgtcgccgccgccggcgacgttgtgatgaggtcgatcagccgaagaggtggtgcttcttctcgccggtggactcctcggcgctcttgtggtccttcttcttctcgtggtgctcgtggaaggcgtagccgccggcgccgaccgccgccgtggccgcgatctcctccgtgatcttgtgcctgtgngcgttttncgggtccttcttcgcctcgtgcttctcatacaggg

SEQ ID NO: 411209 - DNA, 471 bp, Oryza sativa
  unsure (1)..(471): unsure at all n locations
cagttctaccatcgaatcataaaatgttctaatgacgatactgagacttcagatcgattacaaaatctgtgattttgtcctgacagaacggtgtctccttgttcctttggcatctatcagactttctagaccaacaagagctaataataagagcattgtgcggtacataagcagactagtttaaccatctaactctagtaattaattaccaaaagatgcaaatatacacaagaactttgcatctaactctaccagcacattcagactccaaaggttgccagcttgaggttgcacccagaacattgcatcatgtaagggacatctcgatcaatcaggatttgaagcatgacattttccttccacggaacatgttcatcatagagcatccttgtcgngatttctttttcttcttttccctctgcttagttggaggctggattactaccttgatagcagcatcaaacacacctt

SEQ ID NO: 411210 - DNA, 498 bp, Oryza sativa
  unsure (1)..(498): unsure at all n locations
gatgcaaacatgcagttgttttttccctacgtagacaacaaaacatataggatttctgaaatttactctaacaaaaatatgggtctcgactctcgagtcacaaagtacaatacaattcagttcaagcggccaggacattaataaaattgaagttacaatcaggacccaaactgctgtcagaaatgcagatcagaactcggaaatcaatctacaatgaatagttggtgacggtaatctgctaaccatcagttatgtgctttcaaagccaaatattcggaaaacaccttcatcagcctggtacttgttcttgtcgtctcctgcgtaagccaggaggttgtacttggggttccattcaacactattcatagctgccttgcatggaatctgatgaatcgatcgtccagtttgaacattggcaatgtcaatgaagggatcttngctagcatatgcaagaaactctccagtatgattgaagctaactgttcttacaggccactc

SEQ ID NO: 411211 - DNA, 418 bp, Oryza sativa
aaaaattaaaggagtatataaaccggttccgtaaatatcttaaggcgagatatacagatgccaaataggtgtacagtactcgaaattacaaagattataccagtataattaatcgttgggattaagagcatgaacgacccagttacgaggggtgcacggagtacgtgtgttgcttgcgcgcgtgtggatcgacgagattcttttgcaaaaattacctaattaattaatcggcgtgctctctggcgtcgtcgatattgtttattgtttggctagagttcgccggcggcggcggcggcgaggtcctcacaacctggggaaggggcgggcgaggcggtcggcgtcggtgtagatgtgggcgcgggtgatgtcggcgagcgaggtgcatccgctgagcgccatggtgagctcgaactccttc

SEQ ID NO: 411212 - DNA, 479 bp, Oryza sativa
  unsure (1)..(479): unsure at all n locations
cttcttctccttcttctcaccttcagcggtggctacaggtggctcctcgctctccttggacttctttttctttttcttgccgccatcagcatcggccacaggagaatcctcgctatctttggacttctttttcttctttttcttctgaccctcttggtcaccatcctcttgaatggtttcctctgcacctgcaggctccgcctcttgatgtttcctcttctttgaagcaccttcaggcttctttggtgtttcttcagtggattgtccaagtaccagatcagccgcaggattgtatgtcttggcaggagtgattaaagccccagcacccttcttccggtccttttcatacacttctatcttgggctttcccttagtagaacctgcagacctgccaagttctttacnntnaagaacccgaagccgcgtctcaagcttgactcgactctcaagaccaatggagttatcttcaccatcaccat

SEQ ID NO: 411213 - DNA, 372 bp, Oryza sativa
atgggtaaaattaaaaaaggtaaacacaaaaaacaacgaattagaaagaccacattttcactagtctaaaacggctgaatgccagggctttacttacaccttggtcactgaaggtccccgaggggggggggggggggggggggggagggcctggggagggtgcctcatctctgaagcaccttgaggcatttatggcgttcccaaagtggatcgtcgaaggaccagaccagccgcaggattgaatgaaatggcaggagtgaacaaagccccagcacccttcttccggaccttttgatacactaatatcttgggctctcccttagtagaacctgcagacccgcacaaggtctttaccctaaagaacccgaaacc

SEQ ID NO: 411214 - DNA, 268 bp, Oryza sativa
gaaccgaactccaataggaggaggatagcttaatttgcacatagtaaaagagggatacacaactgagtactgaaattacaagtctgtgttcagataaaaacagtagtacaacaaacttgaagaggaacgtcgactccacaataattactaacaaagcaggcagcgggaaacagccgcgcccatcagaaacagcttgctctggattggcatcttgacagtgataatagctgatgcaggttacgacctgctcttgaatggaattgccctg

SEQ ID NO: 411215 - DNA, 480 bp, Oryza sativa
cttgcaagaaaatgccacagcaaattagcaataatcaaacactaggtctcgtatggatcattacaaagtacacaaatgtacaaattaaaacatcaaaagagttaactaagcttaaagcagcagctgacacataagttgcaaaccccaacttttttcagtttctgaattctggatggatcatatcagattcatcacagcatcgtacaatctgtgcaagcattggtacatcgagcgatggagagagagagtagtctacaatggcggctgggccattcacgagcccggcgtgaacttggtggcgtagacccaggcgttgttggcgacggggtcggcgaggtggtcgagcaggttctccaaggggcccttgccggtgacgatggcctggacgaagaagccgaacatggagaacatggcgaggcggccattcttgatctccttgaccttgagctcggcgaaggtgacggggtcgtcggcgaggcc

SEQ ID NO: 411216 - DNA, 409 bp, Oryza sativa
gatagaggagatcaaactgtgtttatagactgaactgaaacttgattatacagtttgccacgactcctaactcaagcccctatgacgtggatacatatgtacaaaagttttgacacctgagaaaatgatctagtttccctacatggatagctagctagtagctatctcatgtcatggagtgttgccaagaaggcgtccaacttgacattgtcacctcgagacaagaacttgatgcagatgggcgccctggcacccatgagtgtcagcatggacagcaagatcgagccgacgccgtcgccgcaaatgagccccgacgccagcgccggcgagagcatccgcccggggccggcgtccatcttctcccacaggtacgccaccaggctggcgatgcacatgccgacgggcacgc

SEQ ID NO: 411217 - DNA, 483 bp, Oryza sativa
acgacaaaccacgaacttggatattaaagatgccacaaagaaggttcacataaacaacacaggtcacagcagcgaaagctacaagcaaaccctgcataatcgaaaagcaaatgtttttcaaaaccagacacacaaactgatagatagaagcccacacggacagatcataggatagcagcagtaatcaagcattgccaaggcaccaggcaagaaccctgaacctctctagtactcgtcaccctcatcaccctcgtcaccatcgtcgaactcggagccgacctcctcgtagtccttctccagcgcggcgaggtcctcgcgggcctcggagaactccccctcctccatgccctcgccgacgtaccagtggacgaaggcgcgcttggagtacatgaggtcgaacttgatgtcgatgcgggagaacacctcgacgacgctggtggagttggagatcatgcacacggccctctgcaccttggccaggtc

SEQ ID NO: 411218 - DNA, 372 bp, Oryza sativa
gatctgaaactcacatgattataactcacgacaaaaggggctaaacatttttggtttggtagtaagttcaggggggggcataattagcattgcccaagctgcaggtagcttcagggaagtgaaggggaggaaaaagagtatctgttccagcacaaaactactagcattacataagcacataaaaaggtatgatccttttaaaacattttcccacgccaaaggtgaatggggggaaaatcttaggcggacttcacggtggcggattttatgatgtcaatgaattcaggcttcaatgaaccacccccgacgagaaaaccatcaacattaggttttgatgccagctccttgcagttcgtcaccagttccggaacc

SEQ ID NO: 411219 - DNA, 414 bp, Oryza sativa
aacaagggggggcaaaaattaaaaatttgggggggttttatattaaaaaaaacccccatgcaaggggccattaaccaccaacccagttttcctaatttaaggggaaaaaaaaaaaagggggacctttcctttttcaaaaccctcccaggtggttgggaataaaaaaaataaaaagggggcgggaacccacaccaacgcattgatcccgtttaaattgcccccaaaaaaccttaaattaaaaggatgaggaaaaggggtcaaaaatggggggggggaccgggtccctaagggggggggcccaattgttggggggccccttgccgggggggggggcctgcacgggaaaaccgaggaagggcaccatggggaggggggcgtgtttgatctcccccaggtgaagccgttcttttttta

SEQ ID NO: 411220 - DNA, 444 bp, Oryza sativa
agggaagagggatgttgcaacataacatattgactgaacacaggcagcaaatccacacaagattaatatcgttgcacaagaggttgatagagcattacatatttagatgaggcacacaaccaaagaagcagcagcagctgaccaaagtttagacccatacatagggcaaccagtcattgcatacaagatgatactagtggattatggcagcttctctttttctcttctgattgagcagagagatgccaccgccattatttcttgaggtgagggaagcacgcggtgaggtcgctcttcggatgcttcgcctcagcatgctctttgcacttggtctcagaggtggtgcagatgaaagtctgcatgcatatcttgcactggatgttcatggccttcttgttggcctcaagctggctccccttggcgcccttgttcttctccatgttc

SEQ ID NO: 411221 - DNA, 409 bp, Oryza sativa
gaaggccttgaaacaaaacaaacttttataaataaaaatcagtcacaggggaatgttgatcccgtaggagatctgcaaattgttgcgttcgaattctaggattatcaaagacagcatctccgcagagtgaagatcaccacatggcaaccattaccacctgctaccgtctattctgaactcaaaattgaaacaaatcacagctcaagataggacagccatcacatctgatactctcaagacaatgtagttggtgccatcagctcccttgaactcactgcctgcgtacttggagtacatcacagtgctgcccgctgaaactgacaatggctgcctcttgccttcatcatcaagagggcctggaccaacggctacaactgttccgattgatggcttctccttagtggtttca

SEQ ID NO: 411222 - DNA, 468 bp, Oryza sativa
cgcgaattaggcaataccataacgaggatgaattcaaccatagcaaatctttaatgttaaccacatagaggttcagattccagacaacaaaaagggctaatcagtaccaaaacattccgataagcatagacgctaattggattctccagttcaagaaacaagcattctagtaaccacccttgagatcattgaccacatcatacggaatgggggtaacagtctccagcgtagcaccctcaaccatgaaaccaggtttgggtccctcgggctgtctcttggtgctgataacctcaccacgggccttggcatcagccttgagctgatcgttcttgattttcctcaggcggagctcctcggtgcacctggatggctggacatgctccacacggacatggatcctcttcctgatgatgcggttaccgacctgcttgttgatctcgacgccgatggcgcgcttggtgacgttcc

SEQ ID NO: 411223 - DNA, 325 bp, Oryza sativa
aagtagcattatgctgtttatctaaccacgaatgcttccagtaaactgtctttaggggatgataaatagacttcataatcgcaaacagaaacaatatgtaggataagataccatgctccattacatcctaaataacccaccattacaaaattcagtctctcagaaaattgcaactcagaggatgatcagacacgggagacaagaaacagcacttcatgatactaggtgaagataggagtttacgcatcctctgtgatggtacccttgtcgctcacgtagataccatccaagaacttcctgatatccttgttcttcacgtggcatt

SEQ ID NO: 411224 - DNA, 483 bp, Oryza sativa
gccaagaaaccaaattcagattactgcttgcaaaccagcaagaatttcagccacagagtacaagaaatcctgcagtgccattctgcaagatgataaattcaggcaattcatcactacccagcagattactactgtttcttcccccaactaatctctgagaaaggcagcacactcatcgactcatcgtggggttggttattgaatctatcttctccaatcccggttgacggattaaccaaagcgaaaaaccgaaagaaattcagtgcatgaagtacaacagggagatgatcagatgactgacgagatcatgcttcccatcctctgagaacggtggcgcgagcgacacggttgacaccgagggtgaaggcgcccatgcggaggtcgcagtggtggctcctgcacatctccttcacatccctgaacccacgggtcatgtaggtcttcagctcattgttcaccttctcctcgtcccacatgaaacct

SEQ ID NO: 411225 - DNA, 474 bp, Oryza sativa
aataacacaaggcaagcatagcttaataaagaaagtaaatattccagtagtgtctccctctcccagctagcccaggaagcagcacagcctaacagctacaaaaatttccaaacatagttgcatacggaaaagagaaaaacatggaagccgtccttaaccacaattcaaatagaccccgtccttaccactcctcccaaacgagaaagttggtcatattaaaacaaaaacaaaaacaaacttttatccagaaccttacttcctaagacataatctagagaaggtcagcgacgttggccggcagctcctcgatggtcacattgtagaacctctggatgtcgaacagcatcctctcatcatcgcgggtgacaaagttaatggcaactcccttcctgccaaaccgaccactacgaccaatgcgatggaggtagttctcaggctgggtgggcaggtcgtagttgatgacaagggagactt

SEQ ID NO: 411226 - DNA, 478 bp, Oryza sativa
  unsure (1)..(478): unsure at all n locations
agatataaatcttatccatatccctgacggtccaataatcaccacatacatcaagagtgcagcagaccacaatctgtagaatctactaaaatcgaacataagttttttttggggtacaaatatctggtgataatcctccattccagaaaacatctctttccatgtagcaactacgagattgtaagacagtatttctttagagattgatcgcacaggacatcaaagttgcgatagtggcaggcattgaactgcatgctgtctcaccctctcatgcgccatcagtgagggtacgctttgatgtgctgatgtataaaacattgtttcctcgtatgaaagcgtcaccgtacttgttcttcagctgaccattgacatattcttccgtttgctccattgcaatgttcatgtaaccatcaagacaagccaaaataccgcggtagtcgacgccggagttgagcttgacgacgacggngcgccccct

SEQ ID NO: 411227 - DNA, 451 bp, Oryza sativa
gatgaaaaccacttcgagacaatttactcaggtagcaaatatttctcagccacaaatccaaacacttggtccttcctatcagaagatcagaatgaacaggttttcaaattcatctcccaactcgacgataatttacacgtacatttaacacattcttccacccttctcaaactcctcccttcttcttcccgggtaagattaaaattaacttgaggccagccagcgtcgccggcggcgagatgtttacaggctgggcgtcctctcggcggcgccggagatgacggtgagcaggttgttgccgaaggggtcgctgaggtgcttggagaggttctcgacggggccctcgccggtgacgtaggcctggatgaagaaccccagcatggagaacatggccagccgcccgttcttgatctccttcaccttcagcagcgccgcctggtccgggtcgctc

SEQ ID NO: 411228 - DNA, 162 bp, Oryza sativa
gaggatgcatgcgtgcgtacgctaggatgcattatatcgtgcggccgtcctttttttttttttttttatgttagaccttggtactatctaattttattcacttagtctggctatctaggttaaataccggctcgaactttaattcggatcgcctttccatat

SEQ ID NO: 411229 - DNA, 438 bp, Oryza sativa
cctagaagctcttttaaattcattcagacccttgaaatttcattgtttgccaagatagccaaacttggcattacaaaagctttgcagcattagccaaacacagcatgacaaaagaaccacaccatcagcctaaagcattacatcctttattctcttgaaattattctttacagcagtaaattatctcacaacctcgatgattttggagaagaaacacccgtattgaacttcttgatgtagttatagatgtgatcactgatttcctgtgctctctcctgctggatgaagtgcccagcacctttgattaccactacttcctcaagcataggaacatctttcttcaacctacccttgtgtatgtagcttttgactcctgggagatggtaaggccaggtcaccatccccgacaataaactttgttggcactagaacttttgc

SEQ ID NO: 411230 - DNA, 350 bp, Oryza sativa
cattccgattgatagcaacaagcagtttaaacaccataaccaaagcgaactcaattcatggtaacatcacggacgaagaacacctaacactggatggatggatagagggcttcttgactcgagagagccactggacacgataacgactcgactcgatgataagatgattctgacacggatagctaaggataactggccacgatgggccccaccaatcagttcctccagttcccgccggagtcgccgccgtagccgccgtcacggctgccaccgtagccgccgtcgtcgacgtcacggccgccgtcgtaacctgcgtcgtcaccgtagccgtcctcacggtgcccgtagcc

SEQ ID NO: 411231 - DNA, 450 bp, Oryza sativa
ctgcccagagatatcctttcattctccatgcttgggagaattcaagttacagagaaaatgtacattgggtgagcacgattacaacgcacgcctcagtgctctctggtgtggcattattagtttattacccatatatacgtgaacttgacaacttaagacttacagctcccagattcatgcagatatgtagacttgttagcacagggatgaagctttgcttttattttgtacgctggatgctgtaccttgaagctatcttacagggcagaacctgcacgccgacgccttgttgcgttagaggtagcaatctgaccaagctgttcgccctggcttgctgggactcgttctctgacaggtgtgtaatgcctcagccaaacaccagtgtatacctgctgaggcctaataatcttagtgtctggatcatcaagtgactctttccatgtgctaacc

SEQ ID NO: 411232 - DNA, 537 bp, Oryza sativa
accataagaatagcaatcgtgtatactccggccattaaaatgccgtcaaaattcagttcatgcatatacacaagctatatatcaccgcgagaaagaataatactataagagagtgtaactaattctagctgtcagtccattgtgatccggcctggccctcccttcagtgagcggtacaaaggtctggatcgcttgaagccgaatatgtcagtgattcggtaagttttgggtgtatcagcttcagcaatggccttcttgaactctgccaaatgttcgccgccgaagacttgcacgcttacagttttcctttgaggggcaccaagtcttatatgctgatcaaaaaattcgatgaattcttctttcttcagctctcttagaagagctacctcagactcgaccctgtcaaacttgagagttcctgcctcaatctctccccaatagaagtgggattcctcccacaaatttttgatttctcagtttcgaatcgacagtgattttacttccttttaaatccttgctgacattcatgaatttgtt

SEQ ID NO: 411233 - DNA, 545 bp, Oryza sativa
agcaaatcgatccatgcgaccatgctggcaaaagatatcggagcacaaatttacatgtggcacccacaccgtacacccatgcataataatacatgggatatacgtacgaacatacatacccctgttgatcacacgcaccattgatcgtacaaagttgcgtacatacatacgtacacacatatacgcatacgcacgtacatacatacataattaaaaactcgtaattaattaaatacgtagttgatggcatctctaatggaacttgaggctggtgaggatgttgttgtggacgggatcagcgaggtgatcaagcaggttctgcacggggccaaccccggtgaagagcgcctggacggagaagccgaggaaggcgagcatggcgagcctgccattcttgatctccttgagcttgagctccttcatgtgcgcctcgcttttggtcccgaagccgagcgggttgaagagcgggccgccggggtaggccgggtcgccggagccggcgaggtacttttcgaggcccaggaagtactgctttcccatggagc

SEQ ID NO: 411234 - DNA, 491 bp, Oryza sativa
gtccgcaagtcgagcacttcagcattgtattcatctccaaaacaaaccgtatcttcattaggaagttagtaaggcctacaaatacaataacaatgtcaaatttgtttacatcgaccaaagcccaccaaattgctcctgcaaggaacctctcgtctcccgttgttatgtgcctccaatctcagccagctcatccaccgtcaaaacacacaaacagggagcaatttacgcaggccaaatgaagtacaattggtttcatcactcttccgatggctttgcgtcgtccatttgatcatcttctcccggaagcccaaatatccgtaggttacgatccatagaacctacggcaatgtacttcgcatcggtgccaaacttgacgtttgtcactttccctgtgcctgacaaatctggtaaggtcttgacaagattccattcaagcttaacatttgctacttggtaaacccttgtatctgaaccaccaacagctagataac

SEQ ID NO: 411235 - DNA, 514 bp, Oryza sativa
ccaaacaaggcagcatgttcatgcaaaattgcaccaattactcgagaaatctgaaagtagctggggtggattgatcgaacatagtgcaagaggttcttgggctattataactcaggaatgaaccgatttttaaaacaattctcaagctctaaaccaacttaggccggtggtagcagcagcccttggcagctagaagaaatgcttggaacctctctctttgcccaagccttctcgcttccggcgtttccctttgcttcctttggaagccttttggggccaagaagcctttctggttactcaagcagccttccgactttctttctttgggcgatccctctttctttcttgtccagcgaattttggccacggctttcctttgggagggttgaaggggagttcacaagaacgctggaatctttaaggagccttgcttacctttttgccattcttggtagtgaatgtcctgcggtaggtgttgacatatttgcggacatcattatccttggaaaggttg

SEQ ID NO: 411236 - DNA, 569 bp, Oryza sativa
tcgcgatcctcctacaccaccatgggcaaggaggttgtgccgatcggttgggacggctgggaagtccagaaacccgagcatagcgggatatactacggagagtacaagtgcagtgggcccggggcgctgcctagcaagaggatcgggtggtcgctggtgctgagcgacatccaggccaagcccttcaccggatcacacttcgtctacggcgactcctggatcctgccgcctcccaagagcatgtaattctgcctgggctgggctagctaaccacaacatgtgttgtgtagggccgtgattttttccagcccattgggccgacaccctcttgactggttgcagttaagcagaggttggttttattatttgtttggaactatgatttgaagatcatatccaagcatgcatgcacatactttgcattattggggggagcatgatgttctgaggagcggctgatgagaatctggaatgagtagttctacaagcttacggcttcttttgtattcggattctgataatctgagtgagaaatttggttgtttgagaagctgaatattttgaatgaa

SEQ ID NO: 411237 - DNA, 484 bp, Oryza sativa
gcaaaaacatcatcttcttcttcatcttcttagtgtacacaacaccaactcgatcatcatctcgtcgcactaaacccatcttccccaacccaaagacaacgaactcgctggccacaaatccatccaaccacaattaaccactgctaagctacggtcccccacttcacttgccggggacgaagttggtggcgtacgcccaggcgttgttgttgacggggtcggcgaggtggtcggcgaggttctcgagggggcccttgccggtgacgatggcctggacgaagaagccgaacatggagaacatggcgaggcggccgttcttgatctccttcaccttgagctccgcgaacgcctcggggtcatcggcgaggccgagcgggtcgaaggcgccgccggggtagagcgggtcgacgacctcgccgagcggcccgccggcgatgcggtacccctcgacggcgcccatgagcaccacctgcaccgcccagat

SEQ ID NO: 411238 - DNA, 92 bp, Oryza sativa
atttgggtgggatgaaagcagaggcagataatattaagaagcctggcacgcatgagagagatggtagcaggagtacatgaagagatcaccat

SEQ ID NO: 411239 - DNA, 464 bp, Oryza sativa
aaaaccactttactagacaccttgacaagcatataaacagttagtttaattggagcaccataaccacaagcacagtgtggacaatgacagtgtgaaaatagtaacaaaaaattgtcacctagaagcaagttcataattttgccgagcttgaattattggggtgcaagggttgctcattgaacaagtgctaacaccgataacagaaaaaaaaaatcctcaaattaaacatggcagttcttggaatctaatagactgcaacaaccaaaagatgcgcatgcgccaagatgtttttcaactcatctcaatttcatctttgaaatgtaagtacaccctgagaaaaatcaaggcttgagggccaccgcaatgccgacctttgagctcttgtcaatggccttggtgtcaacttctgctgagatggtccacacagactttggcctccactcgtgctggagcagcgcgctggc

SEQ ID NO: 411240 - DNA, 496 bp, Oryza sativa
aatcttattatcaccatgaatcttattgcaaaatgtcaagctgatcaaattctgtcacaccagtggcaggcagcctagtacaagccgtcaagagtttttctcaaggtgatcaaacgctggtcgatctgcatgctcttgtgatacacaaagagcgatcgatctgacatgcccatgttttttttcctttttttgcaggaagatcaaggttcatgaggctagctagctcagtgcctgaagtgcctgacccccgtgaagaggagggagacgccgtacttgttgcagcagtcgacggcgtcgccgtccctgatgctggcgctcggctccgcgatcacgccgatgccgttctggcacgcctcctccacggtgtggttccaagccaatgggaagaatgcatcactggccaaagcagctcctttggcctcctctcctgctttcctgaaagcaattctcagactctccagtctgtttggctggccacttcccatgcctaacatgc

SEQ ID NO: 411241 - DNA, 576 bp, Oryza sativa
agcgagaaccttgacgaaatttattggaccgactgcggcagtaataattaaacaattccaaaattgcactgtcaagcgttaaacattccatgttgctttccaacgatttccaggctttgatggatacaatgaaatcttggtttaatagtgattttcacggttcaaccaacaactaaccaactgctgccgaatctaattcaagctggtcaattggctacttctccggtggtgaggtcagctgccttaagttgaactttgcgagctctttgtacctctcgaccaccccaatcatgcatatagtcttagctatctggacaataatagtcctgtctggactgctgagatcaaccttgtgaggttgaggtacagattttgctaccgcgttgataattttcatcctatcaatacctgtgttcgaccttgcttcatataacacagcaaacttatataccgaagaagattccttttgaaagtacttttcaacaagtggactaaatgcttttgatatttcctcttctgatgcataacatgtcacctcagtgggcaaaaacctcagaataaaactagcatgcatta

SEQ ID NO: 411242 - DNA, 474 bp, Oryza sativa
gggatgaaagcagaggtagattatattaagaagcctggcacgcatgaggagatggagcaggagtacatgatgagatcaccatgatgatagatgatccatccaagctagctagggatccatccaacattgatcgacacacgcacacactgacaacgacgacgacggttttatttaggcgtcagagcaaaaggcaaggcctgcctacatataagctgggtactaatgcaagcaaattaaggcctcgatcaaagctctgatcgacagtagcagcatccatacgataaatcctcatgcagccgggcgacgacgacgatagattcagttgcaggagcagcaggagcagccgctgcagctggtgccacacttgcaggtgttgcagccgcagccgccgttctcgccgctctccaccgccatctccattcctccagagctcgccttgttggatggagcagcgaggacgaaggtcttggtggt

SEQ ID NO: 411243 - DNA, 494 bp, Oryza sativa
gtagtcaaaattttgtaaggattttttattggtgtagtaaaaattttggaagagttatttaaagttcgtatagcatcctaaaaaatattaagtaccgaatgtttgtaattaaacataagttgtcggcggggccgcaggcgcagtgtcgacgacaggagctgatccggctgccgaagaggtctccttctcggcggctgatccggccgctggataggtgttcttatcggcggttgatccggccaccgcagaggtctccttgttggcggttgattcggctgctggagaggtctccttatcggcggttgatccggctgccgcagaggtcgccgtgtcggcggttgattcagccgctggagaggtctccttatcagcggttgatccggctgctgcagaggtcgccgtgtcggcgattggttcggccgctggagaggtctccttatcggcagttgatccggctgccgcagaggttgccgtgtcggcggttggttccgccg

SEQ ID NO: 411244 - DNA, 286 bp, Oryza sativa
aaaaaaaacccaccacattggatatggacatatttagcagagcacacaaaggtttattcttattaacaccaacaacatggggggcttccaagggggcattaccagatgatggggcccatacaaatcacaccagaatgggctttcaaaaaaacccaaatgtttaggccttgcgaccaggagtatacacaaataccatggggtttttttttgaaagaaccattttacaggtgcaagaggcaatgtttttgtttattttgggggagtttaagttttttagggcgaaacc

SEQ ID NO: 411245 - DNA, 494 bp, Oryza sativa
gggtagaaatgaaattaatatatccactaatacatgaagccccaaaataaaatttgggtgcttagtagagccaagcaaaccgaattctgcacgggtaatttcaggctattcttacaagcttactacgtgatggggttcttgctctgcatcaaaattctgcgcctatagcacaagcacggttgttgcatcggacactggatgcaaatctgtcacttgacgctttgctcctcagcagcggcagagagcttgaacttgaggtaggctctgatgaaggtgtccagctcgccggccatgacgccggcgatgtccgacgtctcgcaggcggtgcggacgtccttgacgagcttgtaggggtggaagacgtacttgcggatctgctgcccccactccgacttcaccgagtcgccgcggatctgcttgagctccgacgcccggtgctcctcggcgatcaccagcagcttcgtctttagccggcttagggcctttatcttgtt

SEQ ID NO: 411246 - DNA, 191 bp, Oryza sativa
agaaaaattcgagaagatcagtcctactttatctatgccatgaccatgcatacatatgggcttttacagatccatgaagaatttcctcgcccgaaaccgaaacatacatatatagcaaactcactcactctggctgcaaagcgaccgtgcgaagtgcgtacttacacgcaattttattagaacgatcgggg

SEQ ID NO: 411247 - DNA, 374 bp, Oryza sativa
agaccattaaccagtatccaacacaactgaatcgtaaaggccacgttattctggagtaattaacattgagagcaactacgaaagagcaaactaagctgatcatgagacgttgccctacacgaccaaacaaaccagctgaaatgaataggtagtacgaaccaaacacacagctcatatatgcaaccagcataacaaaattacaactgccctggacggtttatattctttcacaagctaaaaagtagactcagggccatattatcagcatcgttacaacttacaagttggtagattggaaaacaaaatgcaacttattatcccaactagcattaacagagggggtgggtcctgattgaacaccctccacgttttat

SEQ ID NO: 411248 - DNA, 296 bp, Oryza sativa
acacaatcaggtccattgtacttttttcatcaaccaaccagataacattgttttacacaatctgaacgaacgaagcaaatattcgggtacccggaaagaggaaaacgtcgcgcgttttaccgcagcctgcatgaaagcaatggaccttaccgccgttgctcgccggagatccacactcacttgccggggacaaagttggtggcgtaagcccatgccttgttgttgaccgggtcggcgaggtggtcggccaagtttttcaggggccccttgcccgggaccaaggcctggaccaaaaa

SEQ ID NO: 411249 - DNA, 496 bp, Oryza sativa
aagtaaaaacctgaaattttatacggttctactatagagtttgatatttacaggaatcctgtaggtacacagacatctgcaagaaacaattcatatcagtaattcaatatggacctacgaaatggtacactaatatacacggatacacctgctttctgcttatttgattccccaaagatttatacctgtttagaggagaaaaggcagagaaatggcacaaaacctacacaaggatcctccatcacaagaagtcatctctcgtgaatgaggttgtctcagtctctcagacatgcagaactaattagatgtgatgaaatccactacagcatcagccaattcttcgcgatgcgcggtgtagttatgatttgctccctcaataacttgcagcttgtgattcggtatatgcttcgcaaactcataggcgtcttccacaggtatagtctcatctgctgaaccgtgaactggaaaacctgcattcttgtaatgacatgcttac

SEQ ID NO: 411250 - DNA, 353 bp, Oryza sativa
acagtaccgatttcattattccatttgcccatcgaagtgatatgatgcattgaaatctgataacttacataactaaaacgtagttgtttcaaatagtaaggcaaatcctatgattacaccataggaaaaactgctcattggaaagcctatataggaattatacatatagccaagaagcatcgtttttggcctagtcaaaatctggcaaaccatgacttgccgtagtatcatcaacaagcacaagctggtcgtctaatcgtccagctcaatgatcttcacaaccgaggaatcacccactttctggcagacaacaacgcgatcatgcgacttgatcacaccggaagctttgccat

SEQ ID NO: 411251 - DNA, 411 bp, Oryza sativa
aataattgaagtatttgacaccttgaattataatccataacgataacaccacggtccactggcaacaacctgagaaaactacttgacagtacactttattcactatagctgtatgcacatgcgactcgcatgcccccaccggacgggtataaatgtaagaactaatgtgtccagaaccaaaaatacgattacataggacacgaatcctgtacaggaatggagaagtttagaagtgtgtcttcactgcctctgcaaatagcaacctagcgtcagcaaaccaatttacagggggtggtcaactaggccgtgcaagtgcaagggcgcaaagaagaatcctccacgatcatgtgaaacttgtttcaaaaggtgccttgggcagagcttccacaaaatcgcaatctttgggggcac

SEQ ID NO: 411252 - DNA, 451 bp, Oryza sativa
aatctcacaagagccaacatgagactccgatattaaccattgacacgtgaaacacattaaggtttgataaataaaaagatctccagctggagtgtgacaccacatagtctctgaggactgtctgggactctgggtttatttattgaccaacattacagataagaaagcgcacagcacaaacaaactcgaagcactcatgacgcgaactggaaatactcatgacgaacgaaatactgaaaagacgataaggcgaagtaggcgatgattgggaggagattcggcgcattactttttctcagattcagaatccgcgctctggagccactccacgaacggcttggcattctttaccacctgggacttcttgccaccagcaacagattcattataccactgagttatcacttcttcatatcaggacgttcccattatacaggggcttgagaacaat

SEQ ID NO: 411253 - DNA, 484 bp, Oryza sativa
aaatggaacactccattcttttacattctaaaggcttacattccaagggttttgctatttaaaccagaaaagaacaaatggaacattctaagggcgtaatactcaacaagaaggcaagattgatcactcaagaacaggccttggcctcaaacattggaagaactacaaagggcgatcgatgtcggtgccaggtacaccggcgagttgacagcaacgagcgcagggctcatggccggaacgccgccgtcgtccgagagttccagcggtgcgccgttgagcagcatcgtcttgctctggaggtcgccgtccttggccgtcaggtggtactcctccctcctcgcgacgtcgcttgacggcttgcgccccagccatgaaaccgctcttctgaggctgtgtgagaaagaattgtgcttatgaaggctggctgttttgtcaaggctgacattgatgtcattctggagggtgacgttgtatccggggtatt

SEQ ID NO: 411254 - DNA, 529 bp, Oryza sativa
  unsure (1)..(529): unsure at all n locations
ggatccctggagcttcaccagtccatcctgcttcttcaccttgaagctctctgtctcagcaatctgctctagctttgacactattgctgatgctggtttttgtgtcatgaaccgtgagtctgccttctgctctttgtcgttctcaaacaggcctgacagatcaaatcctttggagagggagatgatgtcaaatgcattcaagctcactggcttcaaagagcttgctggttcttttgccttgccttcattgtccttgtgatcagcactgaaagcagtatggacatccttgaggttgtttgattcatttggctgtgatagcatcactgctggtttgtaccccttcttgaaccatggatgctcaactagcttctcaacggtgatcctaatgtttggatttggatcaagcagcctggacagaagccttcggacatcagtagtgaaccactgtgggaacttgacatcacctttgcttatctttccgtacatctccattagaatngagtcatggaatgggaggtagccagcaagc

SEQ ID NO: 411255 - DNA, 329 bp, Oryza sativa
ctattcattaattcgtttattttgcataatccagcatgcatgcacacttacataatactccagattcaagtccagtgcatgtgcatgcagtaaatcaaacaactccttggttcggatccaaatgaaaactttagaacacagtacgtacgtccgtagtagaactcatcacgcacatttttttttggtggctacgtacatagcacagcacgtacgtataatagaacgtttaatacgagactaattaatcaagatccgtaggtaattaattaacacggatcgatagcataacacagtaggtcgtacgtaattaattaactgattaattaatt

SEQ ID NO: 411256 - DNA, 449 bp, Oryza sativa
tcttaaaaaggctgcacccactggacacgttgagacacatcctcctctgagtcaacctgcttcatacgaacaacgcatctcatcagcgagcatgacaggaccatctccagcaggaggaagtggaactggaactgattccatagggtatgatggcaaccaagcagctacacagccatctcaacttcaaagtacatctgccaatgtccctgtgccatacgatgacaccttttcatttttaccgcctagtatgttgatggggtctgataatcaagaaaccggaaatgatggcatgggcctggaactaggccaattgcaacaagcaatttcacagagtcagtcgattcagccagcaaatgttggctatgatgattggactcgaagtcaaaacggtcagttcgctgatgacttcaccgaagatattcgcatgaaaagccaccaaatgctcgaga

SEQ ID NO: 411257 - DNA, 528 bp, Oryza sativa
tttcctgtcaaagcaagtgatctctttagctgggatgatctctgtatttgcatttgcagctgctcgtcacggcaatggcatccaccaacagctggccccacgagatcgagtcgccggtggccgcgccgcgcctgttcctcgcctccgtcatggactggcacacccttgcccccaagatcgcctgccacatcgtcggcagcgcccaccccgtcgacggcgacggcagcatcggctgcgtcaggcagttcaacttcacctcagccatgccattcagccacatgaaggagaggctggagttcctggacgtggacaagtgcgagtgcaagtcgacgctggtggagggcggcggcatcggcaaggcgatcgacacggcgacgtcgcacatcaaggtggagccggcggcgaacggctggagcgtcgtgaaggtggagttcacgtacaagctactcccccgagtggaggtgaaagacgagatcaccaaggcttatgaggtcctcaccggcatctttaagaccgccgaggcctacc

SEQ ID NO: 411258 - DNA, 573 bp, Oryza sativa
ccgccggcacgggcccggactgcctggctggacccacgcgtccttcttactgaacgaagcttacctagctactcgatcgatcatccatcagtctagatagatatggcggctttgaacttcaaggcggtggccgccgcgatggtgatggcgatggtggcggcggcgccgggggcgtcggcggcgataacgtgcgggcaggtggggtcggcgatcgcgccgtgcatctcttacgtgacggggaggggtggcctcacccagggatgctgcaacggcgtcaaggggctgaacaacgccgcccgcaccaccgctgaccgccaggccgtctgccggtgcctcaagaccctcgccggcaccatcaagtctctcaacctcggcgccgccgccggcatccccggcaagtgcggcgtcaacgtcggcttccccatcagcctctccactgactgcagcaaggtcagctagatcgattaatcctgcgtagaccgaccgatcgatatatcgatcgatgctggctcgcagttgatcaactagccaatataatagctacagtaaaaataacagctgaggcatatcatt

SEQ ID NO: 411259 - DNA, 533 bp, Oryza sativa
tgatgtctaaacttcctcatgccacaatttttaagccacagcatccatatgctaggcgtgtatcagaaacatttaaagattttcctccgcctgctgtggcgttagtggatgttcttctttcagttgatccagcagatcgaggaacagcatcttctgcattgcaaagtgagttttttgcaacaaaaccatatgcttgcaatccttcaagtctgccgagatatcccccaagcaaagagtttgatgcaaaacggcgagaggaggaagctcggaggcaaggtattgctggaggaaagcaacacaagtatgatcctgaaagacggactagagagtcgagagcagttcctgcacctgacgcaaatgcagaattagtgtcatctttgcagaaaagacaaaaccaagtcaatgccaagagcaggagtgagatgttcaatcccagcaaggaagactctgcatctggctttccgattgagccacccaggccaacttatcctgctgaatcgtctcaagactctcaacgtgtctacacaagaaca

SEQ ID NO: 411260 - DNA, 530 bp, Oryza sativa
ttctctcgatcatggccgccgccgccgccgcctcaagggcgctctgggcttgccgcaccgcctcctaccttcggatctcctccttccccagggctttctccaccgtccttaaagatctaaaatatgctgatactcatgagtgggtgaaggttgagggtgattcagcaaccataggggtcacagaccatgctcaggaccatttgggtgatgttgtgtatgttgagcttccagaagttggttccacagtatcacaaggaacgaactttggtgcggttgaaagtgtgaaagcaaccagtgatatcaatgcaccagtatctggagagattattcaagtaaatgatgaactaagtgaaaaaccaggatttataaatggaagtccatatgagaagggatggatcatcaaggttaagataagtgatccaagtgagttaaactcgctgatggatgatgagaagtacaagaagttttgtgaggaagatgatggcatacactgatcaatcccctaactgctggatttcaagaaactatgc

SEQ ID NO: 411261 - DNA, 447 bp, Oryza sativa
tttttgttttttttttttttttttttttttttttttttttttttttttaaggaaaaatggggagccttatatgcctatatgcatcataaaaaattgggcttgagcctgctattaatggcactccaatacatgaaatttggtacatgaaacaattggaatatcatggtccttgggtctcggtggcactcgaaaacaggctcctggcaaaacttctccgggggcctcttgaccttgcagcttttaggctcccaaacttcaaccaagcttccccggcaataggcttccattgctgagcacatgagaatctgagggccatcccaacagtcaacccacgtaaaagttggatagttcgaagcactgaaaaaagctcttcagggaagctctgcactcccactttatttagcgaagaatccccggtgaagggcgacacaacagccccccctgggg

SEQ ID NO: 411262 - DNA, 519 bp, Oryza sativa
tttgtggtttaatattataatctttaaagatattataggaacgcaagcattgagattagagttacgcaaacatgacgactttcattgcgtaatacaggtcgttgaaagaacaaccaacaaagcgaatgcacctcttttgggttcttttttaattgctaggcggccttgcaactacatcaaccaatataccaccactatatgctcatgctattgtctccatagagactacgctacttatcaactcacacttgcttggaataaataccaactaaatgaattgacttgatctcttctcatacaagtcacagacccgaattgggtagtgaagaatgaatggacaagagaagagaacaaaatctatacattcgtgcatcaatgtacttgaggtgcgtcttttaatgctacattcaaactgttttccattatttgccaccctagtccaacgctgctgccttgcatcatggctacaaattcggcgtaatcaatttgggcgtcattggtttgatcaacctctgaaat

SEQ ID NO: 411263 - DNA, 484 bp, Oryza sativa
tggtttttttttttttttttttttttttttttttttttgatggatgtaagttctttattcagatcaagcgactacatgatggcaagggcgaccaacatgaagaaatgcactcgggacgccattctttccaagccccctaaaccatggaagcccaatttgcacaatgctggagccgttcatggctcgaacaccatgttttcggcctcccttttgatcgattcgaagaggacagacgacaggtagcgctcaccgaagctcgggaagaccacaactacgagcttccctttgttctcgggccgctgcgcgaccctgatggcagcgactgcagcagcaccagatgagatcccaaccagcagccctttttttaacgctagctgctttcccatgctgatggcttcatcaccttgagacttgggcccacttatccaggagattgacattaagtacaccaggaacaaaaccagcaccctattccttggatttt

SEQ ID NO: 411264 - DNA, 487 bp, Oryza sativa
cgataaatattgcttcacttgtacaaagtacagataaaaatacattgatacatgacacggagagagccatgcacaccacttatttggacacacagagggcaaggctgcagagaaaatcaagcaacacaagctgaactcacggccccacctgtcagcctctcactggtcgaggccggagactcttgtgaaaaacagcaacaccacgcatgcagaagaagacaaattattacacacacaaatcgacgacacggcggccggcgacgtacggcgaggtcgtcgccgccgccggcgacgttgtgatgaggtcgatcagccgaagaggtggtgcttcttctcgccggtggactcctcggcgctcttgtggtccttcttcttctcgtggagctcgcggaaggcgtagccgccggcgtctaccgccggcgtggccgcaatttctccgggaacttgtgcctgtgcgcgttttttcgggtccttcttcgcctcgtgc

SEQ ID NO: 411265 - DNA, 474 bp, Oryza sativa
aaagagctaaagatttattattactgcaaaaattggagcaatagaatagattatacaaaaagcagatgctggggtctaattatccacaggcaatgaatccatatatttttttatgaataactatatgcttcaacttcaagcatcctatcctaatgccaaccattccatcctgcattacgcaggattttagcttaccaacatgggcagttgggcacgcattccccatttccgcaccttcatgcttaggctccctaaggaacaccctttgagagcatgaagagtttaaacacaaagatgggtggacacccttcagttgattgcaacgcttttattattccccttttccatgtggaaggctctggttaaaacctgagctcccaggccggccaaaagtgaagggcctgtttcaaagtaagcacacgagggttgccattcaaaaggacggtccgcacccttacaaattcaccattttcc

SEQ ID NO: 411266 - DNA, 471 bp, Oryza sativa
ggagggataatttaaattcttaatagtaatagactttttgatggagtattacaacatgcagcagtggcattaatacgccagtacattaattaagtcacacatatgcaggctccattttggttccttttaatttatcgtattacagaatttctgtagccttgcagatgatcacttggatatcatgtactagtgattaacaataggacgcatacaaaagatggcccaacgacaacagaagatgcgggcatctgacattgtctggccttatttgggggtagtactccaattaattaacaagagatgatgcattcttgggccttagtttcttcacatgcttggcttcacgttgagcctattcggaatctttcacccccaacgactaattacactgggagagggagttgacccatatggcgcggagctcaggggagaccttggggtgcgcgagctcgccggcgaagcggcggatga

SEQ ID NO: 411267 - DNA, 387 bp, Oryza sativa
tttttggtttttaggctccaactataaccttttttatttccaggctcagcacatggcaaattaaacatcgatatgcacaaagtccatcccgtcatactatggcctcttattccaaacgatcagaacagatgggcgcgccatgcgtatgcgcatattacattacagcttggaaggggatttgtaccatccccacggcttatcggaggcgtactccgtcacttgcttgacgcttaggtagttgccaatgcccccttctccgagcttgcgtcccaagccgctgcgcttgttcccgccccatggagcttggcaaaagcagggttgctgagcagctcaacccagatactcccgggatcgatcttcctagttaatctctggaatcgcttcgcg

SEQ ID NO: 411268 - DNA, 516 bp, Oryza sativa
gttttgaaccgcaaatccccatttggtctcacctaaaaccctagctcgctcacccatggctccgaagaagcgaaaggcggatccggcggagtccccggtagcctcgtcggaggccggcgccggcaccaaccaccaccaggagacgccctcctcggagctcaagccccgggggaccatctacttccccatcaccgacgaccccccggagccgagcgcagagggcggcgccgagggggaggacggcgccggaggggacgacgatgaggaggacatcgcgaagctgctcgagcccctgtcgcgggagcagctggtggcgctgctccgcacggccgcggagactacccccgcgacgatggcggccgtgcggcgcgcggcggaagccgaccccgcgagcaggaagctcttcgtccacggcctcggctggggcgccggagccgacgacctccgctccgcgttctcccgcttcggcgagctcgaggactgccgtgtcatctccgacaagcaatctggcagatc

SEQ ID NO: 411269 - DNA, 525 bp, Oryza sativa
tctgggcggcggcggcgctaatcggccacggggcagcgaggctgacgaggaaggacctctcagccaccgcggaggtcggccccggcaagacgcagaccgtgctcgacgagctcaccggctacgccgagccgggctcgctcaccgccctcatggggccctccggctccggcaagtccaccctcctcgacgccctcgccggccgcctcgccgacaacgccttcctctccggcaacgtcctcctcaacggccgcaaggccaagctctccttcggcgcctcggcgtacgtgacgcacgacgacaacttgatcgggacgctgacggcgcgggagacgaccgggtactcggcgatgctgcggctgccggacaagatgccccgggaggacaagcgcgccctggtggagggcaccatctaggagatgggcctccaggactgcgccgacaccgtcatcggaactggcacctccccggcgtcagcgggggacaagaagcgcccgtcagcatcgccctaagctcctcatgcgcccc

SEQ ID NO: 411270 - DNA, 479 bp, Oryza sativa
gcgtttaaagcaggtcataactgcaactggatcggattacactggggtagagttctccaaaagattgtgtggcatgtcactgatctagaagtggtgagagactcgatgagcgcggggttcgcggagctggagcggcagcagcagctgctggcgagctgcacgaggctgtacaagcagctggaggagcacttcgcgtcgctggagcgcgggctggcggcgaggtcggactcgctccgccacaagcgccgcgcggaggaggcgcgggcctcggccgccatggactcgctccgccgccgcgaggcctccatcgatggctccgtctcccgcgcgctcgaccacctcgacgacctcgcctccgtcttgtcggtgccgtccgacgccgccgcggcggcggagggggtggccgagagcctgagggcgatgtgcgccaggatggactccgcggtgttcttcgggttcgtggtcgcgcggcggaagga

SEQ ID NO: 411271 - DNA, 406 bp, Oryza sativa
ttaagttttgcacattgaactgcgaaaatgggcagatatcatggtgattgcgccattatcagctaataccctagctaagattgctggtggtttatgcgacaacctcttgacatgcatagtgagagcatgggactacagcaaaccactctttgttgccccagctatcaacaccttcatgtggaacatcccgttcaccagatcgcatcttgagacaatgaacctgctcggtatatctcatggcccctcccattaccaaaaggctgctctgtggcgattatggtactgctgcaacggctgagcctcatgtgagggttcgcatcccgcgggctggtcgacctagacaacctcttcttccacttagttgagccgtgcgacctggccgcagaagcctacgatgtagccgata

SEQ ID NO: 411272 - DNA, 502 bp, Oryza sativa
attcatcagcaccttagcattatgtcacaagaaatttggaaaagcaacattaaagtgctgggacaatagcctttctccaatctccacgtcctaccatatcactaatagtagtacaacaactggccaataaaggtgctatgttggccgacatagacatcacttaacatttcattttgtgacacgaagtactctttaccatagaaaactaggtccagagtttaatcttgaacagaatagttgccgcatcagctagatgggaggtttctgccggcaggaaccacaggtgaactatttgtattaagtggctgtctcttgcaagcaagcctgacggtggaatcgatcacagaaggctcagccattgcaccattaccataatcaccacaggccagccttttggtaatgggagggaccaaagatatacctagcaggttgattgtctcaagatgacgactggtgaacgggttgttccacatgaaggtgctcatagctggggcaacaaaga

SEQ ID NO: 411273 - DNA, 534 bp, Oryza sativa
tgtcactgacatatgatttgtacaacccatgaggaggcatctaccatcctggaaatgctggcgagcatgaccatgacacagactatatagagccgactagttccaattcatgcccagacactgacgacagtttcccaatggatgaagaagtaggaaagaggttttaccccatggtgccagttccccatgttcctaaaattaatggagagatcccttcagtcgatgaagctaccatggaccatgaaaggctgacagaaaggttgaggttgtatgaactagttgagcacaaggtgaaaggagatggcaactgtcagtttcgggcactatcagatcaactgtatcaaagtcccgatcaccatgagtttgtgaggcagcagattatgagccagcttaaaagtaaccgtgatgcctacgatggatatgtccccatggcatatgacgattactcggagaaagtatcacaaaatggtgaatggggtgaccatgtgactctacaggctgctgctgacagtatggagtgaagattttcgtgat

SEQ ID NO: 411274 - DNA, 389 bp, Oryza sativa
tgttctgtaggcgcaacactaatggatgaggaggccatttatactgtggttaaggaaaatccaccagccttacttgctttgcgctggtattgggcatcggaaggaataggaaatacggatatggttgtactcccgtacaaggatagtttgctacttttgagtagatatttgcaacagcttgtcatggaatctcttgggaaagaatttgaccttgatggcaatcggtttaatcaaggtctaactgtgcatggcaacaaaggaagcaccgatcaatatgcctaacattcagcagctgagagaaggtgtacacaacttcttcgttacttttattgaagttttgcgtgaaaggcctcctgggtatgattggaagcttgaacctggagtaccat

SEQ ID NO: 411275 - DNA, 337 bp, Oryza sativa
tgatgagacactcactgatataatcaagctagctagcttaatcacctagctatccgtcagtttagctagatatggctgcagataactgcaaggcggtggtcgccgcgattgtggtggcgatggtggctgcggcgccgggggcgtcggcggcgataacgtgcgggcaggtgggatcggcgatcgcgccgtgcatctcgtacgtgacggggaggagcggcctcactcacggatgctgcaacggagtgaaggggctgaacaacgccgctcgcaccaccgccgaccgtcaggcggcctgccgctgactcaagagcctcgccggcagcatcaaatttcttaa

SEQ ID NO: 411276 - DNA, 550 bp, Oryza sativa
tatcaacagcgccttcgagccgtcctccatgatggccaagtgcgacccgcgccacggcaagtacatggcgtgctgcctgatgtaccgcggcgacgtggtccccaaggacgtgaacgccgcggtggccaccatcaagacgaagcgcaccatccagttcgtggactggtgccccacggggttcaagtgcggcatcaactaccagccgcccagcgtcgtcccggggggagacctggccaaggtgcagagggccgtgtgcatgatctccaactccaccagcgtcgtcgaggtgttctcccgcatcgacatcaagttcgacctcatgtactccaagcgcgccttcgtccactggtacgtcggcgagggcatggaggagggggagttctccgaggcccgcgaggacctcgccgcgctggagaaggactacgaggaggtcggctccgagttcgacgatggtgacgagggtgatgagggtgacgagtactagagaggttcagggctcttgcctggtgcctcggcaatgcttgattactgctgctatcctatgatctgt

SEQ ID NO: 411277 - DNA, 515 bp, Oryza sativa
tctgtgatccacacacagcaaaagaaccaccagggtcttttcttcccgagatgaagagagcagcctccatggcgcccaaggcggagaagaagccggcggcgaagaagcccgcggaggaggagcccgcggcggaaaaggccgagaaggccccggccgggaagaagcccaaggcggagaagcggctccccgccggaaagggcgagaagggctccggcgaggggaagaaggaccgcgccgggaggaagaaggccaagaagagcgtagagacctacaagatctacatttgtaaggcgctcaagcaggctcaccccgacatcggcatctcctcgaaggccatgtccatcatgaacttctttattaacgacatctgcgagaagttcgccgccgaggccgccaagcttgccgctacaacaagaagcccaccatcacctcccgcgagatccagacctccgtccggcttgtcctcccggagagctcgccaagcaccccgtcttcgagggcaccaggccggcacc

SEQ ID NO: 411278 - DNA, 510 bp, Oryza sativa
atggtaaagggtcaggcctgggtgaatgggcaggtaattggtcgctactggtcactagtagcgccagaatctgggtgctcatcttcgtgctactacccaggagcctacaatgagaggaagtgtcaatcaaactgtggaatgcctacacaaaactggtaccacataccaagagaatggttaaaagagtcagataatttattggttctgcttgaggaaacaggaggtgatccctcgctgatatcaactggaggctcattatgccaaaacagtctgctcaagaatttcagaaaattattatcctcccctttctgcctggccgcatctttccagcggccgtgcctcagtgaatgcagcaacttcagaactgcgcttgcagtgtgacgatgggcatgtgatccttgagattacatttgaagctatggacctccttcaggaggctgcctgaacttctccaagggaaatgccatgcattgagcactcttgatttggtgacagaagcatgtgttggca

SEQ ID NO: 411279 - DNA, 482 bp, Oryza sativa
cagggcactggaggacaaaattctgccttactgtgatggaatcatgacccaactcctgaaggacttgtcgagcaatcagttgcatagatctgtaaagccacctatattctcatgctttggcgatattgcactggcaattggggagaactttgagaagtatttgatatatgccatgcccatgctacaaagtgcagcagatttgtcggcgcatgctgctgcagctgatgatgaaatgctcgattacaccaaccaattaaggaatggaatactggaagcatactctggtattcttcaaggatttaagagctcccctaagacacaattactgatgcagtatgctcccaatattcttaatttccttgatgctctatacaatgggaaggatatggatgatactgtgatgaagactgcgataggtgtactgggagatctcgcggacacgttgggtgtccatgctggccctttgatcatcaatctatctc

SEQ ID NO: 411280 - DNA, 542 bp, Oryza sativa
tgtacgcgtgggcaaggtcaatcacgagagcaaaagttgtggttagtgtccctgcaggaaagacgagggacaggagaaatgacttgctactcatacgagatggaggggaatcattcagaataattgacaagaccaaaagggacgatgcgaccactgtgatccaaagagaggagtgggcaaagtcgaggcaagatgtggagaagcactttaggaagctccgcgactttgactactcgaattggctctgaagaaatagtagctggagtcattcagcagagaaattattttgctaattttgcagctgcttatattagaggaagcgaccatggaccatggcgctcaagggagaatcgccatcttcgagtaggctaattatgtgtactttaagtttttgtagcaggtagaaagcatgccacgtagcgagcctattctgacaaaactgaaaggcttgatgcttgtgaatgcactaccttgatgggtagcgaacgaaaatgtggtccttggattcaaatgcccgtgtttttatagtatcgatatctaga

SEQ ID NO: 411281 - DNA, 430 bp, Oryza sativa
tcgtgggcgtacgtgctaagctgcagcacatccgaaagctatatatggtacgataatggcaaactcaccgacgctgacaatgctggtgctcctagctattgggctatctctcgagctctgcgaagactgcgagtctgaggagagcgtggtcaccgaggcgttcttcaacgggaccaagaaccaggccccgaacggatgcgccggtaagagcttatacacacgggaatcgatcctgaacgccgaccgctgctactagggcttaggcaatgaccggaccaacgacaactccaaccgcgagatcgctgtcttcttcgcgcatgtcacacacaagactggacatatgtgctacatacatgatataaatggggcaaacatggactattgtgacaagagcaacatacaagtgccgcgccaaccgtgcaagaagtac

SEQ ID NO: 411282 - DNA, 465 bp, Oryza sativa
tgtaatgaaccctaagattcaaagttagcaggggtggtgtgggctatttcataggctgtgatcgacatccgaaatgcaagtacattgctcgcacgctatcagacgatgacaatgaaactgaagcatctgatgaaactcaaaggactttcacacctaggttacttggagcgctacctgattctgatgaaaaggtgtttatgaaacaaggttcttatggccactacgaccaggttggagaggatagaaagggagtatcaccgaatagagctcctctctctgaggagaaagatattgactccatcactctgaaagatgcaatcgagctattgtagcatcccaaaattctgggaaaacaccctgatgatgatcttcctgtacttatcacacattctaaagctggatttagtatcagacacaggagaactcttgcttccttgccaaagagtgctgacccaaagaagatta

SEQ ID NO: 411283 - DNA, 505 bp, Oryza sativa
gacacattaaccgtcaaaaggaaccctacttataaaatttaatagaacttgtacaagatgacatggtcgccacaaagatgcacaattccgagaagaaacaacaacaatctttgcagacagccagagacaatctcatgggccatagtaaatgggagcaacaacggtttagttatacaccatgtattttggagtcgcgctgaacttctgataccctttgatgaccttgtttacagcatcaaggaagtccttctcagtcactgttttccgtcgggcgcgaatcgcatacatgccagcttctgtgcagacactccttatatcagctccagttgagttggggcagaggcgagccagcagctcgaaacggatatcgcgctcacagttcatggtgcgtgtatgtatcttgaatatttgggtacggccctccaggtcaggtaagccaaattctaccttcctgtccaaacgaccaggacgtagaagtgcaggatctaaggtatcaggcctgttt

SEQ ID NO: 411284 - DNA, 579 bp, Oryza sativa; identical to SEQ ID NO: 393601

SEQ ID NO: 411285 - DNA, 468 bp, Oryza sativa
tttttgagttggggattgattgattgattcggattgggatgaagaagaagcaggggagcatgggcagcaagtcgtacccgacggtgagcgatgagtacctggcggccgtgggcaaggcgaagcgcaagctccgcggtctcatcgcctagaagaactgcgccccactcatgctccgccttgcgtggcactctgctggcaccttcgatgtgtcgtccaggaccggcgggcccttcggcaccatgaagaaccccggcgagcagtcccacgcctgcaacgccaggcttgacatcgccgtaaggcttctcgaccccattaaggaccaacttaccatactctactacgccgacttataccagcttgctggcgctgtggccgtctaggtcaccggcggacctgaggtacccttccatccgggcaggcaggacaagcctgagcctacttctgaaggccgtgtttctgctgccacac

SEQ ID NO: 411286 - DNA, 554 bp, Oryza sativa
ctagtgtctcccggatactacgatggcaggtattggaccatgtggaagctgcccatgttcggctgcaccgatgccacccaggtgctcaaggagctcgaggaggccaagaaggcctaccccgatgcctttgtccgtatcatcggcttcgacaacgtcaggcaggtgcagttgattagcttcatcgcctacaagcccccaggttgcgaggagtctggtggcaactaagctaagatcaagcatcgcgctggtggattgctgcctataataatagtatgcagctttgttttgggctatgttgatgatatatcaatatataatatgctatatatttttattttacaatttggttatgtaccatctcaatggcctctgctcttaacacatatgtaataatctcttccctccctctccgaccggttttattgtaagagtactacaattatcgttgggtgaggatatgtgaaaacaaagctccggctatatacacacaagatatgtatctagagcatatctgataaattcgtcgacaataaaaaaaatggatggtattacgt

SEQ ID NO: 411287 - DNA, 558 bp, Oryza sativa
tttacgcgtgggctcgcttcttcttcccactaggcaaaagtacaaaccaccgagaaaacgcttctcagataaacatcatcaccatggcggcgtctcttgcctgcgctttcttcttcgacgccgagccggtgggcgagcagggcaggcacgcgctggacgcctgcgcgctctgcaccaagcagctcacgagggacagcgacatcttcatgtacaagggggacacgcccttctgcagcgaggagtgccgctacgagcagatgcagctcgacgcggtgtacgcgaggtcggccggacggaggcagcagcagcagtactccgggagggcggattcgcggcgcgggcaccgggagaccaggaaggtgtccgtggcgagctaatcaagctgcgtcgataatataatgatcagctgagaagaattggcgttgaatccagacgagatttcatgagctaagccacgcatcaccatgcggtgacgaaggagattgatttctccaagccgcgatgcctgacggcgccggagaagagtctgaggaagtccatccgcaagatgagaccttg

SEQ ID NO: 411288 - DNA, 520 bp, Oryza sativa
ttcaccctcgactccgcgctcctccgcatcgggcaccttcacgacctctcccgcctccccgaccacctcctcatcgacctcttccgtagaactatagctgccggtaagctgacagaaaaagtcctgaagatgtttctggcaacggattgcgaggaaatcgccttgcttgttcagatgctcaacattaagcagccgcttgtaccggtccttcccacgaggtgctctgagaagctctagaagtgacactgattaggccagtcttggttacctgagaaaagatgtctttggaaattcacgacagtgaggtcgacattgtgattgcagcactccagcccaacctgactactttctttgaggcatggaagccattcctctctcggttccacatcattgttgtcaaagatccagatatggctgaggagcttcaaatccctacaggttttgatctcaagggtcatacgaagtcagatatgggagtgctatgagccacatgcatcgacttctctggtcactgatgccg

SEQ ID NO: 411289 - DNA, 433 bp, Oryza sativa
tgctagatcgcgagcgacagaggatggccgcagccatgtctatggctgcctagggtttcgcggcggcgacggcgaggtggatttgggggtgggtggggaggacttctcactcatgtcgggaacctttgaaccattgtcccactcatacacagctgcactgttccccatgtgagaaacgaccgtgactaggactagaccttacacctgtgcttgttgtacgatataccagaggacttttttaaccatggcctggaattcacttccacgaggagtctaactcaggacctgaggagtgctactgaaaccacccaaccaactaacttagaggccctttcgcttgcattgagatacttaactgataactcacatacttattcattcctgccacaacttggattaacatacattcctgcataaatcttttcaggaactc

SEQ ID NO: 411290 - DNA, 382 bp, Oryza sativa
ttactcctccccctctttagcttttcctcctgggtttttttccgcggttcgcctagggcttaccgggctgagatggcggccccggatgtcgagtaccgctgcttcatcggcggcctcacctgggccaccgacgaccgctcactcgaggccgccttctccacctacggcgagatcctcgactccaagatcatcaacgacaggcagacggggaggtcacgtggttttggcttcgacaccttctcctccgagcagcccatgcacgacgccatcgagggcatgaacggcaaggagctcgacggacgaaacatcaccgtcaatgatgtccagtgccgccgttccggcggcggatgcgggggctacggcggcggcggtggcagctacg

SEQ ID NO: 411291 - DNA, 566 bp, Oryza sativa
  unsure (1)..(566): unsure at all n locations
tttctgttggcccccattcctcccccaccccggtgtcctcccctccgccgctcgcgtcgccgcctttttcccctatggcgctgccgaatcaggggaccgtggattaccccagcttcaagctggtcatcgtcggcgatggcgggactggtaaaactacatttgtgaagaggcatctcactggagagtttgaaaagaaatatgagccaaccattggtgtcgaagttcaccctctagattttaccaccaactgtggtaagatccgcttctactgctgggacactgctggacaagagaagtttggcggacttagggatggatactatatccatggtcaatgtgcgataattatgtctgatgtcacttcaaggctgacttacaagaatgccccaacatggcatagggactcgcgcagggtgtgtgaaaacatccccattgccccgtgtggcaacaagggtgatgtgaagaacaggcaggttaaagccaagcaggtcacattccacaggaagaagaatctgcagtactatgaaaattctgccaagagccactacaactntgagaagcccttc

SEQ ID NO: 411292 - DNA, 505 bp, Oryza sativa
tgtttcgcgcgccacggagtccggccggttcgtgctgtggcagatggccccggagatgtggtacattgagctcgccgtcggcgggagcaaggtgcacgccggctgcaatggcaagctcgtgtggcgccacacgccgtggctcggcgcgcattccgccaagggccccgtccgccctctccgccgcgcactccagggcttggatcctctgaccgcggcgagcatgtttgccggtgcgcggtgcattggcgagaggaaggtgaatggggaggattgcttcatcctgaagctgtgcgcggaccctgagacgctaagggtgcgcagcgaggggcttgcggagatcatccggcatgttctctctgggtatttcagccagaagactggcctccttgtgcatcttgaggattctcacctcaccaggattcagtccaccaccggaggggacgcagtttactgggagaccaccatcaattcgtttatcgaggactaccgccccgtggagggtata

SEQ ID NO: 411293 - DNA, 488 bp, Oryza sativa
tgtagagagagagagagagagcgaggatacgtctcctgacggaccgagctcgcgattccaatccccgcacggctctgtcctgaccgacgcctcggtctccgccggcggcgcgaccaggatcacagttgcgatggaacacagggaggctggctgccagcagtccgagggcccaatcctttgcatcaataactgcggcttctttggcagcgcggcgaccatgaacatgtgctccaagtgccacaaggagatgatcatgaaggaggagcaggccaagcttgctgcctcctccatcgatagcattgtcaatggttgtgactgtgggaaggagcatattgttgctgacagcggtagcacggcggtggcggtggctcatgtcgaggcgaagactctcgttgtgcaacctaccgatgtcgcgggcaccagcgaggaagtagctgcaggtccccggtcaaggaagggccgaaccggtgcgctccctgtaggaagag

SEQ ID NO: 411294 - DNA, 235 bp, Oryza sativa
tccttccccccccccattcgtcgcctcctggggcggtgttcgcgagcaaaacccgcacccccaaatcgcaggctcgctcagctcgatctctctctcgtctcgccatggcccccagcgacgacctcgtctacatggccaagctcgccgagcaggccgagcgatacgacgagatggcggaggcaatgaatagcgtggcaaaagccagacgaggggctgccaaaggaggagaggaacc

SEQ ID NO: 411295 - DNA, 549 bp, Oryza sativa
tttacgcccgaagcatcgacgccgaacggccgaggcgccgacccctcgacacgctgtccccggtcgcgcctcgcgggctcgcggcggaagggtggcaggcggaggctggagccccgagcaccgagctacgggtggacagcccttgaaacccatcccctccacggaccacgccgccagccgcaaaatattttgtccatcacaattgcccatggactctgccgttgatggcccgagacaacctccggctagggcggggagccgcctctgcacacgctgcggcgagcggaaggccgacctcaagcgcaccaaaaccttagagcagatatgcagggaatgcttctatgtcgtctttgaggatgagatccatcagactatagttgacaataatttgcttaaacctggtgatcgtgtggccattggagcttctggtggaaaagattaaaccgtgctcgcatatgagctatcagagctaaatcgtcggaacagatattgacttgatttgattctcttatctgcggatgaaggaattactgggtatagagacgactc

SEQ ID NO: 411296 - DNA, 511 bp, Oryza sativa
  unsure (1)..(511): unsure at all n locations
ttttcagatcatgtttgagactttcaatgtgccagctatgtatgtcgccatccaggccgtgctctccctgtatgccagtggacgtacaactggtatcgtgttggactctggtgatggtgtcagccacaccgtgccaatctatgaaggatatgcccttcctcatgccatcctgcgtctggaccttgctgggcgtgacctcactgacagcttgatgaagattcttactgagagaggttactccttcactaccactgctgaacgggaaattgtaagggacatcaaggagaagcttgcatatgtggcccttgactatgagcaggagctggaggctgcaaagagcagctcatctgtggagaagagctatgagctgcctgatggacaggtgatcaccattggggcagagaggctccgatgccctgaggttctctttcagccctctttcatcggtatggaagctccctgaatccatgagaccacttacaattncatcatgaagtgtgatgtggatatc

SEQ ID NO: 411297 - DNA, 486 bp, Oryza sativa
tttttagcttctagaagcttcttccgagatgaaggtgatcgataagatccaggaggcggcggcggatgggcggacggtgttctcgttcgagtacttcccgcccaagacggaggaggggctcgacaacctgttcgagcggatggatcgcatggtggcgcacggccccaacttctgcgacatcacctggggcgccgggggatccaccgccgacctcaccctcgagatcgccaaccggatgcagaacatggtgtgtgtggaaacaatgatgcacctgacatgcaccaatatgccagttgagaagattgatgatgccttaacaacaataaagtctaatgggattcaaaatgttctggctcttaggggtgatcctccacatggtcaggacaaatttgttcaagttgctggcggattcgcttgtgctcttgatttggtacaacacattagagccaagtatggtgactattttggcattactgttgctggtta

SEQ ID NO: 411298 - DNA, 508 bp, Oryza sativa
aagatggagctggttgatgctgcatttcctcttttgaagggaattgtcgcaacaactgatgttgtggaggcctgcactggtgtgaatgttgcggttatggttggtgggttccccaggaaggagggaatggaaaggaaggatgttatgtcaaaaaatgtctccatctacaaatcccaagcttctgctcttgaggctcatgcagcccctaactgcaaggttctggtagttgccaatccagcaaacaccaacgctctcatcttaaaagaattcgctccatccatccctgagaagaacattacttgcctcacccgtcttgaccacaacagggcacttggccagatctctgaaaaacttaatgtccaagttactgatgtgaagaatgcgatcatctggggcaaccactcatccacccagtaccctgatgttaaccacgccactgtgaagacttccagtggagagacgcctgtcagggaactcgttgctgatgatgagtggttaaatacggaat

SEQ ID NO: 411299 - DNA, 484 bp, Oryza sativa
attccggccatggctaaggtagctctcagctccctcctcgtcgacggtggcgccgccgccttcgccgttcagccgtcgaagaaaaccggctccggtttgtttcgcaatcgcgtcatcaccgtcaggcggcccaggatttcagccaatctcggtggagatggggaggcgaagcctgcaggtaacaagaagaagttcatcaccagagaagaggagccagagcagtattggcaggcgccaggggagaggaagggcgagaacccgatgaagacaccgctgccatacatgatcatgtttgggatgccgacaccgttcgtcatagctcgcatcggctgcgataatggctggatcaaggtccccgtccggtgaacctcctaccgtccatgttgcatcatcatcagttcatcacatgaggcaatcttggaaggttgctacttgctgccaagatagtcctcactgcgaccactgcactcctaccgggagccct

SEQ ID NO: 411300 - DNA, 376 bp, Oryza sativa
tttacctacttagaatgctattgtgacagttcttttgtcacacgtgttcaaggagatgggttaataatatcaacaacatctggaagcacagcttattcattggcagctgggggatcgatggttcatccacaggtcccagggatccttttcacgccaatctgtccccattcattatcattcaggcctttgatactacctgaatatgtgacattgcgtgtgcaagtgccaatcaatagcagagggcaggcatgggcatccttcgacggcaagggcaggaagcagctagggccaggtgatgcactcatctgcagcatttctccatggcctgtgcccactgcctgcctggtggactcaacaactgacttcctgcgaagca

SEQ ID NO: 411301 - DNA, 363 bp, Oryza sativa
ctggatttgagtggtattcttacagtgttcttctgtggtattgtaatgtcgcactatacctggcataatgtaacagagagttccagggtcacaaccaagcacgccttcgccacattgtcatttatcgccgagacatttctatttctttatgttggtatggatgcattggatatggagaagtggaagattgtcggcgaaacattcatcccaatgaatctattgctctgagctccactattttgttcttggtgccggtcgcatgacctgcttctgtctcctcactatctttcttggcaaatttcgacccctaaatctgtcgatggaacgatctcctatttaaccagatagttatcattttggtgt

SEQ ID NO: 411302 - DNA, 577 bp, Oryza sativa
  unsure (1)..(577): unsure at all n locations
tgtaagcactgttgctagggcttctttcatgtagggaaaggaaaggtgatttcagttgcctgactgctgccagaatctgcgaagcatctacaagcgacgccgtcgttcaggcagccggcacggcaatgccggttccccttgctccatacccaaccccgcctgtgccatttacacctcccaatggggctcaaagccagctcgtgtgctctgggtgccgtaatctgctcatgtatccagccggagcaacgtcggtttgctgcgcagtttgcagtaccgtgactgctgtgcctgctcctggaaccgagatggcgcagttagtttgcggaggatgccacactctcctgatgtatatacgcggtgcgacgagtgtgcaatgttcttgctgtcacactgtcaacctggctatggaagcaaatcaagttgcgcatgtaaactgcgggaactgccgcatgctgctcatgtaccagtatggcgcacggtctgtcaaatgcgcagtctgcaattttgtgacatcagttggagcctcacctggtacagaccagaagcctagcagctgaactgttangtgccataaata

SEQ ID NO: 411303 - DNA, 307 bp, Oryza sativa
tagagagagagagagatggcgtcgccgccggggccgtctaaaatgcgctcgagctgcgcctcaccgcgcgcgcgctcccatagccgacgcctcgccttctcctcacccaggaaagcatctcgagtgagggcatcatccatggctgacaagtcctcgaagaatgacatcattgcgcccccttccatactttctgcacacttttccaagcttggcgagcaggtaaaagctgttgaggcggcaggaagtgactggatccatgtagatgtcagggatggacttttcgtgcccaataaaacaatctgaccct

SEQ ID NO: 411304 - DNA, 425 bp, Oryza sativa
gtttaaccccaccaagtcctccaaggccatgggccgggacttgcgtgtgcacttcaagaacacccgtgagacagcttttgctatcaggaagttgcctctgggcaaggccaagaggtaccttgaggatgtgattgcccacaagcaagctatccccttccgtaggtactgcggtggtgtcggccgcactgctcaagctaagtcacgccattcaaacggtcagggacgctggcctgccaagtctgctagattcattctggatcttcttaagaatgcagagagcaatgctgaggtgaaaggtctggatgttgatactctttatgtgtcccacattcaagctaaccaggcccagaagcagaggcgccttacctaccgtgctcatggacgcatgaacccttacatgtcctacccgtgccacattgagctta

SEQ ID NO: 411305 - DNA, 466 bp, Oryza sativa
gttcaagcaaggcaccaaatccccccaccatggatcaccgcctcctcctcctcggcctcctcctcctctccccggcggtggccgccgcctcagtccccggcgaggaggagccgctgatccggcaggtggtcggcggcggcgacgacaacgagctggagctgaacgcggagcgccacttcgccagcttcgtccagaggttcgggaagtcctaccgtgacgccgacgagcacgcgtaccggctctccgtgttcaaggccaacctccgccgcgcgcgccgccaccagctgctcgacccctccgcggagcacggcgtcaccaagttctccgacctcaccccggccgagttccgccgggcctacctcggcctccgcacgtcgcgccgcgccttcctgcggaggctcggcgggtccgcccacgaggcgcccgtcctacccaccgacgggctacccgacgacttcgactggag

SEQ ID NO: 411306 - DNA, 545 bp, Oryza sativa
cttgttgaagcaaatccagctatttttactggatctgaggtccgtgtggagcaaccagagatgcctctaacgcactttgcaattgctttcaagggttcatcatgggctaaccctagctcaattcctcttatggtgatccaaagcatattgggaacttggaataggagcattggggttgggaactgctcagggtctgctttagctcgtggtatcagcaacggtaatttagctgagagcatgattgcattcaacactaactaccgagatacaggattgtttggcatctgcactattgctcagccggattccctatatgacctatcacagttaataatgcaagaatttagaagacttgcatttgaagtgtcggaaacagaggttgctcgtgctcgtaatcagttgaaatctgctcttttacttcacattgacggatccactgctgtttctgaaaataacggccgtcagatgctaacgtatgggcgagtaatgccattcttagagctctttgctcgcattgatgctgttgaccgtgatacagcaatgga

SEQ ID NO: 411307 - DNA, 415 bp, Oryza sativa
ttctctcgaagaaggagaagaaggagaggagcagccatggcgtcgtcggtggcagcggcggcgagcacgttcctggggacgaggctggcggacccggcgccgcagagcgggaggatcgtggcgaggttcgggttcggcggcgggaagaaggcggcggcgaacaaggcggcgaggccgtcggcgccgacgacggacaggccgctgtggttccccggcgcggtggcgccggactacctggacgggtcgctcgttggcgactacggcttcgacccgttcggcctcgggaagccggcggagtacctgcagttcgagctggactcgctggaccagaacctggccaagaacaacgccggcgagatcatcggcacccggtttgagaccggcgaggtgaagtccaccccgttccagccctaca

SEQ ID NO: 411308 - DNA, 471 bp, Oryza sativa
ttttatgtcaactcctcaccttagtggcattgctgctctcatcaagggaacacacccagattggtcatccgcagcgatcaagtccgcaatcatgacaacagcttatgttgttgataaccagaagaaggcaatcctggatgaaagatacaatattgcagggcatttcgcagttggtgctggacatgttaatccttctgaagccattgaccccggtctgatctatgacattgatgatgcacaatacatttcatatctctgtggcctgggttacacatatgttcaagttgagataattgcaaatcagaaagatgcctgcaaaggaagcaaaataactgaagctgaacttaactatccatcagtagcagtaagggcaagtgctggcaagcttgtggtgaaccggactgttactaatgtgggagaagcaaattcaagcctacaccgtggaaattgatatgcccagggaggtgatga

SEQ ID NO: 411309 - DNA, 541 bp, Oryza sativa
  unsure (1)..(541): unsure at all n locations
gctttttagctaattaagcagcaacttaacttgatcttcttgtgaccgatcgatggctcgcccggcgaataataactatgcggcggcggcgatggtggtggcgctgctggtggcggcgccggcggcgagcgcggcgacatgcgggcaggtggtgagcatgctggcaccgtgcatcatgtacgcgacggggagggtgtccgcccccaccggcggctgctgcgacggggtcaggaccctcaactccgtcgccgccaccaccgccgaccgccagaccacctgcgcctgcctcaagcagcagaccagcgccatgggcggcctgaggcccgaccttgtcgccggcatcccctccaagtgcgacgtcaacatcccctacgccatcagcccttccaccgactgcttcagggtgcactgatgagcggatcaacgtcgacaagtgatgcgacaatataaaggagagatcgatccatcgatctccagctctcatttcgnggatgctatgtgcatgcgccgccgcaatgatcgagctagaaatatatatgca

SEQ ID NO: 411310 - DNA, 563 bp, Oryza sativa
  unsure (1)..(563): unsure at all n locations
tttccaatcagtgttgctgatcgtgctcctaatgttgttgcaatcaatgtaagcccaattgaatatggccatgttcttctcattccccgtgtactggaccgcctgcctcagaggattgaccaggagagcttcttgcttgcactgcacatggctgctgaagccgcaagcccatacttcaggcttggctataatagtttgggtgcctttgcaaccatcaaccacctccactttcaggcatactacttgacagtgcctttccctgttgagaaggcagctaccaagaggattttccttgctgagggcacaatgaatagtggagtaaaggtgtccaagctgatgaactaccctgtgaggggactggtttttgagggaggcaactcactgagcgatctggccaatgtggcttccagcgcttgtatctggctgcaggacaacaatgtgccttacaatgttcttatctctgactgcggcaaaaagatcttcctcttccctcagtgctatgccgagaagcaagctctgggagaagtgagccaagagctactggacacgcangttaacccaac

SEQ ID NO: 411311 - DNA, 542 bp, Oryza sativa
  unsure (1)..(542): unsure at all n locations
cagggtgctgcaggcggggaccatattcgcgccaaggacaagaacttttactgctttgaggtccaagttcacttcactggagaactagttgacggtacgcagttcgtgtcaagccgagaaaatgacattccagagaggtttatactggggcaagaggatgtgatgcatggtttcaacttagctgtcagttcgatgcaaccaggggagaaagctatattcactatcccttcagcgttaaccatgacaaaagctggctcccctgctagcatcccgtcaaacatacctcccaaccaaacactacggtttgagattgagctcatcgccatgtttactataattgacattttcaaagatgaaggcatattgaaaaagattgtcaagaacgcagaacccgacagaaaacaatctcactcaagtgattttgtatttgtgaaatacgacgcatgcctgatggatggaacttcaatgtccaaatctgaaggtgttgaattcagccttaccgacggcttcttttgtctgcatttgcacatgctgngcatact

SEQ ID NO: 411312 - DNA, 414 bp, Oryza sativa
tttcagggaagcctgtcatagtcaaacttaagtggggcatggaatacaaaggatacgtcgctactgcggactctaatatgaatctgtagctggctaatacagaggagtctattgatggacaattctctggaaacctgggagagatactgattaggtgcaacaatgttctgaatctgcgaggagttccacaggatgccgatatagaggatgcagaacgagataacctggacctatgcgcagatcgatttgcgtaatatgcacgatgacatgaacaattcaagagcaatgtaaaattgatgcacaggatgctgtgtgagctggatcttaactatggtcatgatatggctatattaggcattgaaactgacttcatattgactagtgccattgctcacatgtgtgagagatcatatt

SEQ ID NO: 411313 - DNA, 452 bp, Oryza sativa
tccgttacgcgtgggctgctcatcctcctcttctactactcgtcctctttgctctattcacagctagcaacaagaaggaggcttacacatgcatgtgcacggtctctgccggacgcatatgaatcaggcatgaatagggggcacatcagcagctcggagctcatcgacgccaagctcgaggaacgccggatctccacggccaagcactgccccagctgcggcaacaagctcgactgcaaaccggattgggtggggctaccggcaggagtcaagttcgatccgacggaccaggagttgatcgagcacctcgaggccaaagtgagggaagaaggctcaagatctcatcctctcatcgatgagttcatacccacgatagaaggggaggacggcatatgctacacccaccctgagaaacttccaggtgtgaccagggacggcctgagcaagcactt

SEQ ID NO: 411314 - DNA, 511 bp, Oryza sativa
ccatcgccggcaagagagagagagctagctagctaggatgggttctacagccgccgacatggccgcggcggccgacgaggaggcgtgcatgtacgcgctgcagctggcgtcgtcgtcgatcctgccgatgacgctcaagaacgccatcgagctgggcctgctcgagacgctgcagtccgccgccgtcgccggaggaggggggaaggcggcgctgctgacgccggcggaggtggccgacaagctgccgtccaaggcgaacccggcggcggccgacatggtggaccgcatgctccgcctgctcgcctcctacaacgtcgtcaggtgcgagatggaggagggcgccgacggcaagctctcccgccgctacgccgccgggccggtgtgcaagtggctgacgcccaacgaggacggcgtctccatggacgccctcgccctcatgaaccaggacaaggtcctcatggagagctgggactaccttaaggacgcagtcctggaccgcggcatcccgttc

SEQ ID NO: 411315 - DNA, 472 bp, Oryza sativa
ttttacttctttgcaaaagaagagctcaactgcaatctaacggcggtgaaagaagacctgattaagcctgttactgtaagcttcaaagagggtcttggtcagaagttcagacagccttctggcactggaatcgacttctccgtgtttgaggattccgagttattgaagcagggggacatggatgtatatccacttgcagttaaagctgaaacaaccatgcctgttgatcaaaagttggaaggagaagatcaaaagatgaaaactccaaactcacagatcacacaggctctgtttgaaaagaaagaaagcggtgattatcaagttcgagttgctagccagatcctttgggtcaatggaactaggtatgagttgcaggaaatatatggaataggaaactcggtggaaggcgatgctgatgccaatgatcctgggaaagaatgtgttatttgcctcttcgagccaagggatacta

SEQ ID NO: 411316 - DNA, 469 bp, Oryza sativa
tgttccattctcatttcccaaagaccgcaaaaaaattttccttccatctctcgccgcatttccctttccccctatgcggatccgctcccttgcatccaccgccattccccgcgtctgatccgtcgtcgttgtggaggatgagggaagggggagcgggcgaggggcagggcgcggccgcggatgaggcgacggggttcgaggtcgggatcgtcgtgcccaagctctaccgcggcgctgcggccgggtgcggcgaggtcgagaactgcgtggcgcggctggtgcaggagctggaggacgtagggctgatcgtcgagcgcgtccgcggcgtccccgcggagttcatcaagctgtctgcgcccatggggaccctggggagagctgcagcggagatgaacatgaagaagctaacttatatcggaatggaactgcagtttgaatgggaccaggttggagcattcgtcaggcagcc

SEQ ID NO: 411317 - DNA, 518 bp, Oryza sativa
tttgattgttttactcctctggataaaggagtgaatagtaaacatccaggtggatttatttgggccagtgagaagacaggatttagacacctgtctcttcatgacaagaatggtgtgtgcttggggcccctcacacaaggtgattggatgatcgaccaaattgctggtgtcaatgagagttctggagttatatattttacaggcacattggatgggccattggagacaaatctttactccaccaacctatttccggattggagccttcccttgcaagtccccaagaggttgactcatggcacaggacgtcattcagtaattcttgaccatcagttgctgaggtttattgatgtgtatgactcaataaaatctccacctgtgatcctgctatgctctttgcttgatggaagtgtgataatgcctctatatgagcagcctctgactgttcacccgcttataaagttcagcagctgtctacagagatagtacagattgaaggaaaggatgggactgcttta

SEQ ID NO: 411318 - DNA, 576 bp, Oryza sativa
  unsure (1)..(576): unsure at all n locations
tttttcctctcctcccgtcccgccgccgccgccgacgacgacgactacgtccagccctcctccgtaatcccccacttgttgggcctgcaccttgtggtagccactctttaatcaatggagagcacagagcccctacaggatatcatgtgcgagtttcgtgcgggtaagatgtcccttgatggaacacgagtgatcccagacacacgcaagggtcttgctcgcataggaaggggtgaagaaggcttggttcattttcaatggcttgatcgtggacagaatctagttgaagttgatcaaattgtcttccctgaggaggctgtctttgagaaggtaacacaatcttctggaagggtttacatcttgaagttcaggcacgatagcaggaaattcttcttctggatgcaggagccaagtgctgatgacgactcacaaatatgtcgccaagataatgcctacataaaccgancattagatggtgaggcagtttctattgaagctgaaatgtcacatgaagacacagctgatgatgacatctcctccagagctgggaanttagctgaccagagcatgactgct

SEQ ID NO: 411319 - DNA, 568 bp, Oryza sativa
  unsure (1)..(568): unsure at all n locations
gcttttattacgtccacatatctgcagaatgcagacagcttattgcccgcatttttgtcaacaatccattgaggagaatcacgatgaaggaaataaagagccacccgtggttcttgaagaacctccccagggagctcacggagactgcgcaagccatgtactacaggagggacaactccgtgccttccttctcagaccagacctcagaagagatcatgaagattgttcaagaagcaagaaccatgccgaaatcatccaggacaggctactggagcgacgcgggttcagacgaggaggagaaggaagaggaagagaggccagaagagaacgaggaagaggaggaagatgagtacgataagagggtcaaagaggtccatgcgagcggngagctccgtatgagctcactgcgcatatgaaaaagtttgtgtgcagctattgtgtagataatccggcttactatggaactgcggtgtatgcaattttcgcttgtaatttgcttctgtttgggcgttcttcgtgtaacataacttacttgggggcgcttggacttcaattgcctgattatgtt

SEQ ID NO: 411320 - DNA, 250 bp, Oryza sativa
atctcattctcctaattgtcatcactagcttctagctagcttaattaattaattagccatggcggaggagaagcaccaccaccacctgttccaccacaagaaggacgacgagccggccaccggagtagactcctacggcgagggcgtctacacgtcggagacggtgaccaccgaggtggtcgccggcggccaggacgagtacgagaggtacaagaaggaggagaagcagcacaagcacaagcagcacctc

SEQ ID NO: 411321 - DNA, 352 bp, Oryza sativa
gtggctccccatcgtcgtccccatctggttcctcgccatcatcttccccttcttcggccccatcaactccgccgtcggcgcgctcctcgtcagcttcaccgtctacatcatcccggcactcgcccacatcctcacctaccgtacggcctccgcgcgcatgaacgcggcggagaagccaccgttcttcctgccgagctggacggggatgttcgtgctcaacatgttcatcgtggtgtgggcgctcgcggcgggcttcgggctcggcggctgggccagcatggtcaacttcatcaggcagatcgacacgttcgggctcttcgccaagtgctaccagtgtcccaagcccgccccg

SEQ ID NO: 411322 - DNA, 376 bp, Oryza sativa
atttctgtgttgatcaccctgacctacctggggagggggagcggcccaagagatcacgactgccgctacgaccacagctcctcgcccgccggcggcggaggctggctccatccgcgggcgatcgtacacggttgatgatcaggctgctactggtgctgagacagcgggaagactgacgaccactgagcctgcctgtgcacacagggtcgtgactgctgcgacactggccccatctgagcgaccaggaaggatggttggtcgcatacaagtggcggctccatgccaagaatttgcttacatacactatcatgatctgcaagactgaccacacttcaatggatggtgggacgtcgttagctctggccctgtggttgcc

SEQ ID NO: 411323 - DNA, 493 bp, Oryza sativa
ccattcatcattattctatttattctgacctccatacttcgatcgagatattggacatcgaatgccactctttaaaatggaaaaaaaggagtaatcagctgtgacacgaaaaaaaacgaatccttttgtagctcatcatttattggcaaaaatagaaaaggtcaatatgaaggaggagaaagaaacaatagtaacgtggtcccgggcatctagcattctacccgcaatggttggccatacaatcgcgattcataatggaaaggaacatatacctatttacataacaaatcctatggtaggtcgcaaattgggggaattcgtaccaactcggcatttcacgagttatgaaagcgcaagaaaggatactaaatctcgtcgttaactgaattcagaatagaaagattcaaaataaaaaaaaaaagaaataggtaagcggggaataaccttatttatgacaagtttcaaactggtaaagtatacccctaggataaag

SEQ ID NO: 411324 - DNA, 199 bp, Oryza sativa
catacgtgatgtaatcatgataaaattgaatgtgtcaatgatggtcgattcgtatgccattatatgcgaattgactgttgtttctattgttatgatcaacttatcctgttattactgatggcaatgcccctgtggacgcgtggccaagcgtgctgctgagaggacatatggggtctgatattatatgttgaaagaaact

SEQ ID NO: 411325 - DNA, 486 bp, Oryza sativa
tgtctccatctgtgcacggagggattcattgtccctccggccaatttcccggccggccggaacggcggaacctcgtccatgatcacttgaaacacctcccttgctcttcatggccatggagacgacgagccaagattcgcaggtgatcatgggccggtacaagctcggccggctcctcggccgtggcacgttcgccaaggtctacaaggcctataagttggccaccggcgaggccgtcgccatcaaggtgttcgacaaggaggcggtgcagcggtccggcacggtggagcaggtgaagcgcgaggtggacgtcatgcggcgtgtgcaccaccgtcacgttattcgcctccacgaggtgatggctacgcggtccaagatctacttcgtcatggagtacgcgagcggcggcgagctcttcacccgcctctcccggagcccgcgtgtaccggagcccgtcgcgcgccgatactttcagcagctgatcac

SEQ ID NO: 411326 - DNA, 557 bp, Oryza sativa
tttcatatggggcccggaacctggcgcaaggcctacggctcgctcaaggactccaccaaggtcggactcgccaacttcaacagcgagtacaaggatttggatatcgccattgtgaaggcaaccaaccacgtagagtgcccgcccaaggagcgatacctcaggaagatactctttgcgacctcggcgaatcgaccgcgatccgatgttggttactcaatatgtacattggctaggagattatccaagaccaagaactggattgtcgcattaaaaacattgatagtgatacatagattgctcagagaaggtgatgggacatttaaagaagacttcttgaactattcttatagaggaactattttgcagattccacaattcaaggatgattcgagccctttagatgaacgggtcgagtgctctagaattctaaaatatgatgctgaagcggatcgcctggtgaaattaccccaagcttctggcaaggcacacaagagaacaagaactctaccatgtggagatcttttagatcacttgcctgcattgagagactactactc

SEQ ID NO: 411327 - DNA, 548 bp, Oryza sativa
  unsure (1)..(548): unsure at all n locations
ttcagatatagagcagaggaaagctaagctaaattagttagttagattactagtctctggcagctgggtgatcttaatttgatcaaagaagaagaagaagaagcaagtttttttagctcctgagtatattataggattaactactactaggatagtactcctatatgagaagaagatgatgcgcgggaaggatcagaaatttccggcgatgaagaaggagacggcggcggcggcgaaggaggaggtgtgggaggtgcggcccggcggcatgctggtgcagaagcggagcccggagtcggagccaccgccgggcggcgcgccggtgccgacgatccgggtgaaggtgaagtacaacggggtgtaccacgagatctacatcaactcgcaggcgtccttcggcgagctgaagaagctcctgtcggagaagacggngctccaccccgacgaccagaaggtggtgtacagggacacggagagggactccaaggcgttcctcgacatcgccggcgtcaaggaccgctccaagatgctcctcctcgaggacccca

SEQ ID NO: 411328 - DNA, 482 bp, Oryza sativa
ataagctagatagaagggaggtcgatcttaacggcagtacttccagcttcgcacatcactacctgaacggagcaacttctattcttagtcgcaacaaaacagatggttcccacgctggttcatttgaccttgagaagcttgaagaacctttcttctcaaataaattttctgttcttatcaatgttctttcgagatacgggttgcaggaaaacatgaaatgcattgcttttgcgaaaagaataactgttgcaagagcaatatcaaacattctccaaaacttgaagtgtcttgaattttggaaatgtgagtttcttgcgggctgccactcaggatcaaagaacatgtcaaggaataagacggatgctattgctcaaaggttctcttctggtgaggcgaatcttttggctgctacaagcgtaggtgaagagggacttgatattcagacgtgctgccttgctgtgcgatttgatcttccagaaact

SEQ ID NO: 411329 - DNA, 442 bp, Oryza sativa
tttttggttttttttttttttttttttaatctaacatacgcaaactgatattatcacaatgttagccgatgacaatggaaagagtaatctaggtacaagcggatcattgacggtggagacaagacattggctgtaccacaacacccaccaggggggccaacaaggagcgctatccgttataggacgagagaaaaagtaaaacatcacgatgtgaagtgaaactgaataattctagtagacgatgatgatgatggataggctccttaggacgcccgccgcccttagcgtcttgctgctcccatcttgtccactggaaggctcactcgtcatcgccttcattctcttcgctgccctcgtcgtcatccttatcattgacctcggacttggacttgtcagaatcctccttgggggcctccttttcctccttggcgggtgccttttt

SEQ ID NO: 411330 - DNA, 395 bp, Oryza sativa
gctcaaggccgagtacaacaaggccattgctgcctacaacaagggcgagagcactgccaagaaggcacccgccaaggaggaagaggaggacgacgaggaggaatctgacaagtccaagtccgaggtcaatgatgaggatgacgacgagggcagcgaagaggatgaagacgatgacgagtgagccttccagtggacaagatgggagcagcaagacgctaagggcggcgggcgtcctaaggagcctatccatcatcatcatcgtctactagaattattcagtttcacttcacatcgtgatgttttactttttctctcgtcctataacggatagcgctccttggtggcgccactgggggttgtgggtgcagccaatgtcttgtcttcaccgtaatgat

SEQ ID NO: 411331 - DNA, 320 bp, Oryza sativa
ccaccacctcgactcggcgggaggagaaggatacgcgattacaggggaaggtgcccgatcctgccattcctaaggctctggcagaagtggactgagccagggcaaggtggtggaggagtagttcgggcaattgggaaaggtactgctggtcaggagtctgaatttgctgttcgaaaatcccgcagaatgacccctgcccatggaggccttgtacacaatgacaactacaacaggcgtgagtacggggtccaagtcctgatcgaaggtatacctgggatgacccgcctcaatgctcgtcaacatcatgcaagacgcttcat

SEQ ID NO: 411332 - DNA, 435 bp, Oryza sativa
atgcacccgcggtagcaattcgcatcgccccgccctcctcgccgcgcggattcgctcgccgcccccgccaccgcacccccatggacgcctccgccggatccggcaatgcctccggtggcgccggcgccggcgcgtccgcgtgctgctactactccctgctcggcatccggaagaacgcgtccgccaccgacgtgcgcgccgcctaccggaggctcgccatgaagtggcacccggaccggtgcgtgagcgaccccggcgaggccaatcggcggtttcagcggatccaagaagcgtactccgttctgtccgacaaggggaagcgagccatgtacgaagccgggctgttcgatccccctcgacgacgacgaccaggatttctcccgattttcatgcaggagatgctggtggatgatgataacgtgaaaaacgagaagc

SEQ ID NO: 411333 - DNA, 301 bp, Oryza sativa
ccgccgaccaggcggaggaggccatcgtggcggacgccgggaaggaggaggcggaggtgcgcgcggccatgggcgtcgagcaggacggcaagttcagcatgacgagcctcctgtggcacggcggctccgtctgggacgcctggttcagctgcgcctccaaccaggtggcgcaggtgctcctgacgctgccgtactccttctcgcagctcgggatgctcttgggcctgctgctgcaggtgttcttacggacttatgggtagctggaccgcctaccttatcagcgttctctacgtcgagtacc

SEQ ID NO: 411334 - DNA, 297 bp, Oryza sativa
ccctgggtctgccggtggcggcgacggtgaactgcgccgacaacaccggcgccaagaacctctacatcatctccgtgaagggcatcaaggggaggctcaaccggctgccgtcggcctgcgtcggcgacatggtcatggccaccgtcaagaaggggaagcccgaccttcggaagaaggtcatgcccgccgtcatcgtccgccagcgcaagctgtggcgccgcaaggacggcgtttaccatgtacttcgaagacaatgcttggggtgattgtgaatcccaagggtgagatgaaaggttc

SEQ ID NO: 411335 - DNA, 315 bp, Oryza sativa
gggcaacatcgtctttcggacgctttgatgactccttcagcgcggcctccctcaaggcctacgtcgccgagttcatttccaccctcgtcttctgttttaccggcgtcggcttcgccatcgcctacaccaagttgaccggtggtgcgccgcttgacccggccgggctggtcgtcgtggtggtgtgcccacgggttcgggctgttcgtggcggtggccatctgcgccaacatctcctgcggtcacgttaacccggacgtcaccttcggactttgcccttcgcggccagatcaccatgcttaccggccgctttttact

SEQ ID NO: 411336 - DNA, 378 bp, Oryza sativa
cgcataggcggcggacgaagagctcccggcgatgggcggcgacaaggagaacctcgacctctccgacctcaacgcctcgctgcccgccgccgccgccgctctcagcgccgaggaccgcgccggcctcgtcaatgccctgaaggataagctgcagagcttggcgggtcagcacacggacgtgcttgaggcgctctcccccaatgtcaggaagcgtgtcgaatatttgagggagatccagggccagcatgatgaaatcgagttaaaattctttgaagagagagctgcgcttgaagcgaagtaccagaagctttatgaacccttgtacacaaagaggtataacatagtaaatggagttgttgaggttgatggtggaaatga

SEQ ID NO: 411337 - DNA, 411 bp, Oryza sativa
ggcggcggcggcggtggtcgcggtggcggcgctggaggcgatcaacgtgacgacggtggcgttcgaggaggggtacacgccgctgttcggcttcgacaacatcctccgttccgccgacgaccgcaccgtcagccttcttcttgaccgctccaccggctctgggttcatgtcgtcgtccatgtaccagcacggctttttcagcgcctccattaagctcccctacgactacaccggcggcgtcgtcgtcgccttctacacatcgaacggcgacgtgatcgagaagcggcacgacgagctggacttcgagttcctgggcaacatcccggggaagccaatggcgggtgcaaacgaacgtttccggcatggcagcgtgagccggggagggaggagcgctacctggttccctttgac

SEQ ID NO: 411338 - DNA, 495 bp, Oryza sativa
attatcaagcaaggctagggatcatggctgctggatgttatggccttccacaatttcggatgcgtgtatttttattaggctgtcattctaaggagaaattacccccttttccactgcctacgcatgaggcgattgtgaagaatggctgcccgttggcttttgagcgtaatttggttggttggcccaatgacacaccaatgcaactagcaagaccaattgtccttgaagacattcttttctgatctcccagaagttactgacaacattatatctttgaaatatctaaatttgaatggcattttgatacttaagttgaattattaggtggcaaatggggaaagccgcgatgaaatgctgtatgttaagggtccttacactggattccaaagatacattcggtcatttaatgttgaagtgcatggtcccagagcttatgttacaaagattccaattctcaaaatgtatgatcatcgccattgtactggatatgattac

SEQ ID NO: 411339 - DNA, 390 bp, Oryza sativa
cgaccaagatcgagatggcccgtgcacagctggtgttggtcgcccttgtggcagcggctctgctcctggcgggcccacacaccaccatggccgtcatcagctgcggccaggtcaactccgccgtgtcgccctgcctcagctacgcccgcggcggctccggcccgtcggcggcctgctgcagcggcgttaggagcctcaactccgacgtcagcaccaccgccgaccgtcgcaaccgtctgcaactgcctcaagaaacgtggccgggagcatcagcggccttaacgccggctatgccgccagcatccccttcaagtggcgtgttaggatcccctacaccattaggcccttcattgactgttcagcgtgaactattccatcgatccgctaccc

SEQ ID NO: 411340 - DNA, 428 bp, Oryza sativa
gagggagaggagcgctgccgattttccggagggggagatctttttcttctccctgaaggttcgagatcgatctgcgacgaggaggagcggggaatcgtaactttatttccgaggaaatttcaacaaattgatgcactaatggagtccaagggtggcaaaaagaagtctagcagtagtcgttcctccctgatgtacgaagctcccctcggctacagcattgaggacctacgacctgccggctggcatcaagaagttccgcttctgctgcttacttccaactgcgcgaggaagccctcttgatagcccccttggcttaccttgatctaggagtttagttactcctctgaattcttgttctgggctatcttacaactttcttggtagctgcttcccagtgacctggaagggtatcagtcctgcttccttct

SEQ ID NO: 411341 - DNA, 357 bp, Oryza sativa
  unsure (1)..(357): unsure at all n locations
agatgtccaagatggcggaggagaaggtgctggcggcgccggccaccgtcgacggcgggatgcagtcctccggggacctgcaggcttcgtcggcggcggcggcgcgtgtgcggcccgtcgagacgctcctccgcgccgcgccgctggggctctgcgtcgccgccatggccatcatgctccgcaactcggtcaccaacgagtacggcaccgtctcctactccgacctcggcggcttcaagtacctggtgtacgcgaacgggctctgcgccgnctactcgctggcgtcggcgttctacatcgccgtgccgaggccggcgacgttgtcccgctcctgggtcgtttttcttcctcgaccag

SEQ ID NO: 411342 - DNA, 394 bp, Oryza sativa
cgtatacatgggccatccgtcatccagcaagtggttatgttcaaggaataaacgaccttcttacaccattcttggtcgtattcttatcagagcatctagagggcaacatggacacctggtccatggaaaagctttctccacaggatgtttctaatattgaagcggactgttattggtgtctttcaaagtttttcgatggtatgcaagaccattacacctttgctcaaccaggaattcagcgccttgttttcaggttgaaagaaccttgtcattcgattagatgaacctgtgtcaaagcacatggaggaacaaggaatggactttctttagtttgcgtttcgttggttcaattgcctaatgactcgcgagattcctttcatcttgtaacacgctt

SEQ ID NO: 411343 - DNA, 370 bp, Oryza sativa
aacatcgtcctcgccgtcgccgtggtggcagcgctggtcggcggcgggtcgtgcggcccgcccaaggtgccacccggtccgaacatcacgaccaactacaacgccccgtggctccccgccagggccacctggtacggccagccctacggctccggctccaccgacaatggtggcgcgtgcgggatcaagaacgtcaacctgcctccctacaacggcatgatctcctgcggcaacgtcccaatcttcaaggacggcaggggatgcggctcatgctacgaggtgaagtgtgagcagccggcggcgtgctcgaagcagtccgtgacggtgttcatcaccgacatgaactacgagcccatttcggggtaccact

SEQ ID NO: 411344 - DNA, 342 bp, Oryza sativa
ttattgatgcaaacaccggacgttctaggggctacggctttgttaggtttggagatgataacgacaaaactcatgcgatgactgaaatgaatggtgcatattgctctacccggccaattcgtataggacctgcaacacctagaagatcttcaggtgattctggctcctcgccaccaaggcagtcagatagtgactcaactaacaggacgatatatgttggcgggcttgatcccaacgctacctgaagatgaactaaggaaagcatttgctaagcatggtgatcttgcctttgttaaaattcctgttggcatacagtgtggatttgttcaatttgtcaacaga

SEQ ID NO: 411345 - DNA, 314 bp, Oryza sativa
cacaaatcccgcgcgggttgggaagagcgagctcgtgaggagagcagagggaaagcgcgagggggaaggaggtggaaaggtgcacaaggtcagactaagtttgcgttgaagaacaaaggagaggaaaaatgtcgcctgctgaggcatcgcgtgaggagaatgtgtacatggcaaagcttgccgagcaggctgagcgttccgaggaaacggtcgaattcatggagaaggtggcaatagaaccacctgatcggttgtgtgagcctcaacccgttagagcgaagccgggaaacctttgccttttcttgatgggcttt

SEQ ID NO: 411346 - DNA, 381 bp, Oryza sativa
accgcgttgggcaggaaccccgacgtgaactatgtccaggaggaagaggaggactaggagggcaacaagcgcgccgtcttgctcggcccccaggtacccctcaaggagcagttcgagctctacaaggatgatgagagcctgaggaggtggaaggagcaactcctctgccaggttgatactgaacagcttggatagactgctgagccggaggtgaaggtgctgaacctgaccattcctgttccggataggccggaccttgggctgtcgatcccgtttgttccctaccagaaaggctatctccttcttgcttaaggaccggaggacttacagtttccgctttaattttaattgtttcaacaacaatcttgtcatgccttaagt

SEQ ID NO: 411347 - DNA, 295 bp, Oryza sativa
gggccgtaagttcttcgttggtggctactggaaatgcatcgggaccactgatctggtggacaaaattgtgaaaattctgaatgagggacagattgcttctacagatgttgttgaggtggttgtcagcccaccttatgtgttccttcccgtggtcaagagtcagctgcgcccggagatcccagtcgctgctcacaattgttgggtgaagaagggcggggcttttcaccggtgaggttagccctgagatgcttgtcaaccttagtatttcctggcttatttttggacactctgaaag

SEQ ID NO: 411348 - DNA, 284 bp, Oryza sativa
ggggagctcctaggccgtctacctgctccggattctaccctcctcgttgctggtccaagcgaagcagcggtaatggcgtgcgggcgcaggcgtccacgactgagactaccgctgcgccggctgctgaggtgactactaaggtggagaaggtgtcgaagaagcatggggatggcgtggcgacgaacaagttcaggcccaaggagccgttcacggggcggtgccttctgaacacgaggatcaccggcgacgacgtccctggtgagacgtggcacatggtgttcagc

SEQ ID NO: 411349 - DNA, 246 bp, Oryza sativa
cgaagaagtacctcggcggcgcctttgatcctctcggcttcttcaaggtccccgtcaagctcgtggagtacaagctcatggagatcaagaacgggcgattggccatgctggcttttgtgggtttctgcgtccaacagttggtgtacccgggcaccggcccactggagaacctggccagccacctttcgtacccgtggcacaacaacattggtgacatcattatcctgagaaccaattcttacccct

SEQ ID NO: 411350 - DNA, 363 bp, Oryza sativa
acaagagagagagcgccagactctccccaggattcagccatgaagggggccaaatccaagggcgccgccaagcccgacgccaagttggctgtgaagagtaagggcgcggagaagcccgccgccaagggcaggaaggggaaggccggcaaggaccccaacaagcccaagagggctccctccgctttcttcgtttttatgtcagaccacttccccgattttcttctgccttcttttttttttttggaggggattttcgtttgatcttgtttcgcttagggaggagttccgtaaggagttcaaggagaagaaccccaagaataaatctgtcgctgctgtaagaaaagcagccggtgatagggggaa

SEQ ID NO: 411351 - DNA, 373 bp, Oryza sativa
ccattttctaaaaaaacagataatctaagatctgtttttcttgtcgtaactcgtaacagataatctcgtggaggatctattgagtgactttgaatttgaacttcagcctccgtatttgttataccgaaatgctgcacaagaagtaaacggtatttggttttataaccaacaagactgtgatgctgttgcaggtgtttttggaaggatattgaatgcttacgccaaagggcctccaaagcccaaaggacctttccacaaaaagtgagtttgaggaattggaagctgttcctacattccgtgctatagatggcccccttgaacctttttcgtcggccactgttctagtttctaatgcccctgatgaatcattgac

SEQ ID NO: 411352 - DNA, 293 bp, Oryza sativa
gatcccgacgttacatgggaggttgtctagtcgctcaagtgtgagaaggcatattcctgaggaagaagataaagatgatgaccatgagaggggggtctatctctcgttatgtacctccattgacgggcgttggcggcgccgccggcgcctacctgatgtgtctttgatcagtagtgactggctgctccatggaagaagaagaagatgggaagatgatgaaagggttgaaatcgacttgcgaagttgctagtgatatcggcgtatgacccagagttttagtgatcagatgtctt

SEQ ID NO: 411353 - DNA, 379 bp, Oryza sativa
ctcgccacttccaagcaaggggaagactggcaaggatggctggtatcccccaggccatggtgatgtgttcccctccttgaataacagtggaaaacttgataccttgttggcacagggcaaggagtatgtctttgtcgcgaactcggacaacttgggtgctattgttgacatcaagatcttaaaccacctgatccataaccagaacgagtactgtatggaggttactcctaaaacattggctgatgttaaaggtgtgaccctcatctcttacgaagggagagttcagctgttggagattgctcaagtccctgatgagcatgtgaatgaattcaagtcaattgagaagttaagatcttcaataccaacaacctgggggtga

SEQ ID NO: 411354 - DNA, 371 bp, Oryza sativa
atccggtagcgctgctgattggtttattcttctgtgttagcctagatgggtcttcccacctgttttcaccgatgagaaacactctattttcagacaaccctactcctgagacaccatttcctttcacaacagtttgttgaatctctgcaatttctgttatggagggaatggctgctccatttatgccatcctacaagagagttggattagaatatcatgccatgactacaggtactgcttatcgcttgaactttctttatatgcaaagtaaggaggccctatatatgggagcaactgctgcagaattgtagatagcgaattttttgttcagaaaagataattgtgttttcttaaacacagaatggtgtcat

SEQ ID NO: 411355 - DNA, 361 bp, Oryza sativa
tgaggtcgtccccgatcatcttcctgctcctggccgccgccgtcgccatcgccgctccgtggcaggttgcgcacgccgcgggcaagtgcggtaagacgccggcggagaaggtggcgctgaagctggcgccgtgcgcgaaggcggcgcaggaccccggggcccggtcgccggtcgcgtgctgcgcggccgtgcgcgacatctgcacgcaccagagccacgcgtgcctgtgcgccgtgctgctgttcagcaccgtgaggcgctcccgtgttaagccggaggtggccatcaccatccccaagcgcttgcaacttgtcaaccgccccgtcggctacaagtgcggggcttacacgctgcccagcct

SEQ ID NO: 411356 - DNA, 494 bp, Oryza sativa
tttccagaacacccagggtctcatctttgttgtggacagcaatgatagggaccgtgttgtcgaagccagggatgagctccacaggatgctgaacgaggatgagctacgtgatgctgtgctgcttgtctttgctaacaagcaagatctgccaaacgctatgaatgctgctgagatcactgataagcttggactgcactcccttcgccagcgacactggtatatccagagcacttgtgctacaacaggtgagggatttgaccgagggcctggactggctgttcagcaacattgccagcaaggcctaaattttaacaagatttgcataagctaggggagcttttggatggatcgatgggtatttagggctggggttggttcccaatatgtaaggtgaaattcggagctcaatagtattgagctttggtatgatttcacagtaatggttactgtacttgagcctacaagttttgaataacagttttccatgggtccgt

SEQ ID NO: 411357 - DNA, 341 bp, Oryza sativa
atcgcttctgcgctcatcaagatgctgctggagaagggatatgctgtcaacaccgacggtcagaaaccccgatgacatggcgaagaactcccacctcaaggacttggaggcacttggccccttgaaggtcttccgcgccgacatggacgacgaaggcaacttcgacgatgccgttgccggctgcgactacgccttccttgtcgccgctccgatgaacttcaattcagagaatcctgagaaagacttggttgaaagccggcggaaatgggaaccctaacccgatgagatcgtgcgcgaaggcggggacggggaagcgcgtgatcataacatcggcggacgct

SEQ ID NO: 411358 - DNA, 364 bp, Oryza sativa
gaagaagatgtcttgctgcggcggcaactgcggctgcggcagcggctgccagtgcggcggcggctgcggcggatgcaagatgttccctgatgtggaggccacagccaccaccaagaccttcgtcctcgctgctccatccaacaaggcgagctctggaggaatggagatggcggcggagagcggcgagaacggcggctgcggctgcaacacctgcaagtgtggcaccagctgcagcggctgctcctgctgctcctgcaactgaatctatcgtcgtcgtcgcccggctgcatgaggatttatcgtatggatgctgctactgccgatcagagctttgatcgaggccttaatttgctttgcattagta

SEQ ID NO: 411359 - DNA, 420 bp, Oryza sativa
tctattgaatgtgctaagagaattcgaatcaaagaaggaggcagagggtgaccaaattttgattaaggcatcattcctggctgagctacaaaggcgaatattaaaggccgaggcgacagtccgagaaaaggatgaagagaacgagatgcttcagcagcgacttcagcaatatgaaaaccgatggtcagaatacgagcagaaaatgaaagcgatggaggaaatgtggcagaagcaaatgcggtcattacaatcaagcctatccgtagcaaagaagagccttgctcttgatgagacgcctaggatgtccgactcatcggtcgaccagagctgggagagcaatggggttcacattggcagcgcgtcgcagctggttccacgcaccgttggacgggagatgaatgccagcatcagcgtcatcag

SEQ ID NO: 411360 - DNA, 332 bp, Oryza sativa
ctgtcgcagggcatcaagcgcgcgtcgcggtcgcacacctaccaccgacgcgggctctgggccatcaaggccaagaacggcggcaccttccccaaggccggcaagcccgccgccgccgtcgagcccaagttctaccccgccgacgacgtcaagccccgcgcccccagcacccgcaaggtcaaccctaccaagctcaggtcgaccatcacgcccgggacggtgctgatcctgctcgccgggaggtacatggggaagcgccgtgtgttccttaagcagcttaagtccggcctgctccttattaccggaccttttcaagatcaatggagtgccca

SEQ ID NO: 411361 - DNA, 435 bp, Oryza sativa
ggaactcatggctgatgcagataggctgcaagccgaaaaggaaaggtttgagattgaatgggagctgattgatgaaaagaaagaggagctacaaaaggaagcgatcagaattgctgaagaacgaagagcaataactgagtatctgaagaatgaatctgatatcatcaaacaggagaaggataatctccgtgttcagttcaaaagtaattcagaaacactctctcgtgaacacaaagagttcatgagtaagatgcagcaagaacatgcaagttggctgagtaagattcaacaagaaaggcaagatctgaagagagacattgatatccagagggtggaattgctaaattctgctaaggcaaggcagatggaaaaagattcttatttgagggaaaggaggaagagtttgagcagaaaaaggccaaggaactcgaacac

SEQ ID NO: 411362 - DNA, 320 bp, Oryza sativa
gcatcatgaggttaaggtgaaggacttcaagacccttctcttcggtgagaaggaggtcaccgtgttcggctgcaggaaccctgaggagatcccatggggtgagactggcgctgagtttgttgtggagtccactggtgttttcactgacaaggacaaggccgctgctcacctgaagggtggtgctaagaaggccgttatctctgcttccagcaaggatgcccccatgtttgctgctggtgccaatgagaaggagtacaagcctgacatcgacattgggtccaatgctagctgcactaccaacttgcttgctccacttgcca

SEQ ID NO: 411363 - DNA, 386 bp, Oryza sativa
cagataagtctactgtgcttgaccgggcaatgattgagcataacctccttagtgccagtaaactttacactaatatcagctttgatgagcttggagcattattgggcattgaccctaggaaggctgaaaagatagcatcgcgaatgatttatgaagataggatgcgaggttcaattgatcaggttgaagctgtgatacattttgaggatgacactgaagagctgcagcagtgggaccaacagattgcgggactgtgccaagcgctgaacgacatttctggacagcatgtcaagcaagggaatggctattcctgtgtgagctcttcaagtgcttcgatggtactcgtgagaactgtggtcaccgcgtcaggcctcacggacattttg

SEQ ID NO: 411364 - DNA, 309 bp, Oryza sativa
ggcgaagattaagatcgggatcaatgggttcgggaggatcgggaggctcgtggccagggtggccctgcagagcgacgacgtcgagctcgtcgccgtcaacgaccccttcatcaccaccgactacatgacatacatgttcaagtatgacactgtgcacggtcagtggaagcatcatgaggttaaggtgaaggactccaagacccttctctttcgtgagaaggaggtcaccgtgttcggctgcaggaaccctgaggagatcccatggggtgagactggcgctgagtttgttgtggagtccactggtgtttt

SEQ ID NO: 411365 - DNA, 137 bp, Oryza sativa
tgttatttgccaatctagtaatcttctcttcgctggatgctggctatatatatatatctagaacatatatataatgtttttctgcatttttagagatatggaaacgacctttggttaaaaaaaaaaaaaataactat

SEQ ID NO: 411366 - DNA, 448 bp, Oryza sativa
gctggtcaaaaggctaaggaggaacctttcaaacaaggtgaggatgacgcccaaaggagaaataaacttgtgcgagatatgagtgatgtaatgggagaaggcaatatagagagcatgctctcagttgaaatggggcttagagagctttcatcattgaaggtggaagatgctgttgtggttgcacttggtcaacaccggagacctagtattgttcggcaattcacatcagattttaaatcacctggtgaacctaaattcttggaggcgtttgatccttagccatgaagaggcagaagatgttagcttttagcaggcatggcttatatacttcttgagaagaagctaaactcatggtattgaggaagacattgctgaagaaccggttcagttttggattggtcgcaatgctatacccccaacttctcatgatgctatagatgtggagcga

SEQ ID NO: 411367 - DNA, 298 bp, Oryza sativa
ccctctcgtccccggcgctggccggcaaggccgtcgcgaaggtgttcggcgaggggcgcatcaccatgcgcaagtcggcggcgaagcccaagcccgccgcgtcggggagcccgtggtacggcgccgaccgcgtgctctacctcggaccgctctccggcgagccgacgagctacctgaccggcgagttccccggcgactacgggtgggacaccgcggggctcttcgccgacccggagacgttcgccaagaaccgggagctggaggtgatccactccaggcgggcgatgctcggcgcgct

SEQ ID NO: 411368 - DNA, 235 bp, Oryza sativa
tattctccacaaccataagggagaacataatctatgcaaggcacaatgcaacagagtctgagatgaaagaggcggctaggattgcgaacgctcaccatttcattagcagtttgccacatggctatgacacacatgtgggaatgaggggagtggatttaacttctgggcagaagcagcgaatcgccattgcccgtgtagtgctgaagaatgcacccattttgctgcttgacgaagc

SEQ ID NO: 411369 - DNA, 380 bp, Oryza sativa
caggaggcggcggcgaagatgtcgtggcagacgtacgtcgacgatcacctgatgtgcgagatcgagggccaccacctcacctccgccgtcatcgtcggccacgacggcaccgtctgggcacagagcgccgccttcccgcagttcaaaccggaggagatgaccaacatcatgaaggacttcgacgagccggggttcctcgccccgaccggactgtttcttggaccaaccaagtacatggtcatccaaggtgaacctggcgctgtcattcgtggcaagaagggatcaggaggcatcacggtgaagaagaccgggcaggcgctggtggtcggcatctacgatgagccgatgaccccagggcagtgcaacatggtggtcgagag

SEQ ID NO: 411370 - DNA, 434 bp, Oryza sativa
tgccaccaccaccaccatctctccccctcctcctcctcgtactttgtgagttctagctactagccaagaagcatggctgaggaaactggcaacgacaaccaggtggttcaaggtaatgagattgtcccaagcaatgaggaagctcaagctgaggaagttcagggtgatgaattggtccctgctgaggacttaactcaaggtgacgaggtccaaggaaatgaattggtcagtgctgagatcagtacccctccaacattaaggctgccgtaggaagaagtctctagtgtgggagcacttcactattgaagctgtctctggaggggctacacgggcgtgctgcacactgtgcaagcaaacttttgcttacagctttggttcaaaaattgcgggtactaaccatctcaagaggcacattacattgggttcatgcccta

SEQ ID NO: 411371 - DNA, 224 bp, Oryza sativa
agagagcgccagactctccccaggattcaggcatgaagggggccaaatacaagggcgccgccaagcccgacgtcaagtttggctgtgaagagtaagggctcggagaatcccgccgtcaatggcaggaaggggaaggccttcaaggacccctaacaagcccaaagagggcttccttcgttttttttcttttttattggaggagttcccttagggagtttaagggg

SEQ ID NO: 411372 - DNA, 235 bp, Oryza sativa
ggcaggcagaacacaattatatcaatatccaaacggcagcttttcacataaataagataaccgatagctcaaggttgagaatcaaaaaccgaaagaaataggttctttgagcagagggcagaacataaacaaaaatgcctgttgcaaattgcaagactacaggtaaacttaaatgccataaggagtttgtttggcagcataagatgaaactactgggataagggtactctcttac

SEQ ID NO: 411373 - DNA, 241 bp, Oryza sativa
ttgtcaagacccagaagacccatgcctacttcaagcgtttccaagtcaagttcaagagacggaggcagggcaagactgactacagggccaggattaggctcaccaaccaagataagaacaagtacaacacaccgaagtaccgctttgttgtgagatttacaaacaaagatatcacagctcaaattgtctatgctaccattgcgggtgatatcgtgatggctgctgcctactcccatgagct

SEQ ID NO: 411374 - DNA, 440 bp, Oryza sativa
gaacttattgtaacatatgagggatcaaggcttgcaattagtgacctaaggctgcttatggatactttccaccgcgaagactttactggtacatggaggagactattctcaagagtcaaaaaacacatcatctggagtgtcttgaagtcgatggctggaatgcaggttaagaagtttaaggcccacaatcgggaaacacatgatggagctgttcctgatcatgatctgaatttaagtgacagtgacggtgaccatcacggaaagcccgatcagtttcctgtgtcatggctgaagaggccgggtgaaggcgcaggggatggatttgtcacatcaattagagggctctttaattcacagcgccgtaaagaaaggcgtttgtgctacggactgtgcggggagaggagacaatgaatgccatgacgaatgcagtgacagtgatg

SEQ ID NO: 411375 - DNA, 390 bp, Oryza sativa
agacctaagcctagggttagggtttgtgtagctcgcagcgatggcgatcaagaggaccaaggcggagaagaaggtggcgtacgacaagaagctctgccagcttctcgacgagtacaccaaggtgctcatcgccgtcgccgacaacgtcgggtccaaccagctgcaggagatccgcaagggcctcaggggcgactccatcgtcctcatggggaagaacaccctcatccgccgttgcatcaaggtgcacgccgacaacaccggcaacaaggagtttctcgagctcatgcccctcctcgtcggaaaacgttggccttatcttcaccaagggtgacctcaaggaggtccgcgaggaggttgccaagtacaaggttggagcttctgcttgtgctg

SEQ ID NO: 411376 - DNA, 426 bp, Oryza sativa
gctgcgtgcgtatcatctaggtgatcgaatttatcctgctgaattgccaattagatatgctggatattccacctgcttccggaaagaagctggttcacatggaagggacacggctggtatcttcagagtccaccaattcgaaaagattgagcaattctgtgttacaagtccaaatgacaatgaatcctgggagatgcatgaagaaatgataaaaaattcagaagatttctacaaggagattggcctaccgtaccaacttgtctccattgtgtctggtgctcttaatgatgctgcagctaagaagtatgatttagaagcatggttccctgcatcaaaaacctatagggaattagtgtcctgctcaaattgcacagattttcaagcaaggagacttggtataggttatggccagaaaaagaatgatga

SEQ ID NO: 411377 - DNA, 315 bp, Oryza sativa
atccgttcgctttggcagaagaggaatccgggatggccgggggggtgtgatgacaaaagtcgcatgggatctctccgaggtggaacacccgtgctgcgacccccaagacggactggagggcatgcaaaaggcgcacgtttaacatcatttctagtacgactgcaactatcaagtgtgggggggaggtgcttactgagttgaatggcaagcgtacgggaatgttcttacgggttcccactgtggatgtctcagttgttgatctcacagttagaatcgagaaggatgcctcatatgaagctattaagagtgctatca

SEQ ID NO: 411378 - DNA, 441 bp, Oryza sativa
gcttcagcaggtggagccggcaatcgtcgccgcggcggggacagggaccataccggcgtcggcgttggcatccgtcgcgccctccctcccttccccaaactgcgccctctccaggtcgcaccaccaccaccaccacatgtgggctgccgcgtccgccgggttctccggtgccgactccggggtaatcggcgggatcatgcagcggatggggatccctgccgggatcgagctccagggtgggggagcggggggctgggtggtggcagcggcggtggccgcatcgggtttgtgcccatgtttgccggccacgcggcggcggccatgccggggctagagctagggctctcacaggacagccatatttgtatatggatctagggattactctgctactgtccagttaattagcctcatttgtttgggtgattaatgcaggtcccc

SEQ ID NO: 411379 - DNA, 382 bp, Oryza sativa
  unsure (1)..(382): unsure at all n locations
aatccccttctcccatttttcctctcctcgcttcgcgccgtagacgccgccggctgctcctcctatcgccatggccgccgctgctccccccgcgggccccgggctctactccgacatcggcaagaaggctagagatctcctgtatagggattaccacacggaccagaagttcacgctcaccacctacgccgngaacggagctgcaatcactgttgctggcacgaagaaaaatgagtccatcttctctgaaaaccagagccaggtgaagaacaacaatgtgtccgtggatgtgaaagcaacttcagactcaaaattgatgactaccattacaggtcatgagctgggcacttccaggcctgagggaaatctatacattcctttt

SEQ ID NO: 411380 - DNA, 273 bp, Oryza sativa
tcgtgtaactctgctgggatgcgaaccctgacaagggagctgatatggccgacgcggcgtctatgttgtaggcgatcgatacttcgaagggtggaggcatgatccctgtagatcaacgacaaggatgcctttcatgcttcaggcaatacaggggtccgtgacagatggagcacgctggagttgcatctgtagattgacggatacatgtcgtgtaagtagattacattcgttttaaggtacgtaagcaaactgattatggagctagtatgctta

SEQ ID NO: 411381 - DNA, 365 bp, Oryza sativa
ctgggacgtgaaggttggtcggagagactcgcgcggcggtagtataatcggagcggacaacaacatcccgccgacgacgtcgggactcgacaacctcacctccctcttcgccgcgcagggcctctcccagaaagacatggtcgccctcttcggatctcacaccattggacaagcacgatgcacaaacttcagagctcacatatacaacgaaaccaacatcgacagtggctttgcgatgagcacgcaatgaggctgccctcgtagctcacgctcaggtgacaacaatctggcacctttggatattcagacgccaaccgtgttccagaacaactactacaagaacctggtcgtcaagaaggggctcc

SEQ ID NO: 411382 - DNA, 432 bp, Oryza sativa
gaatcaaacagaagtatctgcagctggattcagagggtgaactttgaagtacgtgaccaatttcacccaagagttttgacactcagattccgggacatgttttcccatcaatatgcccgcaaatgaccaaaaagaaaccgagacagattgactggtaacagaaaccctcatgtagtctagaacaggctagaggcaaccaaagttaagccgattacaagttttgttcaatgagctgctgatatcaaaagctagcatcctaaaccaaaccagaaaaagcaggcgaccttcaaggcttgaggaccagggacaggccaaccttggagcttttggcgatggccttggtattaacctcagtggagatggtgacgagcgacttgggcctgaactcgtgctggatgagcgcacttgccatgccaaaagttgtgaagcgcg

SEQ ID NO: 411383 - DNA, 549 bp, Oryza sativa
gttctctcctctccttctataatactcggcctccggctcgcttctcgctctgtttctccgagaattaggggggaggttggagctgtgcaagatggtgattgcgcgcggccttctccgatcgaatgcctcttcttcctcctctcaggcaatcaacttattgaagtatgtaactagcactggaagtctgcaagggcactcgcaaaatttgtgtgatgcatcaaccagacatttcagttcagtaccatcgccccagtacaactcaactgaagagaatgggttcaaggggcatggcatgttggcaccattcacagctggttggcagagcaccgatgttcatccgttagtcattgaaagatctgagggttcgtatgtatatgatatcgacggaaagaagtatctagattctcttgcgggactatggtgtacagctttaggtgggagtgaacctcgattagtcaaagctgcaactgagcaattacacaagttgcccttctatcacttcttttggaaccgtacgaccaaaccatctctggatcttgcaaaggaact

SEQ ID NO: 411384 - DNA, 379 bp, Oryza sativa
tcgatttgggggccgcacgtgcagcgttggtgcggggcgggttatctcctacggtgagaggagcaatggtggcgcccggaggcggatgaggagggagcggtgtaagctgccgcctgaaggcgtgctctttgtagcgcgatctatggtactggatattagtggctgggatgcagcacctgtttggtctctggttaccttggaatgaagatcgccacatttgccaatgccagaactacccttgaagcaaggaagggtgttgggaaggcatttatcattgcttttcgctctggtgctgttatgggcttcttgctggcatcaagtggtcttgaggttctttacatcgccattaatgtatttaagttgtattatggggatgact

SEQ ID NO: 411385 - DNA, 483 bp, Oryza sativa
tcggcttgagagaaggagagaaatcttccccatctgggggtcttctgatatccttgcgcgcgagacgagccgcggctgaacaggggaggggcgcgccgatctccatgcgcctagcaaaccaaggtaggggaacctggaggcaacatcagtttcgctgcaatctgacaaagtggagggactaaaaattgaagcttcttttatgtctgaacaagacttgctttacttgggatcagatggattgctcggagaatattctaggacaacgagaaaaaggcacaagctctcgcttggaaggccctgctgcgcactggtttctgctgattcatttcaaggatacaagactactgttccttttggctcttggtgcttctgatattatctcagcgaaagaaaattaatccaagatggctctgcaaaacattggtgcttcaaaccgtgatgaatgccttctacaggtataagatgcccaggatgatcaccaaa

SEQ ID NO: 411386 - DNA, 499 bp, Oryza sativa
atctccgccaagagaagagaagagacacccaacggcccaaaacctagcgcctctgcgctcgaggcccccccgaatccgcgaatccgccgactcccatggcgagccagggagagccctcctcctcctccgatccgaaggggaagaaggatttctcgacggcgatcctcgagaggaagaagtcgccgaaccggctggtggtcgacgaggccaccaacgatgataactccgtcatcgggatgcaccccgacaccatggagaagctccagcttttccgcggcgacactgtgctgctcaagggtaagaagagaaaagacaccatctgcattgttcttgctgatgacacctgcgaggagccgaagatcagaatgaacaaggttgtcaggaagaacctgagagtacgacttggtgatgtcgtgtctgttcatcaatgcccagatgtcaaatacggcaagcgtgtgcacatacttccaattgatgatactgctgagggcatcaccgg

SEQ ID NO: 411387 - DNA, 428 bp, Oryza sativa
gtatatattttggggtcttcatgtgcatcttcgctgccgtgatcttgcttttccttgggtcagaggagggattcaggacaaagagccagccttgcacatacagcaaggacaagtactgcaagcctgcccttttcaacgcgctctttagcactgcatatttcttgctgggagcgatcacctctttggtctctggttaccttggaatgaagatcgccacatttgccaatgccagaactaccctggaagcaaggaagggtgttgggaaggcatttatcattgctttccgctctggtgctgttatgggcttcttgctggcatcaagtggtcttgtggttctttacatcgccattaatgtatttaagttgtattatggtgatgactgggaaggtctttttgagtctatcactggttatgggcttgggggaatc

SEQ ID NO: 411388 - DNA, 290 bp, Oryza sativa
acgggttcgttttcctcctcttgttgacacggcaagcctccggcgccggtacagcgggtggcagagcgcccacgccacgttctacggaggcggcgatgcttccggcaccatgggcggaggttgtggttacggcaacctgtacaggcaagggtgtggtacgaacaccgaggctctgaggacggagctgttcaacgacggtgcggggtgcggagggcgctacgagctgtggctcgacaatcgggaggagttcgtgcctgatggactacatcaccgtgaccggcaccaacttt

SEQ ID NO: 411389 - DNA, 430 bp, Oryza sativa
gttgtccccaaccaagcagcggcgagccagcgagggcgacacccactgcccaaaccgcggcgctcctcgccgccgccgcggggctgttgctcctcgcgtccggggcgctgccggtcgcgcggtgcgaccccggcggcgacggcgacggtaccgcgtacgacgagctcgggtgccgacggctcccgctggacttgctgccggcgaacgtgcgcgggcacacgctggactccgggtcgggggacttcgcggaggaccccggctcgcgatgccgggttgcgcttccccgggcgagcctcgttggatacccgagggctcgccttaccggtcgagttgcggacccggggctcttttggcgtgcaccgtgacgtccgggacgtgtttgtgccccttgacgacctcctcggcggcgcgcacgacgggagagagccca

SEQ ID NO: 411390 - DNA, 387 bp, Oryza sativa
ggggctcaggccctggcggcggaggctgctcgggggcatggcgctctcctggccctcggccatccgcctcgccgtcgccgccgtgctcctcgccgcggtcggcgtcgcgcttttcacgctccccgttgacaagattttgaaggactttctggtttgggtcaaggataacttgggtccatggggtcctctggtattggctcttgcttacgtccctttgacggtattggctgttccagcatccatacttacacttggaggaggttatctgtttggcctgcctgttgggtttgttgctgattccattggagcaacaattggtgcaactgctgcatttttgcttggcagaacgataggaaggccatatgttctttccaaatgcaaagatta

SEQ ID NO: 411391 - DNA, 376 bp, Oryza sativa
tcgcttatcatcagcaaccaattcgcaccgatcgagggatcgatcgatccagcaactggatcaacagtactagctaggaagcatggcccgtgcacagttggtgttggtcgccctggtggcagctctgctcctcgccgacccggacgccgtcgtgggcatcacctgcgggcaggtcaactccgccgtcgggccctgcctgacctacgcccgcggcggcgccgggccgtcggcggcctgctgcagcggcgtgaggagcctcaaggcggaagcaagcacgaccgcagaccggcgcaccgcctgcaactgcctcaagaacgcggcccgcggcatcaaggggctcaacgccggcaacgccggcagcataccctccaagtgc

SEQ ID NO: 411392 - DNA, 529 bp, Oryza sativa
tcgcattcatccaccgtctcaatctcggtagtaatccgcgcggcctcgccgttagttccaccaccgggcgccaccatgtgcgggatcctggccgtgctcggcgccgccgactggtcgcaggcgaagagggctcacgtcctctcctgctcccgcaggctgaagcacaggggacccgactggtccgggttgtaccagtgcgagggaaacttcctcgctcagcagcgtctcgccatcgtctccccgctctccggcgaccagccgctgtacaacgcggaccggaccatcgtcgtcgtggccaatggagagatctacaaccacaagaagatcaggaagcagttcgcctccaagcacacgttcagcaccggcagcgactgcgaggtcatcatcccgctgtatgaggagtacggcgaggacttcgtcgacatgctggacggcgtgttcgcctttgttctctacgacacccgcaccaagacgtacatggcccgccgcgacgccatcggggttaaccccctttacatcggcaggggca

SEQ ID NO: 411393 - DNA, 496 bp, Oryza sativa
  unsure (1)..(496): unsure at all n locations
cgcacgttgtcaccacaggctacgcaaaattctctccctttctactgcaccacctccactccgacgatcctcctcctgatcctgtgccggtcggtgatggcgtaccggttgctggagctcacgctggtctccgcgagcgacctcaagaaggtcactctcttctcgcgcatgcatgtctacgccgtcgcctccatctgcgggagcaacgtccccatgcccatgcacggtacccacgccgaccgcaacggcggcagcaaccccgcgtggaacaccgtgctccacttacccgtccccgaccgcttcgacacccgcggtctcgccctccacgtacagctccgcgcccggcgcttcttcggcggccaccgcgacgtctggtacgtgttcgtgcccctcgacgacctcctcgccggcgcgcacgaccgcggggagccgaggcccggtagctaccaggtgcgccgncccatgttcggccgcgcgcacggaacgctttactttt

SEQ ID NO: 411394 - DNA, 356 bp, Oryza sativa
ctacggtagtactgtgtcggtggggcggacggcgaccaacgggaggatgataggagacggcatcgggaagaccatcatcacggggaacaagaacttcaagatgaacctgacgaccaaggacacggcgacgattgaggctatcgggaacggcttcttcatgagggggatcacggtggagaacacggtggggccggagaaccaccaggcggtggctctccgcgcgcagagcgacatggcggtgttctaccagtgcgagttggacgggtaccaggacacgctgtacccggacgcgcagcgccagttcttccgtgactgcacagtgtcggggacaatcgacttgatattcgggaactcgc

SEQ ID NO: 411395 - DNA, 337 bp, Oryza sativa
cgacgcctaacttttgtgatggcgtgaacttattggattatgggccggatttgatcttgggggcggcaatctttggcggccatgtgcgattctctggtgatttggtcggaagatgatcaagtggggcatcggtagcagcgggacgccggcggattcgtattatgaggaccggtcggattgcacggatgacgtgcccaagagcaaggtcaagatcaaggttggaaaaacattgagcgtccggtaatggcaagctgcatataagccctgatggcatgcttgacattgcctcagttgtacggccgatacaaaaagtaggtgtgccttcaacattaagggg

SEQ ID NO: 411396 - DNA, 510 bp, Oryza sativa
tcgcattatcgaatcctctcttctcctcgtgcccaccaccaccaccgtagcaatggcgggcaacgggccgatcaacaaggaggacccgctcaactggggcgcggcggcggccgagatggccggcagccacctcgacgaggtgaagcgcatggtggcgcagttccgcgagccgctggtcaagatccagggcgccaccctccgcgtcggccaggtggccgccgtcgcccaggccaaggacgccgccggcgtcgccgtcgagctcgacgaggaggcccgcccccgcgtcaaggccagcagcgagtggatcctcaactgcatcgcccacggcggcgacatctacggcgtcaccaccggcttcggcggcacctcccaccgccgcaccaaggacggtcccgccctccaagtcgagcttctcaggcatctcaacgccggaatctttggcactggctccgatggccacacgctgccgtcggagacggtgcgggcggacatgctcgtgcgcatcaacac

SEQ ID NO: 411397 - DNA, 240 bp, Oryza sativa
cgcgttcggttggacatacccggtcggtggacacctgtcggtgggtggaggagaagaaacttacgaggattcccctagtaacggcgaggcgaggataatggcggtagagcacgcacacccggtctccctagccgtcctcccgtcgtccccggctcaggcgacgccgttgccgctcttcctgaggtacgctgctttccgttgtgggggagatgccgccgaaagaataggccccttctgatt

SEQ ID NO: 411398 - DNA, 504 bp, Oryza sativa
gtctccatcatccaaaccaagtatctcgtgcctcgcaggggagaagggaaaaaaaagaacctagtatctcgtgatatctgtctcctccaaacaaaaaagaatctgtgcaagatctctctccctcgatcgatctatcagcttgcagcagtgtgcacatggatcctaatgccgtgcacgtccaaatgcccgccgttgacaccgaagcgtgctgtgacgatgagaagaatccgcagcctgcacgggagatcatcagcgaccacgtcgccgttcggccgacaccggcggtggacaagacgctgtcgggcgcgtcggacctgttgaagctcctgccgacgggcacggtgctggcgttccaggcgctggcgccgtcctttagcaaccacggcgtctgccacgccgtcgccaaccggtacctggtcctggcgctaatcggcgcctgcgcggcattctgcatgctcctctccttacggacagccttatcggccacaatggaagctctactac

SEQ ID NO: 411399 - DNA, 319 bp, Oryza sativa
accacccgttgcgtgttggggcggaggtggagcggacgctccgcgcggggaatttgaaatacaggcgcggtaaccccaccgtggacgtcgacctcgtcgccagggacgggcggctgcaccgctccgtggagcccagcggcgcatacacggagatctacgaggcgctcgagctccgccacggggacgggacggggtacgcctggaagggcgagctgaacgccctccgtaacattaacgaggttatcgagcccaaactcttacacttggacgacaggaaccagagcgatgttcatgcaagcatgctagacattgcaggaac

SEQ ID NO: 411400 - DNA, 429 bp, Oryza sativa
ggtcgattgctattcgggctattttacacaatgggtggggacccttatactacaccggtgcccaatatatggctgtgcaagaggttgatgatgcttgcactattggacctgctacttaatgtcttgctgggcttgcttggtgttacaaagtgagccatgatgcctatgtgtgctattggtatgagcattgtcctcagctttagccttgctgccatgtctggtgttgctgtggctggtcttggaatgctgagcacaattgccacaggtcttgctatcgatgcctatggtcccatcagtgacaatgctggaggaattgctgaaatggccggcatgagccacagaaattcggagagaactgatgctctggatgctgccggaaacacaactgccgcaattggaaaggggttttgccttcggctttgcaagctt

SEQ ID NO: 411401 - DNA, 479 bp, Oryza sativa
ggttgcctggggccttgcccgctacgccgccattggtcaggacaacgggctggtgcggattgtcgagcctgagatcctcctcgacggtgagcatggcatcgacaggaccttcgaggtggcgcagaaggtgtgggcggagaccttcttctacatggccgagaacaatgtgatgttcgagggcatcctcctcaagccaagcatggtgacacccggtgccgagtgcaaggacagggccacccctgagcaagtatctgactacaccctcaagctcctccacagaaggatcccccctgccgtccccggcatcatgttcttgtcgggtgggcagtcggaggtggaggcgacgcagaacctgaacgcgatgaaccaggggcccaacccgtggcacgtgtcgttctcgtacgcgagggcgctgcataacacgtgcctcaagacgtggggcgggcagccggagaacgtgaaggcggcgcaagacgcgc

SEQ ID NO: 411402 - DNA, 475 bp, Oryza sativa
  unsure (1)..(475): unsure at all n locations
caaggagtgggtagtagcaccttgctctcctttgccttgggagaaaccggaagcaatggcgtctgctactctcctcaagtcatctttccttcccaagaagtctgaatggggtgccacccgccaggctgccgcccccaagccggtgactgtctccatggttgtccgcgctggtgcctacgacgatgagcttgtcaagaccgcgaaaaccattgcatcaccaggaaggggtatccttgccatggatgagtcgaacgcgacctgcggtaagaggcttgcgtcaattggccttgagaacaccgaggccaaccgccaggcttaccggaccctccttgtcaccgcaccgggcttgggacagtacatctncggtgctatcctcttcgaggagactctgtaccagtcaactgtagatggcaagaagattgtcgacatcctcactgagcagaaaatcgttccagtatcaaggtcgacaagggtc

SEQ ID NO: 411403 - DNA, 466 bp, Oryza sativa
accgtcccggaattgaattgtcgacccacgcgacccgtggtgtttagatggagacagacatgaccaatagcactactaaatacatatttaatgggccgcgcgcgttacgtagaacgagcaggctagcgaaaatgcggtgttttaactacttggacgagcacctgttgacaccgaccgaatggaactatcatacatccatccggatcggtcgacaccaatgtacatcttgggctcaaagggccgacttagctaagatgaaaccggtggagatgaccaacatcatgaaggacttccacgagtcggggttcctcgacccgaccggactgttttttggaccaaccaagtacatggtcatccaaggtgaacctggcgctgttattcgtggcaagaagggatcaggaggcataacagagaagaagaccgggcaggcgctggtggacggatttacgacgagcccattgacccc

SEQ ID NO: 411404 - DNA, 410 bp, Oryza sativa
tcggctgaaacaaacccctctcactcccactaccatgggtccttggaagttccgggcggcgagctcgttcgacacgaagacgacgacgacgaacgcgggagctccggtgtggaacgacaacgaggcgctgacagtggggcccagggggccgatcctcctcgaggactaccacctgatcgagaaggtggggcacttcgcccgggagcgcatcccggagcgcgtggtccacgcccgcggcgcctccgccaagggcttcttcgagtgcacccacgacgtcaccgacatcacctgcgccgacttcctccggtccccgggcgcccagacccccgtcatcgtccggttctccaccgtcatccacgagcgcgggagcccggagacgatccgcgaccccgcgcgggttcgccgtcaag

SEQ ID NO: 411405 - DNA, 515 bp, Oryza sativa
gtgacttccttccttccttccggttgcttccgcggatcgacttctcgccccccagagcgattcgccccccgcctcgatcgatcgattccgcggcagcgccccttcgatcggttggagatggccaggacttccttcaagctcgagcacccactggaaaggaggcaagcagaatctgccaggatccgtgagaagtactcagacagaattccggtgatcgttgagaaggctgacaagaccgatgttccagaaattgacaaaaagaagtaccttgtccctgctgatctcactgttggccagtttgtctatgtggttcggaagaggattaagcttagcccagaaaaggccatctttgtctttgtgaagaacacattgccgccaactgcttctttgatgtctgcaatctacgaagagaacaaggatgaggacggcttcctctacatgacttacagtggcgagaacacattcggctctgcgtaattcatcaactggtgctgctgctgaaaaaaacatggatg

SEQ ID NO: 411406 - DNA, 323 bp, Oryza sativa
gttgtgagttagcaagagacaaacctgaccaaatccaccggagctactaattttcttggccgcgcgcggcaggcagatcgagcaggcgagcgaagatgttcgtggcagacgtaccgtctaccgagcacctgatgtgcgagatcgagggccaccaccttaccttcgtcgtcatcgttggtcacgacggtaccgtttgggcacagagcgccgtctttcctcagtttaaaccggaggagatgaccaacattatgaaggacttcgacgagccggggtttcttgtccccgacccggactgttttttggaccaaccaagttcatgggta

SEQ ID NO: 411407 - DNA, 466 bp, Oryza sativa
gctcttgttatccttatccttgttgccattgtttgccgggcaagcaaatctcacggcagtgccctagctcagaaaaggtttcagacaagaacctccacaagactagcaaagacatggccagtacaaaaggaaaggatgacaaaggtggtttggtggtctcagcagatgagcttggtgctcctcgaaagggctctacatctgaagcactaagccaagaagagaagctgtcaggcgtagggggattttccccattcaaaggtaggcgcttctcttggccaccagattttggagaggcatacacccagtaaggcctggcacggatggatagtatatcacctgacagggtagcaggggagttgcgcttcctggatgaaacaattactctgacaccgggggaattgtcaagggcacccgcctgaggtcttgggaggagccttccacggaacttcgtcagagaacacttggg

SEQ ID NO: 411408 - DNA, 318 bp, Oryza sativa
acccgttcttttcctccaagttagcaccatcatccaagctctcatactattgacacggacccgcatgtggacatatgctgagcgccctggatctatgctggtctttggtttctaggttgcacagctgattgctacactgattgatgtgaatgctgactgggcggcaaccctaattaaaagcttttcagggggactggcaggtaatgggtggcagtacgatatactcatcttctgagcacccgccaatttcagtttcatacccacgaacgctgtgcgaagaaagggatccaatgcatgtgctgatccagatgaacgaac

SEQ ID NO: 411409 - DNA, 417 bp, Oryza sativa
tctgcactttccatgtggcacaacgcttgcatttctttgagaccaaatgcaattgatgggcaaacagtgatcctctttgggttgctgaatggcaccttaattggccttctcaactcttagtttaggattcaactccattggattctaccagatgacaaaattggcgatcatacctttcactgtgctgttggagacaatcttcctgaagaaaagattcagcgagagtatcaagctttctctactggtcttacttcttggagtgggcattgcttcagttactgatctcaagctaaatctacttggatccgtcctttctggactcgccatcgagaccacttgtgttgcgcaaattctcacaaatacaatacagaagagattgaaggtattctcaacgcatttactctaccaatctggacc

SEQ ID NO: 411410 - DNA, 511 bp, Oryza sativa
tcgattttagacttggtgactgctacctcgcgatggggtcttcttcgacgccggcgtcgtcgtcgagcgagatgaggaagacgaatccgtccaagcagtcgcgcgcgcaggcgtagcagaacggtggcgccggacactccaagcttgccaggtacttccacccggtggcctactgggacaaggatcaactgctggacgccgtgcactggatccggcaggtgctcggcctcgcctgcggcctgctctggggagccgtccccctcgttggcgccatctggatcgcactgtttgtgactatttctactgggctcgtttactggtactatgcatacctgttgaagattgatgaggaagactttggaggccatggagcactactttaggagggaatgtttgcctttttcactcttttcctgctttcatggacactcatatacagttttgtttacttttgagaagcttctctgatgacatgttggccatggatggaagtttgtgcaccatgtttggt

SEQ ID NO: 411411 - DNA, 469 bp, Oryza sativa
  unsure (1)..(469): unsure at all n locations
tttctcttactcagcaacagctcgcagctcactctgtgagtctactactacgagctaagctggctcgcgccgccgccgccgccgtcgccgccgccatgagcaaggagaagcaccacaagcgggagcaccacctccggcgatgctgcggcgggatggcggcgtgcatcctggcgctggtcctcgtcgtcggcttcatcgcgctcgtcgtctacctcgcgctccgcccctccaagccgtccttctacctgcaggacctccagctccgctccgtcgacctcggcgacccctccctctccgccaccgcgcaggtcaccctcgcctcccgcaaccccaatgaccacgtcggcgtccactaccgccgnctcgacgtcttcgtcacctaccgcgacgaacccgtcacggtgccccgtttcctcccgccgacctaccaaggccaccgcgacgtcaccatctggtcgcccgtgctctc

SEQ ID NO: 411412 - DNA, 562 bp, Oryza sativa
tcgtttcagccgattcttacaattccgggatccacgggcccaaagacgacatccgcttgttgatcccatggttgtttcagagatccggcgatgcttgaatgagggaattgagttccaaggtgagctattgaattttcggaaggacggtgctccactgtacaacaggctaaggctcattccaatgcatggggatgatggttttgtgactcacgtcattggaatccagttgttctctgaagctaacattgatcttagcaatgtatcatatccagtgtataaacaacagtccaaccacagacccaacattcaagagatcaaccctgcttctcatgaacatattcctaagattcaaagttccgagtactgctgcatcctccagctctcagatgaagttctggcgcacaacatattgtctcgcttatcgccaagagatgttgcatccatcggatcagtctgcactagaatgcatgagttgaccaagaatgatcacctgagaaagatggtatgtcaaaacgcgtggggaagagacctcactgtgaggctcgagatgagcaccaagatg

SEQ ID NO: 411413 - DNA, 499 bp, Oryza sativa
gttaaatgcagaagtttgtgttcctagaaactcgtgaagtgatctcttctgtgctgaggccacactgggcgaggagggttgatggaaaggcacaggtcgttcaggcacagggtgatgtgcttgaagttgtaccgctcgggacttccaaaggaaacggggtaaaaattctgttggaatcactttgtgctagtccagatgaggtcatggcactaggcgatggagaaaacgataaagagatgctccaacttgccggccttggtgtcgccctctgcaacggctgtgaggtgacaaaggtggtagccgacgtcatcggcgcgagcaacgaccaaagcggcgtggcacaggccatttacaaatacctctagaaaatgattccacctagctggcttagcatttctactgtggtgtggtagggcctaatatattttgcttgcagcatccatgtgcaagcgtaccatatttaaacttcaataattgtacgtggaagttggaagtacta

SEQ ID NO: 411414 - DNA, 526 bp, Oryza sativa
  unsure (1)..(526): unsure at all n locations
gtggactacttagagctgacctttccaagggaatgacggacgaaaacgcaaggtgcaaaggacttcatttgatttgtttgcgaaaagcagaaatgcattatatatcttgcttcatctcatggtaggactttccgttatctaaagaaaaatcttccgtctaacgataattctgctttacatgcactagattcccaaaacttttggtcgatggaccgtatggtgcaccggcacaagattaccgtgaatacgatgtgctacttctcatcgggctgggcatcggagccacccctttgattagcattgtgaaggacgtgcttaaccacattcaaggtgagggatcagttggaaccacggagccggagagcagcagcaaggcgaagaagaaacctttcatgacgaagagagcctacttctactgggtgacgagagaggaaggctcgtttgagtggttcagaggcgtcatgaacgaggtgtctgagaaggacaaggatggagtcatngagctccataccactgctaagcgtgt

SEQ ID NO: 411415 - DNA, 492 bp, Oryza sativa
tttgttcaacgcatatgctcaggttgctattggcacggaagatgtctacaagagtgctggggctgtcgagttggttacaaaagaactagggggaaagattttgcggcagccaggtacactaccagggctcaacacaaagattgcctctttccttgaccctgatggctggaaagtggttttggttgataacgccgacttcctgaaggaactccagtgaagatgagagatggcccaagttctgtgctaggaggcaaagcgcaaaccttatgtagtaatgccagtgcaatgtaataaagaagcggtttccgctctatgaacaagaataaattctggcacatgcgttgcgcttatgctagtactgtctgggtttggctgtaaatccgctatgcattgctacctgtatcagcatgactgttggagtgttgttgataacaaggaccagtttgtgcaggtgagctgaggttcctgataaaaaaaaaaaaacaaaaaggg

SEQ ID NO: 411416 - DNA, 493 bp, Oryza sativa
cgcatcgtctactcctcctccactcgaggttgaattcccccccccccccctctcgtctctctctctctctccgtcgcagatctcggcaagggggcaacaaggtaggaggcggcgatgggttcggcgagccgcgcggtgacgtgcctgagctgcccgtgcaagtgcctggcgtgcggcctcttcagctgcctctgcagcatcctcatctccctcctcgtcaccctcggcgtcctcgccctcatcttctacctcatcttccgcccccacatgatcgccgccaccgtcgactccgccgccctcacccagttcaccctctccaccaactccgccctcgcctacagcctcaccgtcgacctcaccgtccgcaaccccaacaagcgcgtcggcctctactacgacaacgtcgagtccctcgccctcttcgacggccagcgcttcggctacgcccccctcgactccttctaccagtccaccgaggcatccaccaagctct

SEQ ID NO: 411417 - DNA, 512 bp, Oryza sativa
  unsure (1)..(512): unsure at all n locations
catcatccggctgagcgacaccccctgcgtggtggtgacatccatgtacgggtggagcgcctacatggagaagatcatgcagtcacagaccctctcggatgccagcaagcaggcgtacatgcgcggtaagagggtactcgagatcaaccccaggcaccccatcatcaaggaactccgtgacaaggtcgcccaggacagcgagagcgagagcttgaagcagacggcgaagctggtgtaccagacggccctcatggagagcggcttcaaccttcctgatcccaaggacttcgcctccagcatctacaggtcggtgcagaagagccttgacctgagccccgacgcggccgtggaagaggaagaggaggtcgaggaggccgaggttgaagagaaggaatcatccaacatcaaggaggaggcggagccgtcgtcgtatgataaggacgagctgtagtgatgtgtcgccaccaactgggttgtttttatctagctcttgtgtaggntcgttaaaaatg

SEQ ID NO: 411418 - DNA, 586 bp, Oryza sativa
tcgcaaaattcgttgaaggtgacttgttttaattaagcataataagttgggtcagaactatgtcataacaagttcttcctccgggttgataatacttgtcgttttggacaaaggcaaggtctccaaaaagtaactttgataactattttctattataatatatataggaatatcaacaaatatatggttttactgaagtactttttaagactaatctacgcatatggttttcatatttttaagataaatattttagaaattatttgtagtcaaagattttaaagtttaactttacccttgtccaaaatgactaatattatcagcccggagggagtataacaaataaataacaagtattttgtgttccatcaacaaaaagggttacagaagataacttgtttttaagcttgtaactgtaaaaaaaactactaggtgttacttcaatactacaaaggaatctgattgatacatgtataggagttgattgagcatgatatatgacttgtgcagttgtgccatgcactaagagtagtttaaatgttactaatgctagcgcaactgctcaagtctttccttgcaatactat

SEQ ID NO: 411419 - DNA, 245 bp, Oryza sativa
tcgtggtagagtactcggcttttaagtgcgactatgatcttttacacatttggatgaagcataaaattcgtccagactcttggtagagtctataagaccgcgactgatcctcaagggtaatgaatggaaaaaatagcatgtcgtaataaaatcaatttcttattttgcgattcttggaacggaatacacacattctgattccctgcctctaatgaataattggatatgcgcccgtctccacttcc

SEQ ID NO: 411420 - DNA, 410 bp, Oryza sativa
  unsure (1)..(410): unsure at all n locations
gaaccagatatttgtaaaccctatggctccaactatatttctagtggttcttctcttctctagccacatcatctcgttgacatctgctattggtagccaagtgatttcgcagcatttgtttggcattaatcttcctctctctggacatcatctgatactgaaggcttttgccatagttcctgctctgtactgtgctaaggttgcaggtgctgaaggaatataccaattactgataatctgccagattatccaggccatgctccttccatcatcagtcgtgccactcttccgtgttgcctcatcaagattgataatgggtgcccacagagtgtctntgcatctggagatattaacatttcttgcatttctcctcatgcttgtttcgaatatcatctttatggcagaaatgc

SEQ ID NO: 411421 - DNA, 583 bp, Oryza sativa
  unsure (1)..(583): unsure at all n locations
gaaaaggcctgtgtcaaggagagggtagtagcaccttgctctcctttgccttcagagaaaccggaagcaatggcgtctgctactctcctcaagtcatctttccttcccaagaagtctgaatggggtgccacccgccaggctgccgcccccaagccggtgactgtctccatggttgtccgcgctggtgcctacgacgatgagcttgtcaagaccgcgaaaaccattgcatcaccaggaaggggtatccttgccatggatgagtcgaacgcgacctgcggtaagaggcttgcgtcaattggccttgagaacaccgaggccaaccgccaggcttaccggaccctccttgtcaccgcaccgggcttgggacagtacatctccggtgctatcctcttcgaggagactctgtaccagtcaactgtagatggcaagaagattgtcgacatcctcactgagcagaanatcgttccaggtatcaaggtcgacaagggtcttgtgccccttgctgggctccaacacgagtcatggtgccaaggtctcgacggccttgcctcgcgcgaggccgcatactaccagcagggcgctc

SEQ ID NO: 411422 - DNA, 487 bp, Oryza sativa
gtcgctgtcacgcgcttcgtgctcgccgccttccaccttcgtgctaccccccgccatggcttcctccctcgccggatccgccctctccttcgccacccccgtcaaggcagtcaagactaattcgatatctttcaccagcgcaaggaagggaaatgcatttctccgcctgcagccagtgcctatgagatttgctgtttgctgtgccgcaaaaaaggagacagtggagaaggtttgtgacattgttaagaagcaactcgctgttcctgagggcactgaagtttctggtgcatccaagttctcagatcttggtgctgattcactggacacggttgagattgtgatgggtctcgaggaggagttccacatcagcgtcgaagagtcaagtgcgcagtcaattgcaacggttgaagatgccgctgcactcatcgacaagcttgttgagcagaaatctgctgaagcgaaatcatcttgatatgcacaaatcaca

SEQ ID NO: 411423 - DNA, 466 bp, Oryza sativa
ctttgaagccaccaaaccctagccgcgagccctggcgttgctaggaaggggaagaggagagatcgagatcggagagatccatccatggcgctgcgagccctgatcagcgagatccgggggatgaaggtgcgggaggtgccggggtacctgaagccgcggctgagctgggagaacgtgaagaagagcagcgaccaggccgtcgaccgctacatcgacaagtacatcgagaccagctcgccggagccgctcttccacgtcatctacggcctcatggccttctcctacctcatcaacctccccaaggagcgccgtcacctcgcccacctcgaggagctcgagaggcagggcgccgccggcgccgcccaccactagatccgaggacttggggtttgtctgtggctgattcgatctaacagaaattctgttcttccaccgatgagctacctggagttgtgatgatgttcgt

SEQ ID NO: 411424 - DNA, 557 bp, Oryza sativa
tattggtagcctagtcgcacgctcaatgccagtgaatgtgtggctcgggggtgtgcactgcagtgcgcaatgcttagtcccacattccgcgttcgagaatatgaggtccaagatgcaattccttcttcgataggattttgcacgagtgaaggcccaatttcaacattaccaagtaacgcgctattccagagaggtcatccccttcccagtgtgaaggtcgttactctgcataagaacagcaaatttaaactggatgcattttatgtggatgagaatgaattgcctcctggtacctcaacaaaaattggtgctttccagattggccctttccaagcacatactgaaaagtctaaagtcaaagtaagaattcggttaaatctccatggacttgtttcagtggaatcagctgctctgattgatgatgatcaaagcgatgcacattctgctgactctatggaggtggattccaatggtgaaatggggcaacaggttgataagtcaagaagcgaaaggttaatccaattgcctattgtcagtccatttatggtgcaatgagt

SEQ ID NO: 411425 - DNA, 557 bp, Oryza sativa
tcgggctgcctggtccccggcgctcgcggcggttttggtggcggtggccgtggcgtcggcgtccaactcggagggggacgcgctgtacgcgctgcggcgcgcgctggcggacccccggggcgtgctccagagctgggacccgaccctcgtcaacccctgcacctggttccacgtcacctgcgaccgcgccggccgcgtcacccgcctagacttgggtaactcaaatttgtcaggccatcttgctcctgaactgggacaccttgagcatctccaatatctagagctgtacaaaaacaatattcagggcactatcccagctgagctcgggagtctgaagaaccttattagcttggatctgtataacaacaacattactggaaccataccgaaagaacttggcaagctgagttccttagtattcttgcggcttaatgacaacagtttaaacggtccaatcccgagggaactggcaaaatatctagtctcaaagtgatagaagtctcgacaatgatctttgcgcacgaatctactagcggccttttgagctttaccctgac

SEQ ID NO: 411426 - DNA, 327 bp, Oryza sativa
gaaatagctcagtcgactgcgatggggggggcgttcattgcaacaacctgccgcgttgtggccgtcaagaccacctatgtctgccataatgagctatggaatgtccccatacttgacataccctgcgccgctaccggcctcatgaccatgagctaggaactgtggtactgacctgacaagctgaacaacctggggacattatagacgcatacaccgtgatacctgaggggcgagatcaagggcgactactggaggcacacgtaagagatatgaagagacccagaggcgtgatggaggaacatatcccatgaggagagacacggacgg

SEQ ID NO: 411427 - DNA, 537 bp, Oryza sativa
  unsure (1)..(537): unsure at all n locations
ccctgcgcagcagctcagccgtcgctaccaccaccgcaagctcccgcctcgcgtgcagctagctgagagcgagcgctcgccatggagaacggcgccggcgccggggacgacgagtacacgcgcgacggctccgtcgacctccgcggcaaccccgtcctccgctccaagcgcggcggctggaaggcctgctccttcatcgtcgtgtacgagctgttcgagaggatggcgtactacgggatcgcgtcgaacctggtgatctacctgacggagaagctgcaccagggcaccgtggaggcggccaacaacgtcaccaactggtccggcaccgtcttcatcacgccgctcatcggcgccgtcgtcgccgacgcctggctcggccgctactggaccttcgtcgccggctccgccgtctacctcatgggcatgctgctgctcacactggccgtctccgtgccagcactgaagccgccgncgtgcgacggcggcggcggcgccgccttgccgcgcgcgtcggcgctgcagcttggcgtctacttc

SEQ ID NO: 411428 - DNA, 385 bp, Oryza sativa
ctctccttcctttccccaactaaaccctaactcctggccgacgactgcggctccgcctcctcgtcggagcagcgagccgatgctccttgtcctgcaccaccagccatggcgacccagatcagcaagaagaagaagctcgtgagcgatggcgtgttctacgcggagctgaacgagatgctgacgcgagagctggccgaggacggctactcccgcgcggaggagcgcgtgacgccgatgcgcacggagatcatcatccggcccacgaggacgcagaacgtgctcggcgagaaggggcgcaggatcagggagctcacctccgtcgtgcagaagcgcttcaacttccccgagaacggtgttgagctctacgccgagaaggtcgtaaacc

SEQ ID NO: 411429 - DNA, 553 bp, Oryza sativa
tagacgccggcccttggaagctagctagcatgtcaggccacattggcaccggcccgggccattccaagcttccggcgactggtccccagcacgagccgacgttcaagacttctggccggcccaccaagggtactgtcttacacggcccacaacaccctgtgctctcgccaaacaaaccccggagaactgtgacaactgtgacacaggcacagcgcgacacaacacgagggtaaggcacgaggaggcacaccgggtttgcgctcttgaaacccgccacacgcctctccgtgaaaagctctctctcggccaatcccaccccgtgaagctggtgccgtacaacccagagtaccaggacgagtcggtgctgtggaccgagagcaaggacgtcggccatggcttccgctgcatccgcatggtcaacaacatctacctcaacttggacgccttccacggcgacaagtcccacggcggcgtgcacgacggcaccaccgtcgtgctctgggagtggtgcaagggcaacacccagtgcttgaagatcctccctggggcccca

SEQ ID NO: 411430 - DNA, 507 bp, Oryza sativa
  unsure (1)..(507): unsure at all n locations
cttgnccggctcacgagacacacatggtcatatatcttcacagtacatcaaattttgtggcgcaaaaagacctaattttctgcttcactaggagcaattttttttttgacagtacaacatgggccttttcaatatagtaagaaaaaggatgcttcatcagattatttactaccctaaagaggtgacccctcactgcatggtagagtacaattttgcagactggatgaaatctttgatgttgaaagtctcatcagcatcagactttgtgatcacacccttttccgttatgattgcggtaatcagatttgccggagtaacatcgaaggcagggttccacaccgatatacctgacgcggcgacttgcttacctaggccaccttcagagttcagcaactcattgggagacctctcttcgatcacaatttgctcaccagatgggagggagagaacaatcgaagttattggcgcagccacgtagaattgcacaccgtgatgcttcgcaaaaat

SEQ ID NO: 411431 - DNA, 540 bp, Oryza sativa
  unsure (1)..(540): unsure at all n locations
atctttattgtgatactgctaacaagattggcacatgcaacctttccatttctgcgaagcgtcacggcgtgcaattctacgtggctgcgccgataacttcgattgatctctccctcccatctggggagcaaattgtgatcgaagagaggtctcccaatgagttgctgaactctgaaggtggcctatgtaagcaagtcgccgcgtcaggtatatcggtgtggaaccctgccttcgatgttactccggcaaatctgattaccgcaatcataacggaaaagggtgcgaccacaaagtctgatgctgatgagactttcaacatcaaagatttcatccagtctgcaaaattgtactctaccatgcagtgaggggtcacctctttagggtagtaaataatctgatgaagcatcctttttcttactatattgaaaaggcccatgttgtactgtcaaaaaaaaaattgctcctagtgaagcagaaaattaggtctttttgcgccacataattngatgtactgtgaagatatatgaccatgtgtgtctc

SEQ ID NO: 411432 - DNA, 412 bp, Oryza sativa
tggcatcgcactgataggaatcctaatggcaagtccactgcatctttcactcctcaaatggggcaaccagcaaatgggattcttatggcaaatgacactagtgatggcaaccccgaagaagcaactgcctgcattgctgtgaccaaaaatgattcctatgtgatgtctgcatccggcggcaaagtctcattgttcaacatgacgacattcaaggtcatgactactttcatggcacctacacctgctgcaactgtccttgcattccaccctcacgacaataatatcattgctattggaatggaggactctaccattcaaatttataatgtccgtgctgacgaggttaaaagcaagcttaagggacattcaaaaaagatcactgggctggcattttcgcagtcaatgaatatgc

SEQ ID NO: 411433 - DNA, 462 bp, Oryza sativa
atgtaaaagataatagaatcatcatatgagctaattcactacaatgttcatgaactcgagtcatgacttatagcctaatacagctttgctccagcaaaaaaataagttctttgcttaactacaattgactgaaggggaacaaaattatccccagcaggggtgcacaatcttaattcatggcttcttgtaatgttgccaataatatcatggagccctatcaaatgggcgtgtatcattgtagcatatactccatacagcctcaactgcatcttttgcagctgtccctgaacagtgtgggttgttcctgagagacatcagagcccgccgtttaacacattccttcagaaaatgcagaaaatgtcagaacgtacataaatttatgtagggtttagtaagtgtgcacatgttacacaccgcgcttgaaaaaaggagacttatgctcacttaaataaagtttacttt

SEQ ID NO: 411434 - DNA, 413 bp, Oryza sativa
aaacgagcgaacagatgtaacgacattccggggaagagagcaacatcgagtctacaaatgggccccttcagcttaagggttaacacaaaacacatagttcattgggcgccaaccatgcgggcgacagaatggtacaccaaaaaccatgcgcagagatcaggggcttattggagaatctagagtagccactcaggtaaagacgaaacggctaaaagctcgtagagtttcaggcttctggtgctgggagatggaagggtgagttcacacctccaggtttcagccttgaaggccgatgatcccgcaagcaacacggccaccagggtttccgggggtcttgctcaactcgtgcccaccctttccaagatcatcaggatcggcatgcacaacgacggctctgccaatgattgaatttg

SEQ ID NO: 411435 - DNA, 507 bp, Oryza sativa
  unsure (1)..(507): unsure at all n locations
tcagtttccaaaccagcaggagtcgcctcgcctcctgcttcatcctcctcgtcgtcgccgcgggggtcgcctgagatcacattaacaatggtgaaggctgttgttgtgcttggtagcagtgagattgttaagggcactatccactttgtccaagagggagatggtcccaccactgtgactggaagtgtctctggcctcaagcctggtctccatgggttccatattcatgcacttggtgacaccaccaatggttgcatgtcaactgggccacactacaatcctgccggaaaggagcatggagcaccagaagatgagacccgccatgctggtgatcttggaaatgtcaccgctggagaagatggtgttgctaatatccatgttgttgacagtcagattccacttactggaccaaattcaatcattggcagagccgtcgttgtgcatgccgatcctgatgatcttggaaagggtgggcacgagctgagcangaccaccgganacgctggt

SEQ ID NO: 411436 - DNA, 514 bp, Oryza sativa
agatgcctctaattattataatattattatattagagtgtatttacacatagtataagcagatattgaaaaggaatagggcctgcaatattataatgttattttctctaagtaccatatatatagatagagccaccaagagaaacccagttctcaatttgcccagatttcaaggcggtcagggcagctacgttgcgaaactagtggtggaacaagggaaggtgtcaggatggcaccttcatgcatcttacttgcaagttgagaggatcaaattgcaactcttcgcagatatcttggaggaactctgccttctttggggtcgcagccaactcattgttaaagaatttagtaggtctgaaatactcgagccttgacatctgtgatgattgcttctgcttcgtacttcgccagtccaaatatattcctcagttgattcaaagccgcaagcttgtcatcgctaagatgtccatctgaaagtacctccattgcataggcactatagagcatctttagat

SEQ ID NO: 411437 - DNA, 451 bp, Oryza sativa
ggtgcaatatccatctctttttattgcatttgtacggttgtacacataacaagacgtcgtgttattgtggaagagaaagccaaaaaaaaggattacgaagtgctttccaccacaccagctacgagcaaaaggatgcctcatattcagagtctgactatggtgttgtcttacacgtagtatgtaacaacacaactcacatgaagaccatggttttggcgagctcgacggccctctcccgaccaaacagcttctccacgatggcgagagagaactccatggatgtgcctggaccttggctggtgattaggttgccatcaacgacaaccctgttcttgcattcgctttggtccgagagcttgttccacataccaggaaaggatgtagccttctttcccttcagcaggccatgtggttcaagggcgattgctggcgaggcacatatagctccata

SEQ ID NO: 411438 - DNA, 482 bp, Oryza sativa
  unsure (1)..(482): unsure at all n locations
gaactgtgtgaccagtcgaggaccaggaacggtcatggagtattctgttgttttggtcgaacaattatatggcaaagaaaaagctgatgaagttgctggtccaatggtcatgcgcccccagcatggtgtggagttctcattgaaagagttgaattcaactagttggaatgttggtgaaacacctcagattcttgtaccaattgctaatgggacagaggagatggaagcaactatgataatcgacatcctcagaagggcgaaagcaaatgttgtcgttgcgtccttggaggaaactttggagattgttgcatccaggaaagtgaagatggttgctgatgttctgttggatgatgctcttaagcagcaatatgatctcattttgttaccaggtggtcttggtggtgcccaagcatatgcaaagtcagataaactgattggtctgatcacgacgcangctgaggcaaacaagctatatggagcta

SEQ ID NO: 411439 - DNA, 450 bp, Oryza sativa
  unsure (1)..(450): unsure at all n locations
gtgatgtccttggctgtctcccctatatctaaagatggtggaggacaattttcaaaggctctgaatcgtttccagaaagaggatcctactttccgtgtaggtctggatccagaaagtggagagacaattatttctgggatgggtgagctgcatttggatatctatgttgaacgcatcaggagagagtacaaggttgatgcaaaggtcggaaaacctcgtgtgaacttcagggaaactatcactcagcgtgctgaatttgattacttacacaaaaagcaatctggtggtcaaggtcaatatggacgagtttgcgggtacattgagcctcttccatcagaatctgatggtaaatttgagtttgataacatgatcattggacangcaattcctttaaacttcataccagcaattgagaagggttttaaggaagcttgcaattctggtttcgtg

SEQ ID NO: 411440 - DNA, 469 bp, Oryza sativa
cataatatatccattcacctcacaggtgtgcacaagacctgcacatgtaatacataacatatgcggtacaatacttcatatatagtactgcacatattattcagagggcacaacaatgtataaaagttgcgcgattattcacccaaagcaacaagctaagcatatgctacatgctcttaggacaggttgatcaagtagatcatggcagcttagctagcaaattaaaggctcttaattaggccagcacagtttcagtgggcatcacgatgttggcagccgatgtggtgttgagcatccaggtgtggaacggatggaagagcacctcggcagggcagctgaggttgggcaggacagggcagtcgatgaagctcttggcgtccttgtcgacgcagaggtagatctcgtacaactgcttgttcccaaatggcccgtccctgcactgcactcctggtgtcacacccagcttctg

SEQ ID NO: 411441 - DNA, 413 bp, Oryza sativa
gtagtttactgcactgacagcgagtatggttgtggggggcccaattatgggtacccgcgagaagataacttagtaaagagcttcatgacctttgactcgtcagagaacacagttgttgtcaggagcaactccgacagtacttttgacattaacacgctagactcaatcgagaacaacctgaacgactactggagcaacataaagtgtcctagcaccgacggcgagaacttatggaagagcgagtggaacagctatggcgtttgctacggcctcaaggagttggactactttaaggccggtgtacagctcagaaagaacgcagatgctctatctggtttagctgaacaaggcataaagtcggactaccaactggacaacacggcgttcataagtgggcagtgaaccaaaaagtg

SEQ ID NO: 411442 - DNA, 470 bp, Oryza sativa
caacataactgcaaattctcttcatcctggatctatcatcacgaaccttcttcgtcaccacagtatcctagatgttctccatcggacacttggtaaattggtgcttaaaaatgctcagcagggggcggccaccacttgttatgttgcattgcacccacaggtgaagggtgtgtccgggaagtacttcagtgacagcaatgtgaacgaggcgagtgagaaaggcaatgacatggagctggccaagaggctgtgggagtacagcatcgagctcatcacctgacctgacctgacctgattcatgaactgaatgagagatactatgtaatgttgaagtttgagagagtgcctgtaaagtaaattgtggtaacttaactatggcagctaccatctggtgtgcgtgcgtacgtacatcaaaccaacatgatactagtagtgagtaataagcatatgcgaatcttcctcctcaaaaa

SEQ ID NO: 411443 - DNA, 328 bp, Oryza sativa
gctccagttacacgagcctagttcaggtagatacaatggcgtccaccgcctctttcatgctcgccgtcttgctggcggtggccgtcgcggcggcgccggcgagggcggtgcgatgcccgccgagcgacaagcaggcgctgatgagagtgaagcagtcgctgggaaacccggcgacgctgtcgacgtggtccctggcgtaggcggactgctgcgagtgggaccacgtacggtgcgacgaggccgggcgcgtgaacaacgtcttcatcgacggcgccaacgacgtccgcggtcagatcccgtccgccgtggcggggctgacggcgctcat

SEQ ID NO: 411444 - DNA, 506 bp, Oryza sativa
aagttttcttcttctctctctcgatcccgtctcgtctggggagtttgttcccggttgcctgcgcgccgctctcctctccggtctactcctccgccgtcgccgtcggcaccgccgccggagctcctccctgctccctctactgggttggcggggagtggatcggggatctgcacgcaggggccgatttcttctcttcgtaaggagtagataacacagaatagttgaagatgagcagcataggcacaggatacgatctgtccgttaccaccttctctccggatggtcgcgtcttccaggttgagtatgccacgaaggctgtcgacaacagcgggactgttgttggaatcaaatgcaaagatggaatcgtcctgggtgtggagaagctagtaacttcgaagatgatgctggagggatctaataggaggatccattcagtgcactggcactctggcttggctgtgctgggttagctgcagatggcaggcaaattgtttcaagagcaaaat

SEQ ID NO: 411445 - DNA, 540 bp, Oryza sativa
gcgtacttttttttacggcgtgggaggacaagaagtgccccggggggtttttctatcctgcacaggggaaggttgagacaccataacagctcgtgacccgatgcaggagcaccatttacaatcgatacgccacgattcaggacaaggaaagtttacgttcggaccaacagctgccgatgcgctctgcatgcagatgtctttgcacacaacgctgaccgactacaacactgcttacatgttgatgctagacctagaacttcgacgggactgccggttaatgacaccctccctacaggccctacgcctatcgcgcgatcgagacacgatgatctgcccatagttacatgctcggatgcaccccacggctgtcaacgatcaatttgaaacgtgcggacacagcaaccagctgagttcccatatggagatctagaactagaggtcgagatatcattttctcttaacatgggcgaacaggaagatcagagtttacgaggatagcccctttggcgctggatattgccccacgttattgttctggac

SEQ ID NO: 411446 - DNA, 496 bp, Oryza sativa
  unsure (1)..(496): unsure at all n locations
catcgccggcgagagagagagagttagctagctaggatgggttctacagccgccgacatggccgcggcggccgacgaggaggcgtgcatgtacgcgctgcagctggcgtcgtcgtcgatcctgccgatgacgctcaagaacgccatcgagctgggcctgctcgagacgctgcagtccgccgccgtcgccggaggaggggggaaggcggcgctgatgacgccggcggaggtggccgacaagctgccgtccaaggcgaacccggcggcggccgacatggtggaccgcatgctccgcctgctcgcctactacaacgtcgtcaggtgcgagatggaggagggcgtcgacggcaagctctaccgccgctacgccgacgagtcggtgtgcaagtggctgacgcccaacgaggacggcgactacatggccgtcctcgcccttatgaaccaggacanggtcctcatggagagctggtactaccttaaggacgcagtcctggacg

SEQ ID NO: 411447 - DNA, 496 bp, Oryza sativa
gaaatctcaggttttcttctcgctttcaccggagaaggagaaggagaggaaggtgttgatcgaatcctcctccaatcgcgcgcgattcgatccccgttgctggctcgctcgctccgccgatccctcatccgatctgaatccccgatctgatggcggccaaccccggcaacaagatccgtaacgccaagctggttcttcttggagatgtgggcacgggcaagtcgagcctcgttctccggtttgtgaagggccagtttgttgagttccaggagtccaccatcggcgcggtcttcttctcgcagaccttggcggttaacgacgagacggtgaagttcgaaatctgggatactgcacggcaggagaggtatcatagctcggctccgatgtactatcgtggtgcggctgccgcaatagttgtctacgacatcacaaatgcggcctctttcacacgtgcataaaaatgggttcaagaacttcaagcgcaaggaaacccaaa

SEQ ID NO: 411448 - DNA, 472 bp, Oryza sativa
aaaggcaagaatattattcataaatggcgcgtgatttttatcaaaacgcttgcaaatgatatcagataagtagagtcaacaagacaaaactgtatctgccaaagcacacctccccaactccacccaattacgccattatttctgggcaaaagcaaacggcttcccattcctccccttcaccagtctcaaaccataaaccccacaacaaatcctcctaagtgacggcatataagatgatgaaaacaaagcaggatactccagagtcgtcatggcgaacttcaagttgacacttctcatgccacagccgctagtcgtgctgggcagcctagtaccggtagtgcgcgggcttgtagggaccctcaactggaacgctgatgtagtcagcctgcgacttggagagcttggtcagcctggcaccaagcttgcccaagtggagggcggccaccttctcgtcgaggtgcttgggaagaac

SEQ ID NO: 411449 - DNA, 480 bp, Oryza sativa
tttcttcgtcgcagatccgatccaggaagagctcgccggcgccgttgccatggcgctcgcggtggagaagacctcgtcggggagggagtacaaggtgaaggacctctcccaggcggacttcggccgtctcgagatcgagctcgccgaggtcgagatgccggggctcatggcgtgccgcgccgagttcggcccctcccagccgttcaagggcgcccggatctccgggtccctccacatgaccatccagaccgccgtcctcatcgagaccctcaccgcccttggcgccgaggtccgctggtgctcctgcaacatcttctccacgcaggaccacgccgccgccgccatcgccagggactccgccgccgtgttcgcctggaagggggagaccctcgaggagtactggtggtgcaccgagcgctgcctcgactggggcgtcagcggcggccccgacctcatcgtcgacgacggcggcgacgccac

SEQ ID NO: 411450 - DNA, 371 bp, Oryza sativa
ttgttgcagcagcagcaaggagaagaagaagagccgggatgcatatcttcgtgaagaccctaacggggaagaccatcacgctcgaggtcgagagcagcgacaccatcgacaatgtcaaggccaagatccaggacaaggaaggcatccctccggaccagcagcgcctcatcttcgccggcaagcagctggaggatggccgcaccctggccgactacaacatccagaaggagtccacgctccacctcgtcctccgcctccgcggtggcatcatcgagccctccctccaggccctcgcccgcaagtaccatcaggacaagatgatctgccgcaagtgctatgcttcgctgcaccccaaggctgtcaactgccgc

SEQ ID NO: 411451 - DNA, 503 bp, Oryza sativa
  unsure (1)..(503): unsure at all n locations
accatttttaacccacttataccgtgaaaaacaatgagcacagttcccgtttccgtttccgaatttcgatccggcactgctatgtcgctgcgctggatcgcttgatgaaggagacgacggcatcaagctccgcctccgccttgtctcccccggcggcggcggcggcctcctcgaggaagtagacgtggccctcgccgccggtctcgtacagcgccgcctcctccccttcccacgcgctccccctcagcacctccacgtacatccgagctcggtcacgcatcgtgtcgagctcccccacggtgaccagtgcccgccggcagccaagcgccgcccattcctccgccggagtggacagcgggttgatgaacgggtggtcgatcccgtacctcccggcgcacatgaagccccatgatctctccgcccgccgcgggagctcggnngtcacgcgttccgacggcatgagctccccgccgcggaagaatgggtggagaagcaccatgcct

SEQ ID NO: 411452 - DNA, 483 bp, Oryza sativa
acaaaacaggggcattcattcatattcatattcacgcgggatatggtacaggtactaggtggtgagggcattggggagcgaggtttgagtgccaaggaccttgccgccgacgtcggggaagcagtcttggccggggagagagcggacgcggccgtccttgtccacctttaacgggtaacacatcaggggccccttcgtctcctccatttccggggacacgtacgcccttcagttcttcttcgacattttccttacccgccttacgcacttccccgttttcggccgcccgaaggactccttcaccggcccaaggtgctccggccacagggacattctgtacccgcacacctgtccacgaggagggccttggccgggatcagcaaaccacttgtagtgtggctggtaggcgcccatggcgatctcggtgtccctgcagccttccatggacctctggttgatgttggccgatccgataagacttac

SEQ ID NO: 411453 - DNA, 522 bp, Oryza sativa
  unsure (1)..(522): unsure at all n locations
attttgatggtttcggaaccggaattcggaattgcaggaggagtggatgcctttataaatgaggttcttgtccttggcttcaaatactcgatgtgtttcttggctaatcctaatccctagctgcttgtgtgctgcgtgtgcaatttctgacccttttgtggtggtgtatatcaacagagaaatctctagctttttcagcggcgaagcgaatccatggccgagcacctcgcttccatctttggcacggagaaggaccgcgtgaactgccccttctacttcaagatcggcgcgtgccgacatggcgaccgatgctcccgactgcacaacaagccgtcggactcgccgacgctgctgctctccaacatgtacctgcgtccggacatgatcacccctggaattgatgctcagggcaaccccatcgaccctgagacgatccaggccgacttcgaggatttctacgaggacatctntgagggactcagcangtacggcgagatcgagagcctncacgtgtgtgacaac

SEQ ID NO: 411454 - DNA, 510 bp, Oryza sativa
aatctgaagattataacttaacatgagcactgaacattactacttgattcaacagtggatacagattcaaacattatcataaagtcctcacaactaggcagctcatcgacaattttattcgcacaagtattttgcagacaaatttaaacaagattgacacgataggtccaagtgatcgctgccgttcctaagagctgaagctcttacagtgccttgaggatctcctcagcaccagagattgtgaattggccaccttcctcaatgtttgcaacagtaaccttgaggttgtcagcaaggagagcaaaccgtctcgaacgaataccaagccctttctccgaaaggtcaagctcaagaccaagtgccttggtgtatgttcccaaaccatcggcaaggaatttcacatgcttattctcagggtatgactttgcccacgccttcatgccaaaggggtcgttaacactgacaagcaagatgtcgtctacacccttggctttgagctgctcagcctga

SEQ ID NO: 411455 - DNA, 447 bp, Oryza sativa
ttctgttcctcctctcctccacacatccaggcaggcagcacaagaatcatccgggagagcgacatggccccggttgccgtgggcgacaccctccccgacggccagctggggtggttcgacggggaggacaagctgcagcaggtctccgtccacggcctcgccgccggcaagaaggtcgtcctcttcggcgtccccggtgccttcaccccgacctgcagcaatcagcatgtgccaggattcataaatcaggctgagcagctcaaagccaagggtgtagacgacatcttgcttgtcagtgttaacgacccctttgtcatgaaggcgtgggcaaagtcataccctgagaataagcatgtgaaattccttgccgatggtttgggaacatacaccaaggcacttgggcttgagcttgaccttttcgagaaagggcttggtattcgttcgaga

SEQ ID NO: 411456 - DNA, 492 bp, Oryza sativa
gtcactgtatgtgacagcagtaatgtacactgtacagtttcaggtttgcgacaacaacaacagggggtgggttgggagctcgtcaactaatttattcacacagatgaacccgttgcttatttttgcttgcttttgtgttgtgaactcgatgttgtcgcttattatttgcttgcttttggacggccggcagcatcatcagccaacttatgaagcgtctgtgaattgagctgtacaggtcgtgaatctctgcctgggtttctcaatttggcttgttctccttcacggtgaaaaggacactagagtcaaaaatttgttgtccggcagtagccttcagcccttccacatatccggcacaaggcgccttcacaacatgctccatcttcattgcttccataaccatgacaggctgaccttcctccacccgtgccccgtctttaagcaaaacctttacaaccagaccagccattggtgccaaaacactcccctttggat

SEQ ID NO: 411457 - DNA, 513 bp, Oryza sativa
ttcattatctgctatccgagacatgggcgacaagagggcttttaataggatcatgggtgctgttggtgtaccgctcgtcccaggttaccatggggctgaacaagacattgagctgttaaaacttgaagccaataagattgggtattcagttttgatcaagcccacacatggtggagggggcatggggatgagaatagttcaaaggcctgaggactttgtggattctgtattgagtgctcaacgagaagccgcagtatcatttggcataaacacgctgctggttgagaagtatattacccaacccagacatatagaagtccagatatttggagatcaacatggaaatgtgattcacctttatgagagagattgtagtctacaaagaaggcaccaaaagattatcgaggaagctccagctacgaatgtgacagttgagaataagcatatactagtgttgctgctgtatcagctgcaaggcagttggttactacagtgctggaacagtggaattta

SEQ ID NO: 411458 - DNA, 498 bp, Oryza sativa
ttcttttaggaaagcatcgaaccttgcaaagaggggggtttcatttgaagatgttgggggaaatgataatggggatcttgtggtaacaaaaggtgaccagtatgatgtaagagaccatagtagtagcaaagaggtaagaaacctcgggaagccagtggatttagcaagccagtactacatagatggtgctgatgaggttagcttcttgaatataactggtttccgtgactttccgttgggagatttgccaatgctagaggtattactttgtgcatctgagaaagtatttgtgccacttacagttggtggaggtataagagacttcacagatgcaaatgggagatactactcaagtttggaagtagcgtcagagtacttcaggtctggtgctgacaagatttcaattggtagtgatgccgtttttgctgctgaagcctatttgcagactggtgtaaagacaggaaaaagcagcttggagcaaatctctagagtatatgg

SEQ ID NO: 411459 - DNA, 315 bp, Oryza sativa
agacaaaaccacctggggaaagggggaccatgatccacaggatgggacaaggacccgcggtaccgccattcttggggggttacccaagaggacccaaacgcacttacccaaaagacgaaaaaaaaggggcttatttaaatggccgatgagcaatgtagtagaaggggtagcatgccaccaaatctaaagggaatgggaattttttttggggggagtgacttttttttccctttccttttttttttacttctcccagcacaaaagcaattcaccaaatcgcccgcccaatggggcaaccggggcgacaccggaagg

SEQ ID NO: 411460 - DNA, 340 bp, Oryza sativa
  unsure (1)..(340): unsure at all n locations
ctcgtcgtgtcgctccggttgctccattgatcggacgatctggtgaattgcatttgtgctgggagaagtaaaaaaaaaaggaaagagaaaaaaaagaaaatcacgccaaaaaaaattctcattccatttcgatttggttgcatgctaccactactactacattgctcatctgccatttagattagctcctttttcttcgtcttttgggtgagtgcgtttgggtgctcttgtgtaatcctccaataatggccgtacctacggtacttgtcccatcctgtggatcatcgtcctcctttccacatgtggttttatcaaanaaaaaaaaaaaaggaatcctacc

SEQ ID NO: 411461 - DNA, 508 bp, Oryza sativa
gtcatgcggctgcaggacatcggcatgatcgacgccgtggccggcatgcgcgccctcgacatgaacaccgccgaggacgagatcgtccgcctcacccgcgaggtcgtccccggcatgatcgtcaccggcatggaggtcgccgagatcgacggcgccccgagaatgggcccgacgttcggagccatgatgatctccggccagaaggcggcgcacctggcgctgaaggcgctcggacggccgaacgccatcgacggcacgatcaagaaggcggcggtggcggcggcgcacccggagctgatcctggcgtcgaaggacgacggcgagatcgtggacgcctgagcgaatagaacagggtaaaaaaaaatccgcaagacgtggtggtgacacggaggcgttggggacgagaagaagatgtggactttcccctgtgtttttttttcgggatttgctttgatccccttgtttgttttagctctggatgttgattagcgtcttgttcatagcaatt

SEQ ID NO: 411462 - DNA, 440 bp, Oryza sativa
  unsure (1)..(440): unsure at all n locations
gacgtgcttgtcctcgacggcaacgacatcgagctcgtctggcgctcatcagccctcatgaaccagaaatgccacgtgaagaacaaggatatcaggcaggtcttggatggtatctacgtgagcgacaagggacaccatcacagaggatgcgtaaactgctatgttcacctagtatcatgaagtgctgacacttgtctcccgtgtctgatcatcctctgagttgcgacactatgagagactgaattttgttatggtgggttatttnggactgcatggagcatggactttgagactgcgtagtgtaactgtgtgagattatggagggtacctatcattcacgtaagacagtttactggaagcattaagggttagtttggcagtgtgacgaggtttgagcagaataaaccaacacaaggacaaggagaatgtggagcattagt

SEQ ID NO: 411463 - DNA, 476 bp, Oryza sativa
aagaaggagaacaccaacatcacactatcagtatcgacatctacaaagttcacagaagtttaaacctttttatctgcaacatttgaataactttatattttgacagaagtttaaacctttttatctgcgacatttgaataactttatattttgaagtgctcgatgagagctttgctcgcaagatctcttttaaagaaggcccccagaaactcagacatagtaaaattcctgtactttggtgggtttcccgaagaaatcagatctggcaatggtccataaaaaacagagtcgcctctcttgccaggattgtaaaagatggcgcttgaaactctggcttcttcatgcgacttcattactacccggtgttccacactcttgtacttatcattagacatgatctgcaataggtccccgacattgatcacaagagcgccaggcacaggcttggcatccacccagtagctctccccatcctc

SEQ ID NO: 411464 - DNA, 504 bp, Oryza sativa
tccatgtttctccaaactccaagactccatcgccatcgacggcgtggtgaccatggcgtgctgcgccgccgacgccgtggcaacggaccgcatcgccctcgtcaaggccttcgacgagacacgcaccggcgtccgcggtctcgtcgaatacggcgtctctgccgtcccggacatcttccgccaccccgacccctacgccttcgtccccctcgctccacccggcgtctacatccccgtcgacaacctctacctccccgcgccgctcgccgtcgaggccgtggcgggagccgtgcgcgactgggggttcttctacctcgtcaaccaccacgcccttgtcccctccggcttcaccgtcgggctcctcgtcgccgtccgcgccttcaacgagctccccgtcgtggagcgcgccgagcactacggtcgctccgaggacggcggggtcagctactcctacaacgtcgacctgtaccggtaggacgccgcgagctggcgcgacacgatcca

SEQ ID NO: 411465 - DNA, 493 bp, Oryza sativa
tgctaacaaagtcagattgggtgtcaattaggaaatgacctccatgggcaattgattcctggggactggggtgtttaatttatgagctcttttctggtgcaaagctaaccaggacagaggaccttcggaacactgcttcaatcccaaagtctttacttccagattaccagaggctcttgagttctgccccttctcgtagaatgaacccttctaaacttattgacaacagtgagtttttccagaacaagttagtagagaccatacagttcatggaagttcttaacttaaaggacagtgttgagaaagatagctttttccgtaaactaccgaacatagctgagcagcttcctcgtgagatagtcctgaaaaagttgctccctgtgctggcatctgctcttgagtttggttcagctgctgcaccagccttggttgtattgttgaagatgggttcctggcttccagctgaccaatttagtgcaaaggttttgcctac

SEQ ID NO: 411466 - DNA, 498 bp, Oryza sativa
ctcaatctctcatctccagccgcgctgggtgggtttatatagataccagccgcggcttcacccaaaccctagccctattgcgcgcgggagacccgccggcgaggtgcgcgcacggagcgagccggggggcgggagggccagccgccgtcgacgacgcctgcagcagcgaggatgccgacggggtcggcgacgcagttacggtacacgcagacgccgtacaaggtgctccacctccggaacatgccgtgggagtgcaccgaggaggagctcgtcgagctctgcaagcccttcggcagggtccgtaacaccatgtgcaacgtcggcgccaaccgcaaccaggccttcgtcgagttcgcagatcaaaaccaggcaatttcaatggtttcatattatgcttcttcttcagaacctgctcaagttcgtggcaaaactgtatatatccagtacttacacagacaagaaattaccaacaatagaggaactggtgattcctctggc

SEQ ID NO: 411467 - DNA, 514 bp, Oryza sativa
tgatggaggcgcacgcgtcgttcggtgtgctccggcggcaaggtgctcaacgtgggattcgggatggggctcgtggacacggcgatccagaggtacgagcccgaggagcacaccatcgtcgaggcccacccggaggtgtacgcccggatgctcaagctcggctggggcgagaagaagaatgtcaaggtcgtgttcggacggtggcaggacgtgctcccgcagctcggctcttatgatggtatattcttcgacacctatggagaatactcaggatatgagagagttccaccaacatcttcctaagctattgaagcctggcagggatctactcgtatttcaatggcctctgtggcgataatgccttcttcaacgttgtgtattgccagctcgtagcgttagagttggcaaatcttggctactcgacacagttcatcccgctcccagtcaaagattgtctttcagaggaaatatgattgcgctgaaagcagaaatactggcaattggatacttacca

SEQ ID NO: 411468 - DNA, 509 bp, Oryza sativa
  unsure (1)..(509): unsure at all n locations
tttatatcgcgagcgccgccctttttttttttggttgtttcgcatacctaacaaaaggggaacatcactgccaagaaaacaaagtttcggtgaaagttctctttcattggctacaggccacagccgataagcatctacaggagtagattagtagtcgattgcagtggaaacgtcacatgcccgatggaagttccagctccggagatggtgtatggaattcagaaacacgcttgaacaaacgtagcagcagccaaagcagccagccattgacgcttagcacaatttgctggccattgacgcttagcacaatttgctgacaatccattggattattgctccggttctgattctgcttggcaaactgggaggtggtaagtatccaattgccagtatttctgcttcaccccattccatatttcctctgaaagacaatctttgactgggagcgggatgaactgtgtcgagtagccaagattngccaactctaacgctacgagctggcaatacac

SEQ ID NO: 411469 - DNA, 538 bp, Oryza sativa
  unsure (1)..(538): unsure at all n locations
aacattcatgtacggccggaagctatctaaggactgcagctatgggcaatttgttctgctgtgttcaagttgatcagtctacagtggccattagagaacagttcgggaagtttgatgctgtgcttgagccaggatgtcactgcctgccttggtttgctgggaagcgtatagctggccatctcacactcaggttgcagcaactggatgtgcgctgtgaaaccaagacaaaggacaatgtgtttgtcaatgttgtggcatcgatccagtacagagctttggctggcaaggcaaatgatgctttctacaagctgagcaacacaagatctcagatccaagcttatgtcttcgatgtgatcagggcaagtgttccgaagctgaacctggacgacgcatttgagcagaagaacgacatnagcaaggcagtggaggatgagctggagaaggctatgtctgcttacgggtttgagattgttcagacgctcatcgttgacattgagccagacgagcacgtgaagcgagcgatgaatgaaatcaatgc

SEQ ID NO: 411470 - DNA, 372 bp, Oryza sativa
acgacaaaccacgaacttggatattaaagatgccacaaagaagggtcacataaacaacacagggcacagcagcgaaaggtacaagcaaaccctgcataatcgaaaaggaaatgtttttcaaaaccagacacacaaactggttgatagaagcccacacggacagatcataggatagcagcagtaatcaagcattgccaagggaccaggcaagaaccctgaacctttttaggactcggcacccttatcacccttgtcaccattggcgaactcggagccgacctcctcggaggccttctccaggggggggagggcctcgcgggcctcggagaacttccccttcttcatggccttggcgacgtaccaatggaccaa

SEQ ID NO: 411471 - DNA, 455 bp, Oryza sativa
  unsure (1)..(455): unsure at all n locations
cggacgcgtgggggagtgcatctcgatccacatcgggcaggccggtatccaggtcgggaacgcgtgctgggagctctattgcctcgagcatggcatccagcctgatggacagatgcccggtgacaagaccgttgggggaggtgatgatgcttttaacaccttcttcagtgagactggtgctgggaagcatgtcccccgtgctgtcttcgtcgatcttgagcctaccgtgattgatgaggtgaggactggtgactaccgccagctcttccaccctgagcagctcatcagtggcaaggaggatgcagccaacaactttgcccgtggtcactacaccattggcaaggagattgttgatctgtgccttgaccgcatcaggaagcttgccgacaactgcactggtctncagggcttnccttgtgtcaacgcttgtggaggaggaacggggctccgtctcg

SEQ ID NO: 411472 - DNA, 326 bp, Oryza sativa
tttcatttttttatcaaagagttgaacaatgaagatagatggcaagtgcctgaccgatttgaccaggtcgtgtaggaacaaggttcaaatcgaatgttcgttaggatgcctaacctgcatacatcactgcactcccacttgacacctatttaaacgtgctcggctcgccgctaccttatcctattaccatgcttgtggcgatccatccccctatgggcggtgaacccgtcgatgacctcggctgtgctacctgcggctctccccaagttaaaggagagagccctccccttggtgggggctgcctacttatctgcttgcagcagcta

SEQ ID NO: 411473 - DNA, 482 bp, Oryza sativa
cgagactctatcaagaataaggagcacgctgaagttgaatatgctattgtaccaatacctgttgatgatgatgatgacataggaaaggaggttgttaccagactgacaacaaatatggccaccaacaaaatattttatacagattctaatggaagagatttcctcgaaagggtgagaaaccacagggatgattgggaccttaatttgactcaacctgttgcaggaaattactacccggtcaatcaaggaatatatgtagcagatgggaaatatgaactatctgtccttgtggatcatgctgttggagcttcgagtattcaagatggtcagattgaagttatgctccacaggcgtctttctgcagacgatggcagaggagttggggaaccacttaatgaagtagtatgtgtggatcaaaagtgcgatgggctagtggccagggcaacttactatatcaatgtcaataagaaaggacatggagc

SEQ ID NO: 411474 - DNA, 432 bp, Oryza sativa
ggagtacaagcccgatccgccgtcggcggaggagaagagctgaggtggtcgcggcggtctctaatggcgggtctctggagaccgtggcggtggagccggtgtcgtcgggggcagccgaggaggaccgcgttttggatgacatccttagtaagctggacatccaagagacaccaactcttgtgctctatggatccggtgctttggttgtcctatgggttctatcttcagttgatactgcaatcgattccattcccttggatccaaaagttcttgaactcataggaactggttactcaatttggatcacttcacggtaccttctcttcaaggaaagtagggacaaactgtttgcgacattcgaagagctgaaagagaggattattcgagctcaccacttatgatcctgtggtgtatgataggcttcctttccaa

SEQ ID NO: 411475 - DNA, 504 bp, Oryza sativa
gtagcgcggcaataaaacattgcattgaattctgaacgataaacaccaggaaccggcgtttatttgaggcaagcactgcccaaaatctcgcaaaagtactgaaaccttagacatagtacacatccatggcaaacatggatgccaaatgacaactacagaaaattatcaaattcgaatgcagctgacggcttctcctgctgaagatgcatattttcccctccattacttggatgtgctctctccatcgacagccaatgggacggcgctggccaggctgcggtatttcagagcatagaacatctcaatgtaacggcgagtctcgcgcctctcaaggttgcttacgtacttccagaatccatatacaccagtcaaggtcatcagcctctcagagtacagcttccaggtgtacttctcgtaaatcctctgcagacctccctgtgaaatattgtcccagtaggttgaatcctgcttgcacttctaaagaagttgaccaagatatcagca

SEQ ID NO: 411476 - DNA, 555 bp, Oryza sativa
gtcaacttggagaagttccttggaactattccaatggtgttcaatgttgttatcctgtctccgcatggatactttgcccaatccaatgtgttgggataccctgatactggtggtcaggttgtgtacattttggaccaagtccgcgctttggagaatgagatgcttttgaggatcaagcagcaaggccttgatatcacacctaagatcctcattgtaaccaggctgttgcctgatgctgttggtactacatgcggccagcgtgtggagaaggttattggaactgagcacactgacattcttcgtgttccattcaggagtgagaatggtatcctccgcaagtggatctcccgttttgatgtctggccattcctggaaacatacactgaggatgttgcaaacgaaattatgagggaaatgcaagccaaacctgatctcatcattggcattacagtgatggaaaccttgtcgcactctgctggctcacaaattaggagttacccagtgtaccattgctcatgccttggagaaaaccaaataccccaactcagacatata

SEQ ID NO: 411477 - DNA, 410 bp, Oryza sativa
gcgcggtattttaacattgtattgaatttgtgaacgataaacaccaggaaccggcgtttatttgaggcaagcactgcccaaaatctcgcaaaagtactgaaaccttagacatagttcacatccatggcaaacatggattgccaaatgacaactacagaaaattttcaaatttgaatgcagctgacggcttctcctgctgaagatgcatatttttccctccattactcggatgtgctctctccattgactgccaatgggacggctcttgccaggctgcggcatttcagagcataaaacattttaatggaacggctagtctggcgccttttaaggatgcttacgtacttccagaatccatatacaccagtcaaggtcatcagcctttcaaagtacagccttcaggtgtcctt

SEQ ID NO: 411478 - DNA, 531 bp, Oryza sativa
  unsure (1)..(531): unsure at all n locations
tggtgctccattgacgtatgagactgttgtacgtgctacggggagttttaatgcaagcaattgtattggaagtggtggctttggagcaacatacaaagctgagattgcacctggagttctggtggcgataaagaggcttgcgattggaaggttccaaggtattcagcaattccaagcagaggtaaaaactcttgggaggtgccgccatcccaatcttgtgacactcataggataccatctcagtgattcagagatgtttcttatatataattttcttcctggtggtaatttggaaagatttatacaagaaagggctaagagacctattgactggagaatgcttcacaaaattgctctagatattgcacgtgcacttggattccttcatgatagttgtgtcccacgcattctgcaccgagacgtgaaaccaagcaacattttacttgataatgaatacaatgcatacctttctgattttggattagcaagactactcgngaattcagaaacacacgcaacaactggtgtagc

SEQ ID NO: 411479 - DNA, 519 bp, Oryza sativa
attcaggagatcaaattcttaggcctgattctctcagtgatttagtatactagtgccatcgaagttcataatttgaagagagaatgcaagtgctgcccataataacagtcaaaattgacctatacaaaccatgacagctacataaattccatatagagttgccgaactacggaggttacaaggggtaaaagaaacttaaaaaggctaaccaccacttggcagcagtcttttcaagggagcactaacttattttctgatgcaacatggctaagctcagctaaaatccttcagccttctcttcaacacatccaaggacttctttcgagcactttgcactgtacttcggcctgaaaggctcccaaataagctttccggagcatctctaaacttgtcacagatgatagacaccttcttatgatccaaggatccaaaattcttctccctgatacagggttatggaagttctctggctggttgctgagcacagatcggtgagctgcctaatttcgccaggcaatc

SEQ ID NO: 411480 - DNA, 545 bp, Oryza sativa
gtactggaattcgatcttacaccagtataccgagcggactacattcacacatgccttggtcttggggaaaaattccgagaatactactacaataacaggcttatgcaacttaatttggacctgcaaattcccacgacacaacctttcatggagtctcatcagcacttccttgctcagatagctgggttctttattgttgaggaccgtgtccttcgaactgcagatgggcttctttctgatagtcaggttgagacaatgtgggggacagctatttctaaggtcacatctatcttagaggaacagttctctcgcatggatgctgccaaccacctcctactcgtaaaagactatgtcactcttctgggtgcaaccatgaagaagtatggataccaaaccacatcattgcttgaaattcttgagaagaatagggacaaattctatcaacttcttctttctgattgccggaaaaagatagatggcatcttcactaaggactcatatgagcagatgatcattaagaaggaaaatgagtaccacatgaatgt

SEQ ID NO: 411481 - DNA, 338 bp, Oryza sativa
ggggacaatcaagggatcaactgcaaagcatataatagctcacgataaggcacttgcattatatcaaattcatggaagggggcagcaaaatagtgataacttagccactgaggcattcgctaagtaatagctacaaaactccaatcacatagagaccaggacacaaaagactactgcagcaccctaacttagatgatgccaatcttgttggccacgtcgagagcatcgtcgtctggtgtcagcttcacgtaagccttcttcttcccatcaggcctgatcagagggttcactttctttgctggatgtcgaacatcttcttgacagcagccttgatcttc

SEQ ID NO: 411482 - DNA, 438 bp, Oryza sativa
ctccctcctcgcttcgcgtccgccgccgccgtcccggagaggtaagttcaagaggcagccctgtgaagctccaatggctcctaaagctgctcctgccaagaagggtgatgccaaggcccaagccttgaaggcagccaaggctgttaagtctgggacagccaagaagacgaccaagaagatccgcacatccgtgacatttcaccgccccaagaccttgaagaagtctagggaccccaagtacccaagagtcagtacccctgggaggaacaagcttgatcagtaccagatccttaagtatccccttaccactgaatccgcaatgaagaagatcgaagacaacaacactctggtcttcattgttgaccttaaggctgacaagaagaagatcaaggctgctgtcaagaagatgtacgacatccaggcaaagaaagtgaacac

SEQ ID NO: 411483 - DNA, 418 bp, Oryza sativa
  unsure (1)..(418): unsure at all n locations
caaangctctcattgattgatagcgatatcatagaagcagcgacacgaattaagatttaaaaccaaccccaagaaggatcgcagatccaactccaccgaatcgatccaagaactccgcctaatccaaccaaaccatgggcgatctcatctcaccaacacgacacgaactcataaaaagactaacaccaccaccacctcctccttatttagggactcgacgactaagacgactgatactggcgaaaggcgaaggggaacagcacagatctaggagagctggccgcagtcggcgatgacgaccggcttggcggtgctcccgccgcgggatcccaccttctcgatggccttgacgacgtccatgccctcgacgacgcggccgaacacgacgtgctttcccgccagccagctgcagggcacg

SEQ ID NO: 411484 - DNA, 517 bp, Oryza sativa
  unsure (1)..(517): unsure at all n locations
gtgaaacatcaaaaaaaatcaaacaaaaagaaaaaatgttgcccatctgtgaaattcgcaaaaccctagcgcggcggcgatgtcgaacacgagggtgttcttcgacatgaccgtcggcggagctccggcggngcggatcgtgatggagctgtacgcgaaggacgtgccgcggacggcggagaacttccgcgcgctctgcaccggcgagaagggcgtgggcaagagcggcaagccgctgcactacaaggggagcaccttccaccgcgtgatcccggagttcatgtgccagggcggcgacttcacccgcggcaacggcacgggagggggagtcgatctacggcgagaagttcgccgacgaggtgttcaagttcaagcacgacagccccggcattctgtccatggcgaacgccgggcccaacactaacgggtcccagttcttcatctgcaccgtgccctgcagctggctggacgggaagcacgtcgtgttcggccgcgttgtcgagggcatggacgtcgt

SEQ ID NO: 411485 - DNA, 457 bp, Oryza sativa
  unsure (1)..(457): unsure at all n locations
aaatacttaatagtaatagactctttgatggagtattacaacatgcagcagtggcattaatacgccagtacattaattaagttacacatatgcaggctccattttggtttcttttaatttatcgnattacagaatttctgtagccttgcagatgatcacttggatatcatgtactagtaattaacaataggatgcatacaaaagatggcccaacgacaacagaagatgcgtgcatctgacattgtctggccttatttgttggtagtactccaattaattaacaagagatgatgcattcttgtgccttagtttcttcacatgcttggcttcacgttgagcctattcgcaatcttcacccccaacgactcatcacactgggaggggcagctgacccagatggcgcggagctcaggggagactttggggtgcgcgagctcgccggcgaagcggcggatga

SEQ ID NO: 411486 - DNA, 588 bp, Oryza sativa
gcgccacgttccgctccgccacgcgccgccgacgccgatggcgccgttccccgtggtggggaggaggcagaaggcgacgatacacaagcagaacgacttcaagcagcccggggagaggtacaggtcgtgggcgccggatagacaggagaggttcatccgccgcttcgccggcgagctcgcgcaccccaaggtctcccctgagctccgcgccatctgggtcaactacctctcccagtgtgatgagtcgttgggggtgaagattgcgaataggctcaacgtgaagccaagcatgtgaagaaactaaggcacaagaatgcatcatctcttgttaattaattggagtactaccaacaaataaggccagacaatgtcagatgcacgcatcttctgttgtcgttgggccatcttttgtatgcatcctattgttaattactagtacatgatatccaagtgatcatctgcaaggctacagaaattcttgtatacgagtaattaaaagaaaccaaaatggagcctgcatatgtgtaacttaattaatgtactggcgtattaatgccactgctgcatgttgaatacttcatcaagagt

SEQ ID NO: 411487 - DNA, 551 bp, Oryza sativa
ccgttttcttccctccgactccggccacctccgcggcggcggagcattctagggtttcgcgccggctcgccgccggcgtacggagagggagggtgtaacacgcgcaggcctgcgccgtcgtcctgctctgggaacttccgcgtgcagcgagggatggacgagtgggttcgccaggccgaggtgtgggtgggacaagccgagaggtggatccggcagcagtctcccgagcaggtttacgtcgccgtcgcggtggtcgccgtgacggttctgttgctggtcgcagtttcgtggctgaaattcttgaaaggaaacaccatagtggtatctggggctcagtggtaggggcaaaactatttttttttaccagcttcgggatggatcaacacatcaaggaactgtgacttcaatggaacaaaacaacgatactttcgtgcttcattctgagctggagaggagaggcaaagtaaaacctgttcatgttgttgacgttcctggtcatgcaaggctcaaacccaaacttgatgaagtcctgtctcaagcagctggaatag

SEQ ID NO: 411488 - DNA, 552 bp, Oryza sativa
ttcatcggcctctttcccttcccttcccctccgagcgaatcccctcttctcctcctcgcggcgctcgctgagcatggcggcggagggggaggccaagaaggacagcgccagcaaccctcccgggggaggaggcggcggaggtggaggggaggaggaggactttcccagccctgctgtccaaccaggccctgtcttttatcggcgagaagggcgtgggcaagaccggtatgcccttgaattacaaggggagcaccttccaccgcgtgatcccggagttcatgtgccagggcggcgacttcacccgcggcaacggcacgggaggggagttgatctacggcgagaagttcgccgacgaggtgttcaagttcaagcacgacagccccggcattctgtccatggcgaacgccgggcccaacactaacgggtcccagatctttatctgcaccgtgccctgcagctggctggaccggaagtacgtcatgttttgaccgttcctcgagggcatggccgtcgtcaaggccatcgagaagggggatcccgcgggggagcacc

SEQ ID NO: 411489 - DNA, 473 bp, Oryza sativa
ccatttcgcggttccgccatggccaccgccgcggcgctcgcgctccacacgcagttccggccgccgcgctcgcctcgccgtctccggcagcatctagccttaccctcaggagtcctcatccgatcccccgtccgcgcctcggctgcgtcggcgtcggcgtcggcgccggcgcagcgggaggccgccgccgcgggagtcccgtggggctgcgagatcgagtccctggagagcgccgtgtcgctggagaggtggctcaccgattcggggctccccgagcagaggttggggatacagcgggtggacgtcggtgagcgcggcctcgtcgcgctgaagaacatccgcaagggggagaagctgctcttcgtgcctccctccctcgtcattacagctgactcaagatggggcttgcctgaggtggggaatgtgtgaaagagaaaatttgggccggattggtcgcttattggtacctacct

SEQ ID NO: 411490 - DNA, 275 bp, Oryza sativa
gccgcgtcggcggtttatatctcgggcgccgggacgatgacggggtgggttccagcattgaagaaggaggctattgccatgcgacattcattaaggtacacgaggacgcgctgcatgacggtcttgtacaagccattggataacacaatctgttgggccccgctgatgatcactatggtatgatgtactagcgattcacacaaggattgctacaacttgaggggctaacggcaacataagatgcgggcctgtgacattgggaggactcaatcggt

SEQ ID NO: 411491 - DNA, 487 bp, Oryza sativa
  unsure (1)..(487): unsure at all n locations
cacatacacacagacgcactcacacactcagcttaagcgagcgagcgagtgaacgagagagagagacagagatggcgagtgttgcctccttcccggtgatcaacatggagaacctggagaccgaggagaggggcgcagcaatggaggtcatccgcgacgcctgcgagaactggggcttcttcgagatgctgaaccatggcatcgcgcacgagctgatggacgaggtggagcgggtgagcaaggcgcactacgccaactgccgggaggagaagttcaaggagttcgcgcggcggatgctggaggccggcgagaagggcgccgacgtgaagggcatcgactgggagagcaccttcttcgtccgccaccgncccgtctccaacctcgccgaccttcccgacgtcgacgaccactacaggcaggtgatgaagcaatttgcgtcggagatcgagaagctctcggagagggtgctggacctgctgtgcgagaa

SEQ ID NO: 411492 - DNA, 584 bp, Oryza sativa
  unsure (1)..(584): unsure at all n locations
gagttttggaatttcttagtgaatgatattattgatattcttgaagaagattgtagaactgcaaatagttctcctgagactactcctgaagaggtctcaaatggggcagccaatgctttagcaaatggagccagagaaaggccattagttacattggtgcacaggacttttcagggtattttgaccaatgaaaccaaatgcctaatgtgtgatactatcacagcaaaagatgagacgttttttgatttgagcattgacgtggaacagaatagttcgctcacaagctgcctgaagagcttcttttccactgagattttaaatggcgaggataagttcttttgtgacaaatgcagcagtttgcaagaagcacacaagagaatgaagataaagaaggcgccacacgtattggtgatccacctgaagcgcttcaagtacgttgagcagcttagccggcacaagaaactgtcgtaccgagtggtatatcccctggagctgaagctgggcagcatgtctgaagacgctgactgcgagtactcccttcttgcnngtgtagtccatgtgggagcagccccaaccatggacac

SEQ ID NO: 411493 - DNA, 454 bp, Oryza sativa
ttttatagcttagataactcttatgatgttttaatttggacatttgtgtactttgtagatgatccatacgagacctagtgtttgattaaaaaaaaaaaaaaaaaaaaaaaaaaaaaaaaaaaaaaaaaaaaaaattgaaaaaaaacaagaaaataaaaaaaaaaaaaaaaaaaaaaaaaaaaaaaaaaaaaaaaaaaaaaaggggggggcctttttaaagaatcaaaatttattaacgggtgattgaaaagaaaaatttttttaatgggggacccaaaaataaaataagggggcgccatttaaaaagttactgatgggaaaaacctgggcaaaaccaaaaaaaatatttttgaaaaaaatccccttttaacaaattggggaaaaaaaaaaaaggcccaaacaatacgcctttccaaaaattgtgcaaacctaaatgacaaagggaacacccctt

SEQ ID NO: 411494 - DNA, 549 bp, Oryza sativa
cgcagagctgcaagtaccccgacgaccacccgtcggggctctgcgagtcggcgaggaaagcggcgtatagccggattggcaacatcgacatctacaacatatactcgtccacctgccacgaacagaaagtcaggccctcagcctccaagtgcatggatttggctgatccgtgctcccaatacttcgtggaggcgtacatgaaccagccccaggtacagaagacgatccatgcgaacacggagttgaagtatccctggactagatgcagggtttacaacctagaccacttcggcgactcgccaaagtcaatgctgccatacatcaaggcagtgataaccggccgcatccgcatctggatattcagcggcgacttggatgcgatggtgccggtgacggcgacgaggcagtcgatggagaggctccagctgcgggtggcggcggactggcggccgtggtcggcggacggcaaggacgttgccgggtacgtgatcgcgtacgacgggctggtgttcgcgacggtgcgcgggtcccggcacatggtcacgatcg

SEQ ID NO: 411495 - DNA, 543 bp, Oryza sativa
gtaattgataatccaaatactgaatagtaatagactctttgatggagtattacaacatgcagcagtggcattaatacgccagtacattaattaagttacacatatgcaggctccattttggtttcttgtaatttatcgtattacagaatttctgtaggcttgcagatgatcacttggatatcatgtactagtaattaacaataggatgcatacaaaagatggcccaacgacaacagaagatgcgtgcatctgacattgtctggccttatttgttggtagtactccaattaattaacaagagatgatgcattcttgtgccttagtttcttcacatgcttggcttcacgttgagcctattcgcaatctttacccccaacgactcatcacactgggagaggtagttgacccagatggcgcggagctcaggggagaccttggggtgcgcgagctcgccggcgaagcggcggatgaacctctcctgtctatcctgcgcccacgacctgtaccttttcccgggctgctggaagtcgtctgcttgtgtat

SEQ ID NO: 411496 - DNA, 457 bp, Oryza sativa
gctcccgctctgaacttaacgctgcaaaaaaaatcttggagtgtataactgtgtaagctttgctcaatggcggaggagaacaagtccggctccggcgacctgatggcgagcggcaaggtagtcgcggaggcaaccatgtcggtgttccagcagaagagcgtggagggcgtcgacaagaaggaggtcgccggcgccgccgcggacctgctgcactcggcgtccacctacggcaagctcgacgacaagccggtcgggcagtacatcgacaaggcggaggggtacctcaaggacttcagctccggcagtggcggcgccgcaccgccaccgccggcagccggagacgccgcagcgccgaagccagcggcggaggagctcgccaaggagcctgcgccggctgagaaggaggaaggcaagccaccgtccgtcgtcggaagggttcggtctcgacgacgtcatg

SEQ ID NO: 411497 - DNA, 503 bp, Oryza sativa
gaaccttctggtctggtttgttccatgacggtcaaggatgagatgttgttggctggtaccggagatggtcgcatcatggtttggaaaattcctgacaagaagggtgactctggaccagtggcaatcctcagtggccatgagcgccaagtgatttcgctcggtgtctcagtaacaaggctatactctggctcacttgacaagaccatcaaagtatgggaccttaaaactctgcagtgtgtccaaacactctctgagcacaaagctgctgtaacatctgtgctttgttgggatgaaaaactattatcttgctctctggacaagactgtaaagatctgggctgcttcaaagtctggagaccttcaagtgatatatacccattctgaggagcatggagtacgcacgctctttggcatgcaccgtgttggaaagacgccagttctgttttgctccctccacaacagcaactgcatacgtctgttcgacctgccatcgttcgacgagat

SEQ ID NO: 411498 - DNA, 555 bp, Oryza sativa
gttttgttggcccccattcctcccccaccccggtgtcgtgcgcttcgacgatcgcgtcggcgcctttttcccctatggcgctgccgaatcaggggaccgtggattaccccagcttcaagctggtcatcgtcggcgatggcgggactggtaaaactacatttgtgaagaggcatctcactggagagtttgaaaagaaatatgagccaaccattggtgtcgaagttcaccctctagattttaccaccaactgtggtaagatccgcttctactgctgggacactgctggacaagagaagtttggtggacttagggatggatactatatccatggtcaatgtgcgataattatgtttgatgtcactttaaggctgacttacaagaatgttccaacatggcatagggacttgtgcagggtgtgtgaaaacatccccattgtcctgtgtggtaacaaggttgatgtgaagaacaggcaggttaaagccagcaggtacattccacaggaagaagaatctgcagtactatgaaatttctgccaagagcaactacaactttgag

SEQ ID NO: 411499 - DNA, 479 bp, Oryza sativa
  unsure (1)..(479): unsure at all n locations
ttttaatggagtgttcttgaaggtcaacaaagccaccattaacatgctgcgcagggttgagccatatgttgcatatgggtaagctaccataattacattcgagcctaatatattatatatatgcaccatcttgctattttattttgaattaccatctgttgttttactagaaatgtgatcttggcatttactagaataactggaacatttcacaattaaaggcttctaaaattgcttacactgaatttgtgttattaagtagcaactgtttgcatcattgtgttctgcatcaaaatcataacaaattgtagtcaatcaattttatattttaatttgaattgtctagggtctgaaatagttcaagcccctaatgactagagttgattattgatcttcttactagattagtgattcttatgttntaggtacccaaatttgaagagtgtccgtgaattgatctacaagaggngctatggaaa

SEQ ID NO: 411500 - DNA, 456 bp, Oryza sativa
  unsure (1)..(456): unsure at all n locations
gcgtgggactaccgggggcggccggcggcgaggtcgcggacggggaggtggggcgcggcggcgatgatactggtggcggagctgaacgagcggctgacgacgctggggatcgccgtgaacctggtcacctacctgacggcgacgatgcacgccggcaacgccgaggccgccaacgtcgtcaccaacttcatgggcacctccttcatgctctgcctcctcggcggcttcgtcgccgactccttcctcggccgctacctcaccatcgccatcttcaccgccgtccaagcctcgggggtgacgatcctgacgatctcgacggcggcgccggggctgaggcccgcggcgtgcgcggcggggtcggcggcgtgcgagcgcgcgaccgngtcgcaaatggggtagctgtacctggcgctctacctgacggcgctgggcaccggcgggctcaagtcgagcgtc

SEQ ID NO: 411501 - DNA, 433 bp, Oryza sativa
gggatagaataaccaacacataggaggtttcatttcttcttctcaaagtagtgtagcatctttccttctttcaccattacataagcttaagcaataacagataacaaatcctcctcctcctctaggtaaaatattcaaacacaatacccttataagtacttattattaggaaagtagcgtgcatgggcataaatggcagcggggggcaggttaagaatcacaatgctgagcagcgaggaaacaaaacaccataatgggacagagcaaaagcctccgaaagggagcttttaggcagaaggcttctcccacttgaggggcttcaccacctcccaggtgaagtctgggtcgtcccttccgaagtgaccgtaagccgccgtcttgaggcagcgtccgttgccgcctttcttgaggtcaaggttgatgatgatcatgc

SEQ ID NO: 411502 - DNA, 497 bp, Oryza sativa
  unsure (1)..(497): unsure at all n locations
tatttacctcctccacctcctcctcctccccccgaggggatcggcccggctcctcctgctccgccgccgccaccgccgccgcagataggagaagatggccgcacttgataccttcctctttacctcggagtctgtgaacgagggccaccctgacaagctctgcgaccaagtctcagatgctgtgcttgatgcctgcctcgccgaggaccctgacagcaaggtcgcttgtgagacctgcaccaagacaaacatggtcatggtctttggtgagatcaccaccaaggctaacgttgactatgagaagattggcagggagacatgccgtaacatcggttttgtgtcagctgatgtcggtctcgatgctgaccactgcaaggtgcttgtgaacatcgagcagcagtcccctgacattgcacaaggtgtgcacggncactttaccaagcgccctgaggagattggtgcttgttaccaaggacaccatgttggatatgcaactg

SEQ ID NO: 411503 - DNA, 514 bp, Oryza sativa
ttggtgatcacggcgtactcgcagcagcacacgttcgccctgcagcaggcgagcaccgtggaccgccgcctcgcgccggggctgtcgtcgttccagatcccagcaggctccatgaccgtgttcaccctgctcgccatgctcaccacgctccttgcctacgaccgtgtgctcgtcccgctagcgcgccgcgtcacgggactggaccgtggaatctcctacctccaccggatgggcgttgggttcgccatctccgtggcggctaccctcgtggccgggttcgtggagcgccaccggagggagtccgctgccgccgcgggcaccaccgacgcggggacgtcgccgctgtcggcgtactggctggtgccgcagtacgcgctccacggcatggcggaggcattcaactccgtgggtcacctcgagttcatgtacgaccagtcgccagagagcatgcggagcatggcgacggcgctgttctggctgtccatctcgctgggagctacgtcagcacgatgct

SEQ ID NO: 411504 - DNA, 365 bp, Oryza sativa
cctcgatccgcctccgcctccgcctcgtcgtcgccgtcgacgcccccacccaccatggcggcgctcctcgcccggcaggcagcgcaggcgctccgcgcgcgccagatggcgcagctcgggccgtccgcgacggcgatgcaggggcacatccggacctacatgggcgcagggaagcccacgaggttcaaagaggatgaggagaaagagaagcttgcaaaggagatagcgaaagattggaatgctgtatttgaaaggagcatcaacacattgtttttgactgaaatggtccgcggtttgatgctgacactcaagtacttcttcgagaagaatgttacaatcaactatccatttgagaagggtccttt

SEQ ID NO: 411505 - DNA, 437 bp, Oryza sativa
ggaaatctttgctaccggtattgtgcttggaagctagctggctctgatgaccgttattttgttctgggccatgcacaagacagactttttcacggacaaattcggtgtcagatcaatcaggaacagtgaacatgagatgatgtctgcactgtacctccaagtcagtattgcgagtcaggccctcatctatcgcacccgttgtggcagctggtccttcatcgaacgccctggtcttgtcttggtcactgcattcatgcttgcacagctggttgcgacattcctcgctgtctatgccaactggggctttgccaggatcaagggcattggatggggctgggctggcgttatctggctttacagcattgtgttgtacttgcctcttgacatctctaagatgattatccgctctgagctgagtggaagggcctgggacaacc

SEQ ID NO: 411506 - DNA, 547 bp, Oryza sativa
cacaagctctagcttacagctcactaccagtgtacattgttgctagttagctagagctagatctcgatcgagacaatggcgggtgctcgcaggacgatggcgctggttgcgttggtggcggtggtggcggcggcggtggtggcggagagggcgtcggcggcggtgagctgcggcgacgtgacgtcgtcgatcgcgccgtgcctgtcgtacgtgatggggagggagagctcgccgtcgtcgtcgtgctgcagcggggtgaggaccctcaacggcaaggcctcgtcgtcggccgaccgccgcaccgcctgcagctgcctcaagaacatggcctcctccttcaggaacctcaacatgggcaacgccgcctccatccccagcaaatgcggcgtctccgtcgccttccccatcagcacctccgtcgactgctccaagatcaactaattactagcttgatcatctccagctgagatcgatatgtatgggagaatctagagagtgactgttcactgctagctttgttatttcttgctgatgcgacgtgcactat

SEQ ID NO: 411507 - DNA, 444 bp, Oryza sativa
ctcctcttgatctccattcgtttttgagttcctcgttgggggcgcctctgtttcactcatgggcaagattaagatcggaatcaatgggttcggccgcatcggcaggctggtggccagggtggcgctgcagagcgaggatgtcgagctcgttgccgtcaacgatcccttcatcaccaccgagtacatgacatacatgttcaaggatgacacccatcacgcacagtcggagcattacgaggcctaggccacggactccacgaccctcatctttggcacgacagaggttgcggtgttcggatgcaggaaccctgaggagataccatggagtgcacctcatgctgagtccttcgtggaggctactgcagttcactccgttcttggcggggagaagaaccactggaatgctaacttggcttctgtggtcacttgtattgctaggagaga

SEQ ID NO: 411508 - DNA, 315 bp, Oryza sativa
acccaccccattttttactccacacccactaacccctgattcgattggatccaatccaatccaaggggaggggaaacaatggcgacaaagaagaccctccggacgctgggggaggcggatctgagggggaagaaagagaacgtgcgggccgacctcaacgagccgctcgacgacgcccagaacatcaccgacgacacccgaatccgcgcgtacatgcccactgtcaagatcctcctcgagaagaacgccaaaattaaaacgaacagcaaacaggccgtccgaacgaaatcacccccaagtacaacctgaaaccaa

SEQ ID NO: 411509 - DNA, 433 bp, Oryza sativa
gcagttaacaaacccctctcactcccactaccatggggccttgcatgttccggccgtcgagctcgttcgacacgaagacgacgacgacgaacgcgggagctccggtgtggaacgacaacgaggcgctgacagtggggcccagggggccgatcctcctcgaggactaccacctgatcgagaaggtggcgcacttcgcccgggagcgcatcccggagcgcgtggtccacgcccgcggcgcctccgccaagggcttcttcgagtgcacccacgacgtcaccgacatcacctgcgccgacttcctccggtccccgggcgcccagacccccgtcatcgtccgcttctccaccgtcatccacgagcgcggcagcccggagacgatccgcgacccgcgcgggttcgacgtcaagttctacacccgcgagggcaactggga

SEQ ID NO: 411510 - DNA, 550 bp, Oryza sativa
  unsure (1)..(550): unsure at all n locations
taagaatccccatagctcaagcaaagggagagagcaggagcagcaagaggagcacgcggggagctagctagctccgccgccgccgacgagctccggcggctcgccgttatccgctcgctgatcgagccgtgtgcgggtgagaaagaaaaagaaaaaaaaaagatcgcgcctttttggcggcttcttggggtgtgaatccacggtttccccggggtaggatcttgatggggctcgaggaaggcggcgcgatgagggcgctgatgcggcggaagcaggtggactccgaccgggtccgcgccgccggcggccaccagctcgccaaggagctctccgttacgcagctcgtcgcgattggtgttggttcaacaattggagctggagtatatgttcttgtgggaacagttgctcgggagcatgctgggccggcattgacactttcatttctgatagctggagtggcagctgcactctcagctntctgttatgcagagcttgctagtcgctgcccttctgcaggaagtgccctaccatattcgtacatctgcgttgg

SEQ ID NO: 411511 - DNA, 516 bp, Oryza sativa
gttcttgctatcagcgatggcgccgttggcgtcggtggtcgccggaagcgttctgggctacctcatccacggcgaccgccatggcatcccggtgattgggtacctgaagaaggggataaacccgccgtcggcgcgcgatctcctcctgtcgtcgccgcacacgatggtcgctctcaggaccgggatcatcaccggcatcatcggcctcgccgagggaatcgcgatcgggaggagcttcgcaatgctgaagagctacaatgtcgacgggaacaaggagatgatcgccttcggggcgatgaacatcgtcggctcctgcacctcctgctacctcacagctggcccgttctcgagggcggcggtgaaccacaacgccgggtgcaagacgccgatgtcgaacgcggtgatggcggtggccgtgatgctgacgctgcagttcctgacgccgctcttccactacaccccgctggtggtgctctcggcgatcatcatctcggcgatgatcggcatcatcgacta

SEQ ID NO: 411512 - DNA, 449 bp, Oryza sativa
cgggacctctaagctacaattttatatgtccagcatttgttgatcaagccaatccttcaaaaacaaccacctagtgaccgcatgactgcatcatatcatgtacaacagagcatcaagctgaagacctacatgcaagttcgtcagcaaacagttgatacttgaagcatgttactcaataaactcatcatcggtgctgtcataatcactatcctcatccagatcttcatcttccacctcatcctctacttgctccgacaaagtgttcgtgtcaaaagagttatcaacttccatttcctcaatgccaatcgtatcatatttcatgcgctcatcgaatttggcatcagaacagtttagaagccatgcaagagagcatgtgaatcccttctttgccaccatctcatgccgtggccttacagtcgactcaaggccatatgtaaagaatgcaggga

SEQ ID NO: 411513 - DNA, 433 bp, Oryza sativa
ggggagaaatgtactgaaccacaaatgtattgtttcatcagttgcaccatgatctatttacaaggcaacaccatgtactagtaagtattggaccattattgctgcgggaggatggtccaacaaaatgtttgctttcaagcaccaacaaaacatagcattattcatacaacagtatacaagcaacatgagcatgaaattgaacaaagactgacgtctgatggtgtatgcacattattgccctaacatcagcgaaattgcgtcttcatcatatatcttggaaaaactattatttgtgcgcaagatcacccagggacaaagtagtccatcttctccactggcagattcatcactgaagtattagcctcctcaaatggaacaaacacaaatggggtcaaacccctgctgtgggtaacaagaggaacttctggatcat

SEQ ID NO: 411514 - DNA, 489 bp, Oryza sativa
gcattacaattattcaccagccactttattcagtcatcaggcagagatatattaattactcctctgtccgaaatgtgtatatatatgtagggaagtttataagagtggttaattagctgctagttatcgccgcagtcgacgaactggtagtcgacgatgaggtggccattctggtagccttgaccgtcgctgtcgatcttggagaagacggtgtcccagtctaaatccagccccccattggcgcactggtccacgatcctcgccgtgatctgatcccctgtcgccgtgttcgtcaccgagagacatttgccacatgcatcctgaccagtgggaccaacgggcccacagaaggcggtccatccatacttctggcgccattcaagcggcttgtcagcatcccacgtggcacagtacgcgctaacggccggggcccccaaatcccaattgtttttccgccgacggtagtagtggtacgtggcacgcaccgga

SEQ ID NO: 411515 - DNA, 471 bp, Oryza sativa
aaatcaaactgttgtttatcatagtaaatcttgccggagaatcagatgctcagaattcatagtgttcttcagcatcttacaacttacaagatggcgcagatatacaagcgcaactatcttaaagtaagctgtaggaggaaatggaaccatttctaacaacgggaaaaatataggttatagaaggaaaccatttgaacaaattaatagggaaataaattaggaggatcgtttccgtccgatctcaatagaactggacgtttgatacgtagatggcgtctggcatccagttgaccgggatgacgtctttggcgatgaggctcttgccggactcggtggtgacgcgaatggagaagggtgccttgagtggcgtgccggtgtccatcctccagatggcgccccacgacagcttcatgggccttcacgctggcaatccggccttctggaggtccatctggatgacgtcaccgtcgt

SEQ ID NO: 411516 - DNA, 278 bp, Oryza sativa
gagggacccgaaaggcatctgatttttatttcagaaaaagtagcccaacacaagatagcttgagaccaggcattattgctccagaccctcggagatttagggttcaacaaagggatttatgaccgagtctacaaacaaacaaaaagggccgatttttcgtttcccaccgatgataaggatcgatttttctaagcggctgaaaggaaggccctgctgcttgatcctaaaaagcctctcattttccaaaggggggacctggcccaaaatgtacacaacct

SEQ ID NO: 411517 - DNA, 404 bp, Oryza sativa
acggcccgcccttttttttttttttttttttttggaccgacctctctccttaacttgggggttggttctcatgtacaatgagggaaacacacacgcacacacacatgggtgcactgtatctctctgagcaacgcactcgattgattcgaattcgatccgctagggattcaagagaagctgagatagagatttctacgaacatgctacgctgaaggagctggttgggctatcgacgaacttactggaggccttgaaccacctcttgtggccggcctggaccttgcacacggacagatcgccgtcgttgacccgggccgaaaccaactgatgcttggcgacctcttctacgcccggcattgtactgagaaacctaacgctggaatagtggttccctcccaccgccg

SEQ ID NO: 411518 - DNA, 496 bp, Oryza sativa
actcttgtatagtatagcccatatctttatattatatgattagtaacaaaaacttgtcatgcccagctatggcttgggcgcgatctgatacacagaacaaagagaaaacattacaaggagaaataattaatagcaagcgtcaagccggcctgcttaaaaggtgtaaaggcagctgccgtcgtcgctcctcgccgttgggtcgaagttcttggcaacagggtcggtgcaaccttccggcacaggcaggttacctgcttgctgtgctccttgccctcctcctcctatgcaggccgcctacgatgcatcgatgggatgcgaatagctagagatcttttattcagctggatggcgcagaaccgtagaaggaaccagtcttcatggcgtcggagttagcgtcaccaagagcagcctcgctcaagtactgctcagccagctgcacacgcttgacgttctcctgcttcttcacaagcatgtatccgtactccatgagcttttc

SEQ ID NO: 411519 - DNA, 438 bp, Oryza sativa
agaaagcaaccgtatttctttctacattgaaatatagaagatgtacattgaaatgtgtcaagaagagatgtaggagcaccctcatggagagggatttttagaagttccattgcatggtttcacaagttatgcaatgaccatcctactttcttctagctgtaatatttccaaaactagttacaagaaatgcgaggatgcccattgtcattgatatggtatggtgatgaagagattcacgaaatatgaatgtggagctcattaaacttttgccgcttcagtaggtgcaccggccctctcagcaataatctgctcatagagatctctaatcttcagtcctacgatagtttggaagagacctgttccattgttgctgccggggaagtctgcatgctttagcatttgctgtgtcacctcttcataaaatttggttgagaggtt

SEQ ID NO: 411520 - DNA, 448 bp, Oryza sativa
aaaggcaagaatattattcataaatgacgcatgatttttatcaaaacgcttgcaaatgatttcagatcagtagagtcaacaagacaaaactgtatctgccaaagcacacctccccaactccacccaattacgccattatttctgggcaaaagcaaacggcttcccattcctccccttcaccagtctcaaaccataaaccccacaacaaatcctcctaagtgacggcatataagatgatgaaaacaaagcaggatactccagagtcgtcatggcgaacttcaagttgacacttctcatgccacagccgctagtcgtgctgggcagcctagtaccggtagtgcgcgggcttgtagggaccctcaactggaacgctgatgtagtcagcctgcgacttggagagcttggtcagcctggcaccaagcttgcccaagtggagggcggccacctt

SEQ ID NO: 411521 - DNA, 376 bp, Oryza sativa
aacaaaagggagttctatctttcctcattttaccagcaaatttatgtaacgaaaggcaccctgcgaactgcaggggctgatacggtaattaaattgtctcccaaagatggactatgggagtaaaaacaagcatagcagtttttgttttgccacttaacccaacaaaatggggctaagaagacaccgggtagcgattacttcacgatgcaaatcttgatcacggatgcgacgccaatacggtgcagagcaacaacagcatcaccaggcttgcacaactgcttttgtacagctgacttgagagcagcatcaagggtgacctctgtcgactccgaatcgggggctttggcagaaccctcagccaggagaggaacaagac

SEQ ID NO: 411522 - DNA, 488 bp, Oryza sativa
attaccaaacctcattgacatgagaacatacccaatcatgcacaatttgatggaaacatataacaagtcaaacaagtccattttacaagaaagggcccttttttttcactatggttatgtatcacattgctgttttcttcccactgtgtaacctcagtgcacccaggtaaagaaacttactgaaaattcagcaagttggcaatcactttggcccagctttcccatacgaatcacgcagggtaaccgtcctgttgaacacaatgttctcaggtgtcgagtctgtgtccactgcgaagtagcctatccgctcgaactggaacttgtcaccaagaaccgcagtcgcaagcgatggcacggcgtatgcacccttgatcacctcttttgagttcgggttaagatcacccaggcaatccttcagtttagcaggattctcacagaggaataatttatcaaataatcttacttccaccttaagcggttcaactcca

SEQ ID NO: 411523 - DNA, 441 bp, Oryza sativa
ttttcttattctatctgttaatgaacataatatccactttattttgattaattgatgttcttgtacaactccattattgaaaatatcttccgaaagaaattagaaactgcacgagcctctgcatcggcaaaattaaatggccgagagcaaatgaccgaaatcaagataagagtccatataaaacggtgtgaattcaggcacttcatagttgatagttcgcttagccggtgtcctgcattccagcagcaattcccttcatggtcaggatgagggtgtcctccagccccggtgcatactcactggccgggtttagcttcaccagttccgtatccggttttgaccagtccattatctcctttggacatgtggtggcgctacgtgacatggtagttcgggtcggggttctcttcatcgactaagccttggctacattcagggtgg

SEQ ID NO: 411524 - DNA, 500 bp, Oryza sativa
atccatcaaggggaattcaatccatagttatcttgacagcaaatagtttggtaactttgaaactccacagtacaatacggcgttctagaggtccagacaaagagcatcaaagcaagaatgaagagaaagacaattggaatcacataaaaagatggcccaaagcacactaatttttattacaaccgccacgacagtcttgatcgtactgactctaaggcgcaaaatacaaatcggcattaatcttttgcggatatcccgctctctaaaggcttcttattcctcagcaaatcccagttcagagagcttgaggtgggcctcggcgtaatccgcaaagaaggcgtcctcatccgcagcatatttctccaccagtggacggaaggctgggtcagccatgagggctttgtcacttggcagctgaagaaggcctttcttttcgccactcacaagctcggtgaaagtagagttgtcaaagatcaaagggttggacgttcaggctccct

SEQ ID NO: 411525 - DNA, 355 bp, Oryza sativa
atggggaaccccgtttattaaaaattaaaggggtttttaaaccggttccgtaaatttcttaaggggagaaataccgttgccaaattggggtacagtcctcgaaattaccaagatttttcccgttttattaatcgttgggattaaaagcatgaaccacccattttccaggggggcacggagtacccgtgttgtttgcgcccgtgtggactcgaccagatttttttggaaaaattaccttattaattaattggggggctctttgggggcgccgattttggttattggttggcttaaagttcccccgcggaggtggtcgataggcccccacaaccctgggaaggggccggtcaagtgg

SEQ ID NO: 411526 - DNA, 412 bp, Oryza sativa
aaacgcaaaagccacggttattggaagcccagcaagaactttatataaaggggatcactaataacaatgatgataaaaccacatgtggaaaggaggacgatgatccacaggatgggacaagtaccgtaggtacggccattattggaggattacacaagagcacccaaacgcactcacccaaaagacgaagaaaaaggagctaatctaaatggcagatgagcaatgtagtagtagtggtagcatgcaaccaaatcgaaatggaatgagaattttttttggcgggattttcttttttttctctttccttttttttttacttctcccagcacaaatgcaattcaccagatcgtccgatcaatggagcaaccggagcgacacggcgagctgtggaggacgatgacgaggatgtcgt

SEQ ID NO: 411527 - DNA, 459 bp, Oryza sativa
agggtcaaatccaacttattcataaagcatactgctgtcccacaggaaactgtttcataaaactaacatatcatacggactcgatggtccattaaaccagacacaagtagacatcagcaccacaaatacttgacgaacagaggctcgggatgaccaggcacatcggcagctccaccaaactggctgattactgaccaccacggaggcggagcaccaggtggagggtggactccttctggatgttgtagtcggcgagggtgcgtccatcctccagctgcttgccagcgaagatcagacgctgctggtctgggggaatcccctccttgtcctggatcttggccttcacattatcaatggtgtcggagctctcaacctccaaagtgatggtcttcccagtcaaggtcttcacgaagatctgcataccaccacggagacgaagcaccaggtggagggtagact

SEQ ID NO: 411528 - DNA, 417 bp, Oryza sativa
ggccaattaaaacgcaaaaaccacgggtgttggaagcccaccaagaactttatattaaggtgatcactaataacaatgatgataaaaccacatgtggaaaggaggacgatgatccacacgatgggacaagtcccgcaggtgcggccattattggaggactacacaagagcccccaaacgtactcacccaaaagacgaaaaaaaaggggctaacctaaatggcaggtgaccacatgttgtatgcagtggctgcatgcaaccaaatcgaaatggaatgagaatttcttttggagggaaattccttttttttcttttccattttttttttacttttaccagtaaaattgcaatttaccagattggccgatcaatggaacaacccggagcgacacggtaagattgggagggccattaccag

SEQ ID NO: 411529 - DNA, 249 bp, Oryza sativa
gataggatcaaagcatttatattaccacgactgtttaaggatggatttgaggagctctacttatacccgaaaatacagttgagggacactattttagaacagccgactgctttgccaacatggctggcaagctgagcctggcagtttacacaaagaacaggcgatcactattgaccaaacggtgacgaacgaagaaaataccgggtctttgttgtctgaagatacactaagggggtcggttggtcttat

SEQ ID NO: 411530 - DNA, 359 bp, Oryza sativa
  unsure (1)..(359): unsure at all n locations
cnaaccanggaaaacgcaaaacaccaggggtattggatgcccaaaaagaactttatattaaggggatcactaataacaatggtggtaaaaccacatgtggaaaggaggaccatgatccacaggatgggacaagttccgtagggaccgccattattggaggattacacaagagaacccaaacgcacttacccaaaagacgaaaaaaaaggagctaatctaaatggcaaatgagcaatgtagtattggtggtagcatgcaaccaactcgcaatggaatgagaatttcttttggcgagatattcttttttttctcttgcctttatttttaacttgtccaagaacaaattggaattcaccaaa

SEQ ID NO: 411531 - DNA, 459 bp, Oryza sativa
ataggatcaaaacatttctattaccacaactttttaaggatggaattgagtagcaatactttcaccccaaaatacagtttagcgacactatcttagaacagccgcttgctttgccgccatggctggcaagctgagcctagcagctaacacaaagaacacgagatcactataaaccaaacggtaaccaacgaagaaaatacagggtcttttttgactgaagatacacgaagcgggtcggtttcttttatttttagtctgctctcctcctcgatgatgggtgtatgggaatggcaatggcgatgggatcttggcttaattgaggggaaaggggcttcgcccgttccactccttgaggcaagtcgagcatggggctgcatgaggcttgccctggctgatgccgaggaacaccttgttgcactcctcgccgggggacttgagcttttcgccggtgaggaatac

SEQ ID NO: 411532 - DNA, 499 bp, Oryza sativa
cttttatattatatgaaggacagcgaggtgactgttggaagagagacagaagacataaaagttgctgttgatttgggaaaagaagggagggcaaacaaaatatctcgtagacaggcggttatcaagatggatgaagctggttcttttcatatcaaaaacattgggaaatgttcaatttttgttaatagcaaggaagtaccaagctgcagacgcatcatcttaagttcagattcgttaattgagataaaggatatgaggttcattcttcatgtaaaccaggatgctgtaacgcaattcgtcacacgcaccccgaagccggagcactagatcctaactggttttgttcagcaaccccttatgagaagctcaatgccacattgtcactggtaactagtggagatcattgagtgagcagcgctcacagggtgggctagatgtgctgctctactccttttcaagtaggatgtgataccaccatggaagctcatctcgctccgtg

SEQ ID NO: 411533 - DNA, 411 bp, Oryza sativa
agcttgacggcgctcgcacgcgacgtaggctcgtatacagcggacgggccgcccttttttttttttgattgaaaccagacggccattaatttgaactagaggatcacaaactccgtacatcgacaaagagcccgtgtcatggctctaagcattttcgcatggaaaaatggacgtccctagaaaccattacacttttaaacaacctaacacatgagctggatataaaacacaccaagcggtggcgacacatcactacagctttgacttatcatacgacgacagctccgacttgttcttgatgttggataatgcctactcttgaacctcggactgctggacctcctgttcctcttccacgggcgtgtaggggctcatgtcaaggctcttctgcaccgacctgtagatgctgga

SEQ ID NO: 411534 - DNA, 498 bp, Oryza sativa
atataatttgagttccaggctagaggtgtgcagactcatggacatcatcatcaactcactctacagcaacaaggacattttcctgagggagctcatctccaatgcttctgatgctttggacaagattaggttcctggctctcactgataaggaggttttgggcgaaggtgacactgctaagcttgaaatccagattaagctggataaggagaagaagattctctccattcgggataggggtattggtatgaccaaggaagatctcattaagaaccttgggaccattgccaaatctggaacttcagcttttgtggaaaagatgcagactgggggtgacctcaatctcattgggcaattcggtgttggtttctattcagtatacttgggtgctgactatgctgaagtgatcagcatgcacaatgacgacaaacagcacgtctgggagtccaaagctgatggaacattgcctttctctgcagatacatggaatgaacccct

SEQ ID NO: 411535 - DNA, 365 bp, Oryza sativa
gttaaacttgcttcgccctcagaggtgtctgttgatctgagcgatggtggcagcacagttgtcaaagggaaaaacataatcattgctacagggtctgatgtaaaatcactccctggagtcacaattgatgagaagaaaatcgtctcatctactggggccttgtgcttgtcagagattccaaagaaattggtggttattggagcaggttacattggtctggagatgggttcggtctggaaccgccttggttcagaggtcaccgttgttgaatttgccccagatatagttccatcaatggatggtgaagtcaggaagcagttccagcgcatgttggagaagcagaagatgaagttcatgctcaagac

SEQ ID NO: 411536 - DNA, 456 bp, Oryza sativa
gatgtataagtattgagcgtctatttgaatacacatggacacacaaactgtgtaacggttcaagaactgagagggtggggaaactacagagcagcagctacaatattaaccatagcagctgcaggataaacacggtgctaaataggcaggctttgttcttctttcacagcctggatatctggaaggggaccatgacttcagtcatctcctccctcatgataatcttcccaacctggaaaaggttggagatgcctagctgcgtcgacagatgccttcggcaatgctctgcagcaacaatgcctgaagaataagctccatgcacggacccagagtgatcgatgcaggcgggctccccagcgaaaaacaggttgcccaccggagcacagaatttttcatacaagccagctggcttgccacaaggtcgcaagaataagaaccaagcgaattcgggcggtt

SEQ ID NO: 411537 - DNA, 498 bp, Oryza sativa
gtttggtcggccttagattatatggcaccagaggcgataactctgtgctatatgaccatgacctgacaagctatgttctctttgatagggatggtacgcaagttacccaggaaatagggacagaagtcggggaaacatttgagaaaattcttaaggagacggagaaagtaagagctgaacatgaagatgacatgcctcttattcaagccatctcaattgtgcttgacaggaatccacacctaaagcttgatggtttgcaatatgaagtactgcagtggtgcatatgtaggctggaggcatggtttgccacagatgtggataatatatctctgaaaaattgggatcaggaacatgtttttactggtggccatgggcttatggtgcatggttatgatcctgttatcaaagctcttgcgcaagatcttgatatccacctgaaccacagggttaccaaaatcatccagaggtacaacaaaactatagtatgtgttgaagatg

SEQ ID NO: 411538 - DNA, 427 bp, Oryza sativa
ttataaaaaaaaggaaaaaaaaacaaaacacaccaggccaaataaaagcgacaatgggatcgctcaccaccaacatcgtcctcgccgtcgccgtggtggcagcgctggtcggcggcgggtcgtgcggcccgcccaaggtgccacccggcccgaacatcacgaccaactacaacgccccgtggctccccgccagggccacctggtacggccagccctacggctccggctccaccgacaatggtggcgcgtgcgggatcaagaacgtcaacctgcctccctacaacggcatgatctcctgcggcaacgtcccaatcttcaaggacggcaggggatgcggctcatgctacgaggtgaagtgtgagcagccggcggcgtgctcgaagcagccgggactgtgttcatcacggacatgaactacgagcccatt

SEQ ID NO: 411539 - DNA, 528 bp, Oryza sativa
agcgcagtacgtgacacccgcacacgaagccatgggacgccgcgcgcgcgctctcctccacgcgccggcgccgctcctgctgctgctggcactggccgccgcggcggcggcggtcgccgtggcgtcgggcccgcccttctcctgcggcgcgccgtccagcgcggcgttctgcaacccgaggctgcccatcgagcagcgcgcggacgacctcgtgtcgaggctgacgctggaggagaagatctcgcagctcggggaccagtcgccggccgtcgaccggctcggcgtcccggcgtacaagtggtggtcggaggcgctccacggcgtctccaacgccggccgcggcatccacctcgacggcccgctccgcgccgccaccagcttcccgcaggtcatcctcaccgccgcgtcattcaacccgcacctctggtaccgtatcggccaggtgatcggcacggaggcgagggcggtgtacaacaacgggcaggcggaagggctcacgttctgggcgccaaacatcaacgtgttcag

SEQ ID NO: 411540 - DNA, 309 bp, Oryza sativa
ttttatatcgcaggaacggaatactgctccctggtactcttctgtgttgaggcggcggatataaagaccaaaaacatatgcattgcaccaagggctgcagtaaactcaatcattggaacgacatacggtgacaagtggctcggagcatatgccgcctgctattgctcgtccaagattgcaagcaaaatggacgtcattggagcctgctacatcaaggtagacatgggttcggtctggaaccgccttggttcagaggtcaccgatgttgaatttgacccagatatagcttcatcaacggactgcgaaatc

SEQ ID NO: 411541 - DNA, 420 bp, Oryza sativa
cttaccaccgcctctcaggcctccccgacgggttctaccatagaggccaacgatagacaataactcccccccgaacacagcttacaactttcatcgtactgtgctctccaaagagcaactcttctgaaaatctcaaaacaaaaggtgctgagttggaatcccattctaaggattcttgtggttccggggaatccagctacaggagaaccaggaacggggagctctcccctttttccgcccgactctttgatcttaaacttaagaatgctgggtttaagaacgagtgattgcccttttccgacccttactggccaaccggagagcggacggctaatgtgttccacttattgaacagggtctatggtcggtccgagacccctggacgccgaaagcgtccttggcgtgatctcatagttccta

SEQ ID NO: 411542 - DNA, 499 bp, Oryza sativa
gtctaattgtccaggcggtaatggtagtatcttgtacctgaaccggtggctcactttttctaagtaatggggaagaggactgaaacatgccactgaaagactctactgagacaaaaagatgggctgtcaaaaaggtagaggaggtaggatgggcagttggtcagatctagtatggatcgtacatggacgatagttggagtcggcggctctcctaggcttccctcatctgggatccctggggaagaggatcaagttggcccttgcgaatagcttgatgcactatctcccttcaaccctttgagcgaaatgtggcaaaaggaaggaaaatccatggaccgaccccattatctccaccccgtaggaactacgagatcaccccaaggacgccttcggcgtccaggggtcacggaccgaccatagaccctgttcaataagtggaacacattagccgtccgctctccggttgggcagtaagggtcggagaagggcaatcactcgt

SEQ ID NO: 411543 - DNA, 406 bp, Oryza sativa
acacccattgatgaaagttttttaacattaccaggaggccaaaactaagacagggaatacaaacatccaaacgcagagcaatccaaggatgacaaccggatcttaactcttgaaaaacaaagtgcattagacaaggccgaggtaggaaggactttatttactgcgccatcctatgcctggtcgtcctagacaggggaatgaatcataagagccttagttggcttggccaagagggcggcgtacttctggaatggaaactagacgaacttggtgttcgtccagaagataggtgtaaggaatgcataagtcttaatcaggcagtgaacggaggtcttgccgcagatgtcactggttttgggagatccactggacgaggtgaagactttctatatgacggctaactgga

SEQ ID NO: 411544 - DNA, 329 bp, Oryza sativa
gttttataatacacaccctattaagccagccatggaggagcatggcggctagcgcggcggatagcaccgctgatgatggacgtagcttctggcgcggccgtcgcggcgaccggggatggcgcccatgctggcgccgtggccctcgttagaaggaggagaagtggttgcccgtaacaaaactaccgacgactcgctaaggaagggagggtctccaggatcgaggagatctaccttcactccctaccagcaaaggagcaccagatcgccgataccttcgcaccgacgctcaaggacgaggcgattacgatcacacctgctcagaaggagac

SEQ ID NO: 411545 - DNA, 501 bp, Oryza sativa
atcagagatcaggtagaacagtgagagtgaggtgcagaaaaatttgagctgaagctgaggatggcaacatccatgatcacctcgccgctggtggcgccggcccgggccaagggccttccgtccatctcccgccggggatcctccttcgccatcgtctgcagcggtgggaagaagatcaagaccgacaagccctacgggattggaggtggcatgtcagtcgatattgatgcatctggcaggaagagcacggggaagggcgtgtaccaattcgttgacaagtacggcgcaaacgtcgacggctacagcccaatctactcgacggaggaatggtctcccaccggtgacacctacgttggcggaaccaccgggcttctgatctgggccgtgaccctcgccgggctcctcggcggcggcgccctcctcgtctacaacaccagcgccctcgccggctaaatttcacccaaatccagtctatgtatgtaacaccaagctgggtgtctg

SEQ ID NO: 411546 - DNA, 449 bp, Oryza sativa
  unsure (1)..(449): unsure at all n locations
ggtctcaagaatcttaagatggtaaatacacacaagagagaggtacggtatacaagacttagtttttcttaagtacaacagatcttccattcctccatgatcctatcagcttctacacccaaaccacacaaatcaccatgcacgagccctcttcctccactgccaaatcaactcacctggggcttgagtagccaagcatccatgtggtgatcagtagccgatgtcagcgtcgtcgacgacgaggttgccggtgatgagctcacggtaggcggcgacgggccagatgaaccccctcgggaggagcttgacggcgagctcgacgtcgatgatgatctccctcatggccggcttcttctcgccgctgatggcgatgaggtagctcctgccgacccagccgatccagccggcgatgtagaggaagagcaagcccggngtgatgaactcgcccc

SEQ ID NO: 411547 - DNA, 472 bp, Oryza sativa
atcgcaaatactctctctcgccgatagcagcagcagcagcaatggccgccctcgccgccgcatccaccgccttcgccgccaagccgcgcctggcgcgcgcgccgtcgtccccggccgcgcggttctccgtgtcgtgctccgcgtcgggcaacaacggcggcgccggcgagatggcgcagtcgctggcggcgtcggccaagacgttctccgcggcgctggcgctgtcctcggtgctgctctcctcggcggcgacgtcgccgccccccgccgccgccgacatcgccgggctgacgccgtgcaaggagtccaaggcgttcgcgaagcgggagaagcagtccatcaagaagctccagtcgtcgctcaagaagtacgcgccggactccgcgccggcgctcgccatcaacgccaccatcgagaagacgaagcgccgcttcgagaactacggcaggttccgcctgctctgcggcgccga

SEQ ID NO: 411548 - DNA, 274 bp, Oryza sativa
ctgggaccgggatcaggcatttgattaaatggggataaaccgaacatatgtgtccaaaatcacaagggagaaccacaggtggcaataggtattacagtttttgaatagaaaaaaatgataacagataggccggttgaaaactttgtccacgctaatgaagaaaccgccccaaaaagagagaaacaagccggaggacggggataacagctccttttggcttaacatttttgggtccgaagaattagaagcattttctgtgcacaatggatgggcc

SEQ ID NO: 411549 - DNA, 525 bp, Oryza sativa
  unsure (1)..(525): unsure at all n locations
tttcttaggagcaccccgtcctcctcaccgaggctgctctcaaccccaaggccaatcgtgagaagatgacccagatcatgtttgagaccttcaacacccctgctatgtacgtcgccatccaggccgtcctctctctgtatgccagtggtcgtaccacaggtattgtgttggactctggtgatggtgtcagccacactgtccccatctatgaaggatatgctctcccccatgctatccttcgtctcgaccttgctgggcgtgatctcactgattacctcatgaagatcctgacggagcgtggttactcattcaccacaacggccgagcgggaaattgtgagggacatgaaggagaagctttcctacatcgccctggactatgaccaggaaatggagactgccaagaccagctcctccgtggagaagagctacgagcttcctgatggacaggttatcaccattggtgctgagcgtttccgctgccctgaggtcctcttccagccttncttataggaatggaagctgc

SEQ ID NO: 411550 - DNA, 476 bp, Oryza sativa
gcaataagctaacactactattgtttctagatatacaagggcaatttggcttagacaagctggactactgcagcaattctcagggatccaccctggagaagatcgccaagttcgtcgaacaatatggcagtgcgccaaccccacccttttggagctttgggtaggagtgtgccagcctgctttaggcttccgaaaatcatgacctctctcttcgatggacagataagctgataccgagcagtgaccttttcccggtggtctacatacatgttggccttcctcaatgggtctaaaggctcagccttgcgtcggtgcagaaagagtccaagggtgcgacgtccatgaggatcctcgtcgttgaatgcctggacacttaccttccaaagagagcctgcataaaatacttcagtcgaatgcttcacctgactatctgcgagcctgtgcacatcttcaaactcaactccaaagcggaaagg

SEQ ID NO: 411551 - DNA, 462 bp, Oryza sativa
tccacctccatgccaccgacacgcgcctcaagctagaaccctagccccgatccccgatggccgcgccgcccgtctcgggggatggggcggcggcggcggcccccgtggtggccctgggcgccgcgggggcggtgggggggccgaggccgtacgaggtggccgtcgtggcggcggagctccggcccgtggactgcaacctcgcggcgctgtgcgaccacgtgcaggcggaggggttcgggtccggggcgttctccgacgtcgtcgtcgaggccatgggcgccacctaccgcctccatcgcctcatcatctcccgcagcgcctactttaggaatatgctacatggttcttggagggaggctggagctccacagtggtgttgcatatagatgatccaaacattgactcagaagcaattgcaatcgcgtttgcatatcttttagggcaacccccaaagcttaatga

SEQ ID NO: 411552 - DNA, 468 bp, Oryza sativa
ataccgaagaaagatacttctgcaacgttatttgagggggtcagaaagttatgacagccgatacagcaactgttcttcgtgtgataattgattacaacatttgcccccaacatactacgtaaatctcagcacatgccgtagtatgcgctcctaaaagcgtagcattcttcactactgtacagacatcgcttgtgcactggttctattaaccttcaccaagccatcagctaccgtgaccaaacctgatgaaaatttacgcggcctgcaaaacttcctggcgcttgatctcaaacaccttctgtaacgcatcctcaacaaccttgtccggagttgaggcgccagaagtaactccgattgtgatagggccttctggtaaccagttctctttctcgacaagctcgccatgatttaacttgtagctgatcttgtttccaggtccaatcctttgttcactgtcaatccagtaag

SEQ ID NO: 411553 - DNA, 495 bp, Oryza sativa
tacacccatccactccagagctccccgcggcacttggcaccaccaccaccaccaccggcatccggcggcgcgggcggtgatggcgaccatcaccacgcagctccggtcggccctcctctcgccggcggcctcgccgagccgccgtgccaggcgcgccccgtcgtccgtgcggtgcgactcctcggcagcgtcgtccctgtccgcctccgcgtcgctcgacgccgacttcgacaagaagcagttccgccacaacctcacccgcagcgacaactacaaccgcaagggcttcggccacaagaaggagacgctcgagctcatgagccaggagtacaccagcgacgtgatcaagacgctcaaggagaacgggaaccagcacacgtggggccccgtgacggtgaagctggcggaggcgtacggcttctgtggggcgtcgagcgcgccgtgcagatcgcctacgaggcgcgcaagcagttccccgacgatcgcatctggctc

SEQ ID NO: 411554 - DNA, 347 bp, Oryza sativa
ggttagccggcaacaacaactcaagattgaatcatacctaagtgcttgctgatacaatatcaacatggagggtacattgccggttccatatgaacaaacataaaaacaccgaaaccccatatggccattatgccgatcctagcctagcttggcgaggacatcgccaagagcagatttggtcaacgtgtagtacttctccgccttttcggggctcttgatcttggctgcatggtcaagcccgtcaatggtggcaaaaagcttgccggtgaggtccttgaggcccttcttctcggccttgggcttggagttgatgacggttttgaggtcgtagcgcaggtaggaggccc

SEQ ID NO: 411555 - DNA, 501 bp, Oryza sativa
  unsure (1)..(501): unsure at all n locations
ttcagcttatagtcaggtgaggtctgagctgaggttgagagatggcacaggcaatggcgtctatgaccgggctgtcgcagggcgtgcagctgccggccgggcccaggcgcgccggcggcaggtccaggctcgccgtcgtcagggccgacgccgccgccgccgacgtccagaccggccgccgcgccgtgctcggcctcgtcgccaccgggatcgccggcggcgccctcgcgcaggcggcgctcgccgaggccgccaagcccatcaagctcggccccccgccaccgccctccggtggactccctgggacgctgaactcggaccaggcgagggacacggacctgccgctgagggagaggttctacctgcagccgctgccgccggcggaggcggcggcgagggcgaaggagtcggcccaggacatcatcaacctcaagccgctcatcgagaagaagcagtggccgttcgtcagggacgacctncgcctcagggcctcctacctgc

SEQ ID NO: 411556 - DNA, 484 bp, Oryza sativa
aaaccacacaagattaatagcgttgcacaagaggttgatagagcattacatatttagatgaggcacacaaccaaagaagcagcagcagctgaccaaagtttagacccatacatagggcaaccagtcattgcatacaagatgatactagtggattatggcagcttctctttttctcttctgattgagcagagagatgccaccgccattatttcttgaggtgagggaagcacgcggtgaggtcgctcttcggatgcttcgcctcagcatgctctttgcacttggtctcagaggtggtgcagatgaaagtctgcatgcatatcttgcactggatgttcatggccttcttgttggcctcaagctggctccccttggcgcccttgttcttctccatgttcctctccctcgccatcttcgacttctgcccattgccgccgcccatctcgtcgacctcgaccttcctctccccctttgccggaacaagaga

SEQ ID NO: 411557 - DNA, 526 bp, Oryza sativa
tctcttccaaaaaagaaaaaaaaaaactcgttttcttttcttctcttctcttctcttgttgcggcgaagggggagaggaaggtcgaggtcgacgagatgggcggcggcaatgggcagaagtcgaagatggcgagggagaggaacatggagaagaacaagggcgccaaggggagccagcttgaggccaacaagaaggccatgaacatccagtgcaagatatgcatgcagactttcatctgcaccacctctgagaccaagtgcaaagagcatgctgaggcgaagcatccgaagagcgacctcaccgcgtgcttccctcacctcaagaaataatggcggtggcatctctctgctcaatcagaagagaaaaagagaagctgccataatccactagtatcatcttgtatgcaatgactggttgccctatgtatgggtctaaactttggtcagctgctgctgcttctttggttgtgtgcctcatctaaatatgtaatgctctatcaacctcttgtgcaacgatattaatctt

SEQ ID NO: 411558 - DNA, 349 bp, Oryza sativa
tagtggaaccactacgttgagggtggtgatgctggtaaccgtgagaactacatcaacgaactcatcagaaggatgaactagttccatgagctcattgttagcgcactgtgtttggatgatattttaaagtaagcttattttgcactaggaagtgtatcaagaaaatcttgcaattttgatattcagaatctgacccttttatccggtggtttgatgttattcctaaatttgaagtgcttttaatcatgatatgcgaacatgtgttagtacttattatggctctactgcctttgtgttgacatcacggttgctgttcagctcttatgccatttatacaatgcttagcctg

SEQ ID NO: 411559 - DNA, 518 bp, Oryza sativa
gtacggcctccgcgcgcatgaacgcggcggagaagccaccgttcttcctgccgagctggacggggatgttcgtgctcaacatgttcatcgtggtgtgggtgctcgtggtgggcttcgggctcggcggctgggccagcatggtcaacttcatcaggcagatcgacacgttcgggctcttcgccaagtgctaccagtgtcccaagcccgccccggcgttggcgcagtcgccggtgccattgccgcaccactagcgcgcgcccgttccgcaccaccgccgccgccgcggcggaccgtgacaacgtgcaccgccgagcccggagcaaggaacctcgctctcctggccggcacggctgcaaaaattcagtgttgcttaggttttggtcgccttgtaatatacaaagcctctcctcctgtgctagggtgtcacaccaaaatggtagaagaagaagagggcatgggtccctacgatcttgccccgggccgtccgctgccgcgttgctttcccccgatcctcgatg

SEQ ID NO: 411560 - DNA, 471 bp, Oryza sativa
gattattagcgggctggttattaatatgaaccatgttcaatccttagccagatttatcaagacactgcatcaaactcgacaaacaggaccatctccccaaaagggcttatttcaactagaaccatcacacctctagaacctgattaaatagctagctacattaaaattgcacaccatgtttggaggttaaaacatacaacgcatgaatctagagcttgaggaaaacgaattcttcaatgggcggaatctccccaatttttgtcagggcgctctttttaggttgctcatgaacaccaatgggcatgacagactgcttgcgaggagcgatatttccaacactcatgaagccgacattaacattctcctcaccaaggacacttgctactgcgccgatcatagccagttgatcgacctgtctgcaaggatcaggctttcttacaagctcacatcaacctggaatgatccaacctt

SEQ ID NO: 411561 - DNA, 443 bp, Oryza sativa
ctgttattggagctttgaaaggggaacttgcagcttgagcactcaacgcaccaatggttcctgctgaggtgctgtcagagcttgcaccttatgctgttctcgcacagaagcttgcgcacctggctgtgcagctagtggctgagtggcggtggtatcaagtccgtgaaagtgacctatgcttctgcaagggcttctgatgatcttgacacgagacttcttcctgcaatgatcaccaatgtgttgatcgaaccaatctccagcgatttcgacaatctgttcaatgctgacttcactgctaaacagatgacagttcgtatcactgaggagagaatctttgtggatgggtcacccgagacacctattgactacatccaaggtcatattgcccatgatgagttcaaatttcccagtgcaatatcagagagtggagagatcactgctga

SEQ ID NO: 411562 - DNA, 464 bp, Oryza sativa
cttccaccgcaaatccaagagcttcttattaataataatagtaaaaataaacgccaaaagttctcacacggaagcaactaacttagcacacaaaagacagacatgaacacacccaagcccctcctcttccttgtctaaaacgaagcagcaactaaattaaatcgacctaaaattccgaggcccccaatggcggcgatcgacgacgaaaccgaggagctctagttggctgccttgctgatgagctcctgcgcgacggcgacggtgggcagcgccgggatggcacccttcttggtggtgcagatggctccgcacgcgttcgagaacttgagcgcctccctcagcttctcctcgttgtggaagatggagtcgtccttggcgacgttgactaggagggagccgacgaaggcgtctccggcgccggtggtgtcgacggtgttgacggagaagccggggacggagccctt

SEQ ID NO: 411563 - DNA, 438 bp, Oryza sativa
cgcttatcgcatcgacttcgattcgcttcgtttcgttctcgctgttgatttgttcgtgagatttgaattctagcaatggctcctctcggtgacggagcggcggcggcggcggcggcggagcccaacctggtggtgtcgttcggggagatgctgatcgacttcgtccccgacgtcgccggcgtctcgctggccgagtccggcggcttcgacaaggctcccggcggcgcccccgccaacgtcgcctgcgccatctccaagctcggtggctcctccgccttcgtcggcaagtttggtgatgatgagttcggccacatgctggtggacatcctgaagaagaacggggtgaacgcagaggggagcctggttgacgagcacgcgcgcacggcgctgggcgtcgtgacctttgaaagcaccgtcgagcgcgagttcatgctctac

SEQ ID NO: 411564 - DNA, 495 bp, Oryza sativa
cattttctccccaggtgaggattcagccatgaagggggccaaatccaagggcgccggcaagcccgacgccaagttggctgtgaagagtaagggcgcggagaagcccgccgccaagggcaggaaggggaaggccggcaaggaccccaacaagcccaagagggctccctccgctttcttcgtttttatggaggagttccgtaaggagttcaaggagaagaaccccaagaataaatctgtcgctgctgtaggaaaagcagccggtgataggtggaaatccctgaccgaagcggacaaggctccctatgtagccaaggccaacaagctcaaggccgagtacaacaaggccattgctgcctacaacaagggcgagagcactgccaagaaggcacccgccaaggaggaagaggaggacgacgaggaggaatctgacaagtccaagtccgaggtcaatgatgaggatgacgacgagggcagcgaagaggatgaagaccatga

SEQ ID NO: 411565 - DNA, 391 bp, Oryza sativa
agcgacacgaaagtcatgtggtatatattccagataaagatgttcaacacaagatagcttcagaccaggcaatatagcaccagacacttggtgattcagggttcaacaaagtgatatatgatcgggtctacaaacaaacaaaaaggtccgatttttcgtttcccacagatgataaggatagatatatctaagcggctgagaggaaggccttcccgggggcaccagcagagaggcgaccatggcaaccaaggagcttagcattgacaccatcaggcatgattctaccctggcttttaagcctgacgtattcatcgcggatgaacttggtgaaaccccactttctactcttaaagagcctttggcgaccagggaacttgaacttggcacgacg

SEQ ID NO: 411566 - DNA, 464 bp, Oryza sativa
gtcattggagacccagccttcctctcgccgccgccgacgccgacgacgaggagaggaggaggtggccatggcgaggcggagggtcgcggcgctcgcgtcccagctcctgcggaggcagctgctcatgcggagacccccgccgcggttcctctcatccgcggcggcggcggcttctggccccctcgaccgcctcaggtcgtcgcccttcgcgcgcacggcggcgcgagacgggagccctgctctttccccatggagccgcttcggagggcagaagaggggcatgttcatccagacgcagtcgaccccgaacccgcagtcgctcatgttctatcctggaaaggccggtatggaggttgggagctctgatttcccgaatgcttggaccgcgatgacatcttctttggccaggcgcttgttgcaatcgacggagttaccagagtattctttggatcccattttggaac

SEQ ID NO: 411567 - DNA, 416 bp, Oryza sativa
gaagaaaaacactgaaaatgcaggttgcttagcctgctacatctgcatccttctcaatcaccgtctgcttagcgacaacaaaagagcaagggcacagacgcagcagctggcatagatacacacaaaacacacacgagttttacaggacaagcctattttagaaattttacatgtactctctcttattgatccaaagggttcgttcatctatctccttcttgtacgctaccttatgctgctgtcagcttcttcttcttcttcttcttcttcagtaactggtgacgatgagcagcccgatcgccgtgacgacgatggtcgacggcaccccgaaccggaggtggctccagaaggagaggttgtagccgaagaactgagctcttctagcctgctcgcagacgatgaggttcgcagccgag

SEQ ID NO: 411568 - DNA, 501 bp, Oryza sativa
gcacagcgcacgctaagctaggacttcgtatagatgctagacgggctgtcctttttttttttaaaatggacatgcaatgcctggcctgtattgtcaatgataaccaggccatggaaaacgctaatacagcgatactaataatgtgctgcaaatacaggaagtggttgaaagttgctaattaactagtaaataagtcacggaagcaatgtagtgcacataaactgtgtccactgggtacttcagctcgacacattttgacatacgcagccctaatcttatgattccacatagcaattgatcctagtacatcttatgatccagtaatacagcaggtagctgagtaaatggactcagaaatagacttcaggacagattagtggccctctccttcaggcttcgctgcttccttgatctcgtcaccaccatcctccgcattgtcagaggtccagagagtcagattgtcacgaagaagttgcatgatcaaggtgctgtccttgtaag

SEQ ID NO: 411569 - DNA, 474 bp, Oryza sativa
cgtctcttttacccgctcttccccccgatctccccggactcccacagccgcagcgaacaaatcccgcgcgggttgggaagagcgagctcgtgaggagagcagagggaaagcgcgagggggaaggaggaggaaaggtgcacaaggtcagactaagtttgcgttgaagaacaaaggagaggaaaaatgtcgcctgctgaggcatcgcgtgaggagaatgtgtacatggcaaagcttgccgagcaggctgagcgttacgaggaaatggtcgaattcatggagaaggtggcaaagaccactgatgttggtgagctcaccgttgaggagcggaacctgctttctgtggcttacaagaacgtgattggtgctcgcagggcatcgtggaggatcatctcttctattgagcataacgaggagagccgtgggaatgaggcatatgttgcatcaattaaggagtaccgtagcaggattgaaact

SEQ ID NO: 411570 - DNA, 489 bp, Oryza sativa
  unsure (1)..(489): unsure at all n locations
aaaaaaaacaaagctcccgaaaatattctctctgccccacccccgaaaccctagcgcgacctcgccgccggcaatggccgcatgaccgatgcgcctccgccgaggagccgcccgcacccacccagcagcagcgtcgccgtgcccgccgccgcggcggcagtgatcgcagccgccctcgcgtcctccttcctcgccctgctgcagccgccccggcgcgccccggtcgccgcgggatccagggtcggcatgtcgaaggcgagggtctacgccgacgtcaacgtgctgcgccccaaggagtactgggactacgaggcgctcaccgttcaatggggtgagcaggatgatatgaagttgcaggaaagttggaagaggtaaaaattnngaagtctttgaaggcatcaatgttaacaacaatgagaaatgcatcatcaagatactcaagcctgtgaagaaaagaagatcaaagggagattaaaatacttcagaatc

SEQ ID NO: 411571 - DNA, 510 bp, Oryza sativa
cccgccgccgtccgccgcgcgcacgccgccgccgccatggggaggagacctgcaaggtgctatcgccagatcaagaacaagccgtaccccaagtcaaggtactgccgtggtgtccctgaccccaagatcaggatctacgatgtcgggatgaagaagaagggtgtggatgagttctcccactgtgtgcatctcgtctcttgggagaaggagaatgtcaccagtgaggctcttgaggctgcgcgtatcgcgtgcaacaagtacatgaccaagtctgcaggaaaggatgccttccacctcagggttcgggttcacccgttccatgtgctccgtatcaacaagatgctttcgtgtgccggggcagataggctccagactggaatgaggggtgcttttgggaagccacagggaacctgtgctagggtggatattggccaggtcctcctttctgtgcggtgcaagcccaacaatgctgtccatgccagcgaagccctccgtcgtgccaagttcaag

SEQ ID NO: 411572 - DNA, 491 bp, Oryza sativa
aaattgacttgcacagcctggcctgtattctcaatgataaccagcccatggaaaacgctaatacagcgatactaataatgtgctgcaaatacaggaagtggttgaaaggtgctaattaactagtaaataagtcacggaagcaatgtagggcacataaactgtgtccactgggtacttcagcttgacacattttgacatacgcaggcctaatcttatgattccacatagcaattgatcctagtacatcttatgatccagtaatacagcaagtagctgagtgaatggactcagaaattgactttaagacagattagtgggcctctccttcaagcttcgggtggttgcttgagctggagaacaccattctccgaattggaagagttcaggcctgctcgaatgcgatgaggtacgtcggccgatcaaagggctgtgaggttcccggcaacggtgctgacccacgctaggataagccaggccttcctctctgaatc

SEQ ID NO: 411573 - DNA, 509 bp, Oryza sativa
atcagctgctgcaatctctcacgattcagagaggaaggcctggcttatcctagcgtgggtcagcaccgttgccgggaacctcacactactgggctcggctgcgaacctcatcgtctgcgagcaggctagaagagctcagttcttcggctacaacctctccttctggagccacctccggttcggggtgccgtcgaccatcgtcgtcacggcgatcgggctgctcatcgtcaccagttactgaagaagaagaagaagaagaagaagctgacagcagcataaggtagcgtacaagaaggagatagatgaacgaaccctttggatcaataagagagagtacatgtaaaatttctaaaataggcttgtcctgtaaaactcgtgtgtgttttgtgtgtatctatgccagctgctgcgtctgtgcccttgctctattgttgtcgctaagcagacggtgattgagaaggatgcagatgtagcaggctaagcaacctgcattttcagtgtttttcttc

SEQ ID NO: 411574 - DNA, 413 bp, Oryza sativa
tcatctcatgcctcactcgcctagaacccctcctgctcctcccgatctccgaggcaatgctcctcgaattccccgcgccccgatctccccctgacgccaccctcctcctccgccccggatcgccccgcccgatctcgccgcggggtcgaatttccccttctcttgtctccgatcagggccgcctcgatcgaaggcggcgccgcgccgaccatcccaccttgtttggttgtaatttcttcttgtcgcgtgaggaggggggcgtggcggcgggggagagcgcgtgagcgtgcgggagatgggggcgccaaagcagaggtggactgcggaggaggaggccgagctcaaggcccgcgtggcgaagcacgggacggggaagtggaggaccatcctccgcgaccccgaattcaccgcgc

SEQ ID NO: 411575 - DNA, 468 bp, Oryza sativa
cgtcctttttttttgacttttaatttacccacaaagaaagtgcgatcattaccgctgaaccaccacctaacgcacagcatcatcattagaaacttttacatggcacattaaagaaggctgacagagcaatctgatgcagagaggaaaccagacaatcacacggaaagatgcacagatactacctagggctaaatttagaaacagatgcagatcaatctgcattgcacacatgattaatgcttggttacacttgcacacttcaccatatattatatgtatgtatataaacatatatatatcatgagctggttcatcaccaaaaccatgggcaattcgagttcttccccgggccgccatagtagaagtaggtgccccagtcgccattggtgccgttctgaacattgtaacaattggactggttggtgtaggtgcccaaccccttgggggccctcagctgggtgctggtgt

SEQ ID NO: 411576 - DNA, 423 bp, Oryza sativa
gtttgaaactggaggatgcagatcggcagggagtgtgtactcggctactggccgtccttcctcttctgctacctagtacacagtgcgtcgatggtcgagtggggcggggaggtggtgaactcggagcccgacggcacgcacacgtcgacgcagatggggagcgggcggttcccggaggaagggttcggcaaggcgagctacttcaagaacatccaggtggtggacagcagcaaccagctgaaggcccccaagggggtgggcacctacaccgagcagtccaattgctacgatgttcagaacggcaacaatggcgactggggcacctacttctactatggcggcccggggaagaactcgaattgcccatgaatttggtgatgaagaagctgatgatatatatatatttatatatatatatataat

SEQ ID NO: 411577 - DNA, 477 bp, Oryza sativa
gaagttagccttgagtgaattttattcatcattccctgtgtattacactatacagtagtgcttcaagatacatgcacatatatggacagcattctggtattcgcatatcacatctcgtgtatttcttgtgtttctgtcgctaaccttgtgttgctgcttcacatctctgccacgagtttggactgggcaagcgcaagatcgaatgaggagaaagagtgaggagcaagcgtgacttgcatctgctctgctgcattggaaagctggcttttgacaggaacaaccttattcgggttactaaaagagttctcatccatcacattactggatgtgagaacagtggcaggttgatcccagtgcattaacacgggcctgaagcccagttgcagagatcgtgaggctcacctggatcagacccaaagtttataatctttactcttaagaagctattttcagaatcctgccaagtaattgcagatg

SEQ ID NO: 411578 - DNA, 403 bp, Oryza sativa
gggacggggggtgtattctgggcagaaatcattaattccaaggctgaatgccctgaccaaaaccaatacaagagggccaataataattaaacaaacttaacgtttagtacttgactatagcaaactgaagtccggaccctaaacaaaacaaaaacttgggtcactgattgggcttaactgaccaggccttgaccaattttgtcaccaactttacaaagactgcaagcaaaaaaagtgccaaattaacaaacgccaaacacttgcaaattttaaccatggtcggggtttacacaaggcccaattaagcgctgtttttgggctcaccggtggtagacgtggccgttttgtgcttcctcggcggagcccttgggggaaccgggcaggaactccatgaacttggcca

SEQ ID NO: 411579 - DNA, 498 bp, Oryza sativa
  unsure (1)..(498): unsure at all n locations
gttactcgtcacagctcaaacaagtcaagagcgaatagttcttgctgatctgttgtttgattactttagttctcgagaggctttagctgaatccatcgatcgatcatggaggatgagaggaacacggagagccaccagggtggcgaggctgcagagcaggtggaggtgaaggacaggggcctcttcgacaacctccttggcaggaagaaggacgatcagccggaggagaagaagcatgaggaggagcttgtcaccggcatggagaaggtctccgtggaagagccaaagaaggaggagcaccacgccgagggcgagaagaaggagagcctcctctccaagctgcaccgatccagctccagctccagctcgtcgagtgatgaggaaaggagngtgatcgatgacaacggcgaggtggtcaagaggaagaagaagaaggggctcaaggagaagatcaaggagaagctgcccggccacaaggaccatgccggtgagcatgct

SEQ ID NO: 411580 - DNA, 428 bp, Oryza sativa
gtgctattgagaaagttgaactagcccgaaatatgccagcagccaagagaaaggattttgggtttgttacttttgatacacatgataatgctgttgcatgtgctgatgggataactaattctgagattggtgaaggtgacagcaaggcaaaagtgagagccagattgtcgagaccattgcagagacctcctagaatgaagcatggattaagaggaaattttagggttgggcagggtgctcctcgaggtggacgttttgcatatgatcgtcctcctccacttcgccggtcttcacctcgtcttttaagacccgatgttagccgattaccaccaccggttaggagctgcatcactgaagaggttcatagatattagagcataggggccctgttatgtcaataccagatagagttaggcgtttgccttcat

SEQ ID NO: 411581 - DNA, 376 bp, Oryza sativa
ccgttttccgcgccggagctgaggagggagagcgagcgagccagcgagggaggtggggcaacccagcgaggggccagatcgtgccgccagccccgctccgtcctctctccggcgaccctccgccccgcctgatcccgtggtggatcaactacaactcatctttaggaaagcctcttgaacattagccttgtgtgcctttcaacagtatggcctcggtaggtgtggtgcgttcttccttggggtttcagaacgaaacaagtacaagtggcgatgccgaccgacttccgaatgagacgagcaacatgagcatgagggctcataacaaggacgagaacgacataggctctccaccgcaatgggacagaacctggtcata

SEQ ID NO: 411582 - DNA, 116 bp, Oryza sativa
tttctttcgcttcgcgagattggttgattcatctcgcgattgatcgagctcgagcggcggtgaggtgaggtggaggaggaggaggaggaggtgatcgggatggtgagagggtgggt

SEQ ID NO: 411583 - DNA, 496 bp, Oryza sativa
tttattggtgtacatgtgtaaagtggatgggaagttcaaatttagcccagttagtgtaaacttcttgacagagattacaaaaattatctttgccatcatcatgctatgcatccaggccaggcgcctaaaggtgggagagaagccatttctcacagtttcaacattcatgcaggctgctcgcaacaatgttcttcttgcagtttctgctcttttctatgctatcaacaattacatgaagtttgtaatgcagctatattttaatcctgcaacagtgaaaatgttgggtaatctcaaggatctggtgattgctgtgctcctaaaggtgataatgaggagggcgtttctccacaattcagtgggaagcccttgctcttttgttgattggtatatggggtaatcagctcaaacactgcctgaaggttctagacgcacttggtcttcctgttgctgatggtgcctacctatacacattatttttcggaacaagttctgcatt

SEQ ID NO: 411584 - DNA, 501 bp, Oryza sativa
ctttcccctcgagttcttcaccggcttctttcccctcctctccggaccagggaagcagctaactgtctgcgcaagaaaggtggttcaagcacgatgggacggaaccatctttgcctggtcacttgcttgtggattctgtcatgcgcagttctgcttcatgcttctcctgatggattgctgagaattagcctgaataagaagagattggacaagaagaccttggacggtgcaaaattggcaagggaggaaagccatcgtctgagagccgacggtttaggtgatgacatagttcctttggacaactacctggacacgcagtactttggagagatcggcatcggcactccaccacagaacttcactgtgatattcgacactggaagctccaacttgtgggttccatcagtgaaatgttatttttcgatagcatgctacttacaccacaggtacaagtcaaaagggtcgagcagttacaaaaagaatggagaatcttgcagcatt

SEQ ID NO: 411585 - DNA, 422 bp, Oryza sativa
  unsure (1)..(422): unsure at all n locations
gctatgacgtcgcagtgcacgcggcgaggatcgatgagcggacgggccgccctttttttntgactttttattttacacacattcattataggtctttcatgctggtttaccacaggaaaacgtttcagacaccatcaaaccagacttaaggatacacattacaggtgaataggacacattgaaacgggacaccaacaatggccagaccagacaaccataggttcatatggggaagacaaataggcagacttgtgaaccctataacagtagcagcttcatggctgaggacttactgtgtaccaaggaggcggagcaccaggtggagtgaggacctcttttggatgttagaacccggatgggtgcggacatcctgaagatttttatgattgtatgagagacgcttttggtccggggggtggccc

SEQ ID NO: 411586 - DNA, 494 bp, Oryza sativa
tgttaggagagagatggccactgcttatgctcccatggcgagccagctgatgaagagcagcttggtgtgctccaagccgagggggctgtctggtgcttcgctgacaaggaggccccgcttcacagtcaaggccatccagtctgagaagccaacgtaccaggtggtgcagcccatcaatggcgaccccttcatcggcagcctggagacgccggtgacctccagcccgctggtcgcctggtacctctccaacctcccggcgtaccgcacacgacgtcagcccgctgctccgcgcatcgaggtcggcctcgcccacggctacctcctcgtcgggcccttcgcgctcaccggcccgctccgcacacgccggtgcacggccaggccggcgccctcggcgccgccggcctcgtcgccatcctcagcgtctgcctaccatgtacggcgtcgcctcctcggcgagggcgagccgtccaggcgccgacgctgacgctcaccgg

SEQ ID NO: 411587 - DNA, 293 bp, Oryza sativa
cagcaaccccccatatataatgacaggttaaggaggctttataaataagtctcgggggttccagacgagttatgaaattagttttttcattcatgtacgaaaacccctttctacatccgatggggcacttaaaaatttttttttcgcgaactaaacacacccccaatttacagggagagattgggaatgaaatgggatcccagcatttttctgactaaaaggtggggaagaccttagaaaaaacatatagggatttgcttcgtttatgtcattaggcaagaacggcctgttat

SEQ ID NO: 411588 - DNA, 424 bp, Oryza sativa
ggaatctcccgcgaccacccacgcgcccttagcttctctgaggaagatgctgtcctcaaccgctactttggccatctgaaatctggtggtaatgcttatgtgattggagatccagcacagcctggccagaagtggcatatctactatgctactcagcacccggagcaacctatggttacccttgaaatgtgcatgaccggactggacaaggagaaagcttcagcctttttcaagacttctgctgatggccacacatcatgtgctaaggaaatgacaaaactctcgggcatctctgacattatcccagagatggagaatctgtgactttgacttcgaaccctgcggctactccatgaatgcaatccatggctcaaccgttttctaccattcatgtgacccctgaggatggcttcagctacgccag

SEQ ID NO: 411589 - DNA, 474 bp, Oryza sativa
  unsure (1)..(474): unsure at all n locations
gcgatcggctctaccgtcgccggagaagaagaggaggagcccggcatggggcgcgtgcgcacgaagacggtgaagaagacgtgtcggtaggtgatcgagaagtactactggcggatgaccctggacttccacacgaacaagaaggtgctggaggaggtgtcgatcctgccgtcgaagcgcctccgcaacaaggtggccggcttcagcacccacctgatgcgccgcatccagcgcggccccgtccgcggcatctccctcaagctccaggaggaggagcgcgagcgccgcatggacttcgtcccggacaggtcggcgctcgaggtcgacgacatccgcgtcgacaaggagaccctcgacatgctcacctccctcggcatggccgctccncggggcgtcgtgcgccagcccgacgccttcacctacggccgcagcagaacggctgccgccgcctccctacgcccgccggaacggcct

SEQ ID NO: 411590 - DNA, 499 bp, Oryza sativa
  unsure (1)..(499): unsure at all n locations
attcaagggaaggaagttcagctctgtatgccatttctttggatatcaggctcgaggatccgtcccatcaaactttgactgtgactatgcttatgctcttggccgtatctccttgcatatgatagcagctggcttgactgggtacatggcaactgtggctaatctgaaggaccctgtagacaagtggcggtgtgctgctgctcctctaactgcaatgatgagtgtgaagaggcatttgcgtggtcctggagcaatcccgataggaaagcctgccattcatccttctccaattgacctgaaagggaaggcttatgagttgctgcgagagaaagcatcaagttttctccttgatgatttctacaggactccaggaggcattcaatatgaaggcccgggttgcaatgcaaaacccatcacattgaccattgagaaccaagactacatgggcgacattgagatactgaaagactgtctcagcanggtgaggacgatggtgaag

SEQ ID NO: 411591 - DNA, 471 bp, Oryza sativa
acagtaaccccacatatataatgacagattaattaggcttcataaataagtctcgtggtttccagacgagttatgaaattagttttttcattcatgtccgaaaaccccttccaacatccgatgtgacactcaaaaattttcttttcgcgaactaaacacacccacaattcacagggagagatagggaatgaaatgagatcacagcatcttcctgactaaaaagctggagaagacataagaaaaaacataaaggaatttgctccgtttatgtcattaggcaagatcggcctgtaatgttcaaccgatacacagtttctggtaatgaatacatcaatatgggcatctgaatttccaaatgtaaaatttaagtttctcaaaaatggagatgatgccgccgccgccgccaggactttgtctatttaaatgctcacaaaagcctgacacgatttttctcatcacaaaagaatggtg

SEQ ID NO: 411592 - DNA, 501 bp, Oryza sativa
  unsure (1)..(501): unsure at all n locations
tttgacgcgtgggatccctgggatgggtgagtttggggataggtactttgggacagatgattatcagtcatcaacaccattcttttgtgatgagaaaaatcgtgtcaggcttttgtgagcatttaaatagacaaagtcctggcggcggcggcggcatcatctccatttttgagaaacttaaattttacatttggaaattcagatgcccatattgatgtattcattaccagaaactgtgtatcggttgaacattacaggccgatcttgcctaatgacataaacggagcaaattcctttatgttttttcttatgtcttctccagctttttagtcaggaagatgctgtgatctcattgaattccctatatctacctgtgaattgtgggtgtgtttagttcgcgaaaagaaaatttttgagtgtcacatcggatgttggatggggtttatggacatgaatgaatgaactaatttcataactcgtctgganaccacgagacttatt

SEQ ID NO: 411593 - DNA, 390 bp, Oryza sativa
  unsure (1)..(390): unsure at all n locations
cggctatctatccatctatctactcagctttgcgtcctcccgcgaattcaccgcagcaatggcgtccctcgtcgccgtccagccggtcgccgtgaagggcctcgccggcagctccatcttcggcaggaagcttgccgttagggcgttgncccgggcgctctgtcgtaccacccccacgccgggcgccgncgtggtggccaagtacggcgagaagagcgtctacttcgacctcgaggacatcggcaacaccaccgggcagtgggacctggtacggctccgacgcgccgtcgccgtacaaccctctccagagcaagttcttcgagacgttcgcggggcccttcaccaagagggggctcctgctcaagntcctgctgctcggcggcggatcgc

SEQ ID NO: 411594 - DNA, 392 bp, Oryza sativa
  unsure (1)..(392): unsure at all n locations
gaactgccacctcatcggccgctactggtcctacaaggcctccggcaactgcggcggctgcagctacgccggcacctactccgagaagaagtgccaggccaactgcggagacgcctcccagagatggtaccatgtcccaagatcatggctgaatcctagcgggaacctggtggtgctgctggaagagttcggcggcgacttgtccggggtcacgttgatgacgaggacgacatgaacaggaggaagaattgaagtggataatttagcagggggaattgcagaattgggatttgggagcgaggaaaggggngggcgtatagcaattatctatacataccgggtagatacggatacagctgggaatacgtacaatacgtatacgtatatgaact

SEQ ID NO: 411595 - DNA, 392 bp, Oryza sativa
ccaaaaccaatcctgaacaaggaccgaaattattaagagaattgccatgatatgcgtacttgaaccaagtgcaggattaaaagaaaaaatacatataactgaattagctcatcaacatttgagccaacagtagcatcagcagggtcataattatttctcactgcaaggtaagttcgtggtaggggcccataagattatgctgtaaattaaggagagaaaaagagctttgtctttaagataaagcgccatgggactagatcaagctagcagtattagttcctgcagggtttagagtgatattaagccctgcaaacagccagcaaaaaaaagggacatggttctgtgggaaaccagtttgggaaaagacccatttttacatgcatgcatacaaa

SEQ ID NO: 411596 - DNA, 356 bp, Oryza sativa
cgtcccgaccaggactacctgctgcacatcaaccaccggtggtctcacgacggcgccaagcagaccattgccaagctcgcgcacgacggatccggcaccaatgtcgaaccggacgtggagtcctgcaacccccactgtgtctccttcttcatcaaagaccccaataaggtgaggacgatcgatgagatgcgggagaggatgaggatgcgtggcctccgatgccatctcatgtactgcaggaatgcaacaaggcttcaagttgttcctcttctagcatcgaggtcacaagcactcaggtatcttttcgtacgctggggcctgtctgtgggaaacatgtatctgatcggcggggagca

SEQ ID NO: 411597 - DNA, 463 bp, Oryza sativa
aggttcaaaacatttctattaccacaactttttaaggatggaattgagtagcaatactttcaccccaaaatacagtttagcgacaatatcttagaaacgtcccttgctttgccgccatggctggcaagctgagcagagcagctaacacaaagaacacgagatcactataaaccaaacgggaacgaacgaagaaaatacagggtcttttttgtctgaagatacacgaagcgggtccgttttcttttattactagactcctctcctcctcgatgatgggtgtatggcaatggcaaaggcgatgggatcttggcttagttgatgggaaggggcttgccgttccactccttgaggcagtcgagcatggggtcgatgagcttgccctggctgatgccgaggaacaccttgatgcacttctcgccgagggacttgagcttctcgccggagaggaatactcaaacgagct

SEQ ID NO: 411598 - DNA, 385 bp, Oryza sativa
actatccttctcctccggctcttcttcagtatcgaatcctctcttctcctcgtgcccaccaccaccaccgtagcaatggcgggcaacgggccgatcaacaaggaggacccgctcaactggggcgcggcggcggccgagatggccggcagccacctcgacgaggtgaagcgcatggtggcgcagttccgcgagccgctggtcaagatccagggcgccaccctccgcgtcggccaggtggccgccgtcgcccaggccaaggacgccgccggcgtcgccgtcgagctcgacgaggaggcccgcccccgcgtcaaggccagcagcgagtggatcctcaactgcatcgcccacggcggcgacatctacggcgtcaccaccggctttgggg

SEQ ID NO: 411599 - DNA, 473 bp, Oryza sativa
aatgatgcgatagtaatttggccacattagagtagctgctggtagcaaaaaggctgacataatagttatctttcacagtaccacatcgattgaaaggagaatacttggaggcgcgacagtttcctacaattaaccccaaccaaaacattatactgataaaacagcctactcgtcctcctggctacggagccttgcaagcttgatggtgaccacgatgtcgagctgcgcagcacgctcaacgatctccttgcgcttcttcgtagagacgttgtgggcaatctcggcacagtaggtcctgttgtgcatcatgagcaactgcagctcagagacattgtgcaccacaaactttttgaacttgatggagggtagtgcctggtctttttgtctgagccgtaaccaatgttgggcatcaaggagcattccttgaactttctcctgacacgggagtcaatacccttgggcctgcgccagct

SEQ ID NO: 411600 - DNA, 507 bp, Oryza sativa
cctaattcgtcgctccgcttccctctccgatccgaagagatggcggtgccgctgctgacgaagaagatcgtgaagaagagggtcaagcagttcaagaggccccatagtgaccgctacctatgcctcaagccaagctggcgcaggcccaagggtattgactcccgtgtcaggagaaagttcaagggatgcaccttgatgcccaacattggttacggctcagacaagaagaccaggcactacctccccaacaagttcaagaagtttgtggtgcacaatgtctctgagctggagttgctcatgatgcacaacaggacctactgtgccgagattgcccacaacgtctctacgaagaagcgcaggagatcgttgagcgtgctgcgcagctcgacatcgtggtcaccaacaagcttgcaaggctccgtagccaggaggacgagtaggctgttttatcagtataatgttttggtctggtttgattgtaggaaactgtcgcgcctccaagtattc

SEQ ID NO: 411601 - DNA, 470 bp, Oryza sativa
agggatcacttattcattatagttcttccatgctgctctaccacagcaaaacgtttcagacaccatcaaaccagacttaaggatacacattacaggtaaatagtacacaatgaaacgggacacgaccaaggaccagaccagacaaccatagctccattggggaagacaaataggcagacttgtgaaccctagaacagcagcagctccatggctgaggacttactggccaccacggaggcggagcaccaggtggagtgtggactccttctggatgttgtaatccgcaagggtgcggccatcctcaagctgcttaccagcaaagatcagacgctgctggtccggggggatgccctccttgtcctggatctttgccttcacgttgtcaatagtgtcggacgactcaacctcaagggttatggtcttgccagtcagggtctttacgaaaatctgaatccacccctgagcctgag

SEQ ID NO: 411602 - DNA, 497 bp, Oryza sativa
  unsure (1)..(497): unsure at all n locations
ctgcagagaaaaaaaaatctcccctcgaagcgaagcgtcgaatcgccttctcaagatgcagatctttgtgaagaccctcaccggcaagaccatcaccctcgaggttgagtcctcggacaccattgacaatgtcaaggccaagatccaggacaaggagggcatacccccggaccagcagcgtctcatctttgctggcaagcagcttgaggatggccgtaccctggccgactacaacatccagaaggagtccaccctccaccttgtgctcaggctcaggggaggcatgcagatcttcgtcaagaccttgactggcaagaccatcacccttgaggtcgagtcgtctgacaccattgacaatgtcaaggccaagatccaggacaagggagggcatccccccggaccagcagcgtctcatcttcgctggcaagcagcttgaggatggccgcaccntggccgactacaacatccagaaggagtctaccctcaccttgtgctca

SEQ ID NO: 411603 - DNA, 466 bp, Oryza sativa
cccatatatcttatataaataacatatattcaaaaccatgctttgcatatagctccacagcaatattttggagtacacatgtatgccttattttgccactagcccattacaaaaaaataaccacagaaaattaattaatagaaaattaattaatggttcgctcgaacatggagcgatctcttttaagacataattatttagaggttcataattccaatatgacccaacacaagagtatgcatgcctgttacttagagttggatgccactcttatattcagagccggcagtaaagctttcagggatgacatcatcgacgacacggtagccaccgttcttgacaaggaagcgaacggagaaggggcccttgagtggtgcatcacttttgagtgtccaggtgttagagcccgactccttgagccccacccagtccttgccgcctttctccttgacctccacctcagaga

SEQ ID NO: 411604 - DNA, 509 bp, Oryza sativa
ttctaccaagcaagaaacaagaaacattacaccaaaaaactagctagctagccaatggcctccatgtcctccttccgacttgccgtggcggtggctgcactattggtcattggctcacatgccacagagctcaccttcaaggttgctgagggctctagcgccactagtctagagctcgtcaccaacgtcgccatctctgaggtggaggtcaaggagaaaggcggcaaggactgggtggggctcaaggagtcgggctctaacacctggacactcaaaagtgatgcaccactcaagggccccttctccgttcgcttccttgtcaagaacggtggctaccgtgtcgtcgatgatgtcatccctgaaagctttactgccggctctgaatataagagtggcatccaactctaagtaacaggcatgcatactcttgtgttgggtcatattggaattatgaacctctaaataattatgtcttaaaagagatcgctccatgttcgagcgaaccatta

SEQ ID NO: 411605 - DNA, 322 bp, Oryza sativa
cgtttgggccaccgacgaccgctccctcgaggccgcgttctccacctacggcgagatcctcgactccaagatcatcaacgacagggagacggggaggtcacgtgggtttggcttcgtcaccttctcctccgagcagtcgatgcgcgacgccatcgagggcatgaacggcatggagctcgacggccgcaacatcaccgtcaatgaggcccagtcccgccgctccggcggcggaggcgggggctacggtggtggcggtggcggctacggcggcggtcgtggaggcggcggctactgaggaggtggtggcggcggctacgggcgc

SEQ ID NO: 411606 - DNA, 379 bp, Oryza sativa
gccgaggaaggcgttccagaggtagtcctcgaggtcgacggccgcctgggaggtcggcagggagtactcgccgccctggccgccgatggcgaggaggacgaggatgcccctggactggcagtgcttgatgtcggggccgacggcggagacggtgtggccggagatgtccagcttgtaggtgcccgggatgtagccgaaggcgctgaggaaggagatgatgacggtggtgtagaggccggtgtcgcacgcctcacggagggacccctcgagctggtccgtgttccggccccagaacacgacggtgtcgccggtgctctggccggcggcgaggctggacgagagcagtaggaccagcagcggggcaaggcgtcgggacgcc

SEQ ID NO: 411607 - DNA, 376 bp, Oryza sativa
  unsure (1)..(376): unsure at all n locations
ggtgtcccgacgccttgccccgctgctggtcctactgctctcgtccagcctcgccgccggccagagcaccggcgacaccgtcgtgttctggggccggaacacggaccagctcgaggggtccctccgtgaggcgtgcgacaccggcctctacaccaccgtcatcatctccttcctcagcgccttcggctacatcccgggcacctacaagctggacatctccggccacaccgtctccgccgtcggccccgacatcaagcactgccagtccaggggcatcctcgtcctcctcgccatcggcggccagggcggcgagtactccctgccgacctcccaggcgggncgtcgacctcgaggactacctctggaacgccttcct

SEQ ID NO: 411608 - DNA, 491 bp, Oryza sativa
  unsure (1)..(491): unsure at all n locations
ctgggttctctcacaggaaacaattgaaaagatgggtgctgaggttgagaggttaacaaaacttaaagctagaagattgaaagaaattttcatgaagaaaaggtcagagttagaagagatatgcagatctggacacatagaacctgatgccagtacagcccctgagcaaactgatgagatgattgactctggcatgattgacccttctgagcttttggcaaagcttgaatcgcaaatattaaaagcaaacgaagaatcccttagcagaaaagatatcatggacaggataaataaatggatttctgcttgtgatgaagaagcttggctcgaagaatacaaccaggactcaaagaggtacagtgctggaaaggggtgctcacataaaccttagaagggcagagaagcaccggattttagtcaccaaaatcccagtatggtagataacctgataaatcgaacatttgcttgggaaaatgcaaganacaagccct

SEQ ID NO: 411609 - DNA, 433 bp, Oryza sativa
  unsure (1)..(433): unsure at all n locations
gtcattggcctcatgcctatgattgatcagggtgagaaagatgataagatcatcgcggtttgcgttgatgatcccgagttccgccacttcaatgatctcaaggagctctctcctcaccgacttgctgaaatccgccgcttctttgcngacttcacgatgtatgaaaacaaaaaggttgtcgttaacgataaaatgtcacccgccactgcttttggggggcatcagtacttcatggagactttatgctgaatatattctgcacagcctgaggcgctaattaattatcatcgtcagatggagcaatcagaccctgatctcatgaagaaaataacaataaaagtctcttgggtgatgctctttttgagcagccatttttgcattatatttgaaaccagggatatattatgtttctgcatttgtgcagaatatatgc

SEQ ID NO: 411610 - DNA, 341 bp, Oryza sativa
ttgaagagggggaggagagcatggatcccgggcgggtcttgttcgactccggcgtggcgcggcgggcgtgccccggcggcgcgcagatgcttctcttcggcggcggcggcagcgccaacagcggcggcttcttccgaggcgtgccggcggcggtgctggggatggatgaatcgcggtcgtcgtctacatgctgagggggcgggggcgaatgcggacgttcttcacaacgcacgaggagctcctggaggaggagtacatacgacgagcaggctaccgagaagaagcggcggctgacggcggagcaggtgcaaatgctggagcagcgctttaaggaggagaac

SEQ ID NO: 411611 - DNA, 445 bp, Oryza sativa
ctgacatgtaaactttgaattaagcattgtaactcagtaacactagagagtgacaaatgaaattacaaaattgttacaacaatatacgccagccgatcatcagagcaaccaagaaagcccgggttgcttcttcatcgccactccgacaagatcacctggcctctcactaaatgactcccgtatcttacctttcctggaagtcagttcaggatggattgcagagttcttccatcttttgcgttaggatttacgcctgcttcatgctgcagctgctgcagtctggtttccgcctacccagaactgtttcacagcatacagcaccttttcacgcaccatggggccgtcctcgtgatcgaccagcctagtgtttcattttatgccgagggcgagcctgttcacctttgtcaggatatcgacatcgtccctcattatgacggcgcctttt

SEQ ID NO: 411612 - DNA, 498 bp, Oryza sativa
gtctctttttttttaaccatataacataggaggtttcatttcttcttctcaaagtagtgtagcattttttccttctttcaccattacataagcttaagcaataacagataacaaatcctcctcctcctctaggtaaaatattcaaacacaatacccttataagtacttattattaggaaagtaacgtgcatgggcataaatggcagcggggggcaggttaagaatcacaatgctgagcagcgaggaaacaaaacaccataatgggacagagcaaaagcctccgaaagggagcttttaggcagaaggcttctcccacttgaggggcttcaccacctcccaggtgaagtctgggtcgtcccttccgaagtgaccgtaagccgccgtcttgaggtagcgtccgttgccgcctttcttgaggtcaaggttgatgatgatcatgccaggcctgaagtcgaagttctccttcacaatcttgaggatctccttgtcagggatcct

SEQ ID NO: 411613 - DNA, 495 bp, Oryza sativa
tttatctcctccacctcctcctcctccccccgaggggatcggcccggctcctcctgctccgccgccgccaccgccgccgcagataggagaagatggccgcacttgataccttcctctttacctcggagtctgtgaacgagggccaccctgacaagctctgcgaccaagtctcagatgctgtgcttgatgcctgcctcgccgaggaccctgacagcaaggtcgcttgtgagacctgcaccaagacaaacatggtcatggtctttggtgagatcaccaccaaggctaacgttgactatgagaagattgtcagggagacatgccgtaacatcggttttgtgtcagctgatgtcggtctcgatgctgaccactgcaaggtgcttgtgaacatcgagcagcagtcccctgacattgacaggggtgtgcacggccacttcaccaagcgccctgaggagattggtgctggtgaccagtgacacatgtttggatatgcaactg

SEQ ID NO: 411614 - DNA, 475 bp, Oryza sativa
gtgttgtcgacgagcgaagagaacagaagcgagcgggcaaggaaggcgatccaagggagaagatggcggcggcggcggccatggcgatgaaagatccgagcctgtggcacaaggtggccgccatatccggggttgctgcccttggacttggcacctatggcgcgcacatgttccgccccaagaaccccgcgtacaaggaggtttggcacactgcgtccctctaccatctcgtccacaccgcggcgttgctcggggctcccatcaccaagcgccccgatgtttttggagggcttcttactgctgggattgttctcttctctggaacgtgctacactgtggcttatcttgaagacaggaagtattcttccacggcaccgttgggtggctttgcgttcatcgctgcttgggccagtctgctcttctgattatatcgtgttttagcatgtgaaaacgtattccattactgaatgctttg

SEQ ID NO: 411615 - DNA, 403 bp, Oryza sativa
  unsure (1)..(403): unsure at all n locations
atgcaatcgntctggaaataccatttatttgggaaatttggtcacgaccaaacagtaaattatcgtctcaaaccttacatttcacactgaacccggagaggcagagaattctctactgtttctaacttcacaagctaaaggaacatcaggaaataaaagtcatccgttcacgtgcttcagactaacatcttatcgcacatcggtcctctgtactgctcaaccaaataatgaccgacccttgtttcgttcaagccgagcctccctctctctctttttgcactccttatagtcgtcgaactgctgctggcacttgctcttgtcttggttggcctccaaacacttgagggaggcggtgtactgggnggaagcaatcggagtcggcgatcctggcggcgctggggta

SEQ ID NO: 411616 - DNA, 217 bp, Oryza sativa
ctggctcctcaacacctgggcattcagatggcgagtctactaacagaacggtatatgttggtgggctcgatccaaatgtcagcgaagatgagctgaggaaggcatttgccaaatatggtgatggtgcctctgtaaaaattcctctagggaagcaatgtggctttgttcaattcgtcagcagaactgatgcggaaagaagcactgcaaggattgaatg

SEQ ID NO: 411617 - DNA, 480 bp, Oryza sativa
  unsure (1)..(480): unsure at all n locations
gaccacaaaaaatgttgagccactgcacacggtgcagtgtcagttgtagcattcacaacataccgagtttctttttaggaggtaaaactctacgagtctcacagcatagtaaaacgtagccagctattactagatacgagtagcattttttaagtcgcaaacaaaagggatacagtcccggcttaaggggtgtaaaatcagcttcactatcttcatgttcgccgcaacgggaaacagagcacaatcatctttgggtccaaaaatttacggcaaacctttgcgacgacgttgatttgtgaaccaatgacgagtttcctagatgacatactctgcttactgttgcgcgcactgaactctctgggcacctccaggcatctcatcgtcctcatcatacgcctcctgagcagcttgggctttcctgcgcatctcttcctcaatgttgttgacatcgtgcatngtggtctcctcgcattcatctat

SEQ ID NO: 411618 - DNA, 494 bp, Oryza sativa
  unsure (1)..(494): unsure at all n locations
gtcctcctcctccgcatcccccatcccctcctccccggcggcggcggcggcgcggaggcggcggcacgggagcggctagtggtttcgtcggcggaggcggaggcggggccaagatgttcgggcgcgcgccgaagaagagcgacaacaccaagtactacgagatcctgggggtccccaagaccgcctcccaggacgacctcaagaaggcgtaccgcaaggccgccatcaagaaccaccccgacaagggcggcgaccccgagaagttcaaggagcttgcacaagcttatgaggtattgagtgacccggagaaacgtgaaatctatgaccaatatggtgaagatgccctcaaggaaggaatgggtggaggcggatcccatgttgatccatttgacatcttttcatcattctttggaccttttttggtggngggtggcagcagcaggggcagaaggcaaaggaggggagaggatggnatccatccgcttaaggtttct

SEQ ID NO: 411619 - DNA, 335 bp, Oryza sativa
atcaaacgatatcgatggcggcggcggcggcggtaaccgtgacaaccgcgcgcgggggacgtactgcgcctctcgcagcatgggaggtctgcctcccgcctactctgcgccgcagccggcgacggcgaggcgtccccggcgccgcgggcggggaggctggtgctgtacacgaagcccgggtgctgcctctgcgacggcctcaaggagaagctccaggccgccttcctgctcgccggcacaccctactcgctcgcctccctcgagctccaggagagggacatcacgacgaatccggattgggagcagatgtaccagtacgaagatccccggtgctc

SEQ ID NO: 411620 - DNA, 430 bp, Oryza sativa
  unsure (1)..(430): unsure at all n locations
gtagagcaagaagctcatctcctcctcctccggcatggttggcatggccaccggggtntccagcctcctcaagacctccttcgctggcgcgcgcctccccgccgccggccgcaaccccaccgtctgcgtcgcgccgcgcaccggcggcgccatctgcaactccatctcgtcgtcggcgtccactcccccctacgacctcaacgccatcagggtcagccccatcaaggaggccatcgtgtcccgcgagatgacccggcggtacatgaccgacatgatcacctacgccgacaccgacgttgtcgtcgtcggcgccggctccgcggggctctcctgcgcgtacgagctctccaaggacccctccgtcagcgtcggcgtcatcgagcagtcggtgtaccccggcgggggcgcgtggctcggcgggcagctgttc

SEQ ID NO: 411621 - DNA, 290 bp, Oryza sativa
  unsure (1)..(290): unsure at all n locations
ctcacccgtgggcttccccctttcctcaaagcgccaatttagaccatggcggcgacactgacccgagcattcaaggggatgtacctctcctccccgagccattactactactacgnctacttcctccgcactgaccggggctcgctctccctccgcagcagggcctgcatgggggtgccgatgaccatgcccgggccgtggatgactatccagatggcgcacaaaaagggggccgggagcaccaacaacgggagggactcccccggacagcgccttcgtgttaagattta

SEQ ID NO: 411622 - DNA, 499 bp, Oryza sativa
gatctacttcgcgtcgtcgtcgacgctgttcggggtcgtttgaatcctgttggggacgtggagatccggcggtggcaggacatcaagaaccctggctgcgtcaaccaggaccccatcttcaagagctacagcctcccgccgcacgagtgcggctaccccggcagcgtcttcaaccccctcaacttcgagcccaccctcgaggccaaggagaaggagctcgccaacgggaggctggcgatgctggcgttcttggggttcctggtgcagcacaacgtgacgcagaaggggcccttcgacaacctgctgcagcacctgtctgacccgtggcacaacaccatcatccagacgctgtcaggctgagcgtgtgatcgatttcatcagggccagggcatctcaaggagcttgatgagttcaggctggtgaaaccgatgattgggcgatggaagatgttctcttcttggttcttcttttttttttgtggagtatgcatgtataagat

SEQ ID NO: 411623 - DNA, 459 bp, Oryza sativa
  unsure (1)..(459): unsure at all n locations
tttacggccacaggcgacgctcctgactctccatcggcgaccctcgaaccacaactgggcgttcatcacctgctgctcgcgagacaagttgatgatggtgtgggacctcaccaaccccgtccagaacgtcagcgagggcgccggcagcctccgagtacggcgtgcccttccgccgcctcaccggccactcccacttcgtccaggacgtggtgctcagctgcgacgggcagttggcgctctgtggcttctgggacggggagctccggctctgggacctctccaccggggtcaccacccgtcgcttcgtcggccacgacagagacgtgctctccgacgccttctccgtcgacaaccgccagatcgtgtacgnctaccgcgaccgcaccatgaagctgtggaacaccctcggcgagtgcaagtacaccatcggcggcgacctcggcggtggcgagggccaca

SEQ ID NO: 411624 - DNA, 509 bp, Oryza sativa
  unsure (1)..(509): unsure at all n locations
gtttaggagaggagatcacggggaggaangnngggccgttttagacacatcggggggggctntatatangggaggagcccgctagcccggagcggcggcaatggatgaggagtactacttgatcgtgctggggacggggctcaaggagtgcatcatcagcggcctcctctccgtcgatggcctcaagggccttcacatggacaggaacgattactatggaggagaatctacatcccttaatctcactaagctctggaagagattcaaaggcaacgagaccgctcctgaacatctgggtgtcagcaaggagtacaatgttgacatggttcccaagttcatgatggccaacggtgcactggtccgtgtactcatccacacgagtgtgacaaagtatctgaatttcaaggctgtcgacgggagctttctgtaccacaatggcaagatccacaaagtttctgcaactgatgtcgaggccttgaaatctaatctaatgggctttttgaaaagcg

SEQ ID NO: 411625 - DNA, 440 bp, Oryza sativa
gtccagcgtttggaatgcccggcgtgcatgtgggtggtttggaagacctgggggggtcgcctcttcctacccagattcagatctactcctactcctactaccaaggatgttgccatggctaccgctgttgaagccgtggagaacaagacaggctgagacccggtcaagggctctgctgtgaatgaaaggatactgtcatctatgtcccggagatctattgcagcacatccatggcatgatcttgagattggacctggtgcaccaactatatacaactgcgtcattgagattcctaggggcatcaaggttaaatatgaacttgacaggaaaactggactgatagtggtggaccgtgtgctgtatacatcagctgtgtaccctcacaactatggattcattgctcgcacgctgtgggaagacagcgatccggtagatgcgct

SEQ ID NO: 411626 - DNA, 523 bp, Oryza sativa
atcggatgatgtcggcaagaagaagaagcgcggggatccttacgtcccgatccctgatccaggtggtaactatggacgtagcaagcccgggcccccagccccttcgcgttctccccccaccagcagaaatctgccaattgcagtaccggcaattccccttgatgaaataaagggaataaccaagaacttcagcagtgatgctctcatcggagaaggctcgtacgccagagttttctttggtgtgctgagagatggcaggagatctgcggtgaagaagctcgactccagcaaacagcctgatcaagaattccttgtgcaggtttcagccgtttcacgactgaagcatgagaatattatccaacttatcggatattgcgctggagggagcatccgtgttcttgcttatgagtatgcaccgaggggctccttgcatgacattctccatggtaaaaagggtgtgaagggagctcagccaggaccagctctatcatggatgcagcgagtgaagattgccttgagtgct

SEQ ID NO: 411627 - DNA, 453 bp, Oryza sativa
gttcagcgtttggaatgcccggcgtgcatgtggatgggatggatgtcctgaaggggagggaggtggctaaggaggccattgagagggcaaggagaggtgaaggaccgactcttgtggagtgtgagacttaccggttcagaggacattctcttgctgatccagatgagctcaggaggcctgatgagaaatctcattacgccgcaagggaccccattacagccttgaagaagtacatcatcgaacagaaccttgcaactgaatccgagctgaagagcatcgagaaaaagatcgatgatgttgttgaagaggccgtggagttcgctgacgcaagcccgctctctccacggagccagcttctggaaaacgtgttctcagatcccaagggctttggaattggtcctgaccggaagtacccgtgtgaggatcccttgttcacgcaaggcacggcccaag

SEQ ID NO: 411628 - DNA, 417 bp, Oryza sativa
  unsure (1)..(417): unsure at all n locations
ctctttccccggtgattcagaactcataaatgggtcttctttaatctacttcagcggtcagaagatatggnacgctatcatcagtgatctccttccaaaaggccttgcaaaagcccaaaaggtattgctctcaggctgttcagcaggaggcctagctacattcttccactgcgacgacctcaaaggacgtctcggagatgctgtcactgtgaaatgcttgagtgacgcaggatttttccttgatgtgtaacagtggagtctaatcaagcaaaaaaaaattactttggatgactgattcttgaactcattgggttgaaacacaaaaatttactttggttggtgtcctgcagggatgacattactggcaacaacactgttgagcctttctttaggagcctagtagctttgcaaggagct

SEQ ID NO: 411629 - DNA, 340 bp, Oryza sativa
gataagtacgagacgactggagcgggacaggaggaagggggaccggttgagagccaacaagcgctcggagaggcagccgatcgggacgggggcgcaaggctccgacgacaaggactacaaggagccgacggcggcgccgctgttcgagccaggggagctcaagtcgtggtccttctaccgcgcagggatcgccgagttcatggccaccttcctcttcctttacatcaccgtcctcaccgtcatgggggtcaacaactccacctccaagtgcgccaccgtcggcatccagggcatcgcctggtccttcggcggcatgatcttcgccctcgtctactgcacc

SEQ ID NO: 411630 - DNA, 474 bp, Oryza sativa
  unsure (1)..(474): unsure at all n locations
tttgactagggnaactagaagatgaccggngggtttttttgagatgacttcgcgggcttcaccccctatacagaatataccaaacaagtacacctcaaagatgcttctagctgctattgatgaaaatcataaagggacttatgattttatttacctaccaattgacttcaagaacaagtgcaatgtaggctatgctttcatcaatatgaccaatcctcagcatatcattccattttatcagacgttcaatggcaagaagtgggaaaagtttaacagtgagaaagtggcatcacttgcttatgctagaatccaagggaaatcagctcttattgctcacttccagaactccagtttgatgaatgaggacaagcgctgccgccccatactattccattcggatggtcctaatgcaagagatcaggaaccattccctatgggtacaaacatncgagccaggtcagggagatcgcgagc

SEQ ID NO: 411631 - DNA, 489 bp, Oryza sativa
  unsure (1)..(489): unsure at all n locations
gtcttctctcgcagggcaatacataggcaccgcggcagtccagactcttcaagacctgcttcgttgtcgcgcgactgcccgccgccgaccgaaaccccaccgtgtgcgtcgcgccgcgcaccggcggcgccatctgcaactccatctcgtcgtcgtcgtccactcccccctacgacctcaacgccatcaggttcagccccatcaaggagtccatcgtgtcccgcgagatgacccggcggtacatgaccgacatgatcacctacgccgacaccgacgtcgtcgtcgtcggcgccggctccgcggggctctcctgcgcgtacgagctctccaaggacccctccgtcagcgtcgccgtcatcgagcagtcggtgtcccccggcggcggcgcgtggctcggcgggcagctgttctccgccaggtnggtgcgcaagccggcgcacctgtttctcgacgagctcggcgtcgcgtacgacgagcaggaggactacg

SEQ ID NO: 411632 - DNA, 516 bp, Oryza sativa
ttatattcccactctctcctcttcccgatcccgccaacacccaaaccctaaccctcgaagcgacgcaacccaccggcggcgatggggcagggcactcccggcgggatggggaagcagggcggcctccccggcgatcgcaagccgggcgacggcggcgccggcgacaagaaggaccgcaagttcgagccccccgccgcgccgtcccgcgtcggccggaagcagcggaagcagaaggggcccgaggcggcggcgcgcctgcccgccgtggcgccgctctccaagtgccgcctccgcttgctcaagctggagcgggtcaaggactacctcctagggaggaagagtctcggcggcagccaggaagcgctgcgacccagcgaggacaagaccgaggaagacccgaccaaggtcgatgacctccggggcacccccatgagcgttggctcgcttgaggagatcatcgatgagagccacgccatcgtctcgtcggtcggcgggccggaatactatgttggcata

SEQ ID NO: 411633 - DNA, 471 bp, Oryza sativa
tttttatgcttgagcggaataaagtggaccgcggcatctttagacttcaggccggggagggttgctgtggtcaccggcggcaacaaagggatcgggctggaggtgtgccggcagctggccgccgacggcatcacggttgttctgacagccagggacgagacgaggggcgtggaggccgccgagaagctcagagggatgggcctttcctgtgtcatcttccatcatctggaggtcacggacagttccagcgtttctcggttggctgatttcttgacgactcgttttggcaagctagaaatactggtgaataacgcagcagttagcgggatggagcacgcccaaagagtagatactaacgaggaacagttcgttggcatggacaagcaacagatacttgaatggttgaataaacaaggccgggagacctacgacgcctcaaagaacggcgtgcagacgaactactactgcacg

SEQ ID NO: 411634 - DNA, 475 bp, Oryza sativa
  unsure (1)..(475): unsure at all n locations
atcaaatttcaatatttgatttggtgtcaaacggctactttaattattatggggggccttaattctcggactgcatttcttttctggaattcatatactgcattgtataggtcacaaatgaacatgcttggtcactcgtaccatttggcagccatgagctttctgcatgaatttttattcagctactgcacgattgttctctttccgtttcagtgatcatgttgaatgcgttcacatgctatgtccattcagttactgcatgatcattttatctgaattcctcttcttttgttttcaggccttggtttccctagttaccctggtgttcctgttgggtatatgatcccacaggtgccgtataataatgctgtgaactatggacctaatgggtatggaggaaggtaccaaaacaacangcccagtacacctatgagatcacctgctaacaatgatgcccaagattctctcactattg

SEQ ID NO: 411635 - DNA, 386 bp, Oryza sativa
atcctacctacctacctactctaggcgggagagatggtgttgaagagcggcgtggcggaggacggcggagcgtaggcagctgcggtaatgaggaggtgtctctcggcctcttggcgtaggcgggtgactgactgcgtcctggcgagggagctgcatgacaacgtcgccgacctgaacgacccgctctggagcgccaagagcactactctcctccccgcacctcgaacgcaaggtgcatgtagactacctagaagcaggtgcagatatcataatcacagcgtcataccaggctacaatacaaggctttgaatccaagggattctcaaaagaacaaagtgaagacttgctcgcagagagcgatgaaactgcacgtgaagcgccggaca

SEQ ID NO: 411636 - DNA, 427 bp, Oryza sativa
attgtcgctaaagagctagaagctgggctggagcatgtatgaggtctccaagtggaggttggcagggtgctcttgaagctccgagaaaatcttgaattatctatagcaagaagcaaccgagctcagcaaaacttccgtaacctgtcaacgaaagctggagttccccttagaactttcctgttcggcacgaagccaaagaaaccatcactcttttcatgcatgggtcctggggtgcataagcatcacagtggctcaagggctggtcgtagatgagaatggttggatcatcaactttcttttgtcaattaatacagaacagagctcagtgtacctgtcaattgatttgtggtatatgcagtttctcatagaccttaaatggaaagaaccctgcatctcttaatataaatttgggtcaccctgtccgctc

SEQ ID NO: 411637 - DNA, 434 bp, Oryza sativa
gtatcccagcgcaagaagctcatcgcctccggtctcgtatgggagccatgggcacaaccggctccagcctactaaggacctgcatcgctggcgcgcgcctccccggcggcgaccgcaaccgcaccgtctccgtcgcgccgcgcaccggcggcgccatctgcaactccatctcgtcgtcgtcgtccactcccccctacgacctcaacgccatcaggttcagccccatcaaggagtccatcgtgtcccgcgagatgacccggcggtacatgaccgacatgatcacctacgccgacaccgacgtcgtcgtcgtcggcgccggctccgcggggctctcctgcgcgtacgagctctccaaggacccctccgtcagcgtcgccgtcatcgagcagtcggtgtcccccggcggcggcgcgtggctcggcgggcagctgttc

SEQ ID NO: 411638 - DNA, 467 bp, Oryza sativa
cttttccacagggtagttctcgcaccactgacgaggcagtgatcctatggtaatgttccttagcctcatgccattctgtactatcagcagagaacaaccaaaggaggccttttgattgctgaggccactggaatctcggacactgctcaagggtacaaagatactcctggtatttggacaaaggagcaagtggaagcgtggaagccaatcgtagacggcgttcatgccaaaggaggaatatttttctgtcagatttggcacgtaggaagagtctctaataacacttttcagcctaatgggcaggctccaatttcgagcaccaataagtcactaaaacctgcagtaagagccaacggcatagatgtggctactttctcaactcctaggcgattagagactgatgagatcccttttgtcgtgaatgattacagggttgctgctagaaatgcaattgaagcaagatttga

SEQ ID NO: 411639 - DNA, 482 bp, Oryza sativa
tttcagtctccactccactgaatcctcccacctgggctcgaaggactggcacgcggtagtgaagctgagaagtcacctgaggttgtgctggagtggcctaagaaggacaagaagaggcttctacatgctgtttaccgtgttggagatttggatcgcaccattaaatgttacacagaatgctttggaatgaaattactgaggaaaagagatgtgcctgaagagaaatatacgaatgcatttcttgggtttggacctgaggacaccaactttgcacttgaattgacatacaattatggtgttgataagtacgacattggagcaggatttgggcatttcgctattgcaactgaggacgtgtacaaattggctgagaaaattaaatccagttgttgctgcaagatcactcgtgaacctggtcctgtcaagggaggatccactgtgattgcctttgcacaggatcctgacggttacatgtttgagct

SEQ ID NO: 411640 - DNA, 303 bp, Oryza sativa
gtagattccattattatacatactgttttgggcaaatttagagaggtgtgattgagtttggcacctacgacaacgttaaggccaagatccaggacatggagggcattcccgcggacctgccgcgtctcatctttgccggcaagcagcttgaggacggcaggacccttgctgactacaacatccagaaggagtcaacgcttcaccttgtcctccgtctcaggggaggcatgcaaatcttcgtgaagactctgaccggcaagaccatcaccctcgaggtggagtcttctgataccatcgacaatg

SEQ ID NO: 411641 - DNA, 353 bp, Oryza sativa
tttatcaacttcgacggaggggatgtcgtgtttttgaggactagggggcattatctactttgccaaagatagttccataaaagacaggtgggctgaatatgagcttaatctcccaaattcaaaccgtggacctgatgtcggaagagtgtactttgtgatcctcgagatgtcccctggtacatacattgattaaaggtctggaaggcttataaggacttgtataagaatacagggatgggcatattcagattgcaatagcgaacccaaaccggaaggtacacctggtggttttgagatccggcatgatagacatgaatggtactgggtggtgcttcgtgcgagtgcacgacgct

SEQ ID NO: 411642 - DNA, 491 bp, Oryza sativa
attggcacttccatctcattctcctagagtgtcatcactagcttctagctagcttaattaattaattagccatggcggaggagaagcaccaccaccacctgttccaccacaagaaggacgacgagccggccaccggagtagactcctacggcgagggcgtctacacgtcggagacggtgaccaccgaggtggtcgccggcggccaggacgagtacgagaggtacaagaaggaggagaagcagcacaagcacaagcagcacctcggcgaggccggcgccctcgccgccggcgccttcgccctgtatgagaagcacgaggcgaagaaggacccggagaacgcgcacaggcacaagatcacggaggagatcgcggccacggtggtggtcggcgccggcggctacgccttccacgagcaccacgagaagaagaaggaccacatgagcgccgaggagtccaccggcgagaagaagcaccacctcttcggctgatcg

SEQ ID NO: 411643 - DNA, 527 bp, Oryza sativa
gtggatcatacttcggatgcatgatgaacgaaggggacagaggaggtcttatgggcgatccatgacaacaacaagatctttcgaatcatctgccgggatcgtatactcaaggacttgctgcagccggacaaagataaggagaccaaaagctcatggaaggttcttatcatggacaaatttacggtgaggatcatggcttatgcctgcaagatggcagaaattaccgatgcaggaatctcgttggttgaagatcttttcaagcgaagggagcccatgccttccatggatgcaatctacttcctccagccactgaaagaaaatgtcataatgcttctatctgacatgtctgggagatgtccactgtacaggaaggcatacatattctttagttcaccgattcctaaggagctggtctcttacataaagaacgacagcagtgtgataccacgtattggtgcactaagagagatgaatttggagttctttgcaattgacatgcagggattcacaactgaccatgacatggg

SEQ ID NO: 411644 - DNA, 428 bp, Oryza sativa
gtatcctctgccccccagccatcggcgacgcgaggacgcgacgcgccccaccaaccaccaccgcctccgccgacctcgccgccatgctgtccgcgcgcgccgccgccaccgccgccgccgccgccgcctccccgctgtggaagcgcggcgagggtggcagcagcgggagcgggagcggatgcacgagctgcagggaggtgcggaggagggccgcggcggtgagggtccgtgcggcggcgccgaggagggtggaggcggtcgcgatggagtccgcggcggagaccgagaagaaggaggaggttgcggcggccggcgcggggttgaggacatggctaccgaggaggtgcccgtcacgccatgggccttctccgtcgcgagtggttacacccttttgagggatccacatcacaacaagggccctggcttta

SEQ ID NO: 411645 - DNA, 499 bp, Oryza sativa
gtctgaactcttcatattgccctgttctgaagcggcttgtatctgtggccatgagagagcactattttaaggcagaccgtccagaaactctcttatgtgaggcatgaaatctggattatacgaacgctgaatacgtcgccatgctcaaccatcgacgactccaccggcggcgtgagcccacgctgggggtacctagactacagaggttacgtctcccccgatgccgtctccaactccaccaccgtcttctacaccaccaccaccggcgtaagcattcatgtctccttctgcctcgcccgcccgccgcgcctatactacctgtgcgtacactgcccccgccccggcgacggcgagggcgcctaccggttcactgtggatccccaagtcctcggcacgcacaccaatgtagccctcctccgcgttccgcaccccaacgatgggcttcaccgcggcattaaatcctacgactacttcgtctacacgggcccgccaggcccgg

SEQ ID NO: 411646 - DNA, 515 bp, Oryza sativa
  unsure (1)..(515): unsure at all n locations
tttggccgccgcctcctcctctgccgccgcctgcttcctctccccgtcccctcctccccccccgcgccaccattccatcaaacacctggcgtgcgccgcctccaggtcgccgtcgccggggccctcctcctcccgctccctcgccctcccttcgccttcggcttcggcttctccgtcgccgtggccgcggcggctccgcgacctgctccccgacgagaccggccggatcctgtcgtccgccacgggctccctcatcgtcgccctcgcctcggccgtgctgatcctcggcgacgccggctccgcctccgcgttcgtcgtcgccacgccgcggaagctgcaggccgacgagctcgccaccgtgcgcctcttccaggagaacacgccctccgtcgtctacattaccaacctcgccgtgaggcaggatgccttcacgctggacgtgctcgaggtgccgcaggggtccgggtcggngttcgtctgggacaagagcggncacatagtcaccatttccatgt

SEQ ID NO: 411647 - DNA, 533 bp, Oryza sativa
  unsure (1)..(533): unsure at all n locations
ttttgaactcttcatattgccctgttctgaagcagcttgaatctgtggccatgaaagagtactattttaaggcagaccgtccaaaaactctctctgctggttcttctaatctgaaatataggaaccccaaatatctttccatgctcaaccatttaagattctaccttccacaagtgtatcctaagttgaataagatccttttcttggatgatgacatagttgttcagaaggatttgacaggactctgggaggttgatctaaatgggaatgtaaatggtgctgtggaaacatgtggggagagttttcaccgttttgacaagtacctcaatttttcaaatccaaatattgctcagaacttcgatcctaatgcttgtggctgggcgtatggaatgaatatgtttgatttggaagaatggaagaagaaggacattactggcatttatcacaaatggcagaacatgaatgaaaacaggctgctctggaagcttgggacactgccgncaggtcttctaacattctacangntaacacat

SEQ ID NO: 411648 - DNA, 496 bp, Oryza sativa
gtgaatagtacatgagagaggatgtggtgcgggcagttattttgggaaactatcaaaattaggactcgcccctcttctttggtgtattattattggcttaatttatatatatgtatattcagttatctcaggacaatatagcagtaatatgacattactatttgggttattttcatggttgggaattttccttgctactgccggattggttatgttctataagtgtagcagaaaagatcctggctacattgacaagaatacaagagatgcccaaaatcaaagagatgatgaacctttgttgaagaggggtctagacaaccctgaacttctggctggcaattggtctcagctatgtataacctgcaaaattgttaggcctgtacgctcaaaacattgctctacatgcgatcgctgtgttgagcaatttgaccatcactgcccctgggtgtctaattgcattggaaagagaacaaaatgggatcttttatggtcctga

SEQ ID NO: 411649 - DNA, 522 bp, Oryza sativa
gttatgtctactagagctggaccttgcttcacggtgctgttacatgctccaaggagcgtcatcctgcaagacccaaaaatgcgaatgtagagcttcaggttcacattgcgggggtgattgtggatgtattccctctaagcgtataatggggtggatgtgaacagaggaaaagatgggttgtggccggggtgcgggatgctgctgcagatccagccggccaccggcgggaaccgcctgcgcttctactgccccacctgcccctacgtctgccccgtcaaaaacaagatcgtgaagaaggcgagactagtgaagaaggaggtggagcccatcttcagcgacagcgacgccatgaagaatgcccctaagaccaccactacatgcccaaggtgccaaaatggagatgcatactacaggcagatgcagattcgatcagctgatgagccaatgtctacattttacaagtgttgcagagaagaatgccaatttgatttgagggaggactgactttagtaatattttttg

SEQ ID NO: 411650 - DNA, 429 bp, Oryza sativa
gtccatctcctctgctctgctctccttccaccggctaacgaaccactcgccatcaaagcccccagagagcgcgccatggcggcgcagcggcggtggccgacgtcgacgctggcggcggtggcagtcgccgtagtagtactactggcggcgtcggcggcgacgacggcggaggcgcagtcggcgccggcggcggcgccggggccagcggggccggtgctggaccaggcgtgcctgacggcgctgctgaacatgtcggactgcctgacgtacgtgcagaacgggagcagggcgcggtggccggacaagccgtgctgcccggagctggccgggctggtggagtccaacccggtgtgcctctgcgagctcctctccggcgccggcgactcctacggcattgccgttgactacttccgcgccctcgcccttccc

SEQ ID NO: 411651 - DNA, 501 bp, Oryza sativa
cttgaagctgatcaaatctgacttggtccagggggctgtttagaatcctattgggttttttacaccaactgcccccaggactccctaccatcggaaccgatttacatccctatcacgcacttttggtgatggttcaaaattatggcaagaagatattatggtgacaggctttgctggtggctctaagaagccaaggactcaggttttgtactcggtttctcctagaagtgatgaacctggctcaaaacacaaaggacatttccgcaagatacagtctcatagcagtgcaaagagactttctgataattcaagaagtgaacagagcagtcctgagtcattggcttgtgttgcaaatgtcctagttacagttggtgatagaggatggagggagtacgatactcagatcacaattgactcttatgggcagaatgaaccgaggatttgtgtgaagcttgcagaaggaactaagtatgcttaacaagttcttcaagtttgcaggct

SEQ ID NO: 411652 - DNA, 498 bp, Oryza sativa
  unsure (1)..(498): unsure at all n locations
ttctcacgctgctccccccactccctcccgcggcgccgccgccgccgccaccgccgcatcgccgctgccgacggctgcgctccgaagaattctgtgaggatttaagctgagaagatggtgctgaagacagagctttgccgttttagtggccagaagatatatccagggaagggcattcgctttattcgtgctgattcacaggtcttcctttttgcaaactcaaaatgcaagcgctacttccacaaccgcctgaagcctgcaaagcttacctggacagccatgtacaggaagcagcacaagaaggatatccatgctgaagctgtcaagaagaggcgccgcaccaccaagaagccatactctaggtcaattgttggtgcttcgttggaagtcatccaaaagaagagagctgaaaagcctgaagttcgtgatgctgctagagaagctgctcttcgtgagatcaaggnacgcatcangaagaccaaggatgaaaagaaggcg

SEQ ID NO: 411653 - DNA, 529 bp, Oryza sativa
  unsure (1)..(529): unsure at all n locations
gtgggagcggtcgcaggaggaggaggacggcggcgtctgttgagaccgacggggagcggcgaggatgagcgcgtccaggttcataaagtgcgtcaccgtcggggacggcgccgtcggcaagacctgcatgctcatctcctacacctccaacaccttccccactgattatgttccgacggtgtttgacaacttcagtgccaacgtcgtggttgatggtaacaccgtcaacctcgggctatgggacactgcaggtcaggaggattacaacagactgagaccactgagttatcgtggagctgatgttttccttctggccttctcgctaatcagcaaggccagctatgagaatgtttcaaagaagtggatacctgagctgaagcattatgcacctggtgtgcctatcatccttgtgggaacaaagcttgatcttcgagatgacangcagttttttgtggaccatcctggtgctgttcctatcaccactgctcagggagaggaactaagaaagcaaataggcgccccatactac

SEQ ID NO: 411654 - DNA, 542 bp, Oryza sativa
tttcgtcactgccttcctctccaagtccatccgcttcctttaactaagatccggcctatccaggccatggcggcgaccatccagagcgtgaaggcccgccagatcttcgacagccgtggcaaccccaccgtcgaggttgatatttgctgctcggatggaacatttgcgagggctgctgtgcctagcggtgcatctactggtgtatatgaagctttggaattgagggatggtggttctgattacttgggaaagggtgtcctcaaggctgttgacaatgtgaactctattattggaccagcattgatcggcaaggaccctacagaacagactgtcattgacaacttcatggttcagcaactggatggaaccaaaaacgagtggggctggtgcaagcaaaagcttggtgctaatgctatcctggctgtctcacttgctctatgcaaagccggagctattatcaagaaaattccgttgtatcaacacattgttaaccttgctggtaacaagcaacttgttttgcctgtgcctgctttcaatgtcat

SEQ ID NO: 411655 - DNA, 527 bp, Oryza sativa
gttgagttggggattgattgattgattcggagggggaagaagaagaagcaggggagcatgggcagcaagtcgtacccgacggtgagcgatgagtacctggcggccgtgggcaaggcgaagcgcaagctccgcggcctcatcgccgagaagaactgcgccccactcatgctccgcctcgcgtggcactctgctggcaccttcgatgtgtcgtcgaggaccggcgggcccttcggcaccatgaagaaccccggcgagcagtcccacgccgccaacgccggcctcgacatcgccgtcaggcttctcgaccccatcaaggaccaacttcccatcctctcctacgccgacttctaccagcttgctggcgttgtggccgtcgaggtcaccggcggacctgaggtccccttccatccgggcaggcaggacaagcctgagccttctcctgaaggccgtctttctgatgccacacaaggttctgaccacctaaagcaggtcttttttgcgcagatgggtttgagtgacaaggacat

SEQ ID NO: 411656 - DNA, 433 bp, Oryza sativa
  unsure (1)..(433): unsure at all n locations
ttgcgtcttcgtactcgcctctctccgcgcctgcgcgctttaactcctcctctcccctctctcccttctccgccgccgtcgcagcatcaacccaatccgccgccatgagggagtgcatctcgatccacatcggccaggccggtatccaggtcgggaacgcgtgctgggagctctactgcctcgagcatggcatccaggctgatggtcagatgcccagtgacaggactgttggtggaggtgatgatgctttcaacaccttcttcagtgagactggtgctgggaagcatgttccccgtgctgtatttgttgatcttgagcctactgtgattgatgaggtgaggactggttgctaccgncagctctttcaccctgagcagctcatcaatggcaaggaggatgcagctaacaactttgcccgtggtcactacaccat

SEQ ID NO: 411657 - DNA, 404 bp, Oryza sativa
  unsure (1)..(404): unsure at all n locations
gtgagcatctagctagggagagaaaggaagaggcgagaggagagagatggccactgcttatgctcccatggcgagccagctgatgaagagcagcttggtgtgctccaagccgagggggctgtctggtgcttcgctgacaaggaggccccgcttcacagtcaaggccatccagtctgagaagccaacgtaccaggtggtgcagcccatcaatggcgaccccttcatcggcagcctggagacgccggtgacctccagcccgctggtcgcctggtacctctccaacctcccggcgtaccgcaccgccgtcagcccgctgctccgcggcatcgaggtcggcctcgcccacggctacctnctcgtcgggcccttcgcgctcaccgccccgttcgcaacacgccgtgcac

SEQ ID NO: 411658 - DNA, 467 bp, Oryza sativa
gtctgtcagaggaggagatcaaggggctgaaggggatgttcaagaacatcggcggggacaatagtgggaccattacgcttgaggagctcaaaaatgggttagcaaagcagggcaccaagttttcagacaacgaaattgagcaacttatggaagcagctgatgctgatggcaatggaattatcgactatgaggagttcgtcaccgcgacggtgcacatgaacaaaatggatcgagaagagcacctttacacggcattccagtactttgacaaggataatagtgggtacatcacaaaggaagagctcgagcaagccttgaaggaacaagggttatacgacgccaacgagatcaaggatgtcatcacagatgcagactctaataatgatgggaggatagattattcagagtttgtggccatgatgaggaaaggatcaggctgtgcagaagcaacaaacccaaagaagaag

SEQ ID NO: 411659 - DNA, 513 bp, Oryza sativa
attatcatacacttgaccgtggatcctgatttcggggatattctagacaaagtcgcgtatgaatcaaaaggagtaatcgggaagctctacagggaaataaagaagcacacccctcacataaagcacttcacaagggaggtggcaaggcggtcttatgacaccgatatgattgttgatggctatgaagattacatcactgaacctatggcattgaaggacgagtacgacttcaaattgggtaatcttatggatcactatggaataaaaagtgaggccgagataataagtggatgcattcttaagatggcaaagaatttcacaaagaaaagcgatgctgatgctatcagattggcggtgagatctttgcgtaaggaagcaaggtcaaggttcagtgagatgagcttagatgataatgggcatggccatgatgcctcccaagccaaggcaatccgctggtaccatgtcacttaccaccctgaattctggggttgctacaatgaaggatatgagcga

SEQ ID NO: 411660 - DNA, 495 bp, Oryza sativa
gttgaactcatagatgtgtgctggttggaaatgcatggctggatacacagcaaggtgctctccccaaactcaacttatgccgcatacatggtgtttaagatagctgatgagttctatgggctggatgctccattccaggaggcatcagtcagcctgggaggtaggggatcaacaaaaattgtttgtgtccaaagctatgacagcgaagatgaggaggtgcctgagaattactggcctatgagtattggtccattgctgcgacaaagggccaggagaagagaccgtcgtctagttcttgatgaaggtgtaacggtccctcagaaaaggactgacgagtggatggagctggagatgggtgagttcatcaacgaggaaggtgaagatggagaggtgtgcttcagcctgatggagaccaagggaggcaattggaagagaggtcttattgtgcagggcattgggatcagacttaagaaatctggctgatgaacttctaag

SEQ ID NO: 411661 - DNA, 448 bp, Oryza sativa
gttgcatctccttgtccctcgccttcctcgcctggcctcgcctcggctctcacacgacgcctcttcctctcgctactactagctcaagctaagctagcaagagcattccttgggctttttttcttgttcggggttgagaggcaatggcggtgatgactgatgtgtcgaccaccgggacggcactccggaccccggcggcgggggcggtgaaggagggcgacgtcgagaagctccggttcatcgacgagatgaccaccaacgtcgacgccgtgcaggagcgcgtcctgggggagatcctcggccgcaacgccagcacggagtacctgaccaagtgcggcctcgacggcgccaccgaccgcgccgtcttccgggccaaggttccggtggtgtcgtacgacgacctgcagccgtacattcagcgcattgcgaacggggaccgctcgccgat

SEQ ID NO: 411662 - DNA, 399 bp, Oryza sativa
gtcgagaagcatgtcgctgaggcagacatcaggtttgtgtctgtcaacacccctaccaagacccgtggacttggagcaggcaaggctgctgacctcacctactgggagagtgctgctcggatgattgctgatgtctccaagtctgacaagatcgttgttgagaagtccactgtccctgtcaagaccgcagaggccattgagaagatcttgacccacaacagcaagggcatcaactaccagatcctctccaacccagaattccttgcagagggcactgcgattgaagatctcttcaagccagacagagtgctcattggtggccgggagactcctgaaggaaagaaggctgttcaggctctcaggaagtttatgcccattgggttcctgaggacaggatta

SEQ ID NO: 411663 - DNA, 423 bp, Oryza sativa
ttctcttgctcttcgcctcgttcgtctccaacgagctcgtgagccgagggctgggccgtctattcgttcatctgctgctgtgtctcccctggtgaggtacgacaagatgttggaacattcggagagtgcaacagaaaaaattatgagcagcatcatggataccattgctgagaaccttcctaagcagaaatctgggaaatttgacgtaggcgctgcctctgacaaaatgaaggagaagctgtttggtcgtcagaagaccattcatcgagttctgggtggtggaaagcctgctgatgtgttgctatggaggaacaagaagatatcctccagtgtcctggctcttgcaacagcaatttgggtattctttgagtggttcgactaccactttctaacaattgtttcatttgcccttgtccttggaat

SEQ ID NO: 411664 - DNA, 369 bp, Oryza sativa
  unsure (1)..(369): unsure at all n locations
gatccgatacaaggtgatgagtgctagacttgggcgtattttgaatgaaccccgaggtgttcttcgacatactcatcggcaagggcagggccggccgcgtcgtcatggagctcttcgccgacaccgtccccaagacggccgagaactttcgctgcctatgcaccggcgagaagggcctcggcgcctccggcaagccgatgcattacaagggttctgccttccaccgtatcatacccaacttcatgtgccagggcggcgacttcacccgcggcaacagcacgcggggagagtccatctactgcgacaggtttgctgacaagaactgttagctgcgccacaccggcccaggcgtgctctncatggccaacg

SEQ ID NO: 411665 - DNA, 476 bp, Oryza sativa
tttacatccacaggctccctcctactctccctggcggccgtggagcggcgtctatcctcctccaccggcggcaaggcatctgagctcaacagcaagcaaatggcaggtggcagaattgcacatgcgaccctcaaggggccgagcgtggtgaaggagatctgcattgggctcacccttgggctggtcgctggtggtctgtggaagatgcatcactggaacgagcagaggaagactagatccttctacgacatgctcgagaagggccagatcagtgttgtcgtcgaggagtagtcttttgtgttgaaagtcttttgcctttgttttttgcaagttatttctgaaactctctggagagcatgacaaagctagtgccgtggagattgtcatgaaaaataagcatagcaatgtgagaacatttgatctcgttgaaattgcttcttttctgggattatcctaaaatctggctttaatatatg

SEQ ID NO: 411666 - DNA, 476 bp, Oryza sativa
tctagctccgcctcccacctcccttttctttgcgggggtttttccgacgtcggcggcgacgacgacgattccgatggagttctggggtcttgaagtcaagcctggacagactgtcaaatgtgagcctgaagatgaacgctttttgcacctttctcaggctgctcttggggaatcaaagaaaggatctgacaatgcagtaatgtatgttaaaactgatgatcaaaagctagtcattggaaccctctcagctgacaggttccctcaaatccagtttgatttggtctttgacatagagtttgagctgtcacacacttcaaagactgctagtgtgttcttttctggctacaaagtttcccagccggctgaggaagatgaaatggattttgattctgaagaagttgagatgaagaggaggacgaaaagatcattccagctcccagggcatatggcaatagtgaagggagggaaatgagcag

SEQ ID NO: 411667 - DNA, 314 bp, Oryza sativa
gtccattcaagctgaaggcacacactggatggggtgaagtagaagaggaaccactgacgttgagggtggtgatgctggtaaccgtgagaactacatcaacgaactcatcagaaggatgaactagttccatgagctcattgttagcgcactgtgtttggatgatattttaaagtaagcttattttgcactaggaagtgtatcaagaaaatcttgcaattttgatattcagaatctgacccttttatccggtggtttgatgttattcctaaatttgaagtgcttttaatcatgatatgcgaacatgtgttagtact

SEQ ID NO: 411668 - DNA, 444 bp, Oryza sativa
tttggacatactctactactactagccagtagggtagcttactaactacgtggcgtatggcccccaccgtgatggcctcctcggccacctccgtggctccattccaagggctcaagtccaccgccggcctccccgtcagccgccgctccaccaactcgggcttcggcaacgtcagcaatggcggaaggatcaagtgcatgcaggtgtggccaattgagggcatcaagaagttcgagaccctatcgtacctgccaccactcaccgtggaggatcttttgaagcagatcgagtacctgcttcgatccaagtgggtgccttgtctcgagttcagcaaggttgggttcgtctaccgtgagaaccacaggtctcccggatactacgatggcaggtattggaccatgtggaagctgcccatgttcggctgcaccgatgccacccaggtgc

SEQ ID NO: 411669 - DNA, 409 bp, Oryza sativa
  unsure (1)..(409): unsure at all n locations
ttggtttttttttagcgaagggacaccaatcgccatattaattccttttccaataacaaatagaagtacatagatcaaagcacaagccttgaaacaaatttccaaatgagtaatgccgaaatacagactaatacatctctggggggggggggggggagcaanngatttgacgaccacattacccatttaactgggctgtgcctctggattggacctgacttaagagcaggtagttgcttgggctcaggggaaggtttacccttccaaaaagaatggtccttgtagaggtcgatttacccatatgtgcctgatctgatgggacacttggggtgcgcgagctcgcctgccaagcggcggatgaacctctcctgtctatccggcgcccacgacctgtaccttttcccgggct

SEQ ID NO: 411670 - DNA, 260 bp, Oryza sativa
ggctttagttgcttgatggacgacgaggccacgctgggggggggttaagaaccacaggcgcgccacccaagacctttacgacttcatcgccgacggcaacttccccgagtggaagctgttcgtccaggtgatcgacccggaggaggaggagaggttcgacttcgaccccgtggatgacaccaagacatggccggaggacgaggtgccgcttcctgtccgtggggcgcctcgttcttaaccccatcgtttaccactttttt

SEQ ID NO: 411671 - DNA, 414 bp, Oryza sativa
agatttcgtactcatggcgaagccgcagcttcttgtgggcgtttccgtcgccgcactggtactcgtcgttgcagcctccgccaagaaatccggcgacgtgacggagctccagatcggcgtcaagcacaagccagaatcctgcagcattcaagctcacaaaggtgacagagttaaagttcactaccgtggaaaacttactgatggaacagattttgattctagctatgaaagaggtgacccaatcgaatttgagttgggcactggccaagtgatcaaagggggggatcaggggcattctgggcatgtgcgttggcgagaagaggaagctgaagatcccttaaagctcggttatggggctcaaggggcaccggcgaccatcctgggggagcgactctcattttcgataccgagctt

SEQ ID NO: 411672 - DNA, 452 bp, Oryza sativa
  unsure (1)..(452): unsure at all n locations
tttgggggcttatgagcatggagggtcacactcacttagtcaaataccaagatcgatcgatcgatgtacaagtggatgcattaattcatcatcttgggtgttcttatattacaaatcaccaccatgcaagtcgccattaaccaccaacccagctttcctaatttaagtagtaatcaacaaaaggatgacctctcctctctccataccctcccagctcgctcgtcatcacaaaactaaacagcgcgcgcgaacgcacaccaacgcatngatcccgtttgaattgcgcgcgaaagagcttaaattaagaggatgaggagaaggtgtctaagatggtggtgtggagcgggtcgctgaggtgggtggcccagctgttgaggggccccttgccggtggcggcggcctgcactgcgaagcccaggaaggcgaccatggcgaggcgggcgtgcttgatc

SEQ ID NO: 411673 - DNA, 203 bp, Oryza sativa
gaatgagatgaaggagaggagcagccatggcgtcggcgggggttgtatttggagagcacgttcctggggacaaggctggcggaccctgtgccgcatagcgggaggatcgttgtcagcgctcttgttctcctgtcttatgatactgttgtgtctatttttctgttatgttcattctttttttctctcacttgtctctttttctt

SEQ ID NO: 411674 - DNA, 480 bp, Oryza sativa
ttttgtttggttacttttaagggagtcgattacagaatttctgtagccttgcagatgatcacttggatatcatgtactagtaattaacaataggatgcatacaaaagatggcccaacgacaacagaagatgcgtgcatctgacattgtctggccttatttgttggtagtactccaattaattaacaagagatgatgcattcttgtgccttagtttcttcacatgcttggcttcacgttgagcctattcgcaatcttcacccccaacgactcatcacactgggagaggtagttgacccagatggcgcggagctcaggggagaccttggggtgcgcgagctcgccggcgaagcggcggatgaacctctcctgtctatccggcgcccacgacctgtacctctccccgggctgcttgaagtcgttctgcttgtgtatcgtcgccttctgcctcctccccaccacggggcgcggcgtgatgggcc

SEQ ID NO: 411675 - DNA, 312 bp, Oryza sativa
tctactatgtgatgtgactgggaagattcttatgaagtgcttcctttatggaatgcctgatctgaaattgggattaaatgacaagatcgggcttgaaaaagaagctcaactcaagtccaggcctgcaaagagcggaaagaccattgagcttgatgatgtcacattccaccagtgtgtcaacttgacaagatttaacttacaaaagacagtcagctttgtgccgccagacggcgaatttgaattgatgaaatatcgaataactgagggtgtaaattctcccattcccgggttctaccaaccatttaaggaatt

SEQ ID NO: 411676 - DNA, 284 bp, Oryza sativa
ttatttactgcagcagcagcagctgagcttgaggcagggtaaaaaggaacacatggcgcgcctacaccatggccctctcgtacccaagcgctggccggcaaggccgccccgaaggtgttcggcgaggggcgcataaccatgcgcaagtcggcggcaaagaccaagcccggcgagacgtgaagaccgtggtactgttactaacggatcatatacctattctagctatgaaagaagcgacccaatcaaacttgagttgtgctctggccaagctaccaaagggtggg

SEQ ID NO: 411677 - DNA, 315 bp, Oryza sativa
ttggttcttaaaagctttgggtgttacactttttttttttatttccaagatctgtttttcttttttcaatttgatgcattcatttattatatcagggcgttctaatatgacagagcatccaccactgcaagtcaacaaaaaggggcgggcccaaccagccctaattaaaagaagaaactcaaccacaagggagaccaaccccgggcaaaaaaccggggccagctcggtcgaaaccagcaaaactaaacagggcgcgcgaacgcacaccaacgcataaatcccgatagaattgcgcgcgaaagagccaaaattaag

SEQ ID NO: 411678 - DNA, 393 bp, Oryza sativa
tctgtgttctcctctctcctccccttccctcccctcccccgttcgcggtggtggttcgccggagcgcatcagcatgcagcagcaaaaggccgtgagggccgccgtctggatccccgccgtcgccaagatgaacgacgccgatgtcgccaagcagatccagcagatggtgcggttcatccgccaggaggccgaggagaaggccagcgagatctccgtcttcgccgaggaggagttcaatattgagaagcttcaacttgttgaagctgagaaaaagaagatcaggcatgaatatgaacggaaagagaagcaagtcgaagtttgaaagaaaattgagttctttatgccagttaatgctttttgcattaaagtgcttcaagctcaagatgatttggt

SEQ ID NO: 411679 - DNA, 379 bp, Oryza sativa
tttgttttgatataaccaaggggatctactaccatgatggcattaatgaacaatcaggaattcagaatactgttctgtagacaggatacaatggcacacctggtcctacaatatatcaagcaacacctgtgattatgtactgatgaaactgactttcttttctatttctccttccattcttctctccaataggcgataggcgaacaaaataaatacaatttgagatgtaacaggaaaagctaggggtgtagtttttgtcatatgaaatcttgttcttggtcgtctgttcggcgcgacgaagtatctccgtcgagcattctcttcgtcatgttggccctctggacaagacgaaccaatgcttgcaccacctctgacattg

SEQ ID NO: 411680 - DNA, 190 bp, Oryza sativa
ttggccccttaaacacccgggggtataaagcataatccagcatgcatgcacacttacataattctccatatttaagcccagcgcatgtgcatgcagttaattaaacaactccttggcttggattcaaattaaaacactggaactacagtctatacgtacgtataaaaactcatcatgcacattctttttt

SEQ ID NO: 411681 - DNA, 375 bp, Oryza sativa
ttttgtttttttaatttttggggtttttaatccaactgggaacatcatcccgattctttttcctttttttgatcttttggacaaaaaagaactttactcaacaattcaatcccactaaaggggggaatttactaaaaatgatgatacaaccgtgacagagtcatgggagttaactgcctcccttctgcttgaggggaatcttgtctcctaagctgagggcgattccctggggcttgctccttattctgatggaaccactgagcttgccatcaaactggttctcgatgctgatatttaccaaagcatcttcaccgaaaacactttttgtataaaggttagcggcgagaaaaccgcattctccgtcaagcgcagacg

SEQ ID NO: 411682 - DNA, 497 bp, Oryza sativa
cagtttacttgcgctgatgttactttccgtaacatgtgggcagaatttgagtgggaaaacaaggtggcactgaatactgtcattcagaatgagaaggagtttttggatcatatcatcaagtcaacaaacatgaagtgtctaacaccaccgtctgcgcttgacggagaatgcggttttctcgccgctaacctttatgcaaagagtgtgttcggtgaagatgctttggtaaatatcactatcccgaagcagtttgatggcaagctcagtggttacatcacaataaggagcatgacctctgggagtccactaaaattacgagactagattaccctcaggcgcgactgcggccactaactgccatgactctgtcacggtatgattattattttttagtaaattccactctttattgggagtgatctgctcgccaaccctcttcttgctcttagtcccaacttacgttctccccccttctatttttctttgcccgccctatc

SEQ ID NO: 411683 - DNA, 170 bp, Oryza sativa
ggttgttttgggtaccatggactgacgaggagcgcagcgggtttttaaaaaggctggggcacctagacaacggggactggagaggcatctccaaaaactttgtgaccagcaggacggcgactctggaggccagtcaccccctgaagacctttcttcggcagaccaaccct

SEQ ID NO: 411684 - DNA, 482 bp, Oryza sativa
tttttgttatccaccaaatatgggtagagttgatttattggagtcttcaatttgaaaccatgaaagatatccatattcttatggggcaatagttgttaatgcccattattcaaagattaaaatacattgaaaaaaatccaaggtggttagcatccccactgatatgttcgttttgaaagaagccaactattaacctgaagcacctaaaaatatgcctcatgagctcaggagccttgtttgctactttggttcctcctatttactgaagcccaaacattgatgtcactgcattcacatctggccatgtcctaagatacttgctacattctcatccaccaagcaatcaacctataggagaaggacctcatatgtcacctaatatcaaataattaggaggggtgaggctttgaacccaggtcgtctagcccaccaccttgtggagctagccagaagacccctgtgcatttcttctttccatgcat

SEQ ID NO: 411685 - DNA, 284 bp, Oryza sativa
attgatcaccaggaacagaacagaggaagggacggttataactaaggaagctgtgacatatataccagaaatcacaggacatcgacagtctatgtacccaatgccaactagacagcatcacgcatctacctattcaaactctctgagaaaagacagtgtgtcccatctgctttccaacagattcatcacggaggagatacagaaggataaaaaccagcaatcctgagactagccacagggaggcatttaagtgcatgctgcaaagatcttgggctcatatttcc

SEQ ID NO: 411686 - DNA, 492 bp, Oryza sativa
ttggtttgtttattcgggggggatgctcttgtttattatccttaacaccatatcaaattcacgacgaagtattgactctcgcctctcacgttttttcccatgtgaacaacaaaaataaatgtgagaaggcattccaaaatatcattcatgtccaggtatataaatgttacacaagatgctgctactctggaataacaaggtcaaactaaccttaatcaagtctaaaaaaaatgataggatctccatatcttctcctaggattctcaaaatggagcctagtagcttcttaattctcgcccttctgatccagtataatatcaggttaattgttcatctttgatgtctcctctgaccaaaatagagggattgaacctctgttttgcacaacagaacttgcttctgtaggccaaggtctagctccatacacaatttgctcagtctcagcatcatttgctactcagcctttctcattcacccccatctttaaatatc

SEQ ID NO: 411687 - DNA, 452 bp, Oryza sativa
tttgttttagcaatggatgggcgcattccacaacagtcgaagggcaataataagtcttaacatccaaatttaaaccgaacagaaaatagagttttaaacgactgacatagtgcacaaagcgagcagatattaacggtcaatgcaacaactgaaatgaccgtcgacaaaacttaacgagtactaaaagagctagatatttcaaatgcagatatggaaagcaccacttgaacgaggctcatttcttcttggcggcagccttggtcaccttggcaccggatgggtccttcttctccacgttcttgatgacgccaacagtcaccgattgcctcatgtcccgcacggcaaaacgaccaagaggagggtactcagagaaggcctccacaaccatgggcttggggggaatcatcttaaccataccagcatcaccgttcttgaggaacttgggctccttc

SEQ ID NO: 411688 - DNA, 193 bp, Oryza sativa
tttcttccgacagaagcctcctctcggatgctgcggatcctttttttcgagatagctcgctccttattcaaccatgggtaaggagaagactcacatcaacattgtggagattggccacgtcctctccggcaagtcgaccaccacgggccatctgatctacaagcttggaggtattgacaagcgtgtgattgag

SEQ ID NO: 411689 - DNA, 481 bp, Oryza sativa
tgggtttttagggaagggggggtatcatttcaaatccaaacaataaactcagttaaaaacaagtcgatgaacacacgttacagaaccgtttcaacacaatgggcatggtctcctgaaaggtcgactgtgcagcacactgccattttatgcaatgagaaaagggagtacagtcagcatgaaagcctcgtaagtaaaagtcgcagagcccgagaaggctgtgtctttttccttgaacttctcagtcagacccttaactgtgaggcagcattcaatgaagttatcatattcaatggctttgttcttgcccccagtcttgtcaaactttgacacaagcaagtctagcacagttggagaaactgaatatcccagactgagaagagcatcacgcaattctgttgcatcaattttaccacttcggtcacgatcaaacctctcgaaaatggacctccaattctgaagactgtaaaacacagaggtaaat

SEQ ID NO: 411690 - DNA, 490 bp, Oryza sativa
ttgtttataggaaaagggagtattaggaacgacagaaattttgggttaggccaaaaacaatatcttcggtacaagaccagactacatgcaccaccaacatgctcttttcacaagaggtactgcagtggcacacgccattaaaacaacagcacatcattggtcagattgtgcgtcaaagttgacacgagtagcaaaatggtttatcgtattgggtgcagcttttgaagatctaagcattgcaaccttaggactgttcatattgcttccgagataaccaacaccaaatgaaggggaggaataggcagcaacaagttcagcggctcccaatgcagatacctcccctctctttagaacatcagcctgaattagcaacaacccagcgcctgtatcatgagacatctcgctgctgctttgaaccgcttggcgcagaactttggtacaagcagaagcagggccagattgtatcaatgatgatgagatacaacattca

SEQ ID NO: 411691 - DNA, 384 bp, Oryza sativa
tccttacgcttctctcctcctctaatctcaagtctctgtgtcgtcgtcctcgcatctccactcgccatgggcaagattaagatcggaatcaacggtttcggaaggatcgggaggctcgtggccagggtggccctccagagcgaggatgtcgagctcgtcgccgtcaacgaccccttcatcaccaccgactacatgacctacatgttcaagtacgataccgtgcacggccaatggaagcacagcgacatcaagatcaaggactccaagactctgctcttgggcgagaagccggtcaccgttttcggcatcaggaaccctgacgagattccgtgggctgaggctggtgctgagtatgtcgtggagtccaccggtgtcttcactgac

SEQ ID NO: 411692 - DNA, 445 bp, Oryza sativa
tttgttttgatgacagacagggttattcttattattctcgaaataaccggcacacaacaaaaatgagaacgaatttgtccagaaatgcactcaattacaacatcatccttgcagttacaggatacaagatggaaactttactgaactataccacgtttcgctccatccaccgtgttcttcagcaacatcgccaccgtcatggggccaacgccacctgggactggagtcaggtgaccagcaaccttgctcacctgtgcgaaatccacatcgccgacgagtctgtaccccgatttcctggctgggtcactgatggagttcgtcccaacgtcgatgacagcagcgcctggtttgatccaggctcctttgatcatgatagcctggccagccgctgcaatgacaatgtttgctttacggacaatactttcagggtttggggaccgggagt

SEQ ID NO: 411693 - DNA, 470 bp, Oryza sativa
tgcatcaaaccaaacccccgcgacccacacccaaacgcgccacctattccgagcgcgccgcggcgagcgagcgggagagaggggggtcgcaagcgcagcttcctccccggccatggatctcctgcacggggagagcgtccagaccacggtggccatcgccgtcgccgtcgtcgcggtcgtcttgtgctgtcccttccttcctcctccggtccaggaagcccaagggctgtttggatcctgagatctttaagaagtttaaccttgtggaaaagaagtatatttgtcttttcgtgtccagattcaaacttgctctttcaacttccaacctctgtattggtcctttcaattggtcagtattttattttgcattaggactatgtgtttcatgttattacttttttaatcttttttccctttctacattggttcttgattctatgtatttttgtgtttgtttttaaatgttctct

SEQ ID NO: 411694 - DNA, 485 bp, Oryza sativa
tttgtttttttattaaaaaggggaaacccaaatcatcagcgtgctcgaaacaaatgaattgtgcacagttcaaaacataaagatttatgaactttagcagttctgttagaagcttgctggtaccattcaggtaacattgacaaaaattgcaagtgctcccatgaagaaaatgcttttgcagcagaggaagaaaacagaaaattctaggcatgggaaaccccagtggcagaatgtacatcatactcattatttgaaatgcttccgcttaaatgctcaaaacattttaatgaaagtaagaaacagtggtccctcagttgacaacatcaaggaccagcttgcgtgacttcaggacggaccacctcatgcgacggtagtatgcggcttggagaagtgcaagtgacagtaggaagatccatttcactcccatcagtttcctctcttccatctcaggttcagctgcccatgacaagaacgaaactacattc

SEQ ID NO: 411695 - DNA, 455 bp, Oryza sativa
tgtttgtgtggcctacactgaagaagaaacaaaggctgtggctgctgagattgaggtggttgatggtcctaatgatgagggtgaaatgttcacacgtcctggtaagttaagtgaccggttcccacaaccatatccaaatgagcaagcagcccgttttgcaaatggtggggcatacccaccagatctcagtcttatcacgaaggcaaggcacaatggccagaactatgtgtttgctcttcttactggttaccgtgatccacctgccggtgttcagatccgtgagggtttgcattacaatccctacttccctggtggtgccatagctatgcccaagatgcttatagatggagctgttgaatatgaagatggtactcctgccactgaagcccaaatgggcaaggatgtctgttcgttcttgtcatgggcagctgaacctgatatggaagagaagaaac

SEQ ID NO: 411696 - DNA, 507 bp, Oryza sativa
gggtatttatctccggtcggcggcgggatgtcgatgtcggggtcggacttcggcgccccgtgcgacgaccccaagatcttccgcaacatctgccgggatcgtatactcaaggacttgctgcagtcggacaaagataaggagaccaaaagctcatggaaggttcttatcatggacaaatttacggtgaggatcatggcttatgcctgcaagatggcagaaattaccgatgcaggaatctcgttggttgaagatcttttcaagcgaagggagcccatgccttccatggatgcaatctactttctccagccactgaaagaaaatgtcataatgcttctatctgacatgtctggtagatgtacactgtacaggaaggcatacatattttttatgttaccgattcctaagagctggtctcttacactaagaacgacagcagtgtgataccacgtattgggtgcactaatagagatgatatttgggttttttgtatttgaatgtaggattcac

SEQ ID NO: 411697 - DNA, 262 bp, Oryza sativa
tttgtttttttattctttttgttttttttttttttttttttttttttatagggaatcaccacctttattcgattcttcgtcggcatcgctgtttggtacattaccatggcagttcaagcgaaattttcagaaaactaccaccacataggcttacatgcgaacatgcatactacatacaacggcgcctttgacaggcagcagagtttccaccattccatggctatgtatttattattcttcacccggggcccccacaacaggc

SEQ ID NO: 411698 - DNA, 366 bp, Oryza sativa
tttattataaggcgctgcatgaaggtgagtgggggtcggtttatagatcaactggtgaagcgatcattggcaagcatccactctgcccaccagcccttagtggtgatttggaaacttttcatgatttgggtggatgaagttaggaaactcaaggttatggcaaatgctgatacccccgaggatgcaacaacagccagacagaatggggcagaaggaattgggctatgccggactgaacatatgttcttcgcttcagacgagaggattaaggctgtcatgcagatgattatggcttcaagtcttgaactgaggcataaagcactagatcgccttttgccttatcagaggtctgactttgaaggcctt

SEQ ID NO: 411699 - DNA, 477 bp, Oryza sativa
tttttgttgtttttttgaaagggggaaaataatttgcaggaaaagaacggcatcattcaagcccccgttttcacttccctgcagttgcaaatgcttgttcatgtgataactgcaaactctttggcgccatactagctacatcccgctgcacaggcactcgtttatgtgactgcagaatagcaaaaggagatgcgaatcgcaggagggaaacgaactcccattggaaagaaacggggaaaatgggaggaaaacaagctacactgggagctcagtcccatgagctcctgttactactcgacgctagcatactgggagtgagatgctgcaagaagtgcagctccgatgccagagccatcgtttgccaacttgacaacaactgatgaggcagcctcctctccaagcaggtctgcaagcgttgcttctaggcaggttctgaacttcttgtaatgctcatagagaccaccatccagagcaatg

SEQ ID NO: 411700 - DNA, 153 bp, Oryza sativa
cgattactccttggacttggaaagtttaaacccaggcgagcagatatatgaaaagaggatctccggcatgtatcttggagagattgtgcgcataatctcgcttaagcttgctcatgatgcttgcttgcttggagatgttgctcccacacaccc

SEQ ID NO: 411701 - DNA, 496 bp, Oryza sativa
tttttggttgactatattaaaaagggggaatagcttccatcatttcatttattttgtccaactttatatatattagaaaccatataattcacatgataaagaactacatacaaaaccatacacgggtatttctcaatttgtaccattagaagttctccttgtggaaatcaaatcttgtgtttgtcttgtgggtgaaatctgctgacaactgccttagttggggaaccagcacaggctcaccacagtagaacacaccgacgcgctggttctcatggttgaccgcaaccttcttgaagacgcttcgccaattaggtcgtgcgaaatgggtcttcacactagttcccgacaagatatcgacgcccttcttcgcatgctgaagttcttggagcatgacaatgagagcagaacgagcatcgccttcctggtacacgcttgagcagtggatatggagctcaatgactccatccttggccttctcagacacctcgttcatgac

SEQ ID NO: 411702 - DNA, 477 bp, Oryza sativa
gatctgtataacatcacgcatgatcctcatagagggcccatctgcggtggaatgggcagggaacttcttatatccttcaaaagatcaactggtcaaaagcctcaacggataatattctatagggatggtgttagtgaagggcaattttaccagggtctattgcatgagcttgatgcaatccgaaaggcttgtgcatcactcgaagcaaattaccaaccgcaggtgactttcattgtggttcagaagcgccaccacacgagattatttgcacacaaccacaatgatcagaattcagtcgacaggagtgggaacatattgcctggtactgttgttgactccaagatttgccatcctaccgagtttgacttcttcttgtgcagccatgctggaatcaagggcacaagccgtcccgctcattaccacgtcctgtgggatgaaaacaacttcacagctgatgcgttgcagacccctaccaac

SEQ ID NO: 411703 - DNA, 477 bp, Oryza sativa
tttgtttactgaattacaggggtattcagaatgacagaatacacaagcggtccatacggaacagaaagaccgaagacgatcaacagaattcagagaaacaggctggagtttccattgtccatcatgatcccatatcacacaagactcatatttaccgacgaacatacagagtttcaccaaggcagtagagaacattcatcacataatagctcaagtgcaaatagagcagagcagatgtttggcacggttcacatgccacgacccatagtctgctcctttggtggcgtcatgaccaagacagatcgcccgttgaagccaggatgggggaccctgcgccgcagctcgcgtccctcctggcagagcgcacaagggtgacagaagtagtgagttgcaaggtctcaggcaacctccaggtgctcacggttcccctcatcctcaacaaggccatggcagcacccacattgcttagtgaaagca

SEQ ID NO: 411704 - DNA, 521 bp, Oryza sativa
tgcttatttgagctgttggaagagagagaagcagggaaaacttttgacgtctgttttaagcagatgaaggcttttgcagacagtattacaaactgggcggatgtagtaattgcatatgagcctgtttgggctattggaaccgggaaagttgctactcctgagcaagctcaggaagttcatgctgctgttcgtgattggttgaaaaccaacgtgtcacctgaggttgcttccggcattcgaattatatatggaggttctgtaaatgcagccaattgtgccgagctagcaaagaaagaagatattgacggcttccttgttggtggtgcctctttgaagggtccggattttgccactattatcaactcggtgacttccaagaaagttgcagcctgatgtaacccttctgtagaaataaatgacccagaggcagcgagacggctaccacaccatattgcttgatagagatacttcgtgttcaacacccggctttgtttggcacaccagggaataatgcaagatgc

SEQ ID NO: 411705 - DNA, 264 bp, Oryza sativa
  unsure (1)..(264): unsure at all n locations
tttgtacccaaattcagtgctgcgttttgcctttagcnagttttccaatgatgggggggcaagagcagctttaacacttggtggaaccgtgcttggttattaccctgtgagagttctgccatctaagaccgcgattttgccggtgaaccctaaatttttacctcgaacagaggacgagaaagaaatggtgtcaaggactgtgtattgtactaacatcgataagaatgttcctgaagatgctgtgaagagcttttttgaggggat

SEQ ID NO: 411706 - DNA, 349 bp, Oryza sativa
tttttgttttatcattttgcggggaggaattgttttcaagaattttaataaggcaaatccacacaagagagaggacctgaatccaagacttagttattcttaagtacagcagattttctattcctccatgatcctatgagcttctacacctaaaccacacaaatgaccatgcacgggatctatttctccactggcaaataaactgggggttgcgtggtcaatgctccatgttgagatcagtagctcattcctgttaagcacgctacaagggtgtcggagattagctcacggtcggatgctacgggtcaaattaaccccgtcgggaggagcttgacggtgagctcgacgt

SEQ ID NO: 411707 - DNA, 221 bp, Oryza sativa
gttttgtattagcaatggccgccctcgccgccgcatgcaccgccttcgccgccaagccgcgcctggcgcgcgcgccgtcgtccccggccgtgcggatctccgtgtcgtgctccgcgtcgggcaacaacggcggtgccggtgagatggcgcagtcgctggcggcgtcggacaagacgttctccgcggcgctggcgctgtcctcggcgctgctctcctcggcg

SEQ ID NO: 411708 - DNA, 466 bp, Oryza sativa
tttgtttttttaagatcgagggtactgatcgtccaataaaaaatagcaaatgagttacatctatcatacagaagtgcatgacaaaggacctaaaagcaaaacaaaacaaaatgggaaaactggaaagcccccttccgtcagtagcatcttgtaggttcaatcagttcagagaagagcgcccatatctccagctattgtaggatctccgagtgaactgctgcggcgcaaaacttaacccaaacatctctctcagggccttccctggctcaaggagtccgatcagtctggcaacaagggatgcactctccctgacatgctccaggtctttggtttcggtccaaaggcaacgagcaacctgtagccttctcctcttggaggcaagtgaaaccccccatttggtgtacatgctctctcgttcctcgattgagagccgtctttgcatctgcctgcagagcatctccctttc

SEQ ID NO: 411709 - DNA, 468 bp, Oryza sativa
ggctcctccctctctctcgctcaccgcctccttctcctcgcgatctatccaaacaaggggctcgctaagatcggcatgtcggactctgaggagcaccatttcgagtcgaaggccgacgctggggcgtccaagacctatccccagcaggccggaaccatccgcaagaatgggtatattgttatcaagaaccgcccctgcaaggtggtggaggtttctacctcgaagactggtaagcacggtcatgccaagtgtcactttgttgccatagatatattcaatggtaaaaagcttgaggatattgatccttcgtcccacaactgtgatgttccacatgtgaacccgacagagtaccagctgattgacatatcagaggatggattcgtgagccttcttactgagagtggtaacactaaggatgatcttagactcccaactgatgacagcctcctgggtcagatcaagactgga

SEQ ID NO: 411710 - DNA, 470 bp, Oryza sativa
gccttccttttcagaagaagctttaaggaggctttgagaatcttctggaaaaatggagctgcttgacaagatgatggtgaaactgaaagagcagggtcacagggttcttatttattcacagtttcagcacatgttggacttacttgaggattatttaagctaccggaaatggagttatgagcgtattgatggaaaaataggtggtgctgagaggcagatacgaattgatcgcttcaatgctaaaaattctactaggttttgctttcttctttcaaccagagctggtggtcttggtataaatctggcaactgccgatactgtaattatttatgacagtgattgaaatccttatgctgatttacaagctatggcgagagcccatcgctaagggcagacaagcaaggctatgatttataggctggttagtcgcggtccattgaggagcggatgactgcacttacatacgaaaa

SEQ ID NO: 411711 - DNA, 499 bp, Oryza sativa
  unsure (1)..(499): unsure at all n locations
gtcttagtcggcactgtcggctcgtctgaggccatcatgctcgccggtttggccttcaagaggaggtggcagaacaagatgaaggcagccggcaagccatgcgacaagcctaacattgtcaccggcgccaatgtccaagtttgctgngagaagttcgcgcgatacttcgaggttgagctcaaggaagtgaagctgagtgacggctactacgtcatggacccagctaaggccgtggatatggtcgacgagaacaccatctgcgtcgcggcgatcctcgggtcgacgctgaacggggagttcgaggacgtgaagctgctcaacgatctgctcaccaagaagaacgctgaaacaggctgggacacgccgatccacgtggccctgcgagcggtcggttcatcgcgccgttcctgtacccggagctggagtgggacttctggcttgcgctggtgaagagcatcaacgtgagcgggcacaagtcctgccttctttaccccggatc

SEQ ID NO: 411712 - DNA, 477 bp, Oryza sativa
tttgttttttttatgaattggggaaagcttcacaatccaactgagatatagctttgggataacgatatgtagcaaaaattcaaacaaggtactgatgatatgcaaaacctccatatcaagctggcctacagaaggaactattacagaaaaatagatcatcctgaagacaaccaattcttaaaacatgagttctagcatgcaaaattagactagctaaagcaaaatctctcaagttccattcagcaagaggcatctaggcggaagcttgaatggtctcagccagaaacgccttcccaggggcacgcttcgcaagacgaccatgagaaccaagcagctgagcattgacaccatcagacataattctgccctcagccttcaacttgacgtactcctcacgggtgaacttggtgaagccccacttcctgctgtggatgatcttttgccggccagggaacttgaacttggcacggcggagtg

SEQ ID NO: 411713 - DNA, 397 bp, Oryza sativa
agatatttttgatgaaaccgatcgcattactgggagaacgggtttgtatatcaaatgtgggcgtccatttgagtatatattctgcacatgttggaaacctgacacttattgatcttcctggattgacgaacgttgctgtacaggggcaacaagaatctattgtgcaagatattgaaaacatggttcgggcttatgttgataagccaaattctatcatactgggcatatctccagctcatcaagatatagcaacatcagatgctatcaaccttgctagggatggttgatccttcaggtgacagaacctttggagtgtggaccaagcctgattcgatgggtatgggtaccaatgcttgtgatgcacttgaagggaggcagtatcggttgcaacacccct

SEQ ID NO: 411714 - DNA, 377 bp, Oryza sativa
gtcttccttctccgtggtggcatgcagatctttgggaagactctgaccggcaagactatcacccttgaggtggagtcttctgacaccatcgacaacgtcaaggccaagatccaggacaaagagggcatccccccagaccagcagcgtctcatcttcgccggcaagcagctggaggatggcaggacccttgctgactacaacatccagaaggagtccacccttcaccttgtccttcgcctccgtggtggcatgcagatctttgtcaagacactgaccggcaagaccatcaccctcgaggtggaatcttttgacaccatcgacaacgtcaagggcaagatccaggacaaggagggcatttcccccgacccagagcgtct

SEQ ID NO: 411715 - DNA, 485 bp, Oryza sativa
tttgtttttttttggtactggggattggtcgtttatttactgcaaatctgtaggtagcaaatacaaatccaataccctcttttacggtttaaattaccacacacggacacgccaaggccctataatcacaacataaaacaacatcacatctcttctgatcgatctaaaaaataatcccaatcccaatataatccgtatatatgcaatgcacttaaccgttctatgtactacacgtatgaacgtatgaatcccccccgatgatggagttggctggctagagatccatgtcgagcacgagtgggccatctcccttgccgacgtcgaactgctggtgcttcatctcgccggcgccggtggtgagctgcacgacgtacttgccgtggaaccccctgaacttgaagtggccgctgccgtcgacctgcccccgcgcgtgcgacgtccactcctgccggagacccacgtagcggtggccggcctcgttgagc

SEQ ID NO: 411716 - DNA, 486 bp, Oryza sativa
tgatgctcaggcacctcaggaagaaaactgacaaggtgcgcaagcgtgatgtggtgctcaagctggggcggcgaacgggcggcacggcgatccgcgtggtgcaggtggagaacagctttcccatcggcgcgtgcatcaacaagacggtgatccagaacccggcgttcgtggactttttcaccaagcactttgactgtgcggtgctcgagaacgagctcaagtggtactacaccgaggtggttcaagggcaggttagttactccgactccttctaggctatcgtcttttgcaccttctctttacgctctttctcttcctctgtttattctggttcctcattagtctctttttcatttcctttcttacctctttatgtccttcagtttctaatccttatctctctttttctttttttcccctattttttcttattattctcctacctcactttcacttccttctttctatctcttttcttttattctc

SEQ ID NO: 411717 - DNA, 339 bp, Oryza sativa
tgtgttttttttatttttggggggttaaaaataacttcacttctaaaagagtatcaacttgttttttacatcggttacatcatagaacaagtacacaatcaacaaggcatgcagtgctccatccacaattacatcccaatacaccaccaccattcacaggctactccgaccccaaaaaagagaggtaagtcgcgtccactaacagacttttcatcttgctccatgggcagccattgctaacactccaacacctgaagaactcctcatttgggggtgaaggcctggaagatggtggcgtggccggggtcacctagatgggcaaagaggttgtctacgggg

SEQ ID NO: 411718 - DNA, 341 bp, Oryza sativa
tttttaccaccaccctcttcatcatctatctcgggcggatcttttgaccgaggggcgcctttacccccacatcatcaagcccggctgctttaacaccgaccccatctttcacaacaacaagttcacctggtacacgacttcactctacccttgtaggtatgtggttagacccgctcggatggcgcaccggctcgccagagaagatcaaggagctgggcaccaaggagaccaagaacggtcggttcgacatgctcccagcattgggagctttgctttcacgcagagactaccgcaccctactccatatgcaacctatttgcccatatcgcctaccccggcca

SEQ ID NO: 411719 - DNA, 474 bp, Oryza sativa
ttttggttttttaaattctggggtcatatcatttttatcctctttggaccagctcatcatcatcaacattatacaaaagggccaagatggccaaggaaatatacttgtctgacaaggtaaaaaggacactcgcctgaaagaaaaaagaaagacagaatagagtccggatctccatgtgaatccagacgtaaatggaattagagcattctacggcaatgatctgcgtgtcgcaaatgtatgtctatctcttccagctgtgacttcgctaaccgatcatttccacgcgactgagtcgatctcgttccgggcagatttgtacagctctagcctgttgactaaggaatccctctactccatcaaagcgggatcctaatccaacattgggctgagctgttacttctccttgcttcccacatgagcatagaaacggataagcaagtttctttttgcctccttcacttgacagtgcaccac

SEQ ID NO: 411720 - DNA, 434 bp, Oryza sativa
ttttgttttttttatttattggggaagcatactgctgtcccacaggaaactgtttcataaaactaacatatcatacggactcgatggtccattaaaccagacacaagtagacatgagcaccacaaatacttgacgaacagaggctcgggatgaccaggcacatcggcagctccaccaaactggctgattactgaccaccacggaggcggagcaccaggtggagggtggactccttctggatgttggagtcggcgagggtgcgtccatcctccagctgcttgccagcgaagatcagacgctgctggtctgggggaatcccctccttggcctggatcttggccttcacattatcaatggtgtcggagctctcaacctccaaagggatggtcttcccagtcaagggctttacgaagatctgcataccaccacggaga

SEQ ID NO: 411721 - DNA, 343 bp, Oryza sativa
ttgcatagtaagaaatgggcacataccatacagagattcaaagctcacacgcatactgcaaccttctctgggtggtaatgcaagaactgcaattatttgtacaatgagtcctgcccgtagccatatggaacaatcgagaaacactctgctatttgcaagttgtgcaaaggaagtagttacaaatgcccaggttaatgtagtcatgtccgataaagcactagttaagcaattgcaaaaagagcttgctaggttggagagtgaattgcgatgtccagctttctattctagtcttgaatcattggtgaaggaaaaggataaccaaatcctgaagatggtgaaagaa

SEQ ID NO: 411722 - DNA, 456 bp, Oryza sativa
tttttgtttttttttttttttggggaggttcaactattatagcatcaagccatcaacaaacttttgataatacagacattaacgggactttcagttcatctgatcctctcgggagaaaaagccaaaaagaaaaaaagcaaccacaggtggctgcatgctctatggaacgatatggagttcactgacttcgagatataacaaagcaagctggtcaaacatgtcattactaaaaatgggcagcattaactcctacgatcatctgggtgcaacccagaacactaagcagaagacttgacggtagcagacttgatgatgtccacaaattcaggcttcaatgaagctcctccaacaaggaatccatcaacatcaggtttagcagcaagttctttgcagtttgctccatttacggagcctctgtaaataatcctggttgattcagcaactgcaggactaaca

SEQ ID NO: 411723 - DNA, 380 bp, Oryza sativa
agtgcgttgttttcttcgctcgctgcaccctcgactcggtgatccatccatggctgccaggaagttcttcgtcggcagcaactggaaatgcaatgggacaggggaggacgtgaagaagatcgtcaccgtactcaacgaggtcgaggtgccctccgaggacgtcgtcgaggtggtggtgagcccgccgttcgtgttcctgccgcaggtgaagggtttgctccggccggacttctccgtcgccgcgcagaattgctgggtgcgcaagggcggcgccttcactggcgagatcagtgccgagatgttggtgaaccctgcaggtgccttgggcgattctgggacactctgagcggatagcgctgttcggcgaatcaagtgttctt

SEQ ID NO: 411724 - DNA, 277 bp, Oryza sativa
tgtggtttactacgcgaaggggggtctggaaaactttattcaagttcatattatttgtctctgcaccgttacatgcatgcattgagctttgcaatatgcaggcagaaagcttattcaaacccaaactatatatggaacgcgtgtatgtatatatctatatcgagcgacgtttaattcatcatcgatcgatctcttctcagaacaatcttcttagaaattgatggagtatgccggcgactggtccgggttgaagaggccgaagtgcctctccgtctcg

SEQ ID NO: 411725 - DNA, 289 bp, Oryza sativa
ttagttacatcctccaggccctcagcggctcaagcggggccctcaccatggacgtcggcaacgatcagctcggctccctcgcctccgacccctccgacgccggcgccttcgtccagaacaacatccaggcgttcccgggcgtcaacttccgctacatcaccgtcggcaacgaggtttccggcggcgacacgcagaacatcctcccggccatgcagaacatgaacagcgccctctccgccgtcggcctcggcaacatcaaggtgtcgacgtcggtgtcccagggcgtgac

SEQ ID NO: 411726 - DNA, 507 bp, Oryza sativa
ttgatcctcccctccgccgccggccttgcttcgggcggattcctgctcttcgaggcgttgtttaacttcacaatgaagctgatcgctgcctacctgctcgctgttctgggtggaaacacctctccatctgctgatgacattaagaacattctggaatcagttggcgttgaagctaatgacgagaggctggagttcctgctctcagaactggagggcaaggacataacagaagtgattgctgctggaagggagaagtttgcttctgtgccctcaggggtggttggtggcatagctgtggcagctcctacagttgcaggtggcggtgcaacacctgctgaagaggcaaagaaagaggagaaggtcgaagagaacgaagagcctgatgatgacctggcgtttcagcttgtctgactataccccttcagctgcattttatcccctcgttcaccccagcatacttcttgcattggttggtttaccactttgtgtgcaaaaatgaacattgtg

SEQ ID NO: 411727 - DNA, 497 bp, Oryza sativa
tttcttcgccgcctccatcgccctccgggctcggcctgcgtcgacgacgccatggggagaaggcctgctaggtgctaccgccagatcaagaacaagccgtaccccaagtcaaggtactgccgtggtgtccctgaccccaagatcaggatctatgatgttggcatgaagaagaagggcgtggatgagttcccctactgtgtgcacttggtgagttgggagaaggagaatgtctccagtgaagctcttgaggctgcccgcattgcttgcaacaagtacatgaccaagaatgcaggaaaggatgccttccacctaaggggcagggtccacccgttccatgtgcttcgtatcaacaagatgctctcttgtgctggggctgataggctccaaactggaatgaggggtgcttttgggaagcctcacggtacctgtgctccggtggacattggttaggtttctccttttttttcgttgcaaggagagcaatgttaaacatgctg

SEQ ID NO: 411728 - DNA, 564 bp, Oryza sativa
gatgacgcgtcgtagcttggtcctcttagcggcgcctttttttttggttgttaaagggtaagtgcataaaattccaactttatgagaaaactgagtgggcgcacctagaccatatcaaaggacaagctacatgaatgttccttccatgcataccggacatgacacttcattattcaaagtacagaattcacacctagaatcatcaagacaacagttgtgaattcaaagagaacccacaaagtgacaccacacagaggtactgataccattcaagtcctcaaatgggcggtccattactctttctcgccagcttagtgccactctgtgtggaacgtacctggacggtgaatgcgctcataggtgtgtgccccaaacatgtctctctgtgcttggatcagatatgcaggcagccgactacacctggaggtggcaaagtatgaaaggctagcatacatacctggagtgctaatgcgagcctccacagctcgagccacaacccaccgccatgcattctgcctgtgaaccatatgccttgcaatctcctgcccacgatcagattgggca

SEQ ID NO: 411729 - DNA, 511 bp, Oryza sativa
ttgttttttgatgagtccagctgtgaataatagttgataataggttatattacttggcatgttggcctaatagaatacagctaattcagttaatattattctctagcaaataatattcgtcaaatgcagacatgcatcatagtggctccatatagaagttaaatttggcaaaatcttataccataaagttcatttttggtttttggttcttaacaaaaataaaatctgtttgcagtgacatggaatgtgacctgcacatactcccaatttcttgctcagaagactccttcctgctgtgtatctctctcatcattttataatgacacaattgtgaactgcccaacatgctcttgtggctgccaaaacaatgggacaagtcctggaagctgtgtaaagtgagttaataaaaccaaaactcttacttcgcttcttgttgaggcccaacttttctgcaaaattgctaacaagttccatgcatttccacagtgagaattcaccttatttacaatct

SEQ ID NO: 411730 - DNA, 204 bp, Oryza sativa
gtttttgtattttaaggggaaacataattacgtaataccatccattttttttattgtcgacgaatttatcagatatgctctagatacatatcttgtgtgtatatagccggagctttgttttcacatatcctcacccaacgataattgtagtactcttacaataaaaccggtcggagagggagggaagagattattacatatgtg

SEQ ID NO: 411731 - DNA, 481 bp, Oryza sativa
ttgtttttttgaattaattggggttattttgcataatccagcatgcatgcacacttacataatactccagattcaagtccagtgcatgtgcatgcagttaattaaacaactccttggttcggatacaaattaaaacactagaacacagtacgtacgtacgtagtagaactcatcacgcacatttttttttgttggctacgtacatagcacagcacgtacgtataatagtacgtataatacgagactaattaatcaagatacgtaggtaattaattaacacggatcgatagcataacacagtaggtcgtacgtaattaattaactgattaattaattacgcggcgaagagagaggggcacacgcgataataatatatcgtcgtcgtccctcctgcgcgcgcattctcgaccggccgccgccgcgcgccggcgtgcacgccggcgatcggtggccggccggcaggccgcgccgccgcgattag

SEQ ID NO: 411732 - DNA, 505 bp, Oryza sativa
gtgtttttttgttttttttgtttttttttttttttttacccatccaagaaaggattctaccccaatatcaatttaaaccgggaaccagagtctgaaatacaagggaatatccttctagctctagatttgaatgaaatattacaattgggttggagcacatcaaatatcatcgactggatcttcttgccccttccatttttcctaccagaggggggaggctgccaatcagtctttcgaagaactggtgcctgggctctttttcccgccatatttttggttcccaacgctgaagggaacatatttggattttatcatgggcacaatctggcgcttcatcggggggacaaaaagaacaacccagtagcagagaagtttcggcccgaagacaggaacctcaaatacagagaagaaaggcatcacaaaagctataagaaaagcttttgtgattgcataccaaaacttgaactcggggaggcgcctgatgaagggcttgaacctcgcggag

SEQ ID NO: 411733 - DNA, 523 bp, Oryza sativa
ttgtttttgaaaggaaacacagctcattttttattgatatatgttggatgaatccaataaaaccgatacaagtcacgaaaaatcagactagatgaatccttcgagatcacatgagcaaaagctttcgacgaaagctgtcctatagtcgtggaagcaataacacttgataaagataggaattcagacacgagaggttgcagactataagatgtcatcaaatctccttgaacgccgcgaagagatcaccgttgatgtagtcgttgtccacaagactaaccaagaagtagctcttctggaccttgtctagtatctccctagatgagtcgccctcagggaacaggcaagcccaaccctttgaccaaatttcgaaagcttcgtctttccaaaccataaagctggctgagtcaacgacagttggctggactatttccttgccagggaaaacaccccatgtgaccgcattcacagcgtttgtgggaatgtttgagaatgactctccgtccttgttcacggcaatgtatgt

SEQ ID NO: 411734 - DNA, 406 bp, Oryza sativa
tttggttttttttttttttggggggggaaacataattttccattgaagtgaaataagaaggaaaagaataaactgagtgcgattacatcatgtctacttatgaaacagggataacaagaattttttttctcaaacacaggaaataccatctaggaaagttacctaattgccacgacttgtcagtcacacgagataatcacaaggcagaaaggagaaaatgaaacaaacggatcgctcattgcctcgacaaagaggccttgctgcagctgccagtaaactaggatccccggaccatgaatgctgtttcgctgaagcaagacgcaacaataataaagcctggcaacttcatcgttcttcttcttcgtcgcctactgatgattagatcacaaaatggagcacgcccccc

SEQ ID NO: 411735 - DNA, 509 bp, Oryza sativa
gcccttttcttttggttctttaaggaaagggggcacaacccacactgacacccactcgataaactccaataactcgacccagccaccgaaaaatcagactagacgaatccttcaagatcacatgagcaaaagctctcgacgaaagctgtcctatacttctggaagcaataacacctcgacaaagataggaatccagacacgagaggttgcagactataagatgtcatcaaatttccttgaacgccgcgaagagatcaccgctgatgtagttgttgcccacacgactaaccaagaagtagctcttttggaccttgtctagtatctccctagatgagtcgccctcagggaacaggcaagcccaaccctttgaccaaatttcgaaagcttcgtctttccaaaccataaagctggctgagtcaacgacaagttggctggactatttccttgccagggaaaacaccccatgtgaccgcattcacagcgtttgtgggaatgtttgagaatgactc

SEQ ID NO: 411736 - DNA, 423 bp, Oryza sativa
ttttgttgtttacagagaacggacgcatataatctgaataacatgtaaccagcagcgcctcatcttcgccggcaagcagctcgaggatggccgcaccctcgccgactacaacatccagaaggagtccaccctccacctcgtgctccggctccgcggcggcgccaagaagcgcaagaagaagacgtacaccaagcccaagaagatcaagcacaagcacaagaaggtgaagctcgccgtgctccagttctacaaggtggacgacgccaccggcaaggccaccaggctcaggaaggagtgccccaacaacgactgcggcgcgggcaccttcatggccaaccacttcgatcgccactactgcggcaagtgcgggctcacctacgtctacaaccagaaggcctaggttgatgcgagcagcatcaagca

SEQ ID NO: 411737 - DNA, 482 bp, Oryza sativa
ttgttttttatttaggttgagatccaacttattcataaagcatactgctgtcccacaggaaactgtttcataaaactaacatatcatacggactcgatggtccattaaaccagacacaagtagacatcagcaccacaaatacttgacgaacagaggctcgggatgaccaggcacatcggcagctccaccaaactggctgattactgaccaccacggaggcggagcaccaggtggagggtggactccttctggatgttgtagtcggcgagggtgcgtccatcctccagctgcttgccagcgaagatcagacgctgctggtctgggggaatcccctccttgtcctggatcttggccttcacattatcaatggtgtcggagctctcaacctccaaagtgatggtcttcccagtcaaggtcttcacgaagatctgcataccaccacggagacgaagcaccaggtggagggtagactccttctggat

SEQ ID NO: 411738 - DNA, 527 bp, Oryza sativa
tttgttttttttttttttttgtttttttttttttttttgatagggccaacatttaactgatgacaaatggacaaattacatgagaagatctgaattttttgattatgccaccacaaagtaagttccaattttggtaccaataacaaatggaatgccagacctatgtcagaatagatgtacaattacgatggcattcttgggtaaatgggagcaaagaataattagcatttctcacatgaaaaactgaggcaaatttttgcaattttgccactagccccgaaggagcacagttcgcaatccagtaccctggggcaattttaaatacgatccctcagtctgatcattggtgaaataattcacttctattgacccttattttggctgattgcccctctggttcaacatcgttaacaactccacgggattttgggaatccacaataacaaggaaggcgctgatcactcgaaacaaacctataatcataagtcaactcttcccatggatttatatcccgctttgcaaaaatg

SEQ ID NO: 411739 - DNA, 466 bp, Oryza sativa
ttgttttgtaataaatatgggcagtagctcaattcaggcaatcaagacaacatgtaaggagccgaacacatcggcaacctgaataacaagtggcaacctgaataataacaagttaagtttatgcagtataagaactgaaccttggatctaataacaacaacaacatggccatgggacacgaaaaggtttcacctttgcggccacagctcacaccgcggagggctcctcgacatctctgccccttccgccgacgccagcggcgctgtggtgcggcaggtcaacgccagtggcgccctcgggtatcagggacgcggggcggttctcaattaccttggcgatgagcccccaatcgcgcgcctcctcggggtccatgaagaggtcgcgctccatgcactgctcgatcttgtcgatctcctggccggtgtgcttctggtagatctttgtgaggcggtcgcgcaacttgaga

SEQ ID NO: 411740 - DNA, 431 bp, Oryza sativa
tggttttttttttttttttgtttttttttttttttttttttttttttggcaaataagggggaaattttccaagcacagttggacaccacgcatacataatacaacattattagtaactggtccaaaatgtcaagagacaacacacggtttaaccgctggatcattgcacacatcaaggggtttggtaaatgaaatgaagttcttgggttgatcgatagtaatgcatgcccatgccggtaagtaacacgagcactggaatttattcgccggcttgttatctaaatcgagcgatgatccggtgtccgggggccggccggccggaaacaagcaggccgccggcggcgggggcggcggtcgcaattatatattaacccaggcgcaggtcgtggttgcccccctaggccatgccctgcaggttgggctggctgggc

SEQ ID NO: 411741 - DNA, 384 bp, Oryza sativa
ttttgttttttgaatgtttttgttttctaccaaacaccttccttcagtaatttgacagccgttccaggtccaccacaaatctcgctatagtgaccctgtttatcccacttcccatgggaacaaatgaaatcgagttgaaacttctcaaatctaacgaaagttgacattgaggggtacggcccaataattgccgggcagtgacctgcccggagaacaaggaactgcaacttactcatcattacccgtagccggagttgtccatcgggttgcttacgggcgcaggctcaggctcctttatgtttacgaccaccacctccgatgtgaggaatgttttggacaccgtcgcagactgctcaagacaacatcttaccaccttagtggggc

SEQ ID NO: 411742 - DNA, 402 bp, Oryza sativa
ttgttctttgataccttttgttttttacctttttttttaaacctgaccgtgataactgttaaaccaataagaaaaccatgaaaaacatttcaattcctgcaggggctgaggagccggatggcggaggagtccaaggagacggtggcgcggctattctacccggtgacgggggagaaagcccaggagagcccgggggaagccctcatctcgtcgggggagagcgagaccttccttcaaaaggggatccaggaacaagggggcggccaggtgctcaacaccatttccgagatccatgagcggtacgaccccccgaaggaaaacgagcgcggcctgttcaaccttccaccaggggtcccctcacatggggggcctcgtcgaggcccagggcccccctcttaacca

SEQ ID NO: 411743 - DNA, 455 bp, Oryza sativa
tttgttttgtgtatatagccggagctttgttttcacatatcctcacccaacgataattgtagtactcttacaataaaaccggtcggagagggagggaagagattattacatatgtgttaagagcagaggccattgagatggtacataaccaaattgtaaaataaaaatatatagcatattatatattgatatatcatcaacatagcccaaaacaaagctgcatactattattataggcagcaatccaccagcgcgatgcttgatcttagcttagttgccaccagactcctcgcaacctgggggcttgtaggcgatgaagctaattaactgcacctgcctgacgttgtcgaagccgatgatacggacaaaggcatcggggtaggccttcttggcctcctcgagctccttgagcacctgggtggcatcggtgcagcccaacatgggcagctttcaca

SEQ ID NO: 411744 - DNA, 449 bp, Oryza sativa
tttgtttttggacaagcaaggggtatatatattcatccatttctcaaactactacaagaggtcgagaggaacacataatcaggagggattgcgacaatttacagcaacaggagtctggagatcgaggcaagaacaagacaggcagcagcagagctaccctcttcatttccactgaatttttacacatttggaatccatggaaaccgagccttccctcccgtcgtcgtggtgtcaccggagtccgatgagaaaaatggtcatggcgtgctcataatccggatcgctcgccggcgtcggtgaaggaggcggggcgattgttcgggcggctgttgaggagtgggttcagagccttgacgacgatgctcatgttgggcctgaagtccgcctcgtactgcacgcacagcgcagctacggcagccatcttggcaacagccttgggaggataatcc

SEQ ID NO: 411745 - DNA, 476 bp, Oryza sativa
ttgttttttagcaatgcatagatattatcataggtttatgtatataatatgtcaatcttgttcggtcatacagacgattcgacgaattttgagcactaggtatttagcaaaactctcatttattccgcaggctctctccatatccaaggaaggaaggtggaaattggggggaaagggagataaaaaaggaagaaaaaaaatgcttcagggaagaactctatacatgtgcactcaaagcatcggtttgagaagctcttttctgaatatttatggcacttcagcagttcagctgctaggcttctggtctgtaccaggtgaggccccaactgatgtcacaaaattgcagactgcgcatttgacagaccttgcgccatactggtacatgagcagcatacggcagttcccgcagtttacatgcgcaacttgatttgcttccatagccaggttgacagtgtgacagcaagaacattgcacac

SEQ ID NO: 411746 - DNA, 433 bp, Oryza sativa
ttgttttttgattttttttgttttttatttttttttttaaacccgaccgggataactggtaaaccaataagaaaacgatgaaaaacaatgcaatacctgcaggggctgaggagtcggatggcggaggagtacaaggagaccggggcgcggccatacttcacggggaccggggagaaagcccaggagagcaccggggaagccctcatctcgtcgggggagagcgagaccttcctgcaaaaggggatccaggaacaagggggcggccaggggctcgacaccatttccgagatccaggagcggcaccaccccctgaaggagatcgagggcgggctggtcgacctccaccaggggttcctccacatgggggcgctcgtcgagggccaggggcaccagcttaacgacattgagaggcacgtcgggcgcgccaacttct

SEQ ID NO: 411747 - DNA, 442 bp, Oryza sativa
ttgtttttttattttttttggtggcacaagaccatcaaaatttcaattttcaggtacaatgctaataagattttgcacaacagacgatgtccttgaggacggcagtacaacaagaatatggtcatgctgttgcaaaaaagaacagaaaaactcccctgttattcacctttagggagggagtcaggacggtaaatctacttacgacatgcacgccaatgtgctggtgacaatttacatgtctccaggaattaacacctgctggaaaagcctacagctgggcttcagggatcagtcatgcttgcacatctacatttggtcccagtcaatagaactggtgttttcaaaattataacttggttgctgtagacggttgcgacccaatcggctcatcatggcaagtccttccatgactttgtatagcgatgaccaccacctatcagat

SEQ ID NO: 411748 - DNA, 441 bp, Oryza sativa
tttggggttttgatttttttgtgttttttatgggccaatatacatcttggtttatgcttggcatgataagagggttgaattgaatacagtactgaggccccgacaagggaacgatacaatgcagtcttccatatgtaccataccttgatgcatcctggggaatttgaaccctcctcacccacaggatggggctatgtatttacaagggtgggtaaactaactcccccattattatcctaacttcctgaccaagacatttgtccgttcagttctccatataattgggtccttcacttcaccctctcgttctgatgatggttatggggccctttcctgccgtcctgatccttgtgaggctaacaactgctttgccggacaggcctagtccatgagcgtacacagcagggctgcacgcgaactggccgactgggtgccggaccg

SEQ ID NO: 411749 - DNA, 487 bp, Oryza sativa
ttttgttttttgaattttttggttttatacggcaattaaacctcgacattttattatatttgacacactggatatatagtcaataaactttaccgcaaattatgaaatgtacaggcactgcactgtaccatacgtagtttttgtgcagcatataaccataggctgtcacgtacgggcttttataccacatactagtccttgaacgcttaataataattaaaagggcgtgcatcacatcagaaaagtttcaacacgcttgcacacaaacacggaattactaggctcactcttggaggagaagatcaatctaatggggcgacttgatctgtgtcgtcacatccgtttttattggttgtcgcatcggccttcaggagttcagggtagccatgtcggcatgaaggcagtcacgcatgagttgttcatctgctctggagtaaacccgatctgcaaggtgggctcggcggcagcttccagggaatggaagaat

SEQ ID NO: 411750 - DNA, 465 bp, Oryza sativa
  unsure (1)..(465): unsure at all n locations
tttggtttctttacaagaggggatcatattgcaatcccaatattttaagaaaacacaaataggaactgaaatccagatccacacaatgctgaagtaactgaactgccgtttaacaaagataaagacagacttccccacaggttcaagttccaaaacacaccaagtacatactacatcacttgcagtctcagatataagatgccaaccaagttaagaaacgacgccgtcgctcagggtgagagcagctagctgatcagttggggtatttgcctgctgctgctgagcattacggagaacttccatagcctcagcgaccttggccttaagagcatcaggtgactcaatgagatggagaacttcagtctggtccatctccaagagcatgccagtgaccttcgctgcctgatcatgctccagctgatcacaagcgggataaacttnaccaagatcagtctttgtgatctg

SEQ ID NO: 411751 - DNA, 381 bp, Oryza sativa
tttgggttttgataaaagtggggggcagacatcaaaaaaaaaggaatggcaaaccccttacaagaataaacaacacctttggaagaatggaaaacaagacctcaatcctgcatggtttgtacgtacggcattatccattgacaaattatgtgtagcacaccaaacggaataaacgaatcacagccttggtcaaataatgtcaacgattgatcgatctcttgcacatgggaagatcggacggcggaggcatcagcttttggtcaggcaacgggccgtttttgaccacacatgccatcttcaacccccaggttgtgtgaacctccaggcggtaatgcatgaaccagtcacctgggttatacgcgaagaacctgatggcgaccc

SEQ ID NO: 411752 - DNA, 285 bp, Oryza sativa
tatcagctcatggctgcatgcagattcatttcaatgcagtacaggcatggcacagcgagagccatgagttcttacatttcctcttttcataatccactaatcgcattcgcatggcagtctttaattagtcaagcgagtccacatgtggcatacgcaggtgcgatttattattaattagcgcggataattacttcattagtacttaatcagagcgagggggagcacccggaggcgcaagacaagacgtcactggtgcaggcgatgacccataacgggatcgccctc

SEQ ID NO: 411753 - DNA, 497 bp, Oryza sativa
ttgttttttaagaagaattggtacttcttggatggtgaaaggcgcagtaataagaatgtagtttcacaaaaacatggaagatcagtattgagcatcgacttatttctactcctcaagtaagcattggatgcaacttggtttaatttgatgttaagaaacacaaaatgatgcatcccaacatgggcttcaaatggtttctctcatgcggtaccaaacatccgaagcggattattcaccaaatggctgcacaggcaataattccgctgttggatcaaaggtttgattacccacggctatccaaattaaatctacaggttcaaaatggagagttgatagggtctcgctgcagtgccttctgcacaagctcggtttgctcctgcacatggacggagcagaaacctgttgcggtggctgcagattgggcccttccaacgtattcgatgtcgtctatcgtgccccgaccaagcgccctcatcgcggtcaggaggcgaggattg

SEQ ID NO: 411754 - DNA, 428 bp, Oryza sativa
aataaccaacatatatcatgggggaaccaataatacaataacagaccttactccaaattacaaccaggtgcccaaagcgtagaacagcatcatatcatgcgtccggcaatgagaagttccagggagaagccacatagcatcgagaaacaccacaaaagaagagaccaagctattgactgtatgtcggcatggtttggagctgtatgaaatgcctcacgatgttgggcgtagggacacccacacgcccaattgaatttgcccaatggagacctcaagcggaccccttgagcttattcgtgatgcctgcgaagtacttcccctggtggaaggcgtgctccagctccatttccgtcggtcacctcaagccgtcggctggaaaggtgccggcgccgtacgggctagcccccctgaacttatgccatgttaaa

SEQ ID NO: 411755 - DNA, 346 bp, Oryza sativa
atcaaataacaagtgggctaagcccatataggcccaccaatcgaacacagcaaccacccatatagcacaaaggttacaacccaattagcatctaacacgacccgacaaacatccaatacaacacaaattttacaacacagttaacagccaaatccagccacattccaaatacaatcacagcaaccaaaatttcaccggatgtcgcgcgaccaagatcttcaaagtgagcttagcagcacgatgtcattgtagtggcagtattcaggatcatcagcacaaactgctattatcttgtcatccttctcaccctaatccatccattatcctcagttaaaaagaaagtgtt

SEQ ID NO: 411756 - DNA, 456 bp, Oryza sativa
tcaagcccacaacaagtttaaaccgaacagaaaatagagagttttaaacgacacagtgcacacagcgggcatatgataataacggtcaatgcaacgagtgccatggccgtgcacaaaacttaacgaattagtaaaagctagatatcttaaatgcagacacgcaaaccaccacttgaacgaggatcatttcttcttggcggcagccttggtcaccttggcaccggttgggtccttcttctccacgttcttgatgacgccaacagccaccgtttgcctcatgtcacgcaccgcaaaacgaccaagaggagggtactcagagaaggtctccacaaccatgggcttggtgggaatcatcttaaccataccagcatcaccgttcttgaggaacttgggctccttctccagctccttaccagatcgtctgtcaatcttggtcaccagctcagcaaacttgac

SEQ ID NO: 411757 - DNA, 434 bp, Oryza sativa
  unsure (1)..(434): unsure at all n locations
ccccagcccccaacccaantcttcaattcaaaaagactgcccaaacagaccaagggtttcatcataacaacaaatttttttaacacgcaacatcaaagagacacttatgcaataagataacttgaagcgcggatcacttgcaaatttcgcgcttaggcgacctcctcgatcttggggccagcaccgctgccccctgccgggggagcattgtcctcgtccatgccgccggccatttccgcgccagcgccctggtacattttggcgatgatggggttgcagatgccctccagctccttcatcttgtcatcgaactcatcagcctcggggagctggttgccgtccaaccactggatggcccgatcgatggcattccctatcctttttttgtccgcttgctggagcctccaggcgatcttttcatccttgatggggtt

SEQ ID NO: 411758 - DNA, 133 bp, Oryza sativa
acttttatggccggcctacctttttttttttttggagataaacgcttccaccaaaaaacgaatgtcggggagtgttcttcccctacaagaatgattaggggatttcaatgttaaaaagagcaaaattccacca

SEQ ID NO: 411759 - DNA, 159 bp, Oryza sativa
aatcgaacgaaacttatttgttcctcatcttattctctgatgaaatttcaaaaggagagcgaaacagtggacactgtacgcttgcgaaataaaaaaggttggcgaccagaaaaactccggcgagaactacccggcgacggagaacgctccgaagcgaca

SEQ ID NO: 411760 - DNA, 178 bp, Oryza sativa
aattaaccatcacgggagcatggcatgcaaatatatttatatgcacacaattgcatgcatatatatcagtaggaagcactaggttacgtgctgatgattacacaaagacacatgcctgatccctttgctcataatttaaattttctttgcaaaatcaatatgttagcccctgttaggg

SEQ ID NO: 411761 - DNA, 113 bp, Oryza sativa
gaccccaggataatacacataaatttcataataattagggtttttattacaagggaccgggcagccattattataagttccattcaaaaagggcaaaccatggccttttattt

SEQ ID NO: 411762 - DNA, 309 bp, Oryza sativa
  unsure (1)..(309): unsure at all n locations
acaccgtataatgtacacacagtatatatttatacgtatttcaacaaagcggaattgtacacatacgacgtacatacacagcgtactttcacagtacaaacaacacgcagacacggtccgtactggagaacgtccatcacacattcacactcatcacacgnacagtaacatttttttttccttttatttgcgctcggctaggctcattcttattatttcaggaaaggtgacgtggacgggccgtccgaccggacgggcgcaagacacatggtgaggctggatgttggtcgagcctcaaatgctggccgg

SEQ ID NO: 411763 - DNA, 185 bp, Oryza sativa
  unsure (1)..(185): unsure at all n locations
gggcgtaatgcagatttactcttgttttactagataaataaataaagcaaaaattggagtagttttctggtagaaattatccttgttgcgaatccttatgaatcaggttcaaattaaaaacctttagnnattcattacttaggaggccacggatgatttgagttcttcaagccttaaanacaaaa

SEQ ID NO: 411764 - DNA, 102 bp, Oryza sativa
gaaaatcaatccttgcatgcaggggaaatcgatggatcgacctctctaccttaacttgtttcttaattctcatgtacaatcaaaagaaacacacacggcaca

SEQ ID NO: 411765 - DNA, 531 bp, Oryza sativa
gtggttaggagaatccgccgctgcgccgtcttctccattgaagccaagctcccccaggccttctcgttctccccctcctcctcgagctctcgctggtgcggggagcgaagtggagaggagaggccgagagggacgagagatcgagagggagagggagcaccgaagcagcgggcggcagcatgcggccttcgctccgtactatctattttcttcttttgctacttccacatgtggttttttctagaccactctttccactaccaagcaagagtaatggaatagagaagagacccttacaaacttttcgaccatataacattgctcaccgtggctcaaatggggaaattcctgaggaaacagctgctgcttacctgagggctattgaagaaggtgcggattttatagaaacggacatccttgctagcaaagatggggccttgatctgctttcatgatgtaacactggatgctacaactgacggtgccagccgcatggagttttccaatagaagaagaacctacgaggtggaat

SEQ ID NO: 411766 - DNA, 432 bp, Oryza sativa
aaatactggacaagagcatgtttgacgcctcgcattatcgcatatagcggatgaaaaaacgtcaggccagcctgcgcgacaacgtctagttacagataagagcagaactgcaagtcaaatacactcttttctctccatagtagagtttgagcagcgagcgggcaaacataaattattcaattattaaatgatatgatcactcttgatcatctcaacactataggaacaaaacttcgctaccgcgattttactattttagttgtccacaacttcaatgagggttggttcgtagtcagcaggagcctcgaaaccatggaagttcattacggttgcagcaacattggcgagcccaggggtctgaatgtcagaccggaatttcacaccagggtgaagaccgggacctccaatagcaaccgggaccggctgaagagt

SEQ ID NO: 411767 - DNA, 527 bp, Oryza sativa
gataaagaaaagaaaggctttcgtctcggtgggcaaaagcgcgagggcaaagcgaaggtatagcatctagtaggcgatggcgagctccggtttctcatggacgctgcccgaccaccccaagctccccaaggggaagacggtagccctcgtcgtgcttgacggatggggcgaggccaacgccgacaagtacaactgcatccatgtcgcccagacgcccgtcatggattcgctcaagaatggtgctcccgagaggtggagattagtgaaggctcatggaacagctgttggtcttcctagcgaagatgacatgggcaacagcgaagtgggtcacaatgctcttggtgctggtcgcatttttgctcagggtgctaagcttgtggaccttgctcttgcctctgggaaaatttatgatggagaggggttcaattacatcaaagaatgttttgacaagggtaccctgcaccttattggttttgtgagtgatggaggcgttcactcccgtcttgatcaagtgcagctgcttctga

SEQ ID NO: 411768 - DNA, 523 bp, Oryza sativa
ttttcttccaagaaacaagaaacattacaccaaggagctatctagctagccaatggcctgcatgtcctccttccgacttgccgtggcggcggctgcactattggtcattggctcatgtgccacagagctcaccttcaaggttgctgagggctctagcgccactagtctggagctcgtcaccaacgtcgtcatctatgagcgcgaggtcaaggagaagggcggcaaggactgcggggcgctcaaggagtcgggctctaacacctggacactcaaaagtgaagcaccattcaagggccccttctccgatcgcttacttgtgaagaacggtggctaccgtgtcgtcgatgatgtcatccctgaaagctttactgccgactgtccatataaaagtggcatcccagctgtagacacaggcatgcatacttttgggctgcgtgatcttggaataagaacccctaaatattatgtcttaaaagagatcactccatgtttcagccaaccattaactaactttctatttaat

SEQ ID NO: 411769 - DNA, 389 bp, Oryza sativa
gttgcatcacgactgaaccgaaaactcaagagaacaccgttcaagactccacaagtccacctccgcagccagaggtcgtcgacaccgaggactcttcagctgataagaactcatcagagaatcagcagcagcagggcgatacggccaaccagaaggagaagctgaagaagcctgacaagatcctgccgtgcccccggtgtagcagcatggacaccaagttctgctactacaacaactacaacatcaaccagccgcgccacttctgcaagaactgccagaggtactggacagcgggtggtgccatgcgcaacgtgcctgtgggtgcaggccgacgcaagagcaagagcgtatcggccgcttcccatttcctccagagggtcagggctgct

SEQ ID NO: 411770 - DNA, 434 bp, Oryza sativa
gctcactaaaacatcgttgcataacttagaattaacattactcggccttattcattaccaccgctggcagtcaagtccagtccaggtacataactggttacattcctagtgaagattatatacatggaagcaggcacagcttggtctgctgcacttagctaagccagtgcactagtgttgtagacaagaatagcgccgccaactagaattccagcaagagtgattgcccagagaagtaaacctgcctttcctccaacatagacatcaccagttgaagaccattcttctggggtatatattgggctgtacccatcaacatttgctccatacttgttggaaaactggtaaagaccctttcccttggctacccttccagatgcatcaacaccttccttgaacaccactcctccagcaggcccatagggctgggatgt

SEQ ID NO: 411771 - DNA, 521 bp, Oryza sativa
tttcagagatagagtgagtgatcagttgagtgtggttgcataaacatggctgcctctgtcatggcttctctggctctgaaaccatctgcatctccattactagaacgttcgaagcttcgagggaaagggacaatggcaaggccatctttgatcatagtggccaagaaagcaaagaagattcagacatcccagccctatgggcctgctggaggagtggtgttcaaggaaggtgttgatgcatctggaagggtagccaagggaaagggtctttaccagttttccaacaagtatggagcaaatgttgatgggtacagcccaatatataccccagaagaatggtcttcaactggtgatgtctatgttggaggaaaggcaggtttacttctctgggcaatcactcttgctggaattctagttggcggcgctattcttgtctacaacactagtgcactggcttagctaagtgcagcagaccaagctgtgcctgcttccatgtatataatcttcactaggaatgtaac

SEQ ID NO: 411772 - DNA, 443 bp, Oryza sativa
ggagaaagtcaaggttcgataaatattgcttcacttgtacaaagtacagataaaaatacattgatacatgacacggagagagccatgcacaccacttatttgggacacacagagggcaaggctgcagagaaaatcaagcaacacaagctgaactcacggccccacctgtcagcctctcactggtcgaggccggagactcttgtgaaaaacagcaacaccacgcatgcagaagaagacaaattattacacacacaaatcgacgacacggcggccggcgacgtacggcgaggtcgtcgccgccgccggcgacgttgtgatgaggtcgatcagccgaagaggtggtgcttcttctcgccggtggactcctcggcgctcttgtggtccttctttttctcgtggtgctcgtggaaggcgtagccgccggcgccgaccgccgccgtggc

SEQ ID NO: 411773 - DNA, 483 bp, Oryza sativa
tcggtcgacgagccggccaccggagtagactggtacggtgagggcgtctacacgtcggagacggtgaccaccgaggtggtcgccggcggccaggacgagtacgagaggtacaagaaggaggagaagcagcacaagcacaagcagcacctcggcgaggccggcgccctcgccgccggcgccttcgccctgtatgagaagcacgaggcgaagaaggacccggtgatcgtgcacaggctccagattacggcggagatcgcggtcacggcggaggtcggcgccggcggctacgccttccacgagcaccacgagaagaagaaggaccacaagagcgccgaggagtccaccggcgagaagaagcaccacctcttcggctgatcgaccttatcacaacgtcgcctgagtcgggcgacgacctcgccgtacgaagtcggccgacgtgtcgtagatttgggtgagcaataatttgtctttcttctgcatgcg

SEQ ID NO: 411774 - DNA, 185 bp, Oryza sativa
gtggagaaagtcaaggttcgataaatattgcttcaatagggcaaagcacggataaaataacattgatacatgacacgagctagagccatgcacacctaattacagtgtaccagcacataggttgaaggctatgattaagaaaatacagccctgcaactctgatactcacatgacctactcttaca

SEQ ID NO: 411775 - DNA, 390 bp, Oryza sativa
gcctgcaggaccggccgactggcggtcacccagccgttgtttacagcggccacagctaagcgggaccgctagggagtctacacgtcgccgaccgcgaccaaggaggtggtcccccgaggactctacgagttcgagggagcctataaggaggataagcgctacacgctcatacggccaaccggaaaggccggctgaagaagcctcacaggattctgcctgtctgacagggtcgcggcgaagaaagaccctgagaacgcgcacaggcacaagatcacggaggagatcgcggtctctgcggtagctggcgccggtggttgacagttgcaggagccatgcgcaacgagcatggagctccagaccgccgcaggagcaagagcgtataggacgctt

SEQ ID NO: 411776 - DNA, 454 bp, Oryza sativa
tttgtcagtcgctgtaatagtttcgaggatgcgggcctgttactggaacaactgcgcttatttgataactttgtctatggtgttgcttatggtcttctggtcggttctcgagaagtttggtcacaagctcaatcgttatttaatcagttaggacgcatggactctccaacatcctctgccttttacaatgctcttactgatgtgctatggcatttcggccagaggcgaaaagctcagcaagttgtgtttgaagggataaatcgtcgtgtctgggacaacacatggggtgagttttgcttggacctgcaccttatgtcatgtggtgcagcttatgcaatggtccatgcctggctcctgaatgtgcgctctatcgtctttgaaggaagagctattcctgaatttttaagcattcttacagggtggggaaagcatagcatgattgctggggcaagca

SEQ ID NO: 411777 - DNA, 445 bp, Oryza sativa
gctaaagcaacaaaaatgctatcatttgctggtcactcttacagacttacacttccccagtttcgcagtggtatccacaacagcgaaaggtttcttcacaagggaaaaaacaacacggagcagctcaacagaaggctttacagacaaaaatgcacactccctgttggctctcccaagatttgcaactggctggctggccatgaggtgctccaacatcaactgccaccttcaggttagcggtgtcggcatgaagtgatatgtacagatggagatctcatctctagctttatacagctgctgctactatcagacttggtagaccattcccacctccagtgtggaggcatgaggtatggtagcagcataagatggtccgcggctgtttctcctcaagaactcgtagaagaagtttatcacgattcgctttatgaaactagacccgctc

SEQ ID NO: 411778 - DNA, 528 bp, Oryza sativa
gttccagtgccacatgttcaacctgaagaacggtttctagtgggtcgcattggtccaaaagagtacaggctatacagggtcatcgtgaggtatgggtaccgtgatgtgcagaaggatgacatagagtttgaaaaggacctagtcagcagcattgcagagttcatccgcagtggggattctcaccacaacggtgttttggaggacacagacaagtcgtgtgagaaactgtcttccatcagtaatggtattccattgtggatggaggatggagaggtcgatgcttcagcatcccctcataaggagacagatacacagatcatatcaccaaaccgaaagaaagcaaggttcgtgctgccaaagaatgcccaggtggacagcgaagtgcgccgtgagctgcaggagctcatggatgcaagggaggctggaatgtccttcatcttaggacactcctacatgaaggcgaagagcgggtctagtttcataaagcgaatcgtgataaacttcttctacgagttcttgaggagaaac

SEQ ID NO: 411779 - DNA, 464 bp, Oryza sativa
cgctcctccaagacatggccgcccgcttcggccccttcctcctcgtactccccctgtcctccgcgctgctcgtcctctccgccgccacggcgccccgtggccgtcccagccaagtggatgtggggaggcagctgagggaggagctgtgggagagaaaccaagggcacgagatgctcaggtcgtggcgcgacggtgacccgtgctcgccgcctccatgggaagggttctcttgccgatggaaggacggcaacctcttcgttgtcaagctgaacttttcttcaaagaaactgcaggggccgattcccgcagcgattggtaacttaacagaactagatgagattgatctgcaggacaacaacttcactggttctattccagaatctttctttgatctcacacacttgctgaagctgtcagtaaagtgcaaccccttcttgaacaatcagctacctcatggcctatct

SEQ ID NO: 411780 - DNA, 542 bp, Oryza sativa
  unsure (1)..(542): unsure at all n locations
tttaatctctcctcctcccagcaaagaggaggtggtggagatctcccaatccgcgggaatcactcgctgttcaccccgattcggcctccgctcgagctctgaatctcgggagctcctgatctggaggatgccaaatgtatgaaccaaagcccttctcaagcattgtactagctcacaacgatccagtttcccacaatcaacaaattgaacgtattaacaacaatgtagtatctaatagtggtgggaacagctcaaacagcaactttgccgccagacagcgcttacggtggactgatgacctccatgatcgttttgaggatgctgtaacacagctcggtggacccgacagggcaactccgaagggaattcttagaataatgggtgttcaagggttgaccatctatcatgtcaaaagccatctgcaaaaatatcggcttgctaaatacattccagatcccacagctgatggtgccaagtctgacagaaagatctcggagatttgcttgctgacattgaaagctcctncggaatggacatagggg

SEQ ID NO: 411781 - DNA, 519 bp, Oryza sativa
tttatttttggacggacgcgtgggcgacaacgaggcgctgcagtggggcccagggggccgatcctcctcgaggactaccacctgatcgagaaggtggcgcacttcgcccgggagcgcatcccggagcgcgaggtccacgcccgcggcgcctacgccaagggcttcttctagtgcacccacgacgtcaccgacatcacctgcgccgacttcctcctgtccccgggcgcccagacccccgtcattgtccggttctacaccgtcatccacgagcgcggcagcccggagacgatccgcgacccgcgcgggttcgccgtcaagttctacacccgcgagggcaactgggacctcctcgggaacaacttccccgtcttcttcatccgcgacggtgttaagttccccgacgtcatccacgccttcaagcccaacccgcgctcccatgtccaggagtactggagggtctttgatttcttgtcccaccaccccgagagcctgcacaccttattcttcctttttgacgac

SEQ ID NO: 411782 - DNA, 412 bp, Oryza sativa
ctagtgtagtatatcattataatgcaagtacaatgtttcatcaattaatcacaatgcagtttgattaagcagagggcatgatcccatcggattcagaggaaggctcttttacactacagatgaatatgcagacacccagcttggtgttacatacatagactggattgggctgaaaattatccggacagggcgctggcgttggagacgaggagggcgccgccgagcaggagccctgtgagggtcacggctccacatcacaagcccggtggtaaccaccaacgtaggtggcaccggtggaagaccattcctcccgcgagtagatagtgatgtagccttggacgtttgcgccgaacttggccacgatttgggacacacccttcccagtgctcttcctgccagatgcatcaatatc

SEQ ID NO: 411783 - DNA, 365 bp, Oryza sativa
ttttatatcaagtttaacagtgtgggcgtggggcgcatattgtcgagcggaaggtgaggatggccacatctatgatcacctagcctctggcggcgccggcccggaccaagggccttgcttccatcttctgccggagatcctacttcgccatcgtctgcagcggtgggaagaagagcaagaccgacatgccctactggatcggaggtggcatgtcagtcgatattgatgcatctagcagggagagcacggtgaacggcgtgtaccaattcgatcacaagtgcggcgcaaacgtcgacggctacagcccagtctactacccaaaggaatggtgttccaccgatgacacctactttgggggaaccacc

SEQ ID NO: 411784 - DNA, 366 bp, Oryza sativa
ataattaattcacaacaccatatttcattgaccaggttcaaaacctgcacagaaatacacactaccggcacagacctaaccttctatccaatactgggacattcatccacgcgggccacaccaatacgtccatatatacggtacacgtacgtacatctactgcactgggtacacacacccacactctcctgcaaagacgcccattgaggtaaacctagctggcttagctgaaggcgatgcgtccccatggcagcacgggcggaggtggtgctcacttgccggggacgaaacaggtggcctaggcccaggctttgttgtttgacggggtcacgcaggcggtctatgaggttttcgagggggcccttg

SEQ ID NO: 411785 - DNA, 439 bp, Oryza sativa
ttggttcatcaccatgcgcaagtcggcggcggagcggatgcccgccgcgtcggggagcccgaggtacggcgccgaccgcgtgctgtacctcggcccgctctccggcgagccgccgagctacctgaccggcgagttccccggcgactacgggtgggacaccgctgggctatccgccgacccggagacgttcgccaagaaccgggagctggaggtgatccactccaggtgggcgatgctcggcgcgctggactgcgtgttcccggagcttctcgtccgcaacggcgtcaagatcggcgaggcggagtggttcaaggcggggtcgcagatcgttagcgagggcggtctcgactacctcgagaacccgagcctgatccacgcgcagagcatcctgatcatctgggcggtccaggtggtgctcatgggcgccgtcgaggggtac

SEQ ID NO: 411786 - DNA, 439 bp, Oryza sativa
tctgttcggtgtcgcccgacatcgagctgtggtgcgagttcattggcatccgcagcatgtactactgcgggccgctcacctccttcgactggaacgacgcctacccctgccgcatagggaccttctccatcgacaccacctgcaccatctgggacgtcgagcgggaggccgtcgacactcagtttattgcccatgacatggaggtctacgacatcgcctggggcggtgcccgcgtcttagcattcgtctccgccgacgggtccgttcgcgtgtttgatcttcgggacaaggagcattccacaattatctacgagtccggttctggcggcagctccaattcggcaggtgcagatggcggagctgccttaccaacgccgttggttaggttagggtggaacaagcaggaccctaggtacatggcgaccattatcatggatag

SEQ ID NO: 411787 - DNA, 402 bp, Oryza sativa
acacatgaaatcaacttgcccaacaatttatcagaaaatgcatagcagttcgcaagccatatgcctcagttacacaaatagcagccaggagcgcctaaaatacaaaagctgacccagaaattcgagggcagcacatcacaagagagtttgagagagggagagagccagcaagggagagcatttatttagaaatcgttcacttgccattgccagggttcaaaacatttcagctatttttgcacctacaggctcacggtttttttgggggaattgcccttttcctccaagctaacaagcaggctgtcgaaggcctttttgaaggagtccacaccttccagctttagctgtttgccaaccttatcccaatctatacccagtttttccagggcactgtatacacct

SEQ ID NO: 411788 - DNA, 476 bp, Oryza sativa
ttttactcgtgggcggacgcgtgggcggacgcgtgggcggacgcgtgggcccgagtgaccagtgtagcgtccttctttgtcagccgagttgacacacttattgacaaaatgctcgagaagatcggaacacctgaggcacttgccctcagaggaaaggctgctgtagcacaggcaaagctagccaaccagctttaccagaagaaattctctggcccgaggtgggaggctttggtcaagaaaggtgccaagaagcagaggttgttgtgggcatctaccagtgtgaagaaccctgcatacccagacactctttacgtggatcctctcatcggacctgacaccgtttctaccatgcccgaccaagctctgctggcattcatcgaccacggcacagtttcgaggacaatcgacgcaaacgtttcggatgctgaaggtgtatacagtgccctggagaagctgggtatagattgggatgaggt

SEQ ID NO: 411789 - DNA, 497 bp, Oryza sativa
attcttatcgccggatacccgaggaagaagaagaagaagaaaagatgagctactacggccagcaacctcccgtcggcgtcccgccgcagcaaggttacccggggaaggacggctacccgccgccggggtacccaccggccggctacccgccggcgcagggctacccaccggctgggtaccccccgcagcagggctaccctccgccgtacgcgcagccgccgccccagcagcagcagcacagtagcggcccttccttcatggagggatgcttggctgccctctgctgctgctgtctcctggacgcctgcttctgaggatagaggcgacgggtgcaagagagctgaagagatttgtttcatggagctgatcaaaccgaactgctatgagaaaatgctgctagatttcgtgttcggcattattacctgttaatcgccttgtttatgaacctctttgaacctgatttatttgatcagtgtttgatggatggctaaaactat

SEQ ID NO: 411790 - DNA, 463 bp, Oryza sativa
tttgttcatcctcgccgccgacgagtcgacgggcaccatcggcaagcgcctggccagcatcaacgtggagaacgtggagcccaaccgccaggcgctccgggagctcctcttcacgacgcccggcgcgttccagtacctctccggcgtcatcctcttcgaggagacgctctaccagagcacggccgccggcacgccgttcgtcgacgtgctcaaggccggcggcgtcgtgccggggatcaaggtggacaagggcaccgtggacatcgccggcaccaacggcgagaccaccacccagggcctcgactccctgggcgcgcgctgcgccaagtactacgaggccggcgcccgcttcgccaagtggcgggccgtgctcaagatcggcgccgccggcgagccgttcgagctcgtcgtcaagcagaacgccgagggcctcgcccggtacgcgctcatctgccaggagaac

SEQ ID NO: 411791 - DNA, 430 bp, Oryza sativa
aaaagagtcagcacactagatccttcatgcagtatacagcaaatacaaaccatccaatcaagagagaagagaaggctgccatccctattaggaaaggccagccagccattaaaatgccaacgcatgtcacagttagaaaaggaaagaatgaacgaacaacagacattttatccacccattggccacgcaaccaaacaagagcagccacattcaacacattccacttcacggagccattgtaggcaagccgattcaagcagtttgccacaaatgagtagcaattgcaggtaaacagattatagaacttgtgctcgaaacttctcatgcccagttgcagagcgtcgtcccaggaaatcgccgttcctgcttctgcatgcttgtaggaccgctcacatacatgtgtcgcgagattaacaggaaagcaacactt

SEQ ID NO: 411792 - DNA, 533 bp, Oryza sativa
gtgctgcccatcgcgtccagctagcgcctggcgcggctgcagatgcagctgctgagctgcaggtgcatgcacctttcccacccccacctccctctctccccttcgtcttcctctatagcccgcgccgcgcctccctgtccccgagtccgaagcccgaatccgaagcgaagtgaccgcaagagctcacccccgagtccccccctcgccggatcgcgcgggccgcctacctcctcccgtcgcaccagctaccgcgggaatgcgaagatcttgcgatggaagctagtcaaatctgatttcgtttaagtacaagtaacaacaatggcaccaaacaaaatttcctcaatggatgctggagcagcttttgatgacgaagatgctagttccagcaattcactgcaggagttgtggccagttggcgagatagatcctaagagagcaagatttccttgttgcattggttggactcctctttctattgtctcgtggcttgctccttacatagggcatgctggaatctgtcgagaggatgggac

SEQ ID NO: 411793 - DNA, 536 bp, Oryza sativa
ctgtcatttgatgaagttgctggtaatccccttgtgaaggaaacattcaatgctgctcatgagaccgagagaaagcgtgctttatctgcacttctctcccagacaaaacagcaagaacgaaaggatgctgagattttagcagaagcaaaacgcattatggaaactcgtgctgctagcaaacatactgaggaagcgggagcactggcacactttgataatgttgatggtgtatctcccttgagcaacacacacccattgtcaactgctacacttccagctgcagcagtgaataactccatacctgcttcactgcgaatgcttcgagtgtatttgagaacccaagcgcttgatcaaatggtccaagcagcaagtgcctcggcgggccttagagttatcaaaagggttgaccagactttacaagacctcggagtgaatttgaagcccaaggtcccgacgaaagcagtttgcgtcgagcatcttgaactacggaatgagatacttacactgcttaacttacagaagcagctgcaaaataa

SEQ ID NO: 411794 - DNA, 446 bp, Oryza sativa
gttccctcctgtcacattttccccaaataataatagaggaaggggaaaaacacatttgcagccacatcatccatggcctctctccgcaccattccggtgatcttcggcatcctcttctatgtccttgccagcactgccactgccaccgactcaccggactacgtcgtccaaggccgcgtctactgtgacacgtgccgcgccgggttcgagaccaatgtcaccgagtatatcaagggtgccaaggtcaggctggagtgcaagcactttggcaccgacaaggtcgagcgtgcgattgacggtgtgactgatgagaccgggacatacaagattgagctcaaggacagccatgaggaggacatctgcgaggttgtccttgtgcacagcccccttgcaaactgctctgaaatcgaggccgaacgggaacgtgcccgtgttttgctcaccag

SEQ ID NO: 411795 - DNA, 69 bp, Oryza sativa
tttgatctgtgtgatttgagtgagtgagtgagattctttggaggagggattttggtttggtttggtttg

SEQ ID NO: 411796 - DNA, 444 bp, Oryza sativa
gatacaacagcagaaaaggatatacctctgcttccccggttaccatatggaaagatttttacgttacagacatacaagttacagcacaagcagttttcatatgcttgaacatctaatgtcagcggtagcacattaaccaaaagtaaagtaaaaatcacatcttgggagcaagccccgtatcatgcttgggaacatcagctaatatcagtcttaaatcacatctcaggaaactgaccggcaagtcatcctttcctactcgctgatcctacagcagctgcttgcagtgacagtcatggtgtggccttgtcagcaagtgagtgggcagccgagctccttcgccgccgcggtgaggaaggcgagcgtcagcccggtggcgcggcggctgtgggcttcccactctatgcatctctccacatcggcttgccagttgatgatgcttgctgc

SEQ ID NO: 411797 - DNA, 500 bp, Oryza sativa
gcgttggtttgctgcgtatggtttgctacctctgagttcatcagcagttgatttgcctgaaattgttgtagctgctccacttcagccacctactttgtcatggagcctatacttgccattgttgaaagtatttgagtatttacctcgtgggagtccatctgaagcatgccttatgagaatttttgtggcaacagttgaagctatactgagaagaacttttccatcagaaacctctgaacaatccaggaaaccaagaagtcaatctaagaaccttgctgttgctgaactccgaacaatgatacattcactctttgtggagtcctgtgcttcaatggaccttgcgtccagattactatttgtagtattaactgtttgcgtcagtcatcaagctttgcctgggggaagtaaaaggccaactggtagtgataatcattcctctgaggaggtcacaaatgattcgagattaaccaatggaagaaacagatgtaagaagagacaag

SEQ ID NO: 411798 - DNA, 423 bp, Oryza sativa
gagatcacagtagcaatatttattgagcatgcactaaaatatatacctacacgcttgcgggagataaacccgagctgaaaagctaagggctctccgactcgtccgatcaccatggggggcattatgccgcctttgcgaagccaaccttcaggttgccatagtcaaacacggtatggtaggctcccataaagacatctcccaagatccagagaggaccacgaggaggaggaatgtccatagctgggaatccactgatgcactgggtagcagttccctcaccaaccttaaggatgtattgttctggtttgagaacaaacttgttgccaccgattgtgaaggcaatgtcaggcatggatgcaaggctgctgcagtcaacagatgattctcccataggactaggaagacggtcacatagctgatcaa

SEQ ID NO: 411799 - DNA, 413 bp, Oryza sativa
ctgtttcttcactgcttactggtcccacggccatagttactcatataaatgaaaagattggtgctactggggtagtcagtcaagagtgcaaggcagttgtttcttaatatggtcaacagatcctagatcagctgcgagcagagacaaaaccagcgaaagtatgctcttcggtcggtttatgtacttttgatggtactcatggtgttagagctggtattcggagtgtggtggatgatgaagttggaaaatcaagtggtccctttagcagtgcgatgtgcaatgcttgtgagacagctgctgtatggatgcatacccaacttgcacaaaatcaaactcaggatctcgtattgcagtacattgatcagctatgtgaccgtcttcctagtcctatgggagaattaactattgactgc

SEQ ID NO: 411800 - DNA, 166 bp, Oryza sativa
tcgacggtcttgtcggggtcggagccgacgatcaccgtcgtcgcgccgtcgccgaacagcgcctgcccgaccatggagtcgaggtgggactcggagggcccccggaacgttaccgtcgtgattctttggagcacaccggtgaggactgcgcgcgccgcggttgttc

SEQ ID NO: 411801 - DNA, 367 bp, Oryza sativa
tttgttgcgcacaagccccagcaccagcaagctgctactcatcatcagcgagagctagctagctgtgtgtgccacttacactgctgctgctgctggttctagctaagctcaccgatcgtcgtcttcgtcatcgccggtgacctggtgaattagtcgagagagatggcggcggcggtgacggtggaggaggtgaggagggcgcaaagggcggaggggccggcgacggtgctggcgatcgggacggcgacgccggcgaactgcgtgtaccaggccgactacccggactactacttcaggatcaccaagagcgagcacatggtccaagctcaaggagaagttcaagaggatgtgtgacaagtcgcagatc

SEQ ID NO: 411802 - DNA, 400 bp, Oryza sativa
gtttattaaagcctcccatcaacttcttgcacacaccctccctttggctttcatctgcatctattcagttgcagattgagagccaaagacattatcttgattctatcaggagggttgtgctagcgaattcttgttagcaacaaattgacatattgctcggcacatccccaccgagaataccaagatgacgttctctggtacacaggacaagtgcaatgcttgtgacaagaccgtgcatttcattgatctccttaccgcggacagtattccctaccacaagtcttgcttcagatgcagccacttgaaaggcacactttcgatgtgcagctattccgccatggatggggttctttactgcaagacccattttgagcagctattcaaggaaacaagcaccttc

SEQ ID NO: 411803 - DNA, 528 bp, Oryza sativa
gtcggcaccgcctgcgtcaactccttcggtgacgagcagctcgccgtcgatatgctcgccgacaagctcctcttcgaggctctggaatactctcatgtctgcaagtatgcgtgctccgaggaagtcccggagctgcaagacatgggtggaccagtcgatggtggtttcagtgtagcattcgaccctcttgatgggtccagcattgtcgacacgaacttcacagttggaaccatatttggtgtctggcctggtgacaagctgacaggcgtcaccggtggagaccaagttgctgccgccatgggcatctatggccctcgcactacttacattatcgctctcaaagactgtcctggaactcatgaattccttcttcttgatgaaggaaaatggcagcatgtcaaggacaccacaaccattggagaggggaaaatgttctctcctggtaacctgagggctacatttgataatcctgaatatgacaagctcatcaactactatgtcaaggagaaggacacattgcgttacact

SEQ ID NO: 411804 - DNA, 322 bp, Oryza sativa
gtgcagtgggaatttggatcgaccatggatgttgtggctgtgcaaacaaaatcaattcctgaaaggatcaaggattggactaatgtggttgttgcctatgaacttgtgtgggccatagtaactggtgaagttgctacaccagatcaagcacatgaagtgcatgatggactgaggaagtggctcgctgctaatgctagagcagaagttgctgattcaacagtgatcatgtatggaggttccgcaactgctgcgaactgcatggagctggcagcaaatcctgatgttgatgcgttttctggtctgtggtgcttcattgaagtct

SEQ ID NO: 411805 - DNA, 426 bp, Oryza sativa
aggaaacaaactcccatccgtttccgtttgggctgattaggactttgtttctgtttaggccgaataggacttgggttgaattataccaaggcctattcgggtagcatcaccaggagaacaagggcatatatacctacataggataaaaaatcacagcacataacaaagaattacatgccgccttaaagcacttagcactgggtaaaagacaaaacaacccataactttcccttagtccaaaggggggcaccgagaggtccgcgcctatgtcgatcccaggtaatccaacaactccgttggatgcattttacatattactctggtggggagttaataatactacatattacctgtagggaggattttgcaccagcagtgtcaaatccttgggggtcccttgatagggtgtccatcagcttgttctgg

SEQ ID NO: 411806 - DNA, 519 bp, Oryza sativa
aatagtgagaaagctggttgaaatgatgtgcagtgtttttgttgcttcttggactggagtgatcaagtatcatgggcctcgcccaagcacacggcctcatcaggtatttgttgcaaaccatacatcgatgatagatttcattattctggagcagatgacagcatttgctgtcattatgcaaaagcatcctggatgggttggatttattcagaagactatcttggaaagtgttggttgcatctggtttaatcgcaatgatctcaaggatcgtgaagtggttgcaaaaaagttacgagatcatgttcaacatccagacagcaatcctctcctgattttccctgaaggaacttgtgttaacaaccagtacactgtcatgttcaagaagggtgcttttgagcttggctgtgctgtatgcccaatagctatcaaatacaataaaatattttgtgatgccttctggaaatagtagaagcaatcgtttaccatgcacttggtaagcttatgacatcatgggcaggt

SEQ ID NO: 411807 - DNA, 539 bp, Oryza sativa
atttttaatcaatgattttacctgtcatctaaagcgcaaaatgctcacacagggccgcctgtttttatctccaagaattattgggttctacactaatctttttggccacaaaacaaaattcttctttctttgggaagatatcgaggacatccaagtgatgcctgcaacactatattcaatgggaagtccatctctgcttattattcttcacaagggcagaggaatggatgcaaggcatggagcaaagcaacttgataatgaaggccgactcaagtttcatttccagtcttttgtatcgttcaatgtggcacataaaacaataatggcgctctggaaggcaaggtccttgacccctgaacaaaaagtacagctggtagaagaagaatcagaaatgaaagacctccagaataatgaaagtgattctttcttaggaatagaggatgcaaaaatgtcagaagtattttcatctacaaaaccttttgatgtatcaacactcatgagcatatttgagggtggtcctttggagcatcaagtgatgg

SEQ ID NO: 411808 - DNA, 381 bp, Oryza sativa
tttagatgataatagttatctagggctacggggatatgctgtaggtggtaatgctatgctgacttacaggaagcactggctatctctcggtctggagacagcattggctacgagaagttatattagctgtagaagatcccatatgattgaaaaaaaccatggattaagacagaatgtaagcatgatgagagcatgttgctggaatcaaaccccacttttgtataatggtatggaaaccctgatgacaatggtctacatacctattagggatacagggtgtacgctaagccaggggagtaccgacatttcactagcaatgataaagccttgacactataatacgcttcaaagcatgagcaatatgttgactgtgttggtgga

SEQ ID NO: 411809 - DNA, 438 bp, Oryza sativa
tttacttgtccgtttttttttttaacaaaatggtgaaggctagcctacaaaattagaggctaattctgacaagcaactccggtatacaaagtagaccaacacacgatggaaaaaaggcacaggcaacaccattatttgttccgattaaccgtgacaatatgattcaactgcgggcaaaatttaaaggtgacaccagtaaaaacaatgctgcgatgctcttagaccgttcacgcacgcggcttcccaccaagggttgggaactgagcctgatcttcaatggatggtgcagatgtagaatatgggccacgttggtaaccaccaccatatccacgaccggcacgatctccacgcccccttccacgaccacggacggcatagtacctttctcctttcgcaggcttcaagaactcattgatgcttacagacttcttggcacgc

SEQ ID NO: 411810 - DNA, 449 bp, Oryza sativa
gttcttcgcttcggccgcgccgacgacgccgcctgcctccacctcgacgacatcctcgctaaatcttcttgggacatatcaaggtttgcgacggtagcattggtcgatatggattctgaggagatgcaagtctacattgactatttcgatatcactttggttccagctaccatttttttcttcaatgcccaacacatgaagatggactcagggacacctgatcacacaaaatggattggctctttcagcagcaagcaagatttcattgatgtagttgaggcaatatttaggggtgcgatgaaaggtaaactgattgtttcttgcccacttccaccagagaggatacccaaattccagctccttttcaaggatgtttgagcaaggaaagtgctcatcacatgcgcatgctaaaagagtgtcttggtcatgatgacagaactatatgaagc

SEQ ID NO: 411811 - DNA, 424 bp, Oryza sativa
agccaaaggcaaaggaaatttcccgcaaatacttattcatatgttttgacaacattcctcccgacgcatgctcattgcggcagacgcagctgaccacctagagcttttagttcaccattattatttagaccaagcatacgtcccaagatcagaacacatgcttacaagcgaaaatactaatagcctggctggctgcttcacagaataaccaaacgacaacctcaacagataaaaatgccacggaatgaaaacaaagccaggaatcgccaccagaagtcccatcttactcatcaaacactccatcattctcctccaacgcatgctctgcccaggggagaagattgcccagtttaccttccttaacaggagcagggttcaccatattcttagcctcgaagcagtgcagaacagatttgggcgaccc

SEQ ID NO: 411812 - DNA, 239 bp, Oryza sativa
tggttcgcggacaagttcaaggaggccttgaagccccacagcttccctccgggcgcgtccatcctcttcacccactccccgcccggcgtcctcaccgacgcgttctccaaggactcgtcggtgccagagggcgccgtggcggcggtcggtgatcgagaacagggccgccctgcgaggtcgtgtgctggaattccatcattcggccagtcacggggttctcgtccggcggtggctttcgg

SEQ ID NO: 411813 - DNA, 516 bp, Oryza sativa
gttcttcctccacccgctcttcgactcctcccgatgtctccgggttttctctcgatttccgccgaatttcgctccgctccagcaatgggcgaattgggtgctctccagtccatcgtctaccaccgcggatcgctccgcctgcttgatcagaggaagctcccactcgaggtggactacatcgacgtcaagtgctccggcgatggatggaacgcaatcagagacatggttgtccgtggcgctcctgcgattgccatagcagcggctttggctctggctgtagaggtttctgggttggaggatttcaccggtacgcctgcagaggcagcagcttttgtttccgagaaattggagtaccttgtatcgagccgcccaactgcagtgaacctatctgatgctgcaaccaagcttcggagtttagtttcaaggacagcagaaactgagaaagatgccaaagcaatctttcaggcctacattgatgcagcagagaccatgctagttgacgatgtgtcagataac

SEQ ID NO: 411814 - DNA, 406 bp, Oryza sativa
  unsure (1)..(406): unsure at all n locations
tcgagagcatctagctagggagagaaaggaagagacgagaggagagagatggccactgcttatgctcccatggcgagccagctgatgaagagcagcttggtgtgctccaagccgagggggctgtctggtgcttcgctgacaaggaggccccgcttcacagtcaaggccatccagtctgagaagccaacgtaccaggtggtgcagcccatcaatggcgaccccttcatcggcagcctggagacgccggtgacctccagcccgctggtcgcctggtacctatccaacctcccggcgtaccgcaccgncgtcagcccgctgctccgcggcatcgaggtcggcctcgcccacggctaccttctcgtcgggcccttcgcgctcaccggcccgctccgcacacgccggtgca

SEQ ID NO: 411815 - DNA, 433 bp, Oryza sativa
tcggttggggtgtcactcgccttccccgcaagacccacaggggtctccgtaaggtcgcctgtatcggtgcctggcatcctgctagggtttcctatactgttgctcgcgctggtcagaatgggtaccaccaccgcactgagatgaataagaaggtttacaagatcggcaagtctggccaggaaagccatgctgcctgcactgaatttgacaggactgagaaggacatcactcccatgggtggcttccctcactacggtgttgtgaagggcgactacctcatgatcaagggttgctgtgttggccccaagaagagggtcgtcaccctccgccagtccctgctcaagcagacctctcgtttggcgctcgaggagatcaagctcaagttcatcgacacctcgtccaagtcgggcacggtcgcttccagaccaccgac

SEQ ID NO: 411816 - DNA, 459 bp, Oryza sativa
gttctcggccccggctacccgcacctcgagcgcatctgcctcaagcgcatgaccgcctacaacgacgacctcgcgctcatcgccaagtcattcccgctgttcaaggagctgtcgctggtgtgctgcgatgggttcagcacgctaggcctcgccgccatcgccgagcggtgccggcatctccgtgcgctggatctgattgaagactatatcgaccaggaggaggatgagctagtggattggatctccaagcttccggagtccaacacgtcgctggagtcacttgtgtttgattgtgttagcgtcccattcaactctgaggacctgcaggcgctagttgcacgctcaccagctatgcgccggttgcgactgaatcaccgtgtgacagtagagcaagtgcgccgtctaatggcacgggctccacagctcacacaccttggtactggggcatttcgttctgag

SEQ ID NO: 411817 - DNA, 437 bp, Oryza sativa
aaagaattccgccttccttaaaatatcagaaacggttcttgtaggttgagcacctttttcaaggaaatagagaatagctggaacatttaaacaagtttgattctttatcggatcataaaaacctacttttcgaagatctcttccttctcttcgagatcgaacatcaattgcaacgattcgatagacagcttgttgctttctaccacatcgttttaaacgaagttttaacataacattcctctaatttcattgcaaagtgttatagggaattgatccaatatggatggaatcatgaatagtcattagtttcgttttttgtatactaattcaaacttgctttgctatctatggagaaatatgaataaaagaaattaagtatttatcgggaaagactccgcaaagagccaatttatttaaacccatattctatcatatga

SEQ ID NO: 411818 - DNA, 451 bp, Oryza sativa
ggttaagcaaaaacgatctcgatccgcgattttttaaatatccagaatgatccatcccggtaaagataagataagaactgctcgttagatagaatggattcaattttgatttggagttgcttcttttaggtaaaagaaaaaataagtaaaagcaaagaccttaattttactttacaggaaatgcgttttttttacttcatttttttctttcttttggtattcgagtcgaagaaatacgagaattctataactaccaaaaaactttcttttcattgcaatagtttaactagttaatagttaattagttttgttacggaaaaatggtatggaaaaatagattgctaatctaatatattaattaaattaattaaacgggaggttgatagtttatttgttggagaagagtcaattcttctcttatcatttcaggattggattgatcatctcgagt

SEQ ID NO: 411819 - DNA, 152 bp, Oryza sativa
cttgtttcttgaccttgtcaagagtgctggtttcccctctggcaagtacctctttgctggtgtcgcggatggacgcaacatctgggctgatgatctcgccggatttcttaccaccctataagtatttgaggctttggtggggatggacaagc

SEQ ID NO: 411820 - DNA, 445 bp, Oryza sativa
gccgcgtcggcggcggcgagcgcgggcgccgggaagatgacggcgtcggcgccggggttgtagaaggaggcgatggacatgcggttgccgtcggggcgcgtgaggacgcggtgcatgacgctcttgtacctgccgttggtgatcacctccagctggtcgccgatgttggcgacgatggcgtggcgcatgggcggcacgtccacccactccccgtccttgagcagctggaggccgctcacctggtcgtcctggaacagcaggatgatgccaccggcgtcggtgtgggcgcggaggccgtcgacgagatcggggcgcgggcacggcgggtagctgctcaccttggtgccgaacgttgggccgttcgacccggcgaaggccttcttcaggtaacccttcttcaggcccagattcttgcacagcaggttcagcaccctctccgagagct

SEQ ID NO: 411821 - DNA, 545 bp, Oryza sativa
ttgaaccatggcatcgcgcacgagctgatggacgaggtggagcgggtgagcaaggcgcactacgccaactgccgggaggagaagttcaaggagttcgcgcggcggatgctggaggccggcgagaagggcgccgacgtgaagggcatcgactgggagagcaccttcttcgtccgccaccgccccgtctccaacctcgccgacctccccgacgtcgacgaccactacaggtatacttaccctgcatgcatgcgtcatcatcaatcatcattaacaaactcaatttagtctttgttaatttatctgcatgcttctgaaagaaaagcttaagttgcaaactcgcctaaatgatcgtcagtattttaatcggaagtagtacactcacaaagcaaaggcttacaaagtatcctagctactgtagagtgtaggcctgaccaaaacctcaacaaagttacacctgacacgacgcgctctactatagaaatgcccacttctgtaaacagctactgcaaccaaaggtgacaggattatcgaccaaaaggagatgc

SEQ ID NO: 411822 - DNA, 415 bp, Oryza sativa
ttttgcctcacactcactcgctcagcactacttgcaccccctagctgagatcagtagtaaacggtcagtcaattgttgcaaagcgatcagctactggcgatggctcagggaaggggcagtgctgcaggacgacgcaacgccgccgtgctggcgatggtcctcctctgcgtgctcctccacggcgagctcgccgagtcggccgtgtacaccgtcggcgaccgcggcggctggggcttcaactccggcggctggctcaggggcaagcgcttccgcgccggcgacgtgctcgtgttcaagtacagcccgtcggcgcacaacgtggtggcggtgaacgcggcggggtacaagtcgtgcagcgcgccgaggggtgccaaggtgtacaagtcgggcagcgaccgcgtaaccctggcgcgcg

SEQ ID NO: 411823 - DNA, 482 bp, Oryza sativa
tgttgaagaagaaccgcgttagggcttcctgccccgccgccggcgagagtgggctttgactcccctcggagccgcctcctcttcgtctcatctccccgcggccttgttcatccccttctacgagccttagcgccgcaccgcaggttccagctcggtggctggagtttaatttttatttgttctccatggcgcttcggttcgaggtattaggaagattcaatcgtgctcgtgcagctcgattaacactaccccactttacttgtcagacaccactgtttatgcctgttggaactcaaggtacaataaaaggcctgactactgaccagttagaggaaataggttgccagattatacttggaaacacctaccaccttgaacttcgtccaggttctcaacttattgacgacttgggtggccttcacaaatttatgaattggaaaagggcgttgctgactgactctggtgggttccaaatgggttct

SEQ ID NO: 411824 - DNA, 528 bp, Oryza sativa
  unsure (1)..(528): unsure at all n locations
ctttcttctattgatgtgtggtctgctggctgtgttcttgctgaactacttctagggcagcctgtttttcctggtgacagtggcgtcgaccaacttgttgaaattatcaaggtactgggtactccaacaagggaagaaatcaaacatatgaatccgaactacactgagtttaagttcccccaaatcaaagctcacccatggcacaagatctttcataaaagaatgccatctgaagctgtagatcttgtgtctcggcttctgcagtactcaccacacctccggtgcagtgcattggaggtgttaattcatccattcttcgatgaactacgagatccaaatgctcgcttaccaaatggccgtactcttcccccactattcaatttcaagcctcgtgagctgaaaggagcatcaatggaatttcttgtgaagttggttccacagcatgctaagaagcaatgtgccttcttaggattatgagcagacagttcatacactaatncggtattacgttggtctacttggttccgt

SEQ ID NO: 411825 - DNA, 451 bp, Oryza sativa
aaacagccaaagagatcattgatattttaataaacatcatgcataaaccacgcaggttatcaagtcagttttaaggtccagcacaactcttgcacactagggactatgacacacaaagagcggcagcattacaaggtttgcgacaacataatagttattcagtattcactcatgcaccaacagaaacatcctgcatggtatcaaaagacccagcataggttacgcaaacattttggctttggttgctccaacactatgcttcagggcctaatagtagaacattatttcttgccgcgcagctttgttccaagagccctttcaagcttcccgatgatctgctggttcggaatagctttacctgactcgtactcctggatcacctggggcttctcattgatcatctgtgcaagctgtgcctgggtcatcttcttgtccagccttgcttgcatga

SEQ ID NO: 411826 - DNA, 415 bp, Oryza sativa
gtttttccagaaccttctcttcttccttgttcgttcatcccctaaccctttctttgttcatctcgttcttcctcttgtcgtctcgtcgagatggccgggattggtccgatcaggcaggactgggagccggtggtggtgcggaagaaggcgcccaccgccgccgccaagaaggatgagaaggccgtcaacgccgcccgccgatccggcgccttgatcgagaccatgaagaagtataacgctggaacaaacaaggcggagtccagtggtacatccctcaacaccaagcgggtggatgacgacacctagagccttgcccatgagcgtgcctcaagtgacctgaagaaaatccttatgcaagcaaggctggacaagaagatgaccccaggcacagttttgacagatgatcaatgagaag

SEQ ID NO: 411827 - DNA, 461 bp, Oryza sativa
gaagatgaaacctagtgtttgcatgctcaaataatagtatggactaattgttgctgcacaccagctgcaattaatttcttttgcagaagagcaagaatatagcaacaagcaagcaggccttcatcttgatactccaaggaatgccatatcgaccacttcccactagacctctcagcaatggcatgaagcacagcaccagccacccacaggagatgaattcactgataccagggccaccgggcaagccttccgttgtcaccaaaaccaccctccatgctcctacagcgattgcaatgacacttaacattgcaagtgctgtcacgggaatgaacaccgtcgattcgtcgaaggtgaacctccctggctcaggctcatcggtgttggaatcaccatctgatgtgctcttgtctttgcgggtgacctcgaacacagtctcggagaagcctaggtcttgaggatga

SEQ ID NO: 411828 - DNA, 489 bp, Oryza sativa
  unsure (1)..(489): unsure at all n locations
tttagtgtgggcagtctgcacgtgcatgctggaacaaccacaggatgcaacggatcacctcagcttctgcttggctactggcatttcttaccgtcatcctcaagaccttaggcttctccgagactgtgttcgaggtcacccgcaaagacaagagcacatcagatggtgattccaacaccgatgagcctgagccagggaggttcaccttcgacgaatcgacggtgttcattcccgtgacagcacttgcaatgttaagtgtcattgcaatcgctgtaggagcatggagggtggttttggtgacaacggaaggcttgcccggtggccctggtatcagtgaattcatctcctgtgggtggctggtgctgtgcttcatgccattgctgagaggtctagtgggaagtggtcgatatggcattccttggagtatcaagaanaaggcctgcttgcttgctgctatattcttgctcttctgcaaaagaaattaattgc

SEQ ID NO: 411829 - DNA, 390 bp, Oryza sativa
tgtgcggcggcggccgtgtacgaggtgggcgacaagaccgggtggaccatcttgggcaatcccaactacacagtctgggccgcctccaagaagttccatctcggcgacaccgtcgtgttcacgtacaacaagcagctccacaacgtgatggcggtgagcaaggcggactacaagaactgcgacgcgagaaagccgatcgccacctggtcgacgggcaacgactcggtggtcctcaacgccacgggccaccactacttcctctgcggcttcccgaaccactgcggcatcggccagaaggtggacatccgcgtcgccgcctccggccactcctctgctgccccttccatggcgcccgccccggcctccggctccgaggcacccgtcgccccc

SEQ ID NO: 411830 - DNA, 431 bp, Oryza sativa
agaaatcacgcacaatgatatcagaaagtgtcaatggaccaaagatgaatgtatggcactatgatacattacggtacatgatggaaaaaatacggtacactgcgaaatagatgttagtcaacatatctcactgaggaaggcaccaatgtcagcgttcctgaattaatagtttttcatctacaaaaagaaaaacaaaattatgtcaggttttctccgttgaggtgagaagtccaagtttttctgttatctgctcaacgttccttttgccccaccaaagatgttgtcgatctcctgatttcatctcatccaccttgtttcctccatctcgccgttctgattgagcctcctgatgtgcatctgatgatccaggctgctcggtaagaaactgctgccagaagccatcgtttgcaccaggtgtgacagcaggaggc

SEQ ID NO: 411831 - DNA, 561 bp, Oryza sativa
  unsure (1)..(561): unsure at all n locations
tatggtacgctttggcgatgtgatttaagggctggtggggtggtgcttgttggtcatttcagcagctttgtgcggtcggggtggtctcggtgccgatggcgaggaagcagcatatcgccatattcaccacggcgagcctgccatggatgactggaactgccgtcaaccccctcttccgagcggcctacctcgcgaaggccggggactgggaggttacgctggnggttccatggctttcgaagggggaccagctgctggtttatcctaacaagatgaaattcagtgtgcccggggagcaagaaggctatgtgcgacggtggctcgaggagcgaattgggctgctgccgaagtttgagataaaattctatcctggaaagttctcaacggagaaaagaagcattctacctgctggggacatcacccagactgtatctgatgataaagcagacattgcagttcttgaagagccagagcatcttacatggtaccatcatggacgaaggtggaaaaacacattcagaaaagttataggtgttggtcataccaactatttggagtatg

SEQ ID NO: 411832 - DNA, 361 bp, Oryza sativa
tgatagagagcatgtagcgagggagagaaaggaagagactagaggagagagatggccactgcttatgctcccatggcgagccagctgatgaagagcagctttggttgctccaagccgagggggctggccggtgctacgctgacaaggaggccccgcttcacagtcaaagccattcaatctgagaagccaacgtaccaggtggtgcagcccatcaatggctacccctttattggcagactggagacgccggtgacctccagcccgctggtcgactggtactcttccaacctactggtttaccggaccgtcgtcagcccgattgctccgcgtgcattcgaggtcgctctcgcccactgctacc

SEQ ID NO: 411833 - DNA, 431 bp, Oryza sativa
atagtctaacagaaatttactccaaccagattcggggtagaagcatagcaaaacagagcagctaataacagttctacaacgagaagcagtagcagtagcttcagtgaaacatcatttcagctcattacatcggcagttcgccgctgtccgcgatgacaactttgctcttcggtgacccactctgctggccctcagcttcaatcttgtaaaccacatccattccagacagcaccttaccgaacacgacgtgcttcccgtccaaccagctggtggttacagtggtgatgaaaaactgggacccgtttgtgtctctcccagcattggccatggacaggaggcctggtccggtgtgcttgatcttgaagttttcatcggcgaacttcgtcccatagatagattcaccaccccttccatcaccaagtgtgaagtca

SEQ ID NO: 411834 - DNA, 504 bp, Oryza sativa
ggtcgacccaccgcgcatttttaattcacaaggcttacaagagaagatctttaattcttgcccggcggcaagcgaaagaaaggcggaggaaatccataatggcgggaagcggatggaggaggatcacggcggctatggaggccgctcatgtcgcgcccggcctcggtctgcctctggatcgtgctcgtcgacgccaccctggcgctcgcccaggcgaagaaatcgaaggcggatttgactgaggtcacccacaaggtctacttcgacgtcgagattgatggcaagcccgcaggacgggttgtcatgggacttttcgggaagactgttcctaaaacggcagagaacttccgagcactttgcacaggagagaaaggaactggaaagagtggcaaagcactccacttcaagggaagtgcattccacagaattatacccagctttatgatccaaggaggtgacttcacacttggtgatggaaggggtggtgaatctatctatgggacg

SEQ ID NO: 411835 - DNA, 424 bp, Oryza sativa
gaagacagaacacagaatactttattcttccaagctgaaggatcataccacattgtacactaaaagatagcatttccattgtgtctcaaaacctatcataactcagaacgtcctggtactcatctctctgtgcttaattgtctaacaagatacaaggtgacccttggatttcctctcatccgacaaataggaaaagaaataaacaagaggatagagcaggaaaccaagatgcatatatcataacctggagcagtggccttggtgtatcatgcctttctatctatttaacaagttttacctagcctatcttggatgaaaaatgagctcaggctggtagctccagcttcacattgttcttccagctcattatgtaatagtagaagaagtcagcatacaagagagtctgcacgatgcccgcaaccca

SEQ ID NO: 411836 - DNA, 509 bp, Oryza sativa
ctacggcgacgaccccacaccggcggcggagatgaacgcgttccggctagccggggacatgacccacctcctcagcgtggtggtgctcctcctcaagatccacaccatcaagtcctgcgcaggcatatctctaaagacccaggagctatatgcacttgtgtttgctgctcgttacttggacctgttcattcattttatatctctgtataacactgtcatgaagttggtctttctggcaagttctttctcaatagtttggtacatgaggcggcataagattgtccgaagaacctatgacaaggatcatgacacctttcgtcatcacttcttagtgttgccatgtttggctctggccctccttattaatgagaggtttacttttagagaggttatgtgggcattctccatatatttagaagctgtagcaattctacctcaacttgtgttgctacagcgcacgaggaatattgacaacctgactggccaatatgtcttcttttaggtgcata

SEQ ID NO: 411837 - DNA, 455 bp, Oryza sativa
aaacagccaaagagatcattgatattttaataaacatcatgcataaaccacgcaggttatcaagtcagttttaaggtccagcacaactcttgcacactagggactatgacacacaaagagcggcagcattacaaggtttgcgacaacataatagttattcagtattcactcatgcaccaacagaaacatcctgcatggtatcaaaagacccagcataggttacgcaaacattttggctttggttgctccaacactatgcttcagggcctaatagtagaacattatttcttgccgcgcagctttgttccaagagccctttcaagcttcccgatgatctgctggttcggaatagctttacctgactcgtactcctggatcacctggggcttctcattgatcatctgtgcaagctgtgcctgggtcatcttcttgtccagccttgcttgcatgaggtt

SEQ ID NO: 411838 - DNA, 557 bp, Oryza sativa
  unsure (1)..(557): unsure at all n locations
gttactccagaaccttctcttcttccttgttcgttcatcccctaaccctttctttgttcatcttgttcttcctcttgtcgtctcgtcgagatggccgggattggtccgatcaggcaggactgggagccggtggtggtgcggaagaaggcgcccaccgccgccgccaagaaggatgagaaggccgtcaacgccgcccgccgctccggcgccgagatcgagaccatgaagaagtataacgctggaacaaacaaggcggcgtccagtggcacatccctcaacaccaagcggctggatgacgacaccgagagccttgcccatgagcgtgtctcaagtgacctgaagaaaaacctcatgcaagcaaggctggacaagaagatgacccaggcacagcttgcacagatgatcaatgagaagccccaggtgatccaggagtacgagtcaggtaaagctattccgaaccagcagatcatcgggaagttgaaagggctcttgaacaaagctgcgcggcaagaaataatgtctactattaggcccctgagcatagtgntggagcaacc

SEQ ID NO: 411839 - DNA, 412 bp, Oryza sativa
atatgaagattatttaattatatataaatccgtgatactgtactttgtttcagtaaggtcaaatggaactggaatagcaagaagtagtttaattgaacagatccatctatgaaagaataaaaggaattggaagaagtagctatcgctcaggccgcttcagattcagcagcactagcagcattcagatccacagaaagatcaagttccttcccagtgatcttgctgtacaatgcaagcacatccttcaccgttgtctcaaaatgagtagttgcatcgtaactatttgtcacgaagcagttgtcctcgtcagcggtattagtaggttcgtatcggtcatagatgtcaaaaaatgtttcctctacaggtccgagcagaacgatcccaggtttcagctcgatctcaggcttgtcag

SEQ ID NO: 411840 - DNA, 554 bp, Oryza sativa
gtagaggagaggagatcagggggaggaagggtggccggcgcagcagatcggggcgggcggatttaggggaggagcgcgctagccgggagcggcggcgatggatgaggagtacgacgtgatcgtgctggggacggggctcaaggagtgcatcatcagcggcctcctctccgtcgatggcctcaaggtccttcacatggacaggaacgattactatggaggagaatctacatcccttaatctcactaagctctggaagagattcaaaggcaacgagaccgctcctgaacatctgggtgtcagcaaggagtacaatgttgacatggttcccaagttcatgatggccaacggtgcactggtccgtgtactcatccacacgagtgtgacaaagtatctgaatttcaaggctgtcgacggcagcttcgtgtacaacaatggcaagatccacatagttcctgcaactgatgtcgaggccttgaaatctaatctaatgggcctttttgaaaagcgccgtgctaggaaattcttcatatacgtgcaggattacgaagaggatg

SEQ ID NO: 411841 - DNA, 445 bp, Oryza sativa
aaccgcgccttgtattcatatattcatagaatggagggaatgcgacggcgttcgatgccacgcggccgttcgtcttacaggagcagccgccggccggccgtcttcttgcggaggccgacgagggaggcgtcgtcgatgaccggcccgcagagcgagccgtcggtcatggtgtggtagaacgtgctctggaacacgacgcgggtgcggttggcgatggcggcgaactcgaggacggcgcgcttgtacccgccggtgcccttggactcgtacggcaccttgatgaaggccctcgccgcgtacgcctcggcgaccatggagcccgcgcacccgtcgcgcgcgtcgcccacggcgaacgacaggcggtacgtccacccgggcacggtgcgcaccttctgcaccagcgccgactccttgccccccaccagctccacggcgcgggcgccct

SEQ ID NO: 411842 - DNA, 523 bp, Oryza sativa
ctggggcgcctactacgccgtcacgtttagcgcggcgcgcacctgcgcccaggcggagcagctcaacgtgtcggtgagccccgagtggggggtgctccccatgcagaccatctacggcagcaacgggtgggactcgtacgcgtgggcgttcaaggcgaagatggacgaggtggcgctcgtcatccacaacccgggcgtggaggaggacccggcgtgtggcccgctcatcgacggcgtcgccatcagggcgctgtacccgccgacgctggccaaggggaacatgctcaagaacggcgggttcgaggagggcccctacttcctccccaacgcgtcgtggggggtgctcgtcccgcccaacatcgaggacgaccacttgccgcttccggcgtggatgattatgtcggccaaggccgtcaagtacgtcgacgccgcgcacttcgccgtgccgcaaggcgcccgccccggggagctggtggggggcaaggagtcggcgctggtgcaggatgtgcgcaccgtgcccggg

SEQ ID NO: 411843 - DNA, 413 bp, Oryza sativa
aaccaaaacataggaggtttcatttcttcttctcaaagtagtgtagcatctttccttctttcaccattacataagcttaagcaataacagataacaaatcctcctcctcctttaggtaaaatattcaaacacaatacccttataagtacttattattaggaaagtagcgtgcatgggcataaatggcagcggggggcaggttaagaatcacaatgctgagcagcgaggaaacaaaacaccataatgggacagagcaaaagcctccgaaagggagcttttaggcagaaggcttctcccacttgaggggctttaccacctcccaggtgaagtttgggtcgtcccttccgaagtgaccgtaagccgccgtcttgaggtagcgtccgttgccgcctttcttgaggtcaaggttgatg

SEQ ID NO: 411844 - DNA, 522 bp, Oryza sativa
tttccttgctaccaagcttggcgctcgtcttacggaggttcgcaagaatgggacctgcgcatggctcaggcctgacgggaagacccaagtgactgttgagtaccgcaatgagagcggtgccagggtccctgtccgtgtccacaccgtcctcatctctacccagcatgatgagacagtcaccaacgatgagattgctgctgacctgaaggagcatgtcatcaagcctgtcattcccgagcagtaccttgatgagaagacaatcttccatcttaacccatctggtcgcttcgtcattggcggacctcatggtgatgctggtctcactggccggaagatcatcattgacacttatggtggctggggagctcacggtggtggtgccttctctggcaaggacccaaccaaggttgaccgcagtggagcatacgtcgcaaggcaagctgccaagagcattgttgctagtggccttgctcgccgctgcatttgccaagtatcatacgccatcggtgtcccagagccact

SEQ ID NO: 411845 - DNA, 456 bp, Oryza sativa
aaagcatggccctctgaccctttagttaagcccaagagagaagctccataaccagaaagacaagtgaatctaccatataggaaaaaggaggtaggccatcaccacaaccaccaccagatgccattgcttctcttcagaagacttggcattacaaaaaaggaagaaagaaagctcaaggcagagagagattagaaagcaacaccggggacccattcacatgacacacactatctagggctaaaaaactggagcagatggtgtattacacttgaatggttaaacacttgctcagggtgttcagttcagttttcagttgtcatgggcagtttgagctccttccagggcctccatagtagaagtatgtgccccagtcggcattgttaccgttttgcacgtcgtagcagttcgattgctcagtgaatgtgcccacccccttgggggctttcaggttgttgg

SEQ ID NO: 411846 - DNA, 402 bp, Oryza sativa
gggaaccagaaaactttgactttgtaggctcggagaaaaatattcacttttacaaaaatccatgcaggagtcaagttaaaagaagaaacagggttctgtctttgagatggagtataatttatttaagatcattccctccatcccattatccatgagtttgcaaacttcagctcacattttaaaaatgaagatgcaaaaaagagagagggacagcaacttaaaaacgtattggtcaaccagccaaagggggattgagcgcactgggaacattcactccaatttgagctttggccttttccagttcagttgaggccgatccaagcttggcgttgaattccgggagaccctgctggaccgcggctgggtcgatctggtccagggggacagccttaacagccacaa

SEQ ID NO: 411847 - DNA, 433 bp, Oryza sativa
aaaatcattattgcaaaaacatcatcttcttcttcatcttcttagtgtacacaacaccaactcgatcatcatctcgtcgcactaaacccatcttccccaacccaaagacaacgaactcgctggccacaaatccatccaaccacaattaaccactgctaagctacggtcccccacttcacttgccggggacgaagttggtggcgtacgcccaggcgttgttgttgacggggtcggcgaggtggtcggcgaggttctcgagggggcccttgccggtgacgatggcctggacgaagaagccgaacatggagaacatggcgaggcggccgttcttgatctccttcaccttgagctccgcgaacgcctcggggtcatcggcgaggccgagcgggtcgaaggcgccgccggggtagagcgggtcgacgacctcgccgag

SEQ ID NO: 411848 - DNA, 515 bp, Oryza sativa
gtgttcaccatggcgctctcctccccggtgatggcccgcgcggcgccgtcgacctcctccgcgctcttcggcgaggcgcggatcaccatgcgcaagaccgccgcgaagcccaagccggcggcgtcgtcggggagcccgtggtacggcgccgaccgcgtcctctacctcggcccgctctccggcgagccgccgagctacctcaccggcgagttcccgggcgactacgggtgggacaccgcggggctctccgccgacccggagacgttcgccaagaaccgggagctggaggtgatccactcccggtgggcgatgctgggcgcgctcggctgcgtcttcccggagctcctcgcccggaacggcgtcaagttcggcgaggccgtgtggttcaaggcgggctcgcagatcttcagcgagggcgggctcgactacctcggcaacccgagcctgatccacgcgcagagcatcctcgccatctgggcggtgcaagtggtgctcatgggcgccgtcgaggggta

SEQ ID NO: 411849 - DNA, 551 bp, Oryza sativa
cgtgcttctgatatctgtcaggcaatagacgaaaggaaagcagactgggatgctttgtttgagccatatccattttttgaatcgtatagaaattatctaaagattgagatcacagcaagaaatgaagatgacctcaggaattggaaaggttgggtagaatcccggcttcgtacgcttgtattaaagattgaacgatttacacgtgagatgctcctctcacatcctaatcctagagatttcatcgacagctccaggccattgcattgtttttactttatgggtctctggaaaaaacaaatcagccaagctcaagaagctgagcagtatgacattagagcaattgtgaatgaatttaaaagcaatatccatgcatatcaacactggagagaaggaatggaaattgaagtttcccatgtaaaaagaaaagatatcccatcatttgtttttcctggtggaatcacgccttctcgcccatcaagaacagttggcaaggaagctcgggctgtttcaagaagtaatatttcagctaatggtcaagaaaagaaatgttc

SEQ ID NO: 411850 - DNA, 451 bp, Oryza sativa
gcgatcaaaaacacagatgggcaaccacacagttaacacaaactagatagttccacacaaaactaacgatgataacgatcggatgatgatgatggtagctcgattagatagatagataacttggccatgagggccccaccgctcagttcctccagttcccgtcggagttgccgccgccgcggctgccgtagccgccgccgtagccgccgccaccacggccgccaccgtagccaccgccaccgccgtagccgccttcacggcgctggccgtagccaccgccgccgtcaccaccaccgtagccggcgccaccgtagcctccgcctccgccgcgctggccgtagccaccgccgcctccgccttcggagcggcgcgactgggccttgttgacggagatgttgcggccgtcgagctccttgccgttcatccccttgatggcgtcgcgcatggcctg

SEQ ID NO: 411851 - DNA, 355 bp, Oryza sativa
cttataggtgggttggcttctcctccccctcccggttcggttcggttcggttcgggtccggttcgatttcggtttttccttcggttcgggggttggtgggaaagcatggcggcgccggatgttgagtaccgctgcttcgtcggcggcctcgcctgggccaccgacgaccgctccctcgaagccgccttctccacctacggcgagatcctcgagtccaagatcatcaacgatcgggagacggggaggtcgcgcgggttcgggttcgtgacgttctcgagcgagcaggccatgcgcgacgccatcgaggggatgaacggcaaggagcttgacggccgcaacatcaccgtcaacgagg

SEQ ID NO: 411852 - DNA, 414 bp, Oryza sativa
  unsure (1)..(414): unsure at all n locations
aaaatcattattgcaaaaacatcatcttcttcttcatcttcttagtgtacacaacaccaactcgatcatcatctcgtcgcactaaacccatcttccccaacccaaagacaacgaactcgctggccacaaatccatccaaccacaattaaccactgctaagctacggntcccccacttcacttgccggggacgaagttggtggcgtacgcccaggcgttgttgttgacggggtcggcgaggtggtcggcgaggttctcgagggggcccttgccggtgacgatggcctggacgaagaagccgaacatggagaacatggcgaggcggacgttcttgatcgccttcaccttgagctccgcgaacgcctcggggtcatcggcgaggcccagcgggtcgaaagcgccccccgggtagagc

SEQ ID NO: 411853 - DNA, 550 bp, Oryza sativa
tctctcagctctcacagctcactgcatcaatggttgcggccaccatggcgctctcctccccggtgatggcccgcgcggcgccgtcgacctcctccgcgctcttcggcgaggcgcggatcaccatgcgcaagaccgccgcgaagcccaagccggcggcgtcgtcggggagcccgtggtacggcgccgaccgcgtcctctacctcggcccgctctccggcgagccgccgagctacctcaccggcgagttcccgggcgactacgggtgggacaccgcggggctctccgccgacccggagacgttcgccaagaaccgggagctggaggtgatccactcccggtgggcgatgctgggcgcgctcggctgcgtcttcccggagctcctcgcccggaacggcgtcaagttcggcgaggccgtgtggttcaaggcgggctcgcagatcttcagcgagggcgggctcgactacctcggcaacccgagcctgatccacgcgcagagcatcctcgccatctgggcggtgcaggtggtgctcatgggcgccgtcgaggggta

SEQ ID NO: 411854 - DNA, 404 bp, Oryza sativa
aggaattaaaatttacttatgtttcttcttcttcttcacagttcacatggaaatcagaaggaagtagcaaaaggaagagctgttctacactcgacagagtaacaaactaagagagcaacacaagtaacaagaggagagatttagtctcttttctggggttctgcaaataaaactctcccctcttgctacccctaaaccccaacccaaggtagtagtaagtcaccccactaaaagtaaccggccatctcttacaaaaattggctgtctcctttgaatcaatcgaatcagatcatcatcatcatcatctacagctcgtcatgctcgtcgttgacgccgcccttgccgtaggcgccgtcacccggggcgccaccggtcctttggtagacggcggaaatgatggggtt

SEQ ID NO: 411855 - DNA, 518 bp, Oryza sativa
tttcaccccttaccctcggtatcgagactgtcggtggagtcatgaccaagttgatccccaggaacaccgtcatccccaccaagaagtcccaggtgttcaccacctaccaggatcagcagacaaccgtctccatccaggtctttgagggtgagcgcagcatgaccaaggactgccgtcttctcggcaagttcgacctatctggcattccagcagcaccaaggggcaccccccagattgaggtgaccttcgaggtggacgccaacggcatcctgaacgtgaaggctgaggacaagggcaccggcaagtcggagaagatcacgatcacgaacgagaaggggcgcctgagccaggaggagatcgaccggatggtgcgcgaggcggaggagtttgcggaggaggacaagaaggtgaaggagcggatcgacgcccgcaaccagctcgagacctacgtgtacaacatgaagaacaccgtcggcgacaaggacaagctggcggacaagctggagagcgaggagaag

SEQ ID NO: 411856 - DNA, 442 bp, Oryza sativa
tttatatatgccaaaccaatcccaggaaccttcgtctgcaacatcggtgacatgctgaaggtttggtcaaacggaatatatcagccaacacttcatcgagttgttaacaactcccctcgctaccgtgtatctgttgcattcttctatgagtcaaacttcgatgctgccgtagagcctgttgagttctgccgggagagaacaggtggtgttgccaagtatgaaaaggttgtgtacggagaacacttggttcagaaagtcttgacaaacttcgtcatgtaaaatttgtggaaaagaacatgcattgtactccaatgtctgatcgcaacattcgtcactaaaataaaatcatttgtaaatttgtcatagcacagtagaacagtcatattgaagaatggaatgcatccttaattgaaatcacaagcgatgtgaataatcttttcgt

SEQ ID NO: 411857 - DNA, 553 bp, Oryza sativa
tattcgctctcgtccccttccctctcctctctcgctcgctcctcttccgcggcgcgcgcgccggcgactcgccgcgtcgggccggccgacaaccgccgcgagggagaagccccctccccttggggggcacccatgacgtcgtgcgggtgcctggtgctcgagaaggtggaggaccacggcggcgaggcggcggggagggggagagggaggctcgcgcagggtggcggcggcggcggcggtggctgcggatcgtgcgcgggggagtggaggagccggtcggagaccatgttccccatctacgtgatggggagctcgcgggccagctccgccgcggcggcgcggggcatagtcgacgccgccggggaccccatatgggaggccgtcaagtcggaggccaagtctgaggcagagaaggaacctattttaagtagcttcttgtacgccagcgtactatctcatgactgtctcgagagggcgttgagtttcgtccttgcaaacaggctcgaagatccaacattgcttgcaactcagttaatagacattttcaatgatg

SEQ ID NO: 411858 - DNA, 541 bp, Oryza sativa
ttgtcctctcctctccacgccgaccgccatggccgccgccgccgaggtcgacgcggcccccgacctccccaacggatcctccgccaccgccacaaccgacgacgccgccgaggagaagcctgatgtcaaaccccaggtggaggtggaggtggagtacgtcccggagcaggcggacctggacgacggcctcctcgccgacttcaagagcatcttcgacaagttcaccttcaaggattcctctgccgacgccgaggatgacgagaagaaagatgaggctggcactgatgccgcaaagaaggctgcagggtctgattcggacgacgacgagcaggggacacagcaaaagaaggaagggggcttgtccaacaagcaaaagaaactacaacgaaggatgaagattgcagaactgaaacagatatgcaatagacctgatgttgtggaggtctgggatgcaacggcatcggatccatcattacttgtctatctgaagtcttacaggaacactgtacctgtcccaggcattggtgtaaaaggccaaatt

SEQ ID NO: 411859 - DNA, 486 bp, Oryza sativa
ccggcggttcccgcggggacccacgcgtccggtgtgtctgaagtggcgcatagtacagcgcttgtaaacaaatccccccatttgcttcttttgcactgaagaatccctgaagaatccagcaggatggagaataaggcgtccattctcatgaacgcggatgagctcggccgcatgctcgggcaaggcaccttcaccaaggtgtaccatgcacggaaccttgcatccaaccagagcgtcgccatcaaggtcattgacaaggaaaagggattgcgtgtcggcatgattgaccagatcaagcgagagatctccatcatgcgccttgttcgccaccccaacatcgtccagatgcacgaggtcattgccagcatgagcaagataatactttgcaatggagtatgtccggggtggtgagctcttcagcagggtagccagggggcgactcaaggaggatgctgcgaggaaagacttccagcagttgataggggc

SEQ ID NO: 411860 - DNA, 417 bp, Oryza sativa
attcgagaagatcagtactactttattcatgccatgaccatgcatacatatgggctttcacagatccatgaagaatttcctcgcccgaaaccgaaacatacatatatagcaaactcactcactctggctgcagagcgaccgtgcgaagtgcgtactcacacgcaattttattagatcgatcggggccggcacggcggcgcacacgtctacttcgccgcagacgccgacatgatgccgccgtcgaacggcgcctggccgaagcagtccaggttgggcccgtagccgacgccgagcacgtcgcagtagcgcttgtagaacgcgacccggtcggcgccgccgttgccgccggcgcactggagcccgccggtgaggatgttcgtggtgagcccgtagcctggcgcgcggtcggccgcgctg

SEQ ID NO: 411861 - DNA, 542 bp, Oryza sativa
attcgtacttgttggcaaagtggacttcactgtcaggcatctttcttcagcagttgagacatttccaaattcattcactagtttctcaactggtcaaccttgcatcagtacatcgcccaagcagtgcgcagcttacactgcacctgctaactctcaaacaacttggacaatgcgcgctaccttccctgaatatgtggttgctcttgctaccatcgttggatctgttctcttcacaatatttggtggtgttggaattgcttgccttccattgggacttatattctcatttgtccggcgcccaaaagctgtcattacacgctcacaatatataaaggaagcaactgaactaggtaagaaggctcgggaattgaagaaagcagctgaagcccttcaccaagaagagaaaagtgggaagaagggcagaaaatggcgcaaaaatgtcaaggcccttgggaaggaattagtacttttagaagatgacatgaaggctctttgagagatgtacccttcaggagaacaggctgaggctacctgggctttga

SEQ ID NO: 411862 - DNA, 437 bp, Oryza sativa
atcgtattacagaatttctgtagccttgcagatgatcacttggatatcatgtactagtaattaacaataggatgcatacaaaagatggcccaacgacaacagaagatgcgtgcatctgacattgtctggccttatttgttggtagtactccaattaattaacaagagatgatgcattcttgtgccttagtttcttcacatgcttggcttcacgttgagcctattcgcaatcttcacccccaacgactcatcacactgggagaggtagttgacccagatggcgcggagctcaggggagaccttggggtgcgcgagctcgccggcgaagcggcggatgaacctctcctgtctatccggcgcccacgacctgtacctctccccgggctgcttgaagtcgttctgcttgtgtatcgtcgccttctgcctcctccccaccac

SEQ ID NO: 411863 - DNA, 531 bp, Oryza sativa
  unsure (1)..(531): unsure at all n locations
gttgaaacaaacccctctcactcccactaccatggatccttgcaagttccggccgtcgagctcgttcgacacgaagacgacgacgacgaacgcgggagctccggtgtggaacgacaacgaggcgctgacagtggggcccagggggccgatcctcctcgaggactaccacctgatcgagaaggtggcgcacttcgcccgggagcgcatcccggagcgcgtggtccacgcccgcggcgcctccgccaagggcttcttcgagtgcacccacgacgtcaccgacatcacctgcgccgacttcctccggtccccgggcgcccagacccccgtcatcgtccgcttctccaccgtcatccacgagcgcggcagcccggagacgatccgcgacccgcgcgggttcgccgtcaagttctacacccgcgagggcaactgggacctnctcggcaacaacttccccgtcttcttcatccgcgacggcatcaagttccccgacgtcatccacgccttcaagcccaacccgcgctcccatgttca

SEQ ID NO: 411864 - DNA, 520 bp, Oryza sativa
tttcaccttggctgactacaacatccagaaggagtccacccttcacctggttctcaggctcaggggtgggatgcagatcttcgtgaagaccctgactggcaagaccattacccttgaggttgagtcgtccgacactattgacaacgtgaaggcgaagatccaggacaaggagggcatccccccggaccagcagcgtctgatctttgctggtaagcagcttgaggatggccgcacccttgcggattacaacatccagaaggagtccacactccacctggtgctccgcctccgtggtggccagtaagtcctcagccatggagctgctgctgttctagggttcacaagtctgcctatttgtcttccccaatggagctatggttgtctggtctggtccttggtcgtgtcccgtttcattgtgtactatttacctgtaatgtgtatccttaagtctggtttgatggtgtctgaaacgttttgctgtggtagagcagcatggaagaactataatgaataagtgatc

SEQ ID NO: 411865 - DNA, 414 bp, Oryza sativa
aggaggctccagatcaaagttcaattatatccatttaagtttaaagtctgtaagattcaggtacgaacatgtagtttagatttagtaaaatgcaaacggacacaacatggaccctctacacgatatcatccaggaacaaacttcactacaaagtacaggtacagcctctctctcagacacagcataaataactgaatttagctccaatttaagccatcccgccactagttgccgtcctgattatctggaacaaggatgatccaatgacgacaaaaatgaagaacccaagcaccatgggtccaacagggtagtcattcccctttttcacagtagtctcaggcactgaacccctcttcgggataatcttctggaactttgcgctcttcctgtcagcaagacgccttgaggtagtca

SEQ ID NO: 411866 - DNA, 518 bp, Oryza sativa
tgtcccacactgctcctgctgcctctctctctctcccctccggcttctccgccgccgcgaacgcctctcgactccggcgagttcatcaccggcgttcacgaggatgactacctcaaggcgtcttgctgacaggaagagcgcaaagttccagaagaatatcacgaagaggggttcagtgcctgagactactgtgaagaaggggaatgactaccctgttggacccatggtgcttgggttcttcatttttgtcgtcattggatcatccttgttccagataatcaggacggcaactagtggcgggatggcttaaattggagctaaattcagttatttatgctgtgtctgagagagaggctgtacctgtactttgtagtgaagtttgttcctggatgatatcgtgtagagggtccatgttgtgtccgtttgcattttactaaatctaaactagatgttggtacctgaatcttacagactttaaacttaaatggatataattgaactttgatctggagacttac

SEQ ID NO: 411867 - DNA, 545 bp, Oryza sativa
tgtcaatttgttgagtatgttgtgaacttgaagttcgacgaagagccaaactatgcaaagtgcattgctctttttgatggcattgttggtccaaatccagatggaagaccattaaacaccgatggtgcccagaagcttgtatatcaggttggtcagaagagaggccgcctcacagcggctgaagatgaggagcaacctaagaaaaagattagaatgggaatgccagcgacccagtggattagtgtgtacaatgcccgtcggccaatgaaacagagataccactacaatgtagcagatgatagattagcaccacatattcaaaaaggaaatgaagatggtttgtttataagttcagtttcatcctgttcagatctgtgggctttaattatggatgctggcactggttttaccgcccaagtacatgaactctcccattactttcttcacaaggaatggataatggagcagtgggagagaaattactatattacttctttggctgttcaaataatggaagctcggtggtgatcatgtcaacaggaacg

SEQ ID NO: 411868 - DNA, 369 bp, Oryza sativa
gggggggggacctactggatgaaatatatatatatataggggggatttaggaactggttacccttgggggctgacattggggttcccattggtggaacgggaaattttttatgcacgggacaaatttatacaggggcaatgcccatggacacaggaaaacacgacaaaagacctaaaattccagggcggcgatgaacccggggttgtaggggggggaaggcttcatggggccgaccatttccccgagcattattccgccgaccgggccggcgaggagcccgagtccgagggccaagcccatttgtccaccttttcttgccgccggttgttgggccgccgcgtaactgtacgtcccccgcggcggtgggc

SEQ ID NO: 411869 - DNA, 541 bp, Oryza sativa
  unsure (1)..(541): unsure at all n locations
tctcgttgccaccacaggctacgcaaaattctctcccttcctcctccaccacctccactccgacgatcctcctcctgatcctgtgccggccggcgatggcgtaccggttgctggagctcacgctggtctccgcgagcgacctcaagaaggtcactctcttctcgcgcatgcatgtctacgccgtcgcctccatctccgggagcaacgtccccatgcccatgcacggcacccacgccgaccgcaacggcggcagcaaccccgcgtggaacaccgtgctccacttccccgtccccgcccgcttcgacacccgcggcctcgccctccacgtccagctccgcgcccggcgctccttcggcggccaccgcgacgtcggggacgtgttcgtgcccctcgacgacctcctcgccggcgcgcacgacggcggcgagccgaggccggctagctaccaggtgcgccgncccatgtccgcccgcgcgcacggnacgctctacttctgctacaggttcaccgacgtcaagcatcccgccctcgaagccatcga

SEQ ID NO: 411870 - DNA, 375 bp, Oryza sativa
acacatggaagatgtttacacacaaacacacttttttgggttggcgctagcccttgataggagccagcaggctagctgacacgtaccgggttttgggagtactaacagagacaggaaggtactaggaacagagtaacaagataagatagcaacatactagataattaattacgtattagataaccacaaggaccagcaaacatggggtgacagagagatcgaccaggcttcgatcaatgggattattcagttcaacgatggctgctcctgggctcgtcgctgtacagccaggcgtagaccgtgggggagttgggctgggggcggtagaaaaggttggcgcccaggcttttggtggcaaggttgtttcccgggtgg

SEQ ID NO: 411871 - DNA, 541 bp, Oryza sativa
  unsure (1)..(541): unsure at all n locations
tcttttgtgagttgttgtaaagttgcgagagagagagagagagatcagttagtttgttgagtggaagcagatcaggaagatgctggagaagctgtgggacgacgtggtggccggtcctcgaccggagaccggcctcgagaagctccgcaaggccgctacaacccgcccccttgtcatcaacaaagatggcgacggcgaggcgagcggagtggcgtacaagcggacgcagtcgatgccgacgaccccgacgacgccggtgacgccgtcgtcttcgtccccgacgacggcgacgacgacgacgccgcggggcagcaacgtgtggaggagcgtgttccacccggggagcaacctcgccaccaagagcctcggcgccaacctcttcgaccgcccccagcccaactcccccaccgtctacgactggctgtacagcgacgagaccaggagcagccatcgctgaactgaataatcccattgatcggaggctggtcgatctctctgtcacgccatgtntgctggtccttgtggttttctaatacgtaat

SEQ ID NO: 411872 - DNA, 551 bp, Oryza sativa
tctttgtagagagcattgtgattggtatgccacacagaggtaggctgaatgtcttgggaaatgtcgtgaggaagcccttgcgacagatcttcagtgagtttagtggtggtaccaagcctgccgaagaaggggagggcttgtatacagggactggagatgtcaaataccatctaggaacttcatacgataggcctaccagaggtggaaagcatatccatctgtctctggttgcaaacccaagtcatttggaagcagtcgatcctgttgttgctgggaagaccagagcaaaacagtactattctaatgatcttgacaggaccaagaatttaggagtcttgttgcatggtgatggaagcttcttagggcagggtgtagtgtatgaaaccctgcatctcagtgctcttccaaactacactactggtgggacaattcacattgtggtcaataatcaggttgctttcactactgatccaagggcagggaggtctttgcagcattgcacagatgttgctaaagcattggatgctccaatttttccatgtgaatggtga

SEQ ID NO: 411873 - DNA, 447 bp, Oryza sativa
gaagttaaatttgtcaaaatcttataccataaagttcatttttgttttttgtttcttaacaaaaataaaatctgtttgcagtgacatggaatgtgacctgcacatactcccaatttcttgctcagaagactccttcctgctgtgtatctctctcatcattttataatgacacaattgtgaactgcccaacatgctcttgtggctgccaaaacaatgggacaagtcctggaagctgtgtaaagtgagttaataaaaccaaaaactcttacttcgcttcttgttgaggcccaacttttctgcaaaattgctaacaagttccatgcatttccacagtgagaattcaccttatttacaatctgccattgatggccctggcaaatggaccggtcagcctcttgtccaatgtacttttcacatgtgcccgatcagaatccactggcatgtgaa

SEQ ID NO: 411874 - DNA, 426 bp, Oryza sativa
tttgtaacctgacaacttgaagctcaccgaatttcttggtttcactcatcatgcataagccagcaaagtagccaacacaatcgaaaataccaaaaccgagagtgtcaatggttgttttgtcagaggacttgcattaggcaaccatggatatgcatccggaggtggcatgacacaattatcaccattgaagtacacgcggtgtgggaaggcccatcccttgtcaaaggtgaagtccttggaatccttacgcagaagaagttctgactgtgcatttccaagtggaccagcttgcatgagcaaatcgttatagaacttaactgcccagaacatcgcaggatcatctaaaatagaaggaataaacttcattagataaagagagagagagagagagataaaggaacgtattacaagtgcacttcaattttc

SEQ ID NO: 411875 - DNA, 445 bp, Oryza sativa
attttatcagcgtgaagcagcggcaagaacacaaaaatggcggacgagaagctcgccaagctgcgtgaagccgtcgccggcctctcgcagatcagtgacaacgagaagtccgggttcatcagcctcgtcgcccgctacctcagtggcgaggaggagcatgtggaatgggcaaagatccacacgccgacggacgaggtggtggtgccgtacgacaccctggcggcgccgccggaggacttggaggagaccaagaagctgctcaacaagctcgccgtgctcaagctcaacggcggcctcggcaccaccatgggatgcaccggaccaaaatcggtcatcgaagtgcgcaacggattcacattcctcgacttgattgtgatccagatcgagtccctcaacaagaagtatggcagcaatgtcccactgcttctgatgaactcattcaaca

SEQ ID NO: 411876 - DNA, 539 bp, Oryza sativa
  unsure (1)..(539): unsure at all n locations
gtttcatgatggagtgattagagaaaaacctagcaccccagaagaggcacgaaagttcatcaaaggatactccgaaagccatgcagcgacaattggatctgttcttgttactaatgtgaaaagtggagccagaaaggaaggatgggacaaagctgaagtttatttccataagatacccgatgaagttgttgagagtttgattgaggagggcgatgtcttctatgttgccggtggcctgctggtagagcacccgctgacttcacctcttgtggaagctattgttggcaccatcgacagtgtaatgggactcccgaaatccctcacggagaagctgatcaaggagtcccttgaggagccatagctattttttttaccgggacaactgactgcccatgctgaagttcatatgctagaatttttcactcatctgctgcacaaccaactcgtcatacactctgcttggattggaggatggagatgcatcttaccgatgttgtcagcttgactatgctaagctacttgccgngattggcattatt

SEQ ID NO: 411877 - DNA, 472 bp, Oryza sativa
attctacacaagggattaactcatcactcacttagctaattaaatcttcgaccatgtcggacaagtgcggcaactgcgactgtgctgacaagagccagtgcgtgaagaaaggtaccagctatggcgtcgtcatagttgaagccgagaagagccacttcgaggaggtcgccgccggcgaggagaacggcggctgcaagtgcggcaccagctgctcctgcaccgactgcaagtgcggcaagtgaagtcacgaagcaaccgaacactcgccgccggcgagtcacctaccttaattagtccacaataaaaaccacccatatgagtgtggtttgtgtgtgtgctgattattgctgaattaaacccgtgtgttatcgattaattaagcagctggtcgcttcggcgactatgcgtgtatcaacgtatgaatttgtgtgatgtgatgtacccgtgctattctcagtgaaattaatcaatc

SEQ ID NO: 411878 - DNA, 414 bp, Oryza sativa
aatctccaaattcaagtatcaagtgtagtatatcatcatcatgcaagtacagggttacatagattaatcacaatgcagtttgattaagcagtgggcatcatcacatcgcattcagaggaaggctatcttagattacagatgaatatgcagacacccagcttggtgttacatacatagactggatttgggtgaaatttagccggcgagggcgctggagctgcagaccaggagggcgccgacgccgaggagcccggcgagggtcacgggccacatcagaagcccggtggttccaccaaccaaggtgacaccggtgggagaccattcctccggccagcagattgggctgtacccccccacgtttgccccccacttgtcaacgaattggcacccacccttccccgggctcctcctgcc

SEQ ID NO: 411879 - DNA, 381 bp, Oryza sativa
attattgatcaggtagaacagagcgagtggggtgcagataacttatgagctgaaactgaggatcgcaacatccatgagcacctcgccgctggtggcgccggcccggaccaagggccttgcgtccatctgccgccggggatcctacttagccatccgctgcagaggtgccaagaacatcaagaccgacacgccctacctgattggaggagacatgccagtccatattgatgcatctggcacgatgcgcacggagcacggtgcagcccaagatcccgacaagtacgtgccaaaccggcaccgctacagcccaatctagctcccgggggaagggtctctacaccggagacacctaccttggaggaaccaccgggcttgtgatct

SEQ ID NO: 411880 - DNA, 422 bp, Oryza sativa
tctccttttctccgttcatctcgagcagaggagaggaatggattcctcctccacctccgggaggaagggaggaggactcctcctctcgccgccgccggcggcggtagttgtggcggtggcggtgctcctgtcggcggcagaggcggcgacggaggagccgtgctacccgcggctgttcagctttggggactcgctgacggacacgggcaacttcgccttcatctacggcaacgactcccgcgagccggcgctccgcccgccctacggcgagaccttcttccaccgcgccaccggaagattctccgacggccgcctcgtcgtcgatttcatcgcggacgcgctggggctgccgatcgtgcggccgtacttgagcgggcggaccgcgggggacttcgcatgcggggccaactttcgcggtgggc

SEQ ID NO: 411881 - DNA, 549 bp, Oryza sativa
gaggcggcgacggagctggtgcggaagggcgccacgctcctcctcctcgacgtgccccagcgcaccctcctcggcgtcgacacccaggtgttctccgtcgggcccaagttcaaggggatcaagatggtgcctccggggccgcatttcctctactactgctcccccaacaggcacgcaaatgagttcgcacctactgtcggattctttcttactactcacccatctgaggtgattgttcggaagtggcatgcacaggaggagagattaataaaactacgagaagaggaggaaatcagatattctgaagcagtaagacatttcgagtttgacagtcagcttggaccatataatttggattcatttggagattggaaacaactctcaagctacttgtcacaaagtgtcattgaacgtcttgagccaattggtggagaaattacaattgcatgggagtcatcatggatggataaagctccgcaaacagacatggagagacgtttaatggaccaactaaaagatggaaaatttgcaaaagaatgctcctgtgca

SEQ ID NO: 411882 - DNA, 548 bp, Oryza sativa
gtgccattgccggccacactcctcttcctcctccatcgccaagaaccaccacgagcaatggcgtcgctgtccatggccacaacgctgccgtcgctggccggcgccgcaccggcggcgaggaagaggagcggcgtgacgtacgtggaggggatgaacgcgtacagcgggctcaaggcgctcaacaaggtgaccctgctcggcgtgcgcaagaccgccgactactcgttcgccaaggtggtggccaagctgagccccgccggcgggaagagccgcggcggcgcgttcggggcgcagtgcaacgccgccggtgagatattcaggatcgccgtcatcatgaacgggctcgtgctcgtcggcgtcgccgtcggcttcgtgctgctccgggtggaggcggccgtcgaggagtcggagtagtggaccccgatcgagccatagcaggcagggcccagccagccatggctggttggccccgataagccgtgatatataactgtgatgtatgtttcgataaaatttgctttcgttttgacccatgacgattggtgata

SEQ ID NO: 411883 - DNA, 435 bp, Oryza sativa
agggatcacttattcattatagttcttccatgctgctctaccacagcaaaacgtttcagacaccatcaaaccagacttaaggatacacattacaggtaaatagtacacaatgaaacgggacacgaccaaggaccagaccagacaaccatagctccattggggaagacaaataggcagacttgtgaaccctagaacagcagcagctccatggctgaggacttactggccaccacggaggcggagcaccaggtggagtgtggactccttctggatgttgtaatccgcaagggtgcggccatcctcaagctgcttaccagcaaagatcagacgctgctggtccggggggatgccctccttgtcctggatcttcgccttcacgttgtcaatagtgtcggacgactcaaccttaagggtaatggtcttgccagtcagggt

SEQ ID NO: 411884 - DNA, 502 bp, Oryza sativa
tttttggaccagcagcgtctcatcttcgctggcaggcagctggaggacggccgcacccttgccgactacaacatccagaaggagtccaccctccaccttgtgctcaggctcaggggtggtatgcagatcttcgtcaagaccctgaccggcacgaccatcacgcttgaggtcgagtcctcggacacgatcgacaacgtgaaggccaagatccaggacaaggagggtatccccccggaccagcagcgcctcatcttcgccggcaagcagctggaggatggccgcaccttggctgactacaacatccagaaggagtccacccttcacctggttctcaggctcaggggtgggatgcagatcttcgtgaagaccctgactggcaagaccattacccttgaggttgagtcgtccgacactattgacaacgtgaaggcgaagatccaggacatggagggcatacgcccggaccagcagcgtctgatctttgctggaaagcagcttgagg

SEQ ID NO: 411885 - DNA, 443 bp, Oryza sativa
ggttcatccatcaaggggaattcaatccatagttatcttgacagcaaatagtttggtaactttgaaactccacagtacaatacggcgttctagaggtccagacaaagagcatcaaagcaagaatgaagagaaagacaattggaatcacataaaaagatggcccaaagcacactaatttttattacaaccgccacgacagtcttgatcgtactgactctaaggcgcaaaatacaaatcggcattaatcttttgcggatatcccgctctctaaaggcttcttattcctcagcaaatcccagttcagagagcttgaggtgggcctcggcgtaatccgcaaagaaggcgtcctcatccgcagcatatttctccaccagtggacggaaggctgggtcagccatgagggctttgtcacttggcagctgaagaaggccttccttctcgcc

SEQ ID NO: 411886 - DNA, 547 bp, Oryza sativa
tgttgaagcaggggagcatgggcagcaagtcgtacccgacggtgagcgatgagtacctggcggccgtgggcaaggcgaagcgcaagctccgcggcctcatcgccgagaagaactgcgccccactcatgctccgcctcgcgtggcactctgctggcaccttcgatgtgtcgtcgaggaccggcgggcccttcggcaccatgaagaaccccggcgagcagtcccacgccgccaacgccggcctcgacatcgccgtcaggcttctcgaccccatcaaggaccaacttcccatcctctcctacgccgacttctaccagcttgctggcgttgtggccgtcgaggtcaccggcggacctgaggtccccttccatccgggcaggcaggacaagcctgagcctcctcctgaaggccgtcttcctgatgccacacaaggttctgaccacctaaagcaggtcttttctgcgcagatgggtttgagtgacaaggacatagttgctctttctggtggtcacaccctgggaagatgccacatggagagatctggctttga

SEQ ID NO: 411887 - DNA, 411 bp, Oryza sativa
aaaatgctaccacatgacccaattttaatacaacagaacatttggtacaagttcaaaagaatgatcagggtcattaatcattggtcgaaacggttgacatcataaaactcgatgttcttatatttctgggaaattatttttgcctgaactttccgagctgtgtcagttgcacatccaacaaggataagcactgatgtaccagcaaatcccctgaatgccgttaagtgagtgatttgttcaaccacagatggtccagcagctaaaacagcaaggaaggcaaatcctaggacagatttattactaagaactgtttttattaaggcagctgcactttttcctggccgtacaagcggtattgaaacaccttgccgtttaattgctcactaagatcattaggatccaattgaagga

SEQ ID NO: 411888 - DNA, 439 bp, Oryza sativa
gtttgtaaggacagttgcacaggcatttcaagatgggaattatgttgggcttctgacaatcatattatcattccttttcttagttcttgggattgtttatgtccaagaagccgagaggaaaattccgctaaattatgcttctcgatacagtagtcggagtggagggctccaacgatctgcatatctaccatttaaggtcaatagttctggtgtcatgcctataatattttctacatcttctttggctttgcctggtactttggcacgatttactggcttagactttcttaaaaaggctgccatatccctaaatccaggaggtgctttgtatattccaactaatgtactgcttatagcctttttcaattactattacaccttccttcaattggatcctgatgatcttagtgagcaattgaagcggcaaggtgcttcaata

SEQ ID NO: 411889 - DNA, 387 bp, Oryza sativa
aaaaagagctaagtagaatatcatcatccacgaaaatggcgtcacatgcatacatttaaaaccccatttttttgctgccgccataagcgccccactcttacttattcagttcaagacttcaggcgaaggctacctctcaccttcaggcgcggggacctcacctactgggttttcgccgactcgcttttcgacggctgggcctccggcgatgactcgccgaaaaccttggcgatgcgctcgggggggatggcggggaggaactgggctccggggtaacccttgtcggccggggcggcaaacaccttggtggacttttcggcccaataggcggcggtgggcacggggatctgcgccacctgggggaacagcggcaggttgttgagcgag

SEQ ID NO: 411890 - DNA, 347 bp, Oryza sativa
ggcttaacattcaaatatggccatttgtccattcccttttaaaaagtttaaaccatttttgggtcccaaaattttacagaagaacatagcacgaactcaacacgggcaatacaaaacttttacaaatcgatctttttgctgcccccctatgcacaaatttttaaaaatcgctgacccccttttttaaaagttgatgccgcactgcctgacgtcagggcccctggccttgatggggaagggatcaatcctgacccaaagcaaggaaaagatggaggctagcagaacgggccagatgacaacaatggggggcgtccggttttgcctccccaagagccccttgaggaagg

SEQ ID NO: 411891 - DNA, 508 bp, Oryza sativa
gcttgatgggatccagggcccggtgtacgtcgggacagggtgcgtgttcaggcggcaggcgctgtacggatacaacccacccaagggacccaagaggcccaagatggtgacctgcgactgctgcccttgcttcgggaggaagaagcggaagcacggcaaggacggcctcccggaggccgtcgccgccgacggcgggatggacagcgacaaggagatgctcatgtcgcagatgaacttcgagaagcggttcgggcagtcggcggcgttcgtgacgtcgacgctgatggaggaaggcggcgtcccgccgtcgtccagccccgccgcgctcctcaaggaggccatccatgtcatcagctgcggctacgaggacaagaccgactggggtctcgagctggggtggatctacgggtcgatcacggaggacatcctaacggggttcaagatgcactgccgcgggtggaggtcggtgtactgcatgccgaagagggcggcgttcaaggggtaagcg

SEQ ID NO: 411892 - DNA, 368 bp, Oryza sativa
aaaaactgtttaactttactcactaaaccacataatatatattttttgggccccaagcatttaatagcccaggccattacccacaccatactatcatcctatatcagtttttaagtagctacacgtgggaaattaaggcggcccgatgacgagttttttttaagggaaggcccatggtttgcccgccgccccgggttccgggcacggaaccgggaaaacgtcggaggcgaaccctttgacatgggggcagttccatggcagttttttggcgtccggcgcgagctgcccggtgacgttggacatgcaaatgccagggtaggggtcgttggaaatcccctcaatcctgccggccatggggacgttttccg

SEQ ID NO: 411893 - DNA, 463 bp, Oryza sativa
cgtcttcgagatcctcgcgtctcagaacttggaagattggcctctgatagctcctctgccatcctacggaagaggaagggacgaaccaggcccaagatacagcaatttcattgctggatccaatctcacagatgtcatcatcactggtaggaatggaacgatcaacggccagggccaagtctggtgggacaagttccacgccaaggaactcacctacactcgcggttacctgctcgagctcctctactctaacaatatcatcatctctaatgtcaccttcgtcgactcgccgtcatggaatctccatcccacctactgcaccaatgtgaccatcagcggcatcaccattctagcacctctcaactcgcccaacaccgatggaatcgacccagatttcttctcccatgtaaagatccgggacagctacattgtgtccggcgacgactgcatcggcctgaagagc

SEQ ID NO: 411894 - DNA, 540 bp, Oryza sativa
tgttgagggagcctcgcgccggctttggatttttcgttctgcctcgcgaccgacgataaaaatcgtgcgtccgatgaggcccttctcccctcatctccggcaagccgcggcggcggcggctgctgcggccactggcgctcctcccctcgccgcagctctcctcaagaattcttctgctccccttatccatggccggctcagcttcagccacacgtcgctgcagtcaccgaacaaccgcgggaaacgaacaggctgggcggtgcgtgtgctgccgctgacggaggagaacgtggagatggtgctggaccaggtgcggccgagcctgatggcggacggcggcaacgtggcgctgcacgagatcgacggcctcgtcgtcgtgctcaagctgcagggcgcctgcggctcgtgccccagctccaccatgacgctcaagatgggcatcgagacgcgcctccgcgacaagatccccgagatccttgccgtcgagcagatcgtcgacaccgagaccggcctcgagctcaaccacgacaacgtcgacag

SEQ ID NO: 411895 - DNA, 531 bp, Oryza sativa
ttctactgcttcctttgtgtatggtttgttggtggtctttctgtcttccattgctatttgatgagcaccaaccagacaacttatgagaacttcaggtatcgctacgatagacgggctaacccgtataacagaggcgttctgaacaactttctagagatattctgcagccgtattcctccttcaaagaacaatttccgggcaagggtcacagttgagcaagggctacagcaaacccgtgtagcatcaagaggttttatgagccccaacatgggcaaacctgttggggatcttgaaaggggcaggaagcctgagccttgggatgaaccgaggacagcagctgatatcagggacttggaagcaggtctcgggggctttttggatgagaaagagggtagactaacgcatgcatccccagatctgagcagggacgaccttacagctgatctcatgaaaggacgagctggcacacattcaaggcggacaagttgggttaatagaactggaacttagaatcagagtgaccctggcatt

SEQ ID NO: 411896 - DNA, 540 bp, Oryza sativa
tattgctgaggaaatctgtcaacatgcccaagactgccatggcattcaccatagcagcctccattgttggtcagacaatcgggtcgagggcggagcgcattcgtctgaaggcactggctgcaaagagcgacgctgattccaccaccgtggctgacatgtatccaaacaagactggaaattgcagtgacaccgagggcaaggcatgggatccgctcgcgatgaagatgatggcgggacgggcttctggtggtgctgctgctccaacaccaagcatgtgtttctgattgctcactgattggaaaatttgtatctaccagtatccctggagagtggagagttgatattgagtctattttatcttgtgatgtaattgcctctgcttgtccctcagaagtattcgtttgtttgtggggtgagacaagtggaataagagtgctactatatacacgatcattttgttgttaagtttgccaagtctgcagttcatgtatctgaaatttgatgatgctggatttctactatttatcaaatcgtcaatag

SEQ ID NO: 411897 - DNA, 508 bp, Oryza sativa
tttcttacttttgacagtggtggctacaacattaagactggaccaggctgcagtattgagctgatgaagtttgacatgggaggctctgcagcagtttttggtgcagcaaaagctttgggccaaatcaagccccctggagtagaggttcattttattgttgctgcttgtgaaaacatgattagtggcacaggcatgagacctggtgacattgtgactgcttctaacgggaagactattgaggtaaataacactgatgcggagggaaggcttacacttgctgatgctttggtgtacgcttgtaatcaaggtgttgacaagattattgatctggcaacacttactggtgcatgtgtcgttgcacttgggcctagcattgctggaattttcacgccaagtgatgaactagctaaagaaagtgctgcggcatctgagatatcaggagagaagttctggagaatgccactcgaggaaagctactgggagtcgatgaagtctggtgttgctgaca

SEQ ID NO: 411898 - DNA, 383 bp, Oryza sativa
agcttcaactacaaaccacttactccatatggaggcagaataagtaagtaaattgttttacttaactttcacaggaatagaatgcccccgggacatgcccctcccttcttaaacctttttgacagaatttgttccttctattttagatgataccgcaatgttctggggaggaaaggtctacaacgatttgctcatgcaagctggcccacttggaaatgcgcaggcagaactacttttggggaaggattctatgcctttcacctttgacaagggatgggccttaccccaccgggtgtacttcaatggggaccattgggtcaagccaccttcagatgcatatccatgggtgcctaatgcaagccctttaacaaaaccacccttgg

SEQ ID NO: 411899 - DNA, 335 bp, Oryza sativa
catgattcagagcagcagctctttccacaagccattacatggttccctttgaagaaggtagagatcttggcacaagccaaaaacattgagcgtgtttgaggacctggaactggaaccaagatcatctatgaaggaaagtagccaacacaatccaaaatgccaagagcgggagcgtcaatggttgttttgttagagggcttgcattaggcaaccatggatatgcatctggaggtggcatgacacaattgtcaccattgaagtacacacggtgggggaaggcccattccttgtcaaaggtgaaagccatagaattcttccgcagaagtagttctgac

SEQ ID NO: 411900 - DNA, 267 bp, Oryza sativa
gaaaaatgcggaaaaatgaatgcaaatttttgggtggtttacaaaaagtatgaaaaaacaagcttttaaatttgaaattataccgcaaaaagaaaatttggataaaaagttcccagtccgaccaaaaactaaggaattccttgataggaaaccccaaagtaggaagtccagggttttttgagacgctgtaaaaaggttttaaatggaggtattccctttataggctttcttttttgatgtcgcaaagttaaaaccaagaaatatctg

SEQ ID NO: 411901 - DNA, 444 bp, Oryza sativa
cgttatccgacgttggcaatgatctacgtgctgatcaaggcgaaggacggtgacgcagcactgaaaagattgcacaacgaggttgtggacacagaattgttcagtcgtttgcaggaaatccatggcaaggattaccacagcttcggggagagaaagctggtgcctgtagtcagcgatgacagagaagccaacgttggcatggaccatgagcttgccggcgtgatcgccgacgaggtcgacatcatggtcaactcagcagcaaacaccactttcgacgagaggtacgatgttgcaatggacattaacaaccgaaggccattcaggataatgagcttcgcgcagcggtttcggaggctgaagctgttcttgcaagtgtcaacagcatatgtgaacggacagaggcaaggtgtggtgctagaaaagccatttcgttgggggacacca

SEQ ID NO: 411902 - DNA, 483 bp, Oryza sativa
ggtgctgaaccggaggaaggcggcggcggcgagcctggcggcgctgaagagcgccggcgtggaggggatcatggtggacgtgtggcggggcatcgaggagagcgagggccccggccggtacaacttcgacggctacatggagctcatggagatggcccgcaagaccggcctcaaggtccaggccgtcatgttcttccaccagtgcggcggcaacgtcggcgactccgtcaacatcccgctcccgaggtgggtggtggaggagattgaataaggacaacgacctcgtcttacactcgaccaatggggacgccgcaactttcagtacatctaccttgggtgtgacgccctgcccgtctttaatggtccgaccactccttgggtgttcaccgaattaaagcgcgccttatgcgaccacttgcctttctaatccatccaattgtaattcgaattccagcagcaatcgggaaggagagaaacagaacc

SEQ ID NO: 411903 - DNA, 409 bp, Oryza sativa
caaataaaaaaacgttgtatttttgtttgaaaaataggaagttcaagatagaatttgggtactataactataggtggggcgattaccgctataggcggggcgattaccatatataacataagacttctcccccaattctgtttagtcgagcttctcgatctgtcattatacctcgagaagtagaaagaatagcaattcccattccgcccaaaaccttaggaattccttgatagttggcataaattcgtaagccaggtcggctgatacgctttaaaaaggttctaggtctatatattccctttctaggctttctcttttgatgtcgcaaaggttaaacccagaaatatttgttactttcctgaagtttccgaacactttcaataaaaccctttcgtagaagtattttaac

SEQ ID NO: 411904 - DNA, 448 bp, Oryza sativa
tgatagaaccatcgactataaccccaaaagaaccagatttcgtaaacaacatagaggaagaatgaagggaaaatcctaccgaggcaattgtatttgttttggtagatatgctcttcaagcacttgaacccacttggattacggcgaggcagatagaagcaggacgaagagcaatgacacgatatgcacgtcgtggtggaaaaatctgggtacgtatatttcccgacaaaccggttacaataagaccgaccgaaacacgtatgggttcgggaaagggatcccccgaatattgggtagccgttgttaaaccaggtcgaatactttatgaaatgggcggagtatccgaaactgtagctagagcagctatttccatagctgccagcaaaatgcccatacgaagtcaatttcttcggttagaaatataacccccccaaaaaagtagtattgaa

SEQ ID NO: 411905 - DNA, 437 bp, Oryza sativa
  unsure (1)..(437): unsure at all n locations
ttgtaagcgcagcaggaatgtactctccattgtcctatgcatttgctcaggcaagcgtggagttcatttacaatatcatacaagggattttgtacacggtcatcatctatgcaatgatcggatacgattggaaagctagcaaattcttttattttctattcttcattgtttcaagcttcaactacttcacatttttcggaatgatgttggtggcatgcaccccatctgcactgcttgcgaacattctcataacctttgcactccctctttggaacttgtttgctgggttccttatttttaggaaggcaataccaatttggtggaggtggtactattgggcaaacccagtatcctggacaatatatggtgtcattgcatcacagtttggagggaacggnggatcgatttcagttcctggtgggagccatgtagcaatg

SEQ ID NO: 411906 - DNA, 498 bp, Oryza sativa
ttgtcagcggccatggggcaaatgggctgcggaaatcagagatcctcgcaaaggtgtccgcgtctggcttggcaccttcaactctcctgaggaagctgccagagcttatgatgctgaagcacgaaggattcgaggcaagaaggccaaggtcaatttcccagatggggctccagtggcttctcagaggagtcatgctgagccctcctccatgaacatgcctgctttcagcatcgaagagaagccggccgtcatgtcagcaggcaacaaaaccatgtacaacacaaatgcttatgcctaccctgctgttgagtacaccttacaggagccatttgtgcagattcagaatgtctcaattgttcctgcaatgaacgcgattgaggatactttcgtgaacctgtcctctgatcaagggagcaactcctttggttgctcggactttaaccaggagaatgatatcaagacccctgacataacttccatgcttgcaccgccatgaca

SEQ ID NO: 411907 - DNA, 439 bp, Oryza sativa
accatgaaacgaatccataaaacagcattgaccacaatgccgaatgcaaaaacatataaaaacaccaaaattaaacatctccagacatatctttaattcgagctacctaacatggtgccaaaaagtgctaacataaaccaacatctgaaggccaacctgcttgaattctgaaatccagataggcaagctacagaatttgggcccagttactcagcacagaaagttttatgatcattaaggaaacaactagttgcaaacttcttttctcattcctcatcttcctcctcaccgtcaccgccaccgtcgcttgccttcttctggttcttcctcttcaccctaccaggggggcctccaccgaatgggcttgtcagtgagaagtcaatgtgcttttcagactcaaccctcaccatgaacgacgggatgttgacaatttgcctgc

SEQ ID NO: 411908 - DNA, 508 bp, Oryza sativa
tatgaatcggcggcggcggcgacgctggagaggcggtcctgcgacgatggtccacgtcagcttctaccgcaactatggtaagacattcaagaagccacgtcgcccttacgagaaggagcgtcttgatgcagagctgaagctagtgggtgagtacggactgaggtgcaagcgtgagctgtggcgtgttcagtatgctttgagccgtatccgtaacaatgcaaggcacctgctcacacttgatgagaagaatccacgccgcatcttcgagggtgaggcactgcttcgccgcatgaaccgttatgggctccttgctgatgggcagaacaagcttgattatgtccttgccctcactgttgagaactttctcgcaaggcgtcttcagactcttgtcttcaaggctggcatggccaagtccatccaccatgctcgtgtcctgatcaggcaacgccacatcagggtcggcaggcaaaatgtcaacatcccgtcgttcatgctgagggttgagtct

SEQ ID NO: 411909 - DNA, 457 bp, Oryza sativa
tcgagagccgagaggtttgcgcccttgcagttgcggggtgggaggggagaatggcgccgccgctgctgccggcggctgaggaagacggtggttgcgtggcgaggtggatgcggagggatgtgctgctggggctggcgctggggcagttcgtgtcgctgctcatcacctccaccggcttctcctcctccgagctcgcccgccgaggtatcaatgcaccgacatttcagtctctgatgaactacatccttctctcccttatctatggaggtatactcatctaccggagacagcccctcacgataaaatggttctactatttgatccttgggattattgacgtggaagcgaattatatagttgtgaagtcttatcagtacacatctttgacaagcgtgatgctcttggattgctggtcaatcccttggtcgttattcttacatggattttttgaagacca

SEQ ID NO: 411910 - DNA, 466 bp, Oryza sativa
gcagatgcatttcatttatacaagtagaaggcactcaaatcagccaccacatgaacacacacatgttccatcatcgatcgatctacacatgcatcacccggtcatgcacttacaaacaaaagatctacttgaagaagtacgggaggtcgagcacgtagaggaggaagtaggcccagaggatcgccggtagatgccgccgaagaagaagccgccggtgaacttggccccagccgtcggcggttctgcagcttgtcggcctccttctttgcggccggtgagcgtcagcgttccggcgccgtggaacggctcgccctcgccgaaggaggcgacgccgtacatggtgaggcagacgctgaggatggcgactaggccggcggcgccgagggcgccggcctggccgtgcaccggcgtgtttcggagcgggccgttgagcgcgaaaggcccgaccaggaggtagccgtggtcg

SEQ ID NO: 411911 - DNA, 134 bp, Oryza sativa
attataaacactactactttattgaatcatctccaagaaatgagtttaagctttacaagaatatattctatttatgtgaattactaatatctttacctaaccaaaagaataattcattgttcacgatttttgag

SEQ ID NO: 411912 - DNA, 423 bp, Oryza sativa
atgcaagagtagtatgacctatgaaatatggtcatatatacactactctgtttcatagaaacttccctatatatacacaatgttaaagtgtacatatatttgcagatactgcaatactttgtacattgcaagacttgaatacaagataaattgtaacaacaataccacaagctgatcatgatgatgttaggctagagcagtgcctcactgaagaggggagcatgagtgatctgtagtaagctttaggcagagccacaatcttctttgcctttgggacgtaggcccttttggtgaagttgttgtaatcgttggccttgatctcgtcaaggatttgtcggtacagaagtagagaagcccaaaccggccattggcttttctgattgagctcgctggcgcctttttcggcctgtctgaaaaacgccc

SEQ ID NO: 411913 - DNA, 380 bp, Oryza sativa
actggcaaacagtatcaattccaggatctagtaatttaagtccacagttaaagctagtatcacaattcgcatcgacaacacaccattaatcaacacaaggaaaaaaaagagtaactagagcatcaaatcacctaaaataaacatcttacgacccagatcgacagttgcaatacagtactaggtaataataacacaagggagcacatcctcaatcatcatctacgatggatgacgagagcgagaggaatggcaggcaggtaggtggcttaggcagcaacctcgtcttcctcctcgtcgccgtagtcctcttcctcgtcgtcggctgtcgcgtcctggtactgctggtactcggccaccaggtcgttcatgttgctctcggc

SEQ ID NO: 411914 - DNA, 219 bp, Oryza sativa
gaagtgttaatttaaatacttaatagtaatagactctatgatggtgtatttcaaaatgcaccaaaggcgttaattcggccgaacattaattaagtttcacatattcgggctccattccggttttttacaatctatcgatttacagagtttctgaagccttccggaataacacttggcacatcatgttactaatacttaacaataggttgcatcctaaaa

SEQ ID NO: 411915 - DNA, 312 bp, Oryza sativa
ataataatctcattgattgaaacccgtttaggaaaatttaagcggcaattaaggaagtaatagtttagttgtagcagtagaagagtacaggaacccacgttaattaatcacccgagagccatggatggatcggccggtaagggctcggtcttagaccttacacgaggcggcggccagatggggatgccctcgggcaatggggagctggcaaacgtcaatgcccggttcggggggcccgccctggatttgagggccccttatggcgacgcgaaaacctccggttccaggttccgacaggggggtgtccggggg

SEQ ID NO: 411916 - DNA, 426 bp, Oryza sativa
cgagacaaatgaggcattcataattcattcattaggcatacgaaaagtagagagtacaggggaaagcaagatgagttgcatcagattctgaatcatatggcccctcctcctgcacttacatcacccactgtttcatctcatagcaatcactggctcgcaaaaggacacacactgacacaaactcgaggcacggacggacaccattgactgccatactccgatcgatcgaacgaacgaacacggtccttatttcggtagcagatcgatcaaattattagctagagtcagaagcagagcagacgcgacgacgatggcaatgcaatgcaggtccccctccccggaatctaccaggggaggatcttccagcgctggttgtcacccttgcaccaattccacagcacgatctcggtgccatcggggatgccg

SEQ ID NO: 411917 - DNA, 366 bp, Oryza sativa
acgtaataccatccattttttttattggcgaccaatttatcaaaattgctctaaaaacatattttgggggaatatagccggggctttgttttaaaatattcttacccaacgaaaattggagaacttttacaataaaaccggtcggaaagggagggaaaagatttttacatatgggtctaagagcagaggcccttgaaatggtccaaaaccaaattggaaaataaaaatttatggcatattaaatattgggttatcatcaaaatagccccaaaacaaaggtggatactataattaaagggagaaatccaccaacgcgaagcttgatcttaggttaagtgcccccaaaattcttgaaacctgggggct

SEQ ID NO: 411918 - DNA, 439 bp, Oryza sativa
cctgcaaaattcttatgttccaagaaacccttacagcccacaggaaatgaccggtttgcatttttcaggctgacgttacaacgcgcttacttaaatataaacatacggaaagctaccgaaaaggaatgaagtgccatccaagaagaaaggcacaaaaatgctgcccaggaaggcaacggggcgataaactggaaaggatattgggggatggctgcacagcaacaggattacgttaacaatacagcttttgcccaagacagagttaattactacaacattttgtggtcgagttcagacggttcaaaagtacaggccaccgtaagcctttcgattaaaaaccaaactgtaaacacgtcacgattttttaacacccgacgaaaaacaatgtgatacctagctcctttggaggtggaacctaaagagctttatcttcccaaaa

SEQ ID NO: 411919 - DNA, 402 bp, Oryza sativa
gtaagattcttagaattattgcaggcaattgcatcacattaccagtcagtagcttttcccatgtattacaggttccaacgaaatagcggtaaatactgatgagcgtcgctcaaggccaagttagggctgaaatattttggatcaattgatgaccaaatggagttgcttttacttgaattttagagctatccctcccaggttccaacaccaatgtagttggactggaacaccaacaagctcttctatcctctcgacatagccgttgggcagctagggggaagtttcactgtaactccggtacagacgaaatgtcactttgccacccaggcaacacctaatatttgacctgtacttgctccagagtattaagatcccctgggaaggatttgtagcttctgccca

SEQ ID NO: 411920 - DNA, 454 bp, Oryza sativa
gggggaaacaacgtaaggtattgataattatgtttcctgaggtaaggtatatccaacaaacacaaaatgctgggaagttattcaaacgatttccagcatctctataaaacattggtctcttacatttcgagtggttgaagaggtgcgagaaaggagtagaatatagcaagtttagaatggtacatgaagaagatgcaacaaaatgaaacttagcctcattacggccacagtgacagcttcatcaagtgcaatgactccaggaagttcctttccttccaacagctccaagctagcaccacctcccgttgaaatgtggctcataacatctgcaactcccaccttctcaacagcggcaacagaatcacctcctccaataatggttgtaacacccttgccgctaaggtctgcccacttctttgcaataacctcagttcctactgcaaacttgtcaaat

SEQ ID NO: 411921 - DNA, 466 bp, Oryza sativa
aggaaaaaaaacattttcaaatacaatatttatttcttaccgatacaaattgataatctcggggttacagatttgattagaatatatacttgctataaacaagtaggaactttcttacacctcaagtgataaccttacaagactaacaataaaataaaaatttgatcgcaaaacacagaaatcgcaaaagatgtgctcttcaggtattctacgctagacatggcttcctgcatctatcctcaagcagcagaatctacaacttctgccggtggggactagggagaaaggaatgcatcgaatagcctaggtatttcagtatctgatcccttttgcaacctcaaagaaatgggcaacattttcctcaggagtgcctaccttaatgccatgaccaaggttcaatacatgcccactattaccagctttctgcacagtgtcaaaaatccgcttgcttatgaactcttttgac

SEQ ID NO: 411922 - DNA, 438 bp, Oryza sativa
cctcataatgagagtaacatatttttaaattgatagcttatggtccactaatggcagaatgccgaaggttacattattctttctgacttctgaacgtttggaacttttgcgatgtgaaatcccacaatgtatttacttacaattagtacatccgaaacttctccttagggtctctcgaagacttgttcagcaatcagggctccattgccatctgcccgccttatctccaagttggccttctggtagtaagcagttcccctcaaagcatcagcaatgaagtcatcgaatccaatggcaatagcagtttctgccttggctccatacaccagcctcttaatccgtgatagatgcacagcgcctaaacacattgggcaaggttcacatgatgcatacatttcacagtctgacaactcaatttttccaagctttttgcaagcc

SEQ ID NO: 411923 - DNA, 439 bp, Oryza sativa
aaagggaactcaattcatgggaacatcacggacgaaaaacacctaacactggatggatggattgggggcttttcgactcgggagagccactggacacgataacgactcgactcgatgataagatgattctgacccggatagctaaggataactggccacgatggtgccccaccaatcagtgtcctccagttcccgccgggattcgccgcccgtaggccgcccgccacgggttgccaccgtatgccgccgtccgtccgcccgccacggtccgctccgccgtagaccgcccgtccgccaccgttagccggcccttacggggccccgttatgccgccgccgaccaccttcttcgtaagccgccgttctccacaaccgccgccgttagccgccaccgtcgccgccgtatcccccgtcttcgccgtcggaacggcggaactggg

SEQ ID NO: 411924 - DNA, 438 bp, Oryza sativa
gattcatggtatgtatgcttttaaggaacacaaagatgtgagtattcctcagtacaggtgatgccaaaacctgagctctaacagccttgctgtccaaaaatttattatgtatcaagcatcaaactttcccgggggcaaaaaagacctacttcacctgattaatgagtttcctctcatcaaaaggatgacacatgaattatccactaaaattaagatttaggtgctaaacttcaagctaattgaatacaatttccagcccacaacaaaagatggaaccttcaggaatacatcggccattatcttttgcataagaatcaagcactggcttgcaatgctttctctgctgcaccgggcgcgggccgtaacaccacccgttgttggaagttcaaccatgactttaaaagcatcataaataccccattgagcaccaacaagagt

SEQ ID NO: 411925 - DNA, 367 bp, Oryza sativa
acaaataaaggacatgcaatgcctggcctgtattctaaatcataaccagcccatggaaaacgctaatacagggatactaataatgggctgcaaatacaggaaggggttgaaagttgctaattaactagtaaataagccacggaagcaatgtagtgcacataaactgtgtccactgggtacttaagctcgacacattttgacatacgcagccctaatcttatgattccacatagcaattgatcctagtacatcttatgaaccagtaatacagcaggtagctgagtaaatggactcaaaaatagacttcaggacagattaggggccctttccttaaggcttcgctgcttccttgatcttggcaccacca

SEQ ID NO: 411926 - DNA, 321 bp, Oryza sativa
gaaaggaaacacaactcattttttattgatatatgttggatgaatccaataaaaccgatacaagtcacgaaaaatcagactagatgaatccttcgagatcacatgagcaaaagctttcgacgaaagctgtcctatagtcgtggaagcaataacacttgataaagataggaattcagacacgagaggttgcagactataagatgtcatcaaatctccttgaacgccgcgaagagatcaccgttgatgtagtcgttgtccacaagactaaccaagaagtagctcttctggaccttgtctagtatctccctagatgagtcgccc

SEQ ID NO: 411927 - DNA, 462 bp, Oryza sativa
aatataagactttctagcattgcccacattcatttagatattaatgaatctagacatatgtatgtatttagattcataccacacatatatactgagaccactgaggacagtaataggcaaatcggggacgatcatcaatgcaaaaaaaaatacatgaggatgaaacgaatcgctacatgagaaaaaaaaagaaaaaaaaaagaaagaacagaacaaacagactggattagtattttggcttgtgaacctgctgcgttgtccggtcataccaggggatggcaagcgagaagcatcgccaatgtgacgacgatcgcggcatgagcctgcatcctgctcgcgagcgacggcgcctgagctgttcttgcaggcggcagcggcggctccgccacgtccgagcccgtcaggaggggcatcggcgacatcgccggcggctgcgccggcttactgatgatctgcagcagg

SEQ ID NO: 411928 - DNA, 462 bp, Oryza sativa
aaaatcatagatctacatggaattgtactcatgaacaatagtaggttcataaattggtgaatacaatctaccaataaacgctctctctctctctctctctctctctctctctcttcactttagcacaaaaataaaatcaagaaaccaacttatatttatcacatttaatgaatcaagtagatgttctattgacttacataacattttctatggaagaagctccatttagtcaggtcaaattgagtactttgcaatgagcttatcaacgtggatgatgatatcatcaatgtggggacgaactgcaggatgaggctgcagcatccaagttacaaactggcggagagaatcaggatacgaggggccagcttcagtaggccatttaatttgagcactctttgtaactgactgtaagctctcaccagcagcttcatcaagttcataatcaaatggagattttccgta

SEQ ID NO: 411929 - DNA, 467 bp, Oryza sativa
gatgtggttccaaatcaatcaaaaattgttatatgccttgttttcaaatgatggggtgcgagtgcaacaacacatgtatccaacggaaaaccaagcttacatgtactatcatcatagaattaatcaaattccgttgagctttccatggcgtgaaagccaaaaacaaaaaggtcaaaaaaggggtgaccctcttcatcagatttagccatttgcaacgatttcatggatcttgtcactgatctcaggatcatctgatctgactgctagcttcatggccacttccttcggtccgctaagtccgaatgacagcctcacttaaacttttacattgcctataaacacaccagatagcaggcaagtgtgtgacctctaatagcttgggaccacatcagttccctcgcagggctgcatgccaaggatgcctatgacagcactcacagcctcagccaggctttccctggcgccaa

SEQ ID NO: 411930 - DNA, 442 bp, Oryza sativa
gaaagggacatgatattcatggttcaccaatgtgatcgagtctagcacagcagaggacacgaaattgataggtcccggtatcctcagaactggaacatggcatacaagcaggttgtaaaacagagggcttccgaattttcgccctcaagcctcactggagatatggtacattcaggaggaatctgcagcggccggtggtggtgccggctgtgcttcggcgcgcttgactgatgcgcatttgatcagatggttgtagctccctttctccttgaaaagttgggagaaatggtgcttgcagtataggataccttccaaagctgcataattggatggcgaaatggcacagccaccgtgagaacatttgaagcaggacttgtggtaggcctgtccttcaactgtcaccttctttagaggatacgctgttttactgcaagtggcacac

SEQ ID NO: 411931 - DNA, 458 bp, Oryza sativa
acattctctcctttttttaccactccaaaagtttcatatattattcaacatcaaataaagcagtacccaagccacaatatataacaaacaagcctcttacaaactttaacacacctttaccaagcatacccatcagagttacacggctactagggtatgtgtgcacaatggaacacgcaagcttgtgcacaaccaaacatactgcccccgaaaccatagtttttccaaggagtctggcagttgcacttaaaccatgaatccaggggtgcaacttctttaacagacccatctgaacaccaaaccgtgaatcgattttcctccggtcaccctgcagctgcatcacctggccaagacctgggacctggacaaaaggcccattgcaacaaaactgctggttgagaactttgaggatcctagatgcaagtgaatcacttcataaatccctatacaaccatcag

SEQ ID NO: 411932 - DNA, 458 bp, Oryza sativa
  unsure (1)..(458): unsure at all n locations
gtctagtataggatttttattccatgatcaggaaaaaaaggtttagtgcaactaaagggtaattagcatttcacggtcgttttacagaagtgattttacatgtatatgagcccggcgaaaattttacatgtatatgagcactatatataggacactctttacatgtatgcataactttgtcccttcatacacctnacttgttcatgaaatcgatgcccttctgaatgctctccatcagctctttctttgccatctccaagccagctctctcaaaatcattcaacggccccagagggagaacctcttcggctccagcacgacctaacctcacttttgttgcaaagaacggcaactcggtcaccgcagatgcaacatatgaacattccacaacgccagcattaccacgcattgctcgcaagcatgcatcaccaaattttgctgcagcaaaagccattgac

SEQ ID NO: 411933 - DNA, 394 bp, Oryza sativa
aaatacttaatagtaatagactctttgatggagtattacaacatgcagcagtggcattaatacgccagtacattaattaagttacacatatgcaggctccattttggtttcttttaatttatcgtattacagaatttctgtagccttgcagatgatcacttggatatcatgtactagtaattaacaataggatgcatacaaaagatggcccaacgacaacagaagatgcgtgcatctgacattgtctggccttatttgttggtagtactccaattaattaacaagagatgatgcattcttgtgccttagtttcttcacatgcttggctttacgttgagcctattcgcaatctttacccccaacgactcatcacactgggagaggtagttgaccc

SEQ ID NO: 411934 - DNA, 426 bp, Oryza sativa
acttaataaatcgcacataatagtaactatgatcttcaaattcacaaattctccatatgaatattacatacatgcagaatgtgaaggaaaattaaccaaacttggaagcaccagcgggaagcaacatatggcggacatagttcaaaggaatggagaccatatgcatggatacatagtacataatagtgcagtagaatctatccacgaggcgaaatgcaggatgcgaaggctgaattcgttgatctagtgctggaccgaggcggccatcttgtacgcgtatctacacttcagcgccacctcgcgcgcgccgccgccgccgatctcaggcgttgctccggtaggacccgagcttggcggcgctggccctcagcacgtactggtggtaggcggcggcgatggcggcgccgatcagggggctcacccaga

SEQ ID NO: 411935 - DNA, 473 bp, Oryza sativa
agtacagtgaaaatattttttttaacgactcgcacgagacaatacgattgatagagcaggaaaatattacaggactataaccctggagggtcataaccaggaaaaaggaaaaaatataccaccacccacacactgactagcgccaacacacaagtaccgggagaaggctaacaccggtaccgtgccgccgctaagcatgactgatcaccgtctatgaccgacaaaggaacgctagacgatgatcacctaaaagaacactcctcacaaccaacgcaaagtccaactcctagagtgtgcttgcaccaatcgatcgagaggcttcggctaggggatgccaaaacgacgtcttcaagaagagaagcgatagaaaaccgtcgtcaccgtccgtcggggctcaaagaagccaagactggctttcgcccggcaaccacccttgagggatgagacagcacgacaacgccctcaggagggag

SEQ ID NO: 411936 - DNA, 429 bp, Oryza sativa
acaacaaattatctcacttcattcaacaaattgtcattgtgtttgcaaactataatgtacacgagaaagacttcaagctgctagagcacttacaaatgctacgaaaatcctacaaccttgacctgagttctcacagttagctgcacataaaacagaatgatattctaaaattcttcatcgggtgaaaactcatcgtcgggcgaatttactgtcaagagtgagtatttcacccgcagcgatatcttgcccctctcaagatgcagctttgcacctgaaaccacccagtaacctggcaggtcctgcggtccacgcaacatctccgttgtatccacaaacctgagcaactttggggtctgcactggaacaggcgggccaccagggtacaccgccgaattgatgttcactttggcagggccaggcacgggcttt

SEQ ID NO: 411937 - DNA, 446 bp, Oryza sativa
  unsure (1)..(446): unsure at all n locations
aggtagaaaggatccttcaaaatatctttcagaaatgacacaattaagttttgctagtctcagtagagaagtgactactaattactgtcgattgctcaaacagaacggtcgcacaatgccgatcgcaacacttgcaaacaggagctgacttagaccttgaatccacggctgttcctcctgccacggngccttctcgaacttccttcccttggagcgcacatatggcttcgtgtggctgtgcggcacaccaggagccttaccaaagtgcctgacggcctcacgggcattcttgggacccctcaagaggaccgtgttctccccaagcggagcacggagagcaagctggtcgaaggtgaggcactcgccgccagcattgacaatccttgccctagccgtctccgtgaacctcagggcagtaaccttcattttcggaatctcttggatcc

SEQ ID NO: 411938 - DNA, 447 bp, Oryza sativa
gataagcaaaaaaaacatcgatatatcgcttatataaagtaccctcttcagtttcagaactgacaacattatcgccgcacactttaccggacctgcagcagaaacgcagtattggcaagaaaacgagaacagttgatacatacacgtttattcggggagagatgtaaaaaggctatcaaacaggaggccataaagaaagttcatgggtagcctcaaaagcattctagaatggctcttgaaaagtttatgtgatgacggtgggagcagatcggccagtgtactcttgcatctttgacagcttcagtgcaacatcaaccagaggagcaagggcatcctgcgaatccctgccggtcttggaagaatccttctcatactgctcgatgtagacacggatagtagcaccaacagagccagttccagagaggcggaacaccagtccgggaacca

SEQ ID NO: 411939 - DNA, 521 bp, Oryza sativa
gtttcacgcatctttgtggaagagcttggtgctgctgaaagctcattgttgaactgtgttccgaaggaagactttggagggggccatccagatcctaacctcacctatgcaaaagaacttgttgaccggatgggccttggaaaatcctcaaatgctgaacccccagaatttggtgctgcagctgatggtgatgctgatcgcaacatgattctgggtaaaagattcttcgtaacaccttcagattcggttgccattattgcagccaatgctgttcagtcgattccttacttttcttctggccttaagggagttgccaggagcatgcccacatcagctgcccttgatgttgtcgctaagaatttgaatctcaagttctttgaggtgcctactgggtggaaattttttgggaacttgatggatgctggaatgtgctcaatttgtggtgaagaaagctttggcactggttctgatcacattcgtgagaaagatggtattttgggctgttctagcatgggtatcta

SEQ ID NO: 411940 - DNA, 560 bp, Oryza sativa; identical to SEQ ID NO: 391957

SEQ ID NO: 411941 - DNA, 534 bp, Oryza sativa
gtttttagtctcgtttgcctcgatcctctcgttcttggttggtcggcgccatgagtaacaccctgcttcgaatctacccttccgagctgaagatacccttcgagctcaagaggcagaattcggggatcctggagctcacgaataagaccgatcatcatgtagccttcaaggtgaaaacgacgaaccctaggaagtactcggtgagaccaaccaccggaatcgttctgcccagagggtcttgcggaatcacaatatctatgcaaccgccgaaagagatccctacggattataactgcaaggacaagtttctcatccaaagcgtcgtggtagaggatggcacaacgcagaaggacattcacagtgacatgttcagtaaagaggcaggcaaggtggtcgaggagttcaagctgagggtggtctacatccctgccaatcctccctcccctgtgccagaggaagaagaggatgagattgattcccttgattcagatgtggaccatgaagtgcaaatgccatctacgttcgatgctgcat

SEQ ID NO: 411942 - DNA, 435 bp, Oryza sativa
gtcttccctcccgctcgggccatcgacgcaggctcccctaaagaacaacacctaccctctgccgcgtcggcgaagagatggggaagcacgagttcctgacgccgaaggcgatcgcgaacaggatcaaggcgaaggggctgcagaagctgcggtggtactgccagatgtgccagaagcagtgccgcgacgagaatggcttcaagtgccactgcatgtcggagtcgcaccagcgccagatgcaggtgttcggccaggcccccgaccgagtcgtcgagggcttctccgaggagttcctcgacgccttcctcaccttgctccgccgcgcccaccgacactgccgcatcgccgccaccgtcgtctacaacgagttcatcgccgaccgccaccacgtccacatgaacctcacgcgctgggccacgctcaccgagttcgtca

SEQ ID NO: 411943 - DNA, 523 bp, Oryza sativa
gccaggataggcgtgaagagggagaggtatggcaagcctcgccgacgccattgatgctttacaagcgttggtgagaggccaggagaggcgtggagagggagagttatgagcgcaaggacattacgacaagatcgttattcctaatgggtgagataggcataaacgattacaaccaccacttcttccagaacagatccttcacagctgagatcaaacccttagtgccactagtgattttaaagattgaaaatgccaccaaggttttgatcgaccttggtgccaagaccatactggttccagggatcccgccaatgggctgcattccgaggtttctcaacttgctccctagcaagaaccacaatgactatgacaagcttggatgtctgaagtggctgaacgacttctctcagtaccacaatcgtgctctcaaacaatgttacagaggattcatcatgatcctaccgtcaccctaatctatgccgactactatggagcaatgttgaagatagttcgaagccctcag

SEQ ID NO: 411944 - DNA, 387 bp, Oryza sativa
acgaaaccagctacctttattggcatggcatggcatcccgcgcctatcgattatttttctgttcatttcgcattggggcatgggtctatttccatggatgggcaaatgaaaaacgtacaaaatgcctttcttttttttcacctcatttttgggaggggggcatggagagggagaccccctgagccggggacttcttccactggtgggggaccgttttgatctgggagaaaaactggacgcccgccttggcgtaaaaattcaaggttcctgcaaagggggctttgctgccggtgaaggaaaaaaacggccggggtactggaatcggcacgttgatgcccacctggcccggttaaaggcctgtttgaaatttccttgccaaccccccaa

SEQ ID NO: 411945 - DNA, 365 bp, Oryza sativa
gctgcactccactcgccgccggcgaccgatgctccgcgccgccctcctccgctcaggctccggcctccgccggcctcccatggccgcgccgctctccaccgccgccgccgcctcgtggctctccgacagcgcctcgtctccgcctagggtgcgcctcctcatcggcggggagttcgtcgagtcgcgggccgacgagcacgtcgacgtcaccaatccggcgacgcaggaggtggtgtcgcggatcccgctcaccaccgccgacgagttcagggccgccgtggacgccgccaggaccgccttccccgggtggcggaacacgccggtgaccacgcggcagcgcatcaagctcaagtaccaggagctca

SEQ ID NO: 411946 - DNA, 531 bp, Oryza sativa
  unsure (1)..(531): unsure at all n locations
atggcatcggtgcactattatgtgcaatcacacatacagatgaatgaatatcgagatcgtgttgtactgccgaaagcctctaagatgttcgggaaacagattaacacttgcctaaaggttatggatatgacggggctgaagctttctgccttgaaccaaataaagatgttatctacaataacagccatcgatgaccttaactatcctgagaaaacagagacctatttcattgtcaatgctccatatgttttttcagcatgttggaaggttgtgaagcctcttctacaagaaagaacaaaaaggaaaattaaagtcctgtacggctcaggaagagatgaattactaacggctatggactatgaggcactcccaaacttttgcaagcgagaaggatcaggctcgtcgaatgattcgtcggatggagttgattgctactcctatgatcacccttttcaccaggagctgtataattacatcaaacagcangcccttgatgaagacttcatcngtcccataaagcaaggctcaatg

SEQ ID NO: 411947 - DNA, 519 bp, Oryza sativa
tcgctaagttagaagaccaaggctcagaccccagttgagttttgcctgtggagtggagctgaagccccgctaggatcgccttttccgctgctactgctttcttttaggtgtctgccgtcggccgagacgatcgcctccgcatgtagccgcgcaccgcggcagcccggagcagcaaacccgccggcgtcctcactggagcccccaagccgctgacacatgcgcatgcacatgcgcagattgcagctgcagcagccatttggacctatccaatttcaattcactaatgcgtttgcatatgtatcgatacgtatctaaccacgattgatctatcgttttgcatgtacgccatcggtcgattttcctcctgcatcgtgcgaggcaccgccaccaggcgtccacacgtctctcgtgccggcaaccgcgcgccgaacgctcacgcacggagatgttgtgaccaggctgctcgatcgcaaactacacgtgcaagccgcacgaggccgaccagcgtgtacgtactga

SEQ ID NO: 411948 - DNA, 449 bp, Oryza sativa
cttaaatctgtctgtgttttttgatttttgttattcttagtcatttttttattttttactactaaatggaaggatcttatcaacgtccatgaatgcgaaatcatagatcgaactgccgaattggcaaaattcggtgctatcatagtatccgctaagttcacgggctggagataagcggactcgaaccgctgacatccgccacagggtaaaccaccgcctctcaggcctccccgacgggttctaccatagaggccaacgatagacaataactcccccccgaacacagcttacaactttcatcgtactgtgctctccaaagagcaactcttctcaaaatctcaaaacaaaaggtgctgagttggaatcccattctaaggattcttgtggttccggggaatccagctacaggagaaccaggaacggggagctctcccctttttccgcccgac

SEQ ID NO: 411949 - DNA, 549 bp, Oryza sativa
ttgttggttggctgtctaattgtccaggcggcaatggtagtatcttgtacctgaaccggtggctcactttttctaagtaatggggaagaggactgaaacatgccactgaaagactctactgagacaaaaagatgggctgtcaaaaaggtagaggaggtaggatgggcagttggtcagatctagtatggatcgtacatggacgatagttggaatcggcggctctcctaggcttccctcatctgggatccctggggaagaggatcaagttggcccttgcgaatagcttgatgcactatctcccttcaaccctttgagcgaaatgtggcaaaaggaaggaaaatccatggaccgaccccattatctccaccccgtaggaactacgagatcaccccaaggacgccttcggcgtccaggggtcacggaccgaccatagaccctgttcaataagtggaacacattagccgtccgctctccggttgggcagtaagggtcggagaagggcaatcactcgctcttaaaaccagcattcttaagtttaagatcaaagag

SEQ ID NO: 411950 - DNA, 442 bp, Oryza sativa
aagatcacagaaaatccacggatcccaaatgttctcattgattgatagcgatatcatagaagcagcgacacgaattaagatttaaaaccaaccccaagaaggatcgcagatccaactccaccgaatcgatccaagaactccgcctaatccaaccaaaccatgggcgatctcatctcaccaacacgacacgaactcataaaaagactaacaccaccaccacctcctccttatttagggactcgacgactcaagacgactgatactggcgaaaggcgaaggggaacagcacagatctaggagagctggccgcagtcggcgatgacgaccggcttggcggtgctcccgccgcgggatcccaccttctcgatggccttgacaacgtccatgccctcgacgacgcggccgaacacgacgtgcttcccgtccagccagctgcagggca

SEQ ID NO: 411951 - DNA, 548 bp, Oryza sativa
tttgtacatgtgccagggcggcgacttcacccgcggcaacggcacgggaggggagtcgatctacggcgagaagttcgccgacgaggtgttcaagttcaagcacgacagccccggcatcctgtccatggcgaacgccgggcccaacactaacgggtcccagttcttcatctgcaccgtgccctgcagctggctggacgggaagcacgtcgtgttcggccgcgtcgtcgagggcatggacgttgtcaaggccatcgagaaggtgggatcccgcggcgggagcaccgccaagccggtcgtcatcgccgactgcggccagctctcctagatctgtgctgttccccttcgcctttcgccagtatcagtcgtcttgagtcgtcgagtccctaaataaggaggaggtggtggtggtgttagtctctttatgaggtcgtgtcgcgttggtgagatgagatcgcccatggtttggttggattaggcggagttcttggatcgtatcttggaaatggattctgcatccttcctggggtggtttaaaactaaatcgtgtc

SEQ ID NO: 411952 - DNA, 351 bp, Oryza sativa
aaaataaaacgtactgatttatacttaattagtagaaacaggcacagtataggtagaggtagaggtagagaattaggaagagggggtgactggttcattggaggaagtagccggagaggaagaagaggaagccgactaggaggctgccgcatatgagcagcgctttctggtcgccggtgagggagttgccgacgaggcccaactgctggttctgcgcgaacccggcgatctcgacgctcttgctgtcgaagaaggactgcgccgggccgcacgtcgggcaccgacagtcgccggggagctgatcgaacggccattccggctttaccggtttccacgggtcaccggcggcct

SEQ ID NO: 411953 - DNA, 490 bp, Oryza sativa
gttttaggcagctaatcctacggaagctctgcttgttgttgatgctatgactggacaggaagctgcagcattggtcaccaccttcaatattgagattggtatcactggtgctatattgactaaactggatggtgattcgaggggtggagcagcactaagtgttaaagaggtgtctggaaagcccatcaagtttgtcgggcgtggagaacgaatggaggaccttgagcttttttatcctgaccgtatggcacaacgtgttttgggaatgggcgatgtactttcatttgttgaaaaagcacaagaagtcatgcgtcaagaagatgcttgtgaattacagaagaagatcatgagtgcaaatattcgactttaaagaccttctaaagcaatcacaaaatgttgccaaattgggttccatgagccgggtagatggaatgattccaggcatgaacaaggttacttctgcacaaatcgagaagccgagaaaagactt

SEQ ID NO: 411954 - DNA, 324 bp, Oryza sativa
aaaaggcataatggtttacatgtacggacaaactgatattaattacactcgtgaaggaactaaaaacctgacggttttagaaatgtgatgtgactgtatggcataagattatacaaatactttcccagtggcaacaagttgctcaccttactaaaggatgcaaaccctacatatcagcatcctgttgaaaaacgcacactttaaagcttaaatccctgttacagacgtactgatttgatatccatgaccagtggggcaaaaatgaaacaatggcccaatggaaacctttacattattgaaccatcgacacaattcagtaccccg

SEQ ID NO: 411955 - DNA, 462 bp, Oryza sativa
ttttgtacttcggtctcatcctttgagtcagacgacagcaaaatacatcacgaggttttcacggttatatagattgctgttcaaaatagtacttaatagagcaggacacactgacgtcactgagcaagttgacaaaacgtctggttggtgctgatggactggctagttatcactttgcatgctcctgatcatgttcaggatataaaggaacaagttgaggatgtcaaggtagagctcaacagaggcccaaatgtagtcgtcataagtgtggcgctttatcaagttctctgtgtcgcagatgatgaaacctgagaaaactaaagctccaaggccaccaaacaatgcaactggtccagagcccaatgggaagaacacctgaataaagcttatcacaacaagtaaaacaagagcagaaaacagaattggtccaagataaccaaattctttccctttctttgaagc

SEQ ID NO: 411956 - DNA, 454 bp, Oryza sativa
acctttccaccaagcgcgtcggaagcgatggcgtcggcggcggagatgcagccgctggccccggcgggctaccgccgggcgccggagatgaaggagaaggtggacgcctccgcggtggacctggaggccggcaccggggagacgctgtacccggggatctcgcgcggggagagcgccctccggtgggggttcgtccgcaaggtgtacggcatcctcgccgcgcagctgctcctcaccaccgtcgtcttcgtgctcaccgttctccaccccacccttaacgccacgctcttctcctccccgaccctcgcccttgtgctcgccgtcctacccttcgtcctgatggtcccattgtatcattatcagcacaaacacccacacaactttgtttacctgggtctgttcacgttgtgcttgagttttcagattggtgtggcatgtgctaacactcaaggga

SEQ ID NO: 411957 - DNA, 519 bp, Oryza sativa
ttcacacaccccagcagcagcagcagcagcagctgagcttgaagcagcagagcgaggtagacatggccgccgccaccatggccctctcgtccccggcgctggccggcaaggccgccgcgaaggtgttcggcgaggggcgcatcaccatgcgcaagtcggcggcgaagcccaagcccgccgcgtcggggagcccgtggtacggcgccgaccgcgtgctctacctcgggccgctctccggcgagccgccgagctacctgaccggcgagttccccggcgactacgggtgggacaccgcggggctctccgccgacccggagacgttcgccaagaaccgggagctggaggtgatccactccaggtgggcgatgctcggcgcgctgggctgcgtgttcccggagctcctcgcccgcaacggcgtcaagttcggcgaggcggcgtggttcaaggcggagtcgcagatcttcagcgagggcgggctcgactacctcggcaacccgagcctgatccacgcgcagagca

SEQ ID NO: 411958 - DNA, 56 bp, Oryza sativa
aaatcgccagtacattaattaagttacacatatgcaggctccattttggttgcttt

SEQ ID NO: 411959 - DNA, 544 bp, Oryza sativa
ctcgccccgagaaaaccctaaaccccccaaccctcgccgccggcaaccgccgccgccatgttcggcaccccggcttcgtcgcccctatttgggaccccctccaccaccccggcattcggcgccccttcctccacccctgcattcggcacgccctccaccaaccccgccttcggcaccccttcctccacgccggcgttcggcgcgccgtcgtccaccccgtccttcggcaccccctccaccgcgcccgcgttcgggaccccgtcctcgaccccggcgttcggcgcgccctcctcgacccctgccttcggggcgcccttctcgaccccggcgttcggcgtggcgccgtcgccgtcgccatcgccgtttgggttccagcagcagatgacgccgtccccgtcgccgttcgggttcgccggtgggggcggcgggcagatcaccacccagatggcccccgtcgcgccgctcccgctctcgccctgcgaccgtgacatccaggctatcgtggatgcgtaccaggaggatcctggaaaccctcagtatgctt

SEQ ID NO: 411960 - DNA, 537 bp, Oryza sativa
gttcatgaggtccttcaagtacgcgtgggtgcttgataagctcaaggccgagcgtgagagaggtatcaccatcgatatcgccctgtggaagttcgagaccaccaagtactactgcacggtcattgatgcccctggtcaccgtgacttcatcaagaacatgatcacgggtacctcccaggctgactgtgccgtgctcatcattgactccaccactggtggttttgaggctggtatctccaaggatggccagacccgtgagcacgctcttcttgctttcactcttggagtgaagcagatgatctgctgctgcaacaagatggatgccaccactcccaagtactccaaggcccgttacgatgaaatcgtgaaggaagtctcatcctacctgaagaaggttggctacaaccctgacaagattcccttcgttcccatctttgggtttgagggtgacaacatgattgagaggtccaccaaccttgactggtacacgggccccaccttgcttgaggcttttgaccagatcaacgagcccaagaa

SEQ ID NO: 411961 - DNA, 456 bp, Oryza sativa
caatttttaaagttcatagagatattaagggtggcaatattctgctaactgagcaaggagaggtgaagctgggcgattttggggtagctgcccagctgacgagaaccatgtcaaagcgcaacacgttcattggcactccacattggatggcacctgaggttattcaagaaagtcgctatgatggaaaggtggatgtgtgggcattaggtgtatctgcaattgaaatggcagagggtatgccaccgagatccaccgtgcatccaatgagagtgatctttatgatatctagtgaacccgcaccaatgctcgaggataaggagaagtggtgagtgccatctaatacaccatgaactgttgtgcttctctgagtacctcagtaccaggaacagctgataagagcatggttataaaactttcagaccagagatcatttaaggctccctgttcttttgatct

SEQ ID NO: 411962 - DNA, 527 bp, Oryza sativa
aggcgacactctctatgagctatgtctgacgatgcacgcacacgtacgcatggctatgccatcctcatatgaggccgccgtccttttttttttttttttttttttttttttgagtaaaaatagtttctcagtagcacgcgaacataggattgttgatgtgaaacacatgcattcgacaaaagggaaatgaaatacgacaacgaaagcagttcttttagcagtagaccaactagaacatgtaagggtaacggcacaacacatgcggcggccaaaaatttagagcttgtcctcgaaatcggaaaggggagtcatctgctccttgagacccttccttttgcggatatcctgcaccagggttgaagcctgcgagccagcttcaagaggatcagaggtcatcatgtcccaatggtcgaacacacactgggggaaggcctggccagatgtcgcagccctaagctggcttgagaacccaaaggactcgatgacagggaggtaagccttgatgttgtacagaggggtaccaggcc

SEQ ID NO: 411963 - DNA, 461 bp, Oryza sativa
atcatgcgtggtatctgctttgaggtgtgcgatgttgttctccatgctgatgctattcacagaggtggtggccaggtcattcccacggccaggagggtcatctatgcttctcagctcacagcaaagcccaggcttcttgagcccgtctacctggtggagatccaggcccctgagaatgcccttggtggtatctatggtgttctgaaccagaagagaggacatgtgttcgaggagatgcagaggcctggtacccctctgtacaacatcaaggcttacctccctgtcatcgagtcctttgggttctcaagccagcttagggctgcgacatctggccaggccttcccccagtgtgtgttcgaccattgggacatgatgacctctgatcctcttgaagctggctcgcaggcttcaaccctggtgcaggatatccgcaggaggaagggtctcaaggagcagatgac

SEQ ID NO: 411964 - DNA, 273 bp, Oryza sativa
tttgtggaaatttaaaatccttaattaggtaattaggactcttttgattggaggtattaacaacaatggaagcaaaagggaaataaaacggcccggttcattaaataaggtacacatatgcaggctccattttggtttctttaaatttatcggattacagaatttctgtagccttgcagatgatcacttggatattaaggactagtaattaacaataggatgcatacaaaagatggcccaacgaaccacagaaaaaatgcgtgcatcttgaca

SEQ ID NO: 411965 - DNA, 531 bp, Oryza sativa
tttttcacagtgataccttccgtgcaaggtatccaccacacggacgacggaccgtagtcttggaggacggggtacactgggatagggtcagggcacctacagtagacactcacgcacatgatctccatgcctctgactgcttacacgaactccggccagtcgataacattgagatccaatggagaaggaacaaggaattcccctatggctggtggtatggagttgttggccacttggagtcatgtgatggaagtgagcacttttgtcggtgtcatcttagtgacactgttgctctggagttcaaccaatacacacctggttcaagatggaggcaggcgctggtgaaccggaaggaccacagggaagagggcaatgagggcgacggttactacggtggaatcaggaagctccgcatcaaggatgacatctcagagtggagacagttgtggccaacagacattcttgtgtagcaaggacagagactattattccactgttggtattcatcaagttggcaattgatgctctcca

SEQ ID NO: 411966 - DNA, 556 bp, Oryza sativa
caccttcagcgcgagccgcgagcgagagaggaaaagggaagcgacgatctctgcccttctagaagggtttgggatttcttgactggacgacctcgtgcgatttcgggaggcaggagccatgaacggcaataagcagtccctgatatacagcttcgtggccaagggctccgtcgtgctggccgagcacaccgccttctccggcaacttcagcaccatcgccgtccagtgcctccagaagcttccccccaacacctacaagtccacctactcctgcgatggccacaccttcaacttcctcgtcgaccgcggcttcgtgtttctcgtcgttgcggatgaggccgctggaaggagcgtgccgtttgtgttcctagatagggttaaggaagacttcatgcagcggtatggctccagtatcgacgaggagggtcaacacccgctcgccgatgatgcagatgatgatgacttcctcttggaggaccgatttagcatcgcctacaatcttgacccggaattcggaccgaggctgaaggatcacatgctgcattgtattaatcat

SEQ ID NO: 411967 - DNA, 442 bp, Oryza sativa
aaatacttaatagtaatagactctttgatggagtattacaacatgcagcagtggcattaatacgccagtacattaattaagttacacatatgcaggctccattttggtttcttttaatttatcgtattacagaatttctgtagccttgcagatgatcacttggatatcatgtactagtaattaacaataggatgcatacaaaagatggcccaacgacaacagaagatgcgtgcatctgacattgtctggccttatttgttggtagtactccaattaattaacaagagatgatgcattcttgtgccttagtttcttcacatgcttggcttcacgttgagcctattcgcaatcttcacccccaacgactcatcacactgggagaggtagttgacccagatggcgcggagctcaggggagaccttggggtgcgcgagctcgccgg

SEQ ID NO: 411968 - DNA, 557 bp, Oryza sativa
gttagcagaaacaaacccctctcactcccactaccatggatccttgcaagttccggccgtcgagctcgttcgacacgaagacgacgacgacgaacgcgggagctccggtgtggaacgacaacgaggcgctgacagtggggcccagggggccgatcctcctcgaggactaccacctgatcgagaaggtggcgcacttcgcccgggagcgcatcccggagcgcgtggtccacgcccgcggcgcctccgccaagggcttcttcgagtgcacccacgacgtcaccgacatcacctgcgccgacttcctccggtccccgggcgcccagacccccgtcatcgtccgcttctccaccgtcatccacgagcgcggcagcccggagacgatccgcgacccgcgcgggttcgccgtcaagttctacacccgcgagggcaactgggacctcctcggcaacaacttccccgtcttcttcatccgcgacggcatcaagttccccgacgtcatccacgccttcagcccaacccgcgctcccatgttcaggagtactggagggtcttcgact

SEQ ID NO: 411969 - DNA, 394 bp, Oryza sativa
gttgttggggagcatgggcagcaagtcgtacccgacggtgagcgatgagtacctggcggccgtgggcaaggcgaagcgcaagctccgcggcctcatcgccgagaagaactgcgccccactcatgctccgcctcgcgtggcactctgttggcaccttcgatgtgtcgtcgaggaccggcgggcccttgtgcaccatgagaagacctcggcgagcagtcccacgccgccaacgccggcctataccttggcttcaggcttctcgaccccatcaaggaccaacttcccatgctctgctacgccgacttctaccagcttgctggcgttgtggccgtcgaggacaccggcggacctgaggcacccttccatccgggcaggcaggacaagcctgagccttc

SEQ ID NO: 411970 - DNA, 436 bp, Oryza sativa
gtatttcattttgacaccaaggtcagcaggtcctgaggggtcatttattggtgtccaagggtctaatcaagctggaaacaatttgactctgaaaggatggccactcacgggacttgaacaacttcgctctggacttctgcagcagaagtcatttgtgcagaatcaacagcaattacaacagcagattcattttcttaccccgcaacagcagcagcagcttatgttgcaggctcagcaaaatatggcttccccaacatctagtgatgttgacagcagacgattaaggatgatgcttaacaacaggaatgttgggcagacaaacagtggtggtgatattattccaaatattggttctcctagtctaagtggtggagatgtagatatcctgataaagaagaaaattgctcagcagcaacaattattacagcagcaaagc

SEQ ID NO: 411971 - DNA, 552 bp, Oryza sativa
gttatcccaaaccctaaaccctctccccatggccgccgccgactcgcccaagcgcttgagggtctactcgtccgtctcgggcgacggccgctccgcgaacggcgcggggagcggcaagcgcgtggggacccacaacggcagcttccactgcgacgaggcgctcgggtgctacctcatccgcctcacctcccagttcgccggcgccgacgtcgtccgcacccgcgacccccagatcctcgatactctggatgctgtgcttgatgttggtggtgtctatgatcccagccggcatcgctacgatcatcaccagaagggctttaatgaggtctttggacatggctttaacacacaacttagcagtgccgggcttgattacaagcactctggtaaggagataattgcaacggagcttgaagctagtgaagaccatgaagatgtgcatcggttgtatcttgcaatatataaaagctctgatgaggcgcttgatgcagtcgacaaccggatcaatcaatatgacacagaccaaccctcaagaatgtgaacaacacacac

SEQ ID NO: 411972 - DNA, 416 bp, Oryza sativa
ggttccaaggctaaacatctgcattcatgctctgaaactaaatctctttataaatatcaaatagagcactaatacgagtaaagctaaaagccgatatttcttatctacatgatgagactacgactagttcacggttgttgccaaataaggttaatatttacatcacctacgagcaatctcggtcaggctacaaaaggctatggtaaatatttggccaggcgacaataggctgagtttgttttcacttttcagaaccacgggtgccatgtcggatccatcatgcacaggttcctcgaagataatgccgcttccacgagatccgtgacgcctctttggaccgactgaggtggctcagatgaattctcctcctcatagcagataatggggatttaattgatacgtatgcatgctcaatg

SEQ ID NO: 411973 - DNA, 511 bp, Oryza sativa
atcatttgtgaagatatgtgaacaagccaaggcatacttagagatgaaaggcgaactagtcagtggtcttaacttaatcaataacaccaatttggaatttttccctgtgaagaacaaagcagaaatatttcgtctgagaggtgacttcctgctaaaaatgaatgactgcgagaatgcaaatgttgcttattcaaatgctataacactttttaagcatttgccaaaagcatggattagctgggggaattactgcgatatggttttcaaggagacaaaagatgagatttggcttgagtatgccgtaagttgtttcttccaaggcatcaaatatggagtttcaaactcaaggagccatcttgcacgaattctctaccttctgagcttcgatacacaaaatgaacctgctggaagggctttggataaatatcttgagcagttgccccattgggtttggctttcgtggatacctcagttattgctatcattacagagaagtgaagcccaacactgc

SEQ ID NO: 411974 - DNA, 440 bp, Oryza sativa
gattcaacaaggcgtgaaatatacgaacatccaaaattcaacacacttaactcagtctgggctataataattcaataatgcatcgctacttcagttagattcagaaggttctacccccacaaacctattacatcttaaagtacaataaaaatggagaaagagtttccaccttgtgctagggaaagattctattcaagtgtggtgttcagtactgctcttcatcccatcataaacttaacttaaaccatgcagtatccccgtgtagtatgtctagctgtttgctcttgctaataggccagagaaggatggaacaggggagttcctcatttgttcttgagcttgctttatctcctcgggatctatgttctccatcattttgggcataacgaagaccattatgaccataaaaccaagcatcatacccatagggctcttcaaaa

SEQ ID NO: 411975 - DNA, 564 bp, Oryza sativa
  unsure (1)..(564): unsure at all n locations
gttgccgcgacgagcacggcggcgacgacgacctccgccgcgacgatggccgcgcgcctcctcctcctcgtacttttcgccgtcgtggcagcgcgcgtaggcgcagcggcggcctatcagcccggatctgctgaggggcacacgatcgcgggccgcatcaagatcgatgctgcaagtgcaattgcaaagggctttggtcttccagccaagacatcaaacacaaaagtgatacttaacggtggtcagagggttacatttgccaggccagatggctactttgcattccacaatgtgccagctggtactcatttaattgaggtctcctcattgggctacttattttcaccagttcgggtagacatcagtgccaggaatcctgggcacattcaagcagcattgactgaaaacagaagagttctaaatgagcttgtgttggaacctctcagagaagagcaatactacgagaaaagggagcctttctccattatgtcactctngaagagccctatgggtatgatgcttggctctatggtcataatggtctatcgtatgcccaaaatgatg

SEQ ID NO: 411976 - DNA, 518 bp, Oryza sativa
gaggagttgtcggcaatctctgttggaagacctaaatggttggaatctgtggttgattggtatgatcaagatgaggaggcaaaacagttgctggctcaactgataatcaatctagtaggggtagaacatttcaccttgactaatggagtaatcaggttctagggaaaaatctggctgggtaagtttgttgaagcacaacatgcagtacttcttgctatgcatgccagtgggctaggaggacattctagaataacagccacctataatagaattaaaaatctattctattggccgggaatgaaaaaagatgtttaccagtatgtgtcatcctgtgacatctgtcagcaagccaaacctgaacattgtaagagtcctggtaaactacagcctttaccaattccagagcaagcttggtcaaccattagcatggattttattgaaggtttacccaagtcagaaggctttgatacaattcttgtagtggttgacaagttctcaaaatttgctaagtttatacc

SEQ ID NO: 411977 - DNA, 523 bp, Oryza sativa
gacgttaggagagagatggccactgcttatgctcccatggcgagccagctgatgaagagcagcttggtgtgctccaagccgagggggctgtctggtgcttcgctgacaaggaggccccgcttcacagtcaaggccatccagtctgagaagccaacgtaccaggtggtgcagcccatcaatggcgaccccttcatcggcagcctggagacgccggtgacctccagcccgctggtcgcctggtacctcttcaacctgccggcgtaccgcaccgccgtcagcccgctgctccgcggcatctaggtcggcctcgcccacggctaccttctcgtcgggcccttcgtgctcaccggcccgctccgcaacacgccggtgcacggccaggccggcgccctcggcgccgccgggcttgtcggcatcctcagcgtctgcctcaccatgtacggcgtcgcctccttcggcgagggcgagccgtccacggcgccgacgctgacgctcaccgccgcaagaggaggccgacagctgc

SEQ ID NO: 411978 - DNA, 387 bp, Oryza sativa
agcatgaaagtacttgggttggagaaataattatttaagtggtccaccggttcacatgtttactcatctttcgatcccgcgatcctaacattttatttcttattacacatttatccttactccgccctaagatagagtaacatcgaatagaaagatcactttttagtactaaactctttgacgtcacttagcttccagcatgtacgtaccgtgcacgtatgcaatgtacgtacgcaccaaacgttttattcattattattactctgatcattattcactcgatcacgatgagccgagcagcgtgtgcatgcaactcaacagtagaggttgccccccgggctgacgccaaactggcggcagtagtccttgtagttagtttacccttgc

SEQ ID NO: 411979 - DNA, 503 bp, Oryza sativa
ggcgttcgtgctaagctgcagcacaacccaaagccatatatctccgataatggcgaactcaccgacgctgacaatgctggtgttcctagctattgggctatctctcgtcctctccgcagccggcgtgtctgtggagagcgtggtcaccgaggcgttcttcaacgggatcaagaaccaggccccgaacggctgcgccggtaagagcttctacacacggcaatcgttcctgaacgccgcccgctcctactcgggcttcgccaatgaccgcaccaacgacgactccaagcgcgagatcgctgccttcttcgcgcatgtcacacacgagactggacatatgtgctacatcaatgagataaatggggcaaacatggactattgtgacaagagcaacaaacagtggccgtgccagccgggcaagaagtactacggacgcgggccgctgcagatctcatggaacttcaactacgggccggcgggaaaagacatcgggttcgaccggctag

SEQ ID NO: 411980 - DNA, 233 bp, Oryza sativa
  unsure (1)..(233): unsure at all n locations
atcacatcagcatcagcaagcagcagcagcagaagcagatcgatcgatcgatcgccatgagcgtggtgatcctggacgggtcgacggtgcggggcttcgtggcggacgacgacgccttcgcccgcagcgtcgacgcgcgcttcgaggcgctggacgccaacggcgacggcgtgctgtcccgcgccgagctccgncgcgcgctcgagtccttccgcctcctcgacggcgccggg

SEQ ID NO: 411981 - DNA, 304 bp, Oryza sativa
ctgttacatatttacaatcgtttaatggaaaggctctgaatattgtggactttccatgatcttctccgaaaactagatggattgcgtggctgtagtgaatagggttccccattggcagcccttgtctggcaaatggatccaatgagctattcactcacttgaaagcatggataaccttggattttccaagatccagcccaatccttgtggcctcaatgacaatctgaccatccaggtagtgaagcctacatacaggcatgtccacattagctcctccaatgagctcggacttagttttcccgtg

SEQ ID NO: 411982 - DNA, 449 bp, Oryza sativa
aaaggaaacacatcttattttttattgatatatgttggatgaatccaataaaaccgatacaagtcacgaaaaatcagactagatgaatccttcgagatcacatgagcaaaagctttcaacgaaagctggcctatagtcgtggaagcaataacactggataaagataggaattcagacacgagaggctgcagactataagatgtcatcaaatctccttgaacgccgcgaagagatcaccgttgatgtagtcgttgaccacaagactaaccaagaagtagctcttctggaccttgtctagtatctccctagatgagtcgccctcagggaacaggcaagcccaaccctttgaccaaatttcgaaagcttcgactttccaaaccataaagctggctgagtcaacgacagttggctggactatttccttgccagggaaaacaccccatgtgacc

SEQ ID NO: 411983 - DNA, 487 bp, Oryza sativa
caacagcatcaggggaggggtctagaagcttatataagcttcttccgagatgaaggtgatcgagaagatccaggaggcggctgcggatgggcggacggtgttctcgttcgagtacttcccgcccaagacggaggaggggctcgacaacctgttcgagcggatggatcgcatggtggcgcacggtcccaacttctgcgacatcacctggggcgccggaggatccaccgccgacctcacccttgtgatcgccaaccggatgcagaacatggtgtgtgtggaaacaatgatgcacctgacatgcaccaatatgccatttgagaagattgatgatgccttaacaacaataaagtctaatgggattcaaagtgttctggctcttaagggtgatcctccacatggtcaggacaaacttgttcaaatcgctggtggatacccttgcgctcttgatttggtacaacacattaaagccacgtatggtgaatatttt

SEQ ID NO: 411984 - DNA, 370 bp, Oryza sativa
gggcataaaatgaagccgaaactttattgcaacaacacgcacggaaatttgctgatggacttcaaaaccctgctttaactggaagagttagaccccatacctgaacctactacacttagcttcaacgggaacacagcttccctttacacttaatgccctataaatttccaaacgtgtgctacgaccattagatcttggaaagactgctacaataagagggcaactgcatgcttcagttacccagccttgggcttgggcttcagtctcttcaggtgggagcacaggaaaacctcggcaagtgccatggcagtgcccagggagttgataggaaaaaccggattcctgaagaacaaaaccggtgttacgatga

SEQ ID NO: 411985 - DNA, 423 bp, Oryza sativa
atggcaaatagtcaaccatgacaaataaataacatcattcggtcatacatagttttaacaatagatataataaaagtaaaagactcctccctcctcaccagcacatagcacagcctagcaactacaaaaattcccataacatggcataaaaatttggaaattgtctacgaccacagtgacttttaaaacagaacccccacctttatcacttccccccccccccagataagacagtgatacttcagacaaaaacaatccttatcaggccccttaacataactcttctgaacttgatcacagaaggtcagcgacgttggccggcagctcctcaatcaccacattgtagaacctctggatgtcaaacagcatcctctcatcgtcacgggtcacaaagttaatggcaacacctttcctaccaaaacg

SEQ ID NO: 411986 - DNA, 552 bp, Oryza sativa
  unsure (1)..(552): unsure at all n locations
gccgccgccaccgccgccgccgccgccgccgaatccgagacccccatctcggattcacctctcccgcctccggcctccgtcaccgtctccccacgcgcgtcagtcatggcgggaatggcaccagagggatcccagtttgatgctaagcactatgattctaaaatgcaggagcttctgaaccaaggtgaaaccgaggagttcttcacatcttatgatgaagttcatgagagttttgatgacatgggtctccaagagaaccttctcagaggcatctatgcctatggtttcgagaagccttcagccattcagcaaaggggtattgtccctttctgcaagggtcttgatgtgattcagcaagctcagtcaggaacaggaaagactgccaccttctgttctggaattttgcagcaacttgactatgctgtggttgagtgccaaggcctggtccttgctcctactcgtgagctngcacagcaaatngagacagtcatgcgcgcacttggtgactatctgggtgtgagggtcatgcttgtgttggaggtacttctgttc

SEQ ID NO: 411987 - DNA, 247 bp, Oryza sativa
agtacaaaaatcgttttatttaattactaggctttgccaacttatgtgatcaaacggcaagccgaccagtacagtgctatatcgatacaatccgacaagctctttgtaaagcagagagagaggctcattactgatcacggttcacttataacaacaggctattgtaactggtagagtaaacgagcttaatggtgtccgttgcctccgacgtaacctgagccatatccagagcctaagccatagccgg

SEQ ID NO: 411988 - DNA, 279 bp, Oryza sativa
tttgctatggcttaggctctggatatggctcaggctacggcggaggcaacggacaccactaagctcgtttactctaccagctacaatagcctgttgttataagtgaaccgtgatcagtaatgagcctctctctctgctttacaaagagcttgtcggattgtatcgatatagcactgtactggtcggcttgccgtttgatcacataagttggcaaagcctagtaattaaataaaacgatctttgtactaaaaaaaaaaataaataaacaacaatctatgc

SEQ ID NO: 411989 - DNA, 524 bp, Oryza sativa
ttatagcgagagtgcgttgcgttgcgagcgggaagcgaaaactcgaaaccatggccacggccggcgacgagcagcagcagcaggcggcggcggcgcagacggcggaggtgacggaggcggcggcgaaggaggtggtgtccgtggagatgccggcgccggaggggtggacgaagaagtttactccccagagaggggggagatttgagattgtttttgtttcaccaactggagaagagattaagaacaagagacagctgagccagtatctgaaggcacaccctggaggccctgcatcctcagagtttgattggggaactggtgatactccaaggcgctctgctcgcattagcgagaaagttaaggctttcgatagcccagaaggggagaagatcccgaaacgttctaggaactcatctggcagaaagggcacgcaggagacaaaggaggccaccgaaaatgaagacgcgaaagacgctgaagctgacatggaggcccctagcgaagatgctacaaaggagactgat

SEQ ID NO: 411990 - DNA, 559 bp, Oryza sativa
ggagacggtggggctgatggaccggcgggcggcggtggaggcggagatggacgccatcatcgccgccctctccgtgcccgtcgggccggggatcaccggcggcctcgtggacgcggagggtttccccaggtccgacatcgacatcccggccgtcctcgcccagcgccgcaagctcgccgaattgcggaatgatcacaaggatattacgaacaaaattgagaagaatctggaagttttgcactcaacaaaattgtcaagaaatgaagcgtcaatccctgcaagttctggcacacctgcttcattgcacagtgggttatctcaaaatgatcctatggaagaagatgctgtgaccagacttccttttgccataattgatgaactgacagatggttctcctgctgctgtggatggcttgcagctttgggatgagatagtaaagtttggaaatgtggaagcaggtgatagattgcatgaaaggcttgtctctgaagctctttccaatgaggattgtcaagtatctctagtcatcattcgtcagggatcatcaatgaacttaact

SEQ ID NO: 411991 - DNA, 199 bp, Oryza sativa
gattagtttcaggctgcaggagcgtgctgagaagaggaaggagttctaccaataacttgaagagaagatccatgcaaaggagcttgaacaaacataattgcaggctatatttaaagagagccaagaggctgatatcaaattacttaggaagagcctcgtattttaagagatatccatgccaagcttttatatggagcta

SEQ ID NO: 411992 - DNA, 114 bp, Oryza sativa
aggttcaaatccaacttattcataaagcatactgctgtcccacaggaaactgtttcataaaactaacatatcatacggactcgatggtccattaaaccagacacaagttagaca

SEQ ID NO: 411993 - DNA, 529 bp, Oryza sativa
ctgtaaaatttctccccaatctcgcgaggctctcggcgtcgaatcgaatcctctcgcgtcctcaagatgcagatctttgtgaagacattgaccggcaagactatcacccttgaggtggagtcctctgacaccatcgataatgtcaaggctaagatccaagataaggagggcattcccccggaccagcagcgtctcatcttcgctggcaagcagctggaggatggcaggacccttgctgactacaacatccagaaggagtcgacccctcaccttgtcctccgcctccgtggtggcatgcagatctttgtcaagactctgaccggcaagactatcacccttgaggtggagtcttttgacaccttcgacaacgtcaaggccaagaaccaggacatagaggtgattctcccagaccagcatcgtcttatcttcgccggtatgcagcttgaggttggcaggcccttgctgacttcacatccagaaggagtccacctacaccttggtcttcgcttccgggtggctgcatactttg

SEQ ID NO: 411994 - DNA, 514 bp, Oryza sativa
tttgttttcatttcgctaaaaaaaaaaataaaacaaaagaaaaaaaaaaacaccacacgagcaaaatctccttggcccgccgccgccgcctccgccgtcgcgcggcgatctccaccaccgcgacgcgagcggcggtgcccggcggcgtccagctgctcccgccgccgcgtaccctcgcctctggctcctcctcgccgcgcccaagccaatctctccccacccgccacctcggcctctcgactcgcgagcgagttcgccgatctccatccatcacccctcgagccagcggcgccggccgacggcgtgcttccggtcctcccctgccaaagtgttggtgttgatttgaagcctcaaggattcgagcgaaatgacttcttccatgagcaaatccgacaagaagaaggtgctagattttgcggcatggagtttcaacatcaccacatccgttggaatcatcatggtcaacaaggctctgatggctacacatggattcagtttcggcacaacattaact

SEQ ID NO: 411995 - DNA, 398 bp, Oryza sativa
ttggcagcagactatcattcagagaagccacatagactggactacagtaaatatccagacactgatgagcagaagcgttttgtgaagacgtacctaagcaattctgtaagtgaagaacctgatgcggaagaggtggagaaccttctccaaagcattgagaaatacacgctcgccagtcatctagtttggggcctctggggaataatatcggatcatgtcaatgatattgacttcgactacaaggagtatgcaaggcagagattcgagcagtattggcagaagaagcaagcacttttaacttcatgaattgcctgaaggcgtcaggtcgtacctgaaggcctgtgctgcacataacttgtgcgatgttactgacacataactccctgtgaaaagaagaa

SEQ ID NO: 411996 - DNA, 390 bp, Oryza sativa
gcaagctgaaaacctctcataaccctcgtagcatttgattggagaaacagatgttcacaagtagatacagagctaccgaaactggaagaacagaaacccgagggaatggacacaaggaacataactgaagggcaaagtgtttacattattatgattgagcccagcttgcaacaagtactaaaagtttctactgaggatttggtggcctggagttggcagcagaaaccctcgatccccattccagcagctctttgctggtgtcgttccttgtgcgcgatcacctcaatgaagcacaggcagtccttctcccccagcgccatcccgatcgcctccgtcagctcctcctcgcacttcaccttagaagtccagcatttgccctctccattgtgg

SEQ ID NO: 411997 - DNA, 278 bp, Oryza sativa
tcgtacgggaatggcccggcgtttgggtgcgtcatgatgaaggagttcttatctgagctggctaagcgcgtcaacaagaacaccactgcttatgagaactacaagaggatcttcgtgcctgagggccagccgctggagagcgagccgaatgagccgctgcgcgttaatgtgctcttcaagcacgtccagaagatgctgaacagtgacagtgctgtgattgccgagactggtgacttctggttcaattgccagaagctgaagctttcttgagggctgcg

SEQ ID NO: 411998 - DNA, 483 bp, Oryza sativa
ttggtagttgagaagatcaaggacggcgagtgggaagtcgggtacaatgcgatgaacgacaagtatgagaacttgattgaggcgggtgttattgacccagctaaggtgacgagatgcgcgctccagaatgccgcctcggtggctggaatggtccttaccacacaggccattgttgtcgagaagccgaagcccaaggctcctgttgctgagccggcagagggaacccttaccgtctaaacagtggtgaatttcttcagggtggctttgtttagatggttcataccaactgaaatggtagaatttttgtctgggagtttttggttcagatcaaccgaaaggtctagtgtaggattggtttccatttttgagattgaaggtgcaacctgcctgatctgaactcatatgtccatcaaagaaataatttgcatcattatcgtcatcttcggtttaaactttataaagtaaatcatatggtgttttttc

SEQ ID NO: 411999 - DNA, 475 bp, Oryza sativa
tgttggtgggttccccaggaaggagggaatggaaaggaaggatgttatgtcaaaaaatgtctccatctacaaatcccaagcttctgctcttgaggctcatgcagcccctaactgcaaggttctggtagttgccaatccagcaaacaccaacgctctcatcttaaaagaattcgctccatccatccctgagaagaacattacttgcctcacccgtcttgaccacaacagggcacttggccagatctctgaaaaacttaatgtccaagttactgatgtgaagaatgcgatcatctggggcaaccactcatccacccagtaccctgatgttaaccacgccactgtgaagactcccagtggagagaagcctgtcagggaactcgttgctgatgatgagtggttaaatacgggattcatctctaccgtccagcagcgtggtgccgccctcatcaaggcgaggaagcaatccagtgcccta

SEQ ID NO: 412000 - DNA, 348 bp, Oryza sativa
ttactactagccagtaagctagctaactaactacgtggctatggcccccaccgtgatggcctcctcggccacctccgtggctccattccaagggctcaagtccaccgccggcctccccgtcagccgccgctccaccaactcgggcttcggcaacgtcagcaatggcggaaggatcaagtgcatgcaggtgtggccaattgagggcatcaagaagttcgagaccctatcgtacctgccaccactcaccgtggaggatcttttgaagcagatcgagtacctgcttcgatccaagtgggtgccttgtctcgagttcagtaaggttgggttcgcttaccgtgagaaccacag

SEQ ID NO: 412001 - DNA, 332 bp, Oryza sativa
ctttgcttggctctgcacggaccaacgccgacgacgaccgccggagccgccgcatctagctcgccgccccgccatgcagccgctgctcaaggtgtacgccgaccgccggtcgcagcccagccgggccataatcatcttctgcagagtgaaccggatcgatttcgaggaggtcacggtggatctgttcaagcgcgagcacctgtcccctgaattcaagaagataaacccaatgggacaggtgccagcaatcgttgatgggcgattcagaatgtttgagagccatgccattctgaggtatcttgcaaccggtgctccctggagttgcagatcac

SEQ ID NO: 412002 - DNA, 514 bp, Oryza sativa
cttcgagacaaattgagattacctgatatcttgttgatggtgctattttctctgggtatcaaagcatgggttcttatcgctatgtggttcctttttgcacctattgctcaaatgtacgacgttggacctttatttggtggtggagagcatcagctcagagcctaagagaactgtattgtactgaggacatgtccttgccctacaaaaggcaatggcctatggccaacttgtccatcctatgaagaaaatgagaggatggagatagtcggtacagagagaagctttggacaggacagagtagaaccatttacactttgcatgcacttctttttttcctgtgattatgtccaatcaaggggaaatgaattgagaaggaaacattgcacacaactcaaaacaaaatgagcagtgtgctcatcatgacactgagatacttggtacaggcttcttggtcattctttgtaatcttggaagacgacagcaaggtgatgtcagtgcatactccatatttaat

SEQ ID NO: 412003 - DNA, 201 bp, Oryza sativa
acctcgagcatgccacatggaatcagcatgtgaagctcttgggtgtccacttccagtctctctccagcgggtacaagaagacaattagacagtagttaacattacggggcttttgtccatttcctcggcaatgtatccaaatgatatcgctcaatgatggcgatccttggaacattatcctttgcttggatccctcgttgt

SEQ ID NO: 412004 - DNA, 158 bp, Oryza sativa
ttgtcgatccccaaacccccccgccccgccggagtcccccctgctccgacgagcctcgccgcgccgcgccgatggctgtggagggccgccgccgcgtgccgttgccgttgccgccgtcgacgaggcgggggaagcagcagcagtagcaggggggggag

SEQ ID NO: 412005 - DNA, 211 bp, Oryza sativa
  unsure (1)..(211): unsure at all n locations
aatctccaaattcaagtatcaagtgtagtatatcatcatcatgcaagtacagtgttacatagattaatcacaatgcagtttgattaagcagtgggcatcatcacatcgcattcagaggaaggctatcttagattacangatgaatatngcagtactacccgagcttgtngtgttacattacatttagaactcggactttgggttgaaattt

SEQ ID NO: 412006 - DNA, 256 bp, Oryza sativa
ctgagatcaggtagaacagtgagagtgaggtgcagaaaaatttgagctgaagctgaggatggcaacatccatgatcacctcgccgctggtggcgccggcccgggccaagggccttccgtccatctcccgccggggatcctccttcgccatcgtctgcagcggtgggaagaagatcaagaccgacaagccctacgggattggaggtggcatgtcagtcgatattgatgcatctggcaggaagagcacggggaagggt

SEQ ID NO: 412007 - DNA, 400 bp, Oryza sativa
cacaatccaactgagatatagctttgggataacgatatgtagcaaaaattcaaacaaggtactgatgatatgcaaaacctccatatcaagctggcctacagaaggaactattacagaaaaatagatcatcctgaagacaaccaattcttaaaacatgagttctagcatgcaaaattagactagctaaagcaaaatctctcaagtttccattcagcaagaggcatctaggccggcaagcttgaatggttctcagccagaatacgccttcccaggggcacgcttcgcaagacgaccatgagaaccaagcagctgagcattgacaccatcagacataattctgccctcagccttcaacttgacgtactcctcacgggtgaacttggtgaagccccacttcctg

SEQ ID NO: 412008 - DNA, 222 bp, Oryza sativa
tttcgcctccatcgccctccgggctccgcctccgccgccgccgccatggggagaaggcctgctaggtgctaccgccagatcaagaacaagccgtaccccaagtcaaggtactgccgtggtgtccctgaccccaagatcaggatctatgatgttggcatgaagaagaagggcgtggatgagttcccctactgtgcgcacttggtgagttgggagaaggagaat

SEQ ID NO: 412009 - DNA, 292 bp, Oryza sativa
  unsure (1)..(292): unsure at all n locations
acgtaataccatccattttttttattgccgacgaatttatcagatatgctctagatacatatcttgtgtgtatatagccggagctttgttttcacatattcctcacccaacgataattgtagtacttcttacaataaaaccggattcggagagggggagggaagcacgatttaattacactatgtgttttaagagncacgaggtccaattcgagtatggttaccataaacncaaaatttgttaaaataaaaataattattagcattanttatttatattggattattattca

SEQ ID NO: 412010 - DNA, 323 bp, Oryza sativa
ttactagccagtaagctagctaactaactacgtggctatggcccccaccgtgatggcctcctcggccacctccgtggctccattccaagggctcaagtccaccgccggcctccccgtcagccgccgctccaccaactcgggcttcggcaacgtcagcaatggcggaaggatcaagtgcatgcaggtgtggccaattgagggcatcaagaagttcgagaccctatcgtacctgccaccactcaccgtggaggatcttttgaagcagatcgagtacctgcttcgatccaagtgggtgccttgtctcgagttcagcaaggttgggt

SEQ ID NO: 412011 - DNA, 540 bp, Oryza sativa
tcgttcacgcgtccgcaacgccgccgccccgctccgcgccgtcgtgcacctgctccgcctcgcctcatcgtgtccgcggccggcgagcagatcggcggcgcggtgagcacggtcccctcttcttcctgaactcgccctagcctgcttcaggcttccaccccgtgcggtctcctcgcgcgcacggccggcctccatcgctgctcgaatcgaactaaggaactggtatcaggctgttggtgagaatggaaccaaagcattcagctgaaatgtccaagcatttggacaagcaaaatcaagccctaatggaaacttaccgagcaatgtcccacgagttgcataaagttcaggtggaagaagaaacaatcatgcgcaagttatatgagctgatgtctgcagaaggacttcttccgaagcgcaagatagaaagtcaagcacagaaaactggggaatcaactcaggaaaacaaagagcttgaaccgtaggatgtaaactgtgaatatcgatacgatactcaatttgatgcaattaaacgagttgagc

SEQ ID NO: 412012 - DNA, 451 bp, Oryza sativa
atcatgtcgagagtattatcatttcttgtctggaagttaatagatcccagctgattgaccatgcccttaatgaatgcaatcttgttggcaaaattcttgctgctgaaagaagttcctccctgtcaacagaatctaacacaccaacattactatctgaagggaaggtgcctccaaaaattgggaatattgggcacataactcgaatagctaataagcttattcaactgggaaatagcaacagcataatccagtctcatttgcaggagaacagcgagtgggttgaatggcagacaactgccctggtcaaacgcaatgaggttgagaacgtttatcattgggcctgtggtcgtccgacttctctacatgatcgtggtagggatagcgatgatgatgactttcgagacagggactatgatgtggcggtacttgctaataacctgagctcaggcat

SEQ ID NO: 412013 - DNA, 442 bp, Oryza sativa
cttattccaatctccagaattctgcttcgatatggccgccaagatctacatagtgtactactccatgtatggccatgttgcaaagctagcagaggagatcgagaaaggtgcttcttcagttgaaggagttgaggtcaagctatggcaggtcccagagactctttctgatgatgtgctcaccaagatgggtgctccttcaaagaaagatgttcccataatcacacccgcagagcttgccgaggctgatggtgtcatctttgggttcccaactagatttggaatgatggctgctcaattcaaagcattcatggatgctaccggtgggctgtggaggacacagcagctcgcaggcaagcccgcgggaattttctactctactggttcccagggtggtggccaagaaactactccgttgacagtaatttctcatctagtgcatcat

SEQ ID NO: 412014 - DNA, 538 bp, Oryza sativa
atatagcaagcaaaaggataggaaggagccaagaacaccaagaacttgttggagctgagacagcagcaccaagcaagaaaccggatccaatccatccatccatccatagtttccaatggctggcaagtacatcgccgctggtcttgttggttcctttgccatctcatatgtttgtgatcattttatcgctgagaagaagatatttggaggcaccacaccacataccgtgtccgacaaggaatggtggcaagcaactgacaagaagtttcaagcctggcctcgcactgctgggccaccggttgtcatgaaccccatcagtcgccagaacttcatcgtcaaggatctcgagtcctaagattgtagtgggagcatatatgctgaaggttgcgccgtgactaagatggcgatggctgtggctacaaactaccttcctatgccgtacttccgaaccagtacgtgagtacttggtcttaattaaaccagaccattttgcctagtgccgccttaacagaaccttgaagcatatctgctttagaca

SEQ ID NO: 412015 - DNA, 513 bp, Oryza sativa
  unsure (1)..(513): unsure at all n locations
ttctataacaacacacctcctctgcacttgctccttctcttcttctgtccatcgaatcgacaagaagaaatttacaagcaagaatggccgccaaggtgcatcctaacgtcgccgccgcgccacagccaccctgcattagcagcatcgtctcccaacaacaagaagaagaggagcccccggtggtgctcacggtgtggcgcaagtctctcctcttcaactgccacggcttcaccgtcttcgacgccaagggcaacctcgccttccgcctcgactgctacgactccaccagctcaaggcgcgccgacctcgtcctcatggacgccgccggcaagccgctcctcaccatccgccgcaagaggatgagcctctccgacagctggatcatctacgacggcgacggcgccgtcacctncaccgccacgccgttcctctccgtgcgccgccgccgngttggtcttcgcgccttcaagtccaaggccattgcgcacgttacgccgttcttcttctccctgc

SEQ ID NO: 412016 - DNA, 210 bp, Oryza sativa
tcgttgtaatcgagccgtattcggcatcatgggttattgtgtgaccactgcaaagggtgctgcagagaccctcaaattcaacatggctttggtcctactttctgtctgcagaaatacaatcacatggatacggtcaaagacacaggttggagctgttgtacccttcaacgacaatataaactttcataacgccatagtcacaggtgttgc

SEQ ID NO: 412017 - DNA, 476 bp, Oryza sativa
gcatattaaagcctcccatcaacttcttgcacacaccctccctttggctttcatctgcatctattcagttgcagattgagagccaaagacattatcttgattctatcaggagggttgtgctagcgaattcttgttagcaacaaattgacatattgctcggcacatccccaccgagaataccaagatgacgttctctggtacacaggacaagtgcaatgcttgtgacaagaccgtgcatttcattgatctccttaccgcggacagtattccctaccacaagtcttgcttcagatgcagccactgcaaaggcacactttcgatgtgcagctattcgtccatggatggggttctttactgcaagacccattttgagcagctattcaaggaaacaggcacctttaagaagaacttcccttcaggtacaaaggcaaacagtgaacaggcttagattcccagcagctgtcctctgtgttctg

SEQ ID NO: 412018 - DNA, 548 bp, Oryza sativa
ttataattctaccatgcatgttgatctatcttgaacctcaaatctactttatgaagatgctccttcggtttctgtattataatgagagtggttcttcaagccaagtgtacgatgcactaggcaatagaggatcactgcatgattactggcctaagaagatggtagagttatgctactttgatatgcctaataagtatcggagttgcatgctgtatctatctattttcccacctggctacaaaatcaggaggaccagcttagtaagacgatggattgttgaaggcctcatcactgacggacaagaaatgaatgcactagaacaagctgataactgttttgattcccttgttggcaggctgcttctctgtccaagcgacattgatgctttaggcaaggtcaagacctgcacggtacttgacttggttcatgatgtcattactgatctggtatccggaggatatgatactacttttgttgcaccggtttggcaccacgagaacctgctcgccatctttaaatccgtttcagcacaaagttgcatatatttt

SEQ ID NO: 412019 - DNA, 385 bp, Oryza sativa
gtaaatatgttcattaccaataaaaacagaaacgaatgctcatccaccactttctcctaggtaggagtatatcttatgaaggccaagaaagccttatgttgttagcacaagcttatatatcaaacgacacaacttagacattcactatttaatttaactagtacaaaatacactaaaatgaacagtctcaccaaaaactacttagtttacatggagtatcatcacttgcgccagaaagtgacacttcttactgtttgagcacactgtactcttggagcatcctcctcctcatcttcgtcgtacgcttcctgcttcctttgatactgcttgcgcctcatctcctcttctatgttcacatcatgcatggtagttttctcacattgat

SEQ ID NO: 412020 - DNA, 111 bp, Oryza sativa
atataattatcacaagcgtatgaggttctcactgatcctgagaagagagacatatatgaccaatatggggaggatgctcttaaggatggaatgtgaggcgtctctgccttt

SEQ ID NO: 412021 - DNA, 366 bp, Oryza sativa
gtgaacaacggtctcatcagcggcatctctctggtgaaccccaagttcttccacatgaacgtgttcaagagcaagaacatcaccatcaaggacgtgaccatcaccgcgccgggggacagcccgaacacggatggcatccacatgggagactcctccaagatcagcatcattgacacggtcatcggcaccggcgatgattgcatctccatcggccccggcaccgagggcgtcaacatctccggcgtcacctgcggtcctggccacggcatcagcgtcggtagcctgggcaggtacaaggacgagaaggatgttgacggatgttaccgctatgaactgcgttctcaagaagtctaccaatggcgtccg

SEQ ID NO: 412022 - DNA, 381 bp, Oryza sativa
tttaagatcttgttttagctgcagagagcggagtgtttgtaaacatagacagtgaatttgatttggagaatattgtcactgctgcgagagttgctgggaagaaagtccctgttttgctcaggataaacccagatgtggatccacaggtccatccttatgttgcgactggaaacaaaacctccaaatttggtatccgtaatgagaaactacaatggttcttagactctatcaagtcatactcaaatgatatcacactggtgggtgttcattgtcatccgggatctaccattacaaagggccatatatttagagatgctgccggctctattgtgatttaatgcttcttacattctatcctactgttttcacttcctcattttt

SEQ ID NO: 412023 - DNA, 452 bp, Oryza sativa
tcagtccatcagttggttgagaatgctgatgagtgtatggttcttgataatgaggctctctacgacatttgcttcaggactctcaagctgaccacacctagctttggggatttgaaccatttgatttctgccaccatgagtggagtcacatgctgcctaaggttccctggtcagttgaactctgacctccgtaagctggcagtgaaccttatcccctttccccgtctccacttcttcatggtcggattcgccccgctgacatcacgtggctcccagcagtaccgtgcccttactgtttctgagctcacacagcagatgtgggatgccaagaacatgatgtgcgctgctgatcctcgccatggtcgttaccttaccgcctttgccatgttccgtggaaagatgagcaccaaggaagttgatgagcagatgatcaatgttcgaactagaactta

SEQ ID NO: 412024 - DNA, 453 bp, Oryza sativa
  unsure (1)..(453): unsure at all n locations
gataaaattattattgtcttgaattatgtaaacgatgataacaaatccttttccagctacaaaagaaccagcataacaacaaagaattataaagttgcttaagtaatctctcccttcatctcaaaaagagctatatctagggggccctatggccatcagcaacacttttcacttttaaagggtaacttttccattcctgtcgtacactacaatgcttcccatggaatctatatcttacttggcctttgccgtttctttcgacagccatgcagttcgtagggggttttcaagcttcattccctagtgcctcnngtatccaggtgtaccatgtgctatcggccaaggcttnngacgaaggtaggggttcgaaatctttgccgagncttcttcccttgacctgcctcgngccgagggaggaggttagcactttctggcacggtggtcgcaactcct

SEQ ID NO: 412025 - DNA, 581 bp, Oryza sativa
tgtcaccatcacctcctcctcctcctcctcttcctccgcgcgcgcgagatccagggagagggagagggagagatcatggcggtgactgtgactgtgcctgtttctttttttttcttttttccttttttttttgtcttttttttttttctttttttttttttttttgttttttttttttctttttttcttgttttttctttttttttttttttttttttattttcttttattttttttacttcttttttttttttttctttcttttcttttcctttcttttttctttttttcctcttttctttttcttctttttcttctcttttttttcttttcttttatcttttttttttcttcttttttttcttttttcttatttttttctttcttttttttcttttttttatttttttttcatttttctttctatttttatcttctttttcctttcctttctttatttgttttctctatttttttatcctctctatttttttttcttctttctttttttttttttcttttctcttttcctcttccttcttttttttttctttttttctctttttttttttctctttttc

SEQ ID NO: 412026 - DNA, 118 bp, Oryza sativa
agcgtctcttattttattttatttttattttatataaagatttttaacaaaagattgcttcagaccaatcaatttagcaccagacacttggtgattcagggattcaacaaagggatag

SEQ ID NO: 412027 - DNA, 209 bp, Oryza sativa
tcagatgtgaccagcacgctctgccgagcgcacgccatcgtcgtcatggggaggagacctgcaaggtgctatcgtcagatcaagaacaagccgtaccccaagtcaaggtactgccgtggtgtccctgaccccaagatcaggatctacgatgtcgggatgaataagaagggtgtggatgagttcttccactgagtgcatctctttttctt

SEQ ID NO: 412028 - DNA, 177 bp, Oryza sativa
gtttcatattatgaaggagatgacaatcaaaatgttcttgtgctacgggatatcctgttgacgtattccttctataatttcgaccttggctattgccaaggaatgagtgattttctggcacctatactttatgtgatggaggatgagcccgattcattcttttgttcttcacttttt

SEQ ID NO: 412029 - DNA, 101 bp, Oryza sativa
gtatggttgttaagatccaggaagagcttgacatcgatgtccttgttcacggctagcctgagagaaacgatatggttgagtacttcagtgagcatcttatt

SEQ ID NO: 412030 - DNA, 274 bp, Oryza sativa
tgtcatagactcgacacccgccgcaccacgatctgcagaaccgaacgcgacacgcgccttactatcacttaatccgccatgcttcctactagggttgccccctcctctctggccgccgccgccgccgccgcgcctacctatctcgccgccgcggcctcgacccctgcttccgtctggctgcctgtgccgcgtggagccggagccgtggcagtgtgcagggccgccgggaaagggaaggaggtgctcagcggcgtggtcttacagcccttcgagg

SEQ ID NO: 412031 - DNA, 207 bp, Oryza sativa
  unsure (1)..(207): unsure at all n locations
gcacttatcaacatgtagtacagtaacaaccatcatcaaatgtccctacaactccgtctctctcatgctcgaagaatataataatctcattgattgaaacacgtatagngaaaatttaagcggcaattaagggaagctaatagctatagcttgctagccagctagcaagcaagtaccagcatactacatcgttaatnnttaatcacg

SEQ ID NO: 412032 - DNA, 294 bp, Oryza sativa
ttgcagcaacagctcaaacggaggaagatctcatcgccatgacgaccggcaatggcgacgcaccggtgatcaagaacgcccacagcgacatcgacagcaccaacaagacgctgctcaagagcgacgccctgtacaagtatgtcctggacacgacggtgctgccacgggagccggagtgcatgcgcgatctgcgcctcatcacggacaagcaccagtgggggttcatgcagtcgtcggcggatgaggcgcagctgctggggatgctgctgaagatggtcggagcgaagaggacaa

SEQ ID NO: 412033 - DNA, 162 bp, Oryza sativa
agcgctctcaaagtagcatatattattcaatcttgatgaaagagggacacaagccatcatctatagtgatggatgcctcttacaaacttcaacacacgggtaacaagcatacactcaagagtcaagaggttggcctaggtttttgtgtgtacaatgtgaaca

SEQ ID NO: 412034 - DNA, 256 bp, Oryza sativa
tcgtcatatcttccggtcgagttcttggtcgatctcttccctcctccacctcctcctcacaggttcttggtgtagcttgccactttcaccagcaaagtttcatgtctgatctcgacattcagatcccaactgccttcgatccctttgctgaggccaatgctggagactctggtgcggttgaaggatcaaaggactacgtttattgacgcatccagcaacgtattggtcgtaagagcctgaccactgtccagggatt

SEQ ID NO: 412035 - DNA, 135 bp, Oryza sativa
ttatttccacctccacctcctcccccctcgctggcggacgacgagcttctaccccctccccctacgccgccgacgtgccggaagaagatggctgacgccttggatatccagtccctcgtctgcgataatggaact

SEQ ID NO: 412036 - DNA, 188 bp, Oryza sativa
gttttattctcagaggcccatttgttgtggaaaagaagcaaaccacctaagtttcccaccagatacaattttactcgctttgcaatcacattaaatgaacttaccgctggattgaaggaaaaactgccaccaacagactctagattgcgaccagatcagtgatgtctagagaatggtgagtttgaaag

SEQ ID NO: 412037 - DNA, 112 bp, Oryza sativa
cttggaaacaaggatgctccaatttattattgcagaaacggcaccaaggccgcttctattattcataggtaacatcccagcaacaagaggagacagagcaaccataccacac

SEQ ID NO: 412038 - DNA, 328 bp, Oryza sativa
tcggtactagactggtctggttgagctgtatggtcgcaaccctagcctgcaagagctggttaaccttgtggtggtatgtggtgaccatggcaacccatctaaggacaaggaggagcaggctgagttcaagaagatgtttgaccttattgagcaatacaacttgaatggtcacatccgctggatctccgcgcagatgaaccgtgtccgcaacggtgagctataccgttacatttgcgacaccaagggtgcttttgtgcagcccgctttctacgaggcattcggtctcactgttgttgagtccatgacctgtggtcttccgacatttcgc

SEQ ID NO: 412039 - DNA, 201 bp, Oryza sativa
  unsure (1)..(201): unsure at all n locations
aaatacttaatagtaatagactctttgatggagtattacaacatgcagcagtggcattaatacgccagtacattaattaagttacacatatgcaggctccattttggtttcttttaatttatcgtattacagaatttctgtangccttgcagtatgattcactttggattatcatgttaactagttannattaacaaatag

SEQ ID NO: 412040 - DNA, 84 bp, Oryza sativa
ttgtagaaacaaacccctctactcccactaccatggatccttgcaagttccggtcgtcgagctcgttcgacacgaagacgacta

SEQ ID NO: 412041 - DNA, 297 bp, Oryza sativa
tcgttctgcctcatatgatgctatcaagagtgctatcaagtctgcatcagagggaaagctcaagggaatcataggatatgttgaggaagacctggtttctactgactttgttggtgacagcaggtcgagcattttctacgccaaggctggaattgttcttatcgataactttgtcaagcttgtcccctggttctacaactagtggtgtttctcgctcccttgtcctctacttgatccgtcacatgccctattcccagtagtcttctctctgtttctccttggttttctttgtctctt

SEQ ID NO: 412042 - DNA, 281 bp, Oryza sativa
aggatgtacctgactataagtataccattgccatgttgggctatgctgatgaggataagacaactgttattgagttgacatacaactatggtgttacagaatataccaagggcaacgcatatgctcaggttgctattggcactgaagatgtctacaagtgtgctgaggctgttgagttggttacaaaagaactagggggaaagattgtgtgtcagccaggctcactttcatggttcaacacattgattgctttctttttttgaccctgtttgcttgaaaag

SEQ ID NO: 412043 - DNA, 174 bp, Oryza sativa
atatgagagaaaatataataatattagccgtgcaatctgcgtgggccaccacgctagtttacatcattgtaagtgtaccttctatcatatcacatgggtaggggccctgaaaatatatgcctaattaatgtatgacactcttttatgattataaagaaatcaaagaaaaagaat

SEQ ID NO: 412044 - DNA, 159 bp, Oryza sativa
gttgtggcggcttgacggcaaggtcgggacgcgcgccgtggtgaagcacagactccccgtgtccgccttagagcttgaccagcttaacaagctttttgccaccaacggccttacccagaccgacatgatcgccctcttaggagggcacacgataggggt

SEQ ID NO: 412045 - DNA, 220 bp, Oryza sativa
tcggtgccctcgttggaaacgcggcaagcggcaagaagatttttcggaccaagtgcgcgcagtgccacacggtggagcgcggtggctcgcctagtctgggtccaacctttattggcttatttcgtcgttatgttttactactcctggtttcctctacttcacctctaataaagaacattgtcttcgtatgagtttaaggttttttcttcgactacctttt

SEQ ID NO: 412046 - DNA, 542 bp, Oryza sativa
tcggttgggatatctagcgaatcaaagccgattttatcttattgacaaggaattcaatgtcatggggtacacattacttcttagtttgattgagtacaagacacttgtgatgcgtggggatattgaacgtgcaaattgatattttaccatccataccaaatggcgcagataataatgttgctcatttcttggagtctagaggtattgttgtggatgcttctgaatttgctatttattttttttactgattttcttttctcgtctattttcgttctcttttcttcatctgcttttcattttattcatatttctttttatatttctattttttctttttcttatattattttattattttctcttttcctttatattcttctttattcttattttctttttctttatatttttcttcttatctttttcttatttttctttactttcttataatttttaatttttttctttctcttacttttaattccttttatctttttactcttctttttttcttttttatttcatttctaatttctcttttt

SEQ ID NO: 412047 - DNA, 427 bp, Oryza sativa
actctctagttcgggagctatgactaatacgagggtgttcttcgacatgaccgtcggcggagctccggcggggcggatcgtgatggagctgtacgcgaaggacgtgccgcggacggcggagaacttccgcgcgctctgcaccggcgagaagggcgtgggcaagagcggcaagccgctgcactacaaggggagcaccttccaccgcgtgatcccggagttcatgtgccagggcggcgacttcacccgcggcaacggcacgggaggggagtcgatctacggcgagaagttcgccgacgaggtgttcaagttcaagcacgacagccccggcatcctgtccatggcgaacgccgggcccaacactaacgggtcccagttcttcatctgcaccgtgccctgcagctggctggacgggaagcacgtcgtgttc

SEQ ID NO: 412048 - DNA, 349 bp, Oryza sativa
gtagttcacacagtctggtggtgtaagaccatttggagtatcattattgattgccgggtacgatgacaatggcccacagctgtatcaggttgatccctcaggatcatacttctcctggaaagcatcagctatggggaaaaatgtctccaatgcaaagacatttcttgaaaaaagatacacagaagacatggagcttgatgatgccatccatactgccattttgactctgaaagaaggatatgagggtcaaatctcagccaacaatattgaaattggagttattcgatctgaccgtgaattcaaagttctaaccccggcagagatcaaggatttcttggaagaggcggag

SEQ ID NO: 412049 - DNA, 376 bp, Oryza sativa
atttttgccatcctcgccgaggtcctctcggccgtgttctgcgaggtgatgaacggcaagccggagtacaccgaccacctgactcacaagctcaagcaccatccaggacagatcgaggccgtcgccatcatggagcacatcttggagggaagctcctacatgaagcatgccaagaagcttggtgagcttgacccactgatgaagccgaagcaagaccggtacgcgctccggacatccccacagtggctcggccctcaaattgaggttatcctcgccgccaccaagtcctattagcgtgagatcaactccgtgatctacaacctgtttcatcgacgtttttccgtgctaggttcttcacggctgctactttcagggt

SEQ ID NO: 412050 - DNA, 303 bp, Oryza sativa
attcttgccatcctcgccgaggcgctttaggccgtgttctgcgaggtgatgatctgcatgtcggagatacaccgaccacttgacttataaggtcaagcaccttcctggtcagatcgcggtccccatcattatggcgcacacttagcagggaagctactacatgaagcatgccctgaagctaggtgagctctacctactgttgaagacgaagcatgaccggtactcgctctagacatccccacagcggcttgtttctcaatatgaggtctttctcctctttcttctattcctttttgtgtttta

SEQ ID NO: 412051 - DNA, 249 bp, Oryza sativa
gcgtgttcaacgccggcatggttgaggacagccgtgtcgccatggatatcatcttgaaggagagctgtggcattttccagggcatcagctctcttattgatgttggtggtggccatggcgctgcagctgcagccatagcaacggcattcccaaacatcaagtgcactgtgctggatctgcctcatattgttgctgaggctccagccactcatagcaacatccagtttgtaggtggtgacccttttctag

SEQ ID NO: 412052 - DNA, 218 bp, Oryza sativa
tcgttccaatccaagaagaagcgatggcatctcgtctcgttgcggcggcggcggcgccctcctcgtattcctcgctcgcccgcctcgtctcccgccgtggcctcgccggcgctgcagatcaccatgggcctgcgaaggtcaacatttggcaagaactgatgaacccggctaactggaaggaagagccatttgtgctagccagcttagctatgtgggga

SEQ ID NO: 412053 - DNA, 237 bp, Oryza sativa
ctgcgcgctgggctgcgtgttcccggagctcctcgcccgcaacggcgtcaagttcggcgaggcggtgtggttcaaggcggggtcgcagatcttcagcgagggcgggctcgactaccttggcaacccgagcctgatccacgcgcatagcattctcgccatctgggcggtccatgtggtgctcatggtcgccatctttggttaccgtattgtcttctgtccttttgatctagttttcta

SEQ ID NO: 412054 - DNA, 339 bp, Oryza sativa
gtgaaccagagcgtgccacttatggatcctatagtcacgcttttcggcagtgtccatgagaacatgcctcatgctggaggaagcatgcggagtacattgtttcccaactttggtagtatgtttagtgtgacagatcagcaccccaaggttgatcaatgggatgaggagaaccttcatagggatgatgaggaatacgcgtctgatggtgctggaggtgactatgaagacaatgttcacagcccgttgctgtcccgacagaccacgagcgcagaagggaaggacattgcacaccatgcttattgtggaagttctttgatgtatgagatgaagaagcctttt

SEQ ID NO: 412055 - DNA, 438 bp, Oryza sativa
attccacaagggtgcaaccgaccatgcttacatgagacttgatggggaaccctggaatcagcctcttccgaaggatgacggcaaggtcttggtggagatctcacatgccggccaggtgaagatgcttgctaccaaaaactgcattgctaaaggcatccatgaggcactgtctatgtcaacggttcatccagagtccagctcctccagtgacgatacggatgacgatgacgatttcgcggaggagaggaagaactttggtgctgcattgtcgtttcggtacatggatgatgtgaccaaagagtaaaaaagcttgctttttttactgagccttgtacagcatgtttgcataggacgtagattgctgcactaactctggaagctgtgccccttgaagattctttccattgccaggttctgacatttggttgattttgctgt

SEQ ID NO: 412056 - DNA, 255 bp, Oryza sativa
  unsure (1)..(255): unsure at all n locations
ctcctcgtcgccgacgagccgcctcctcctcgtcgtcgccggcggcagagcaccggagcagccaccccatggcgtccccggacctcctcttcaacctgcgcaacctcttctacctcggcgcctaccaggccgccatcaacaacagcgacgtcccgggcctcgacgccgacgccgccgccgagcgcgacgccatcgncttccgctcctacgtcgcgctcggctcctaccagttggtgatcagcgtgatcgactcgt

SEQ ID NO: 412057 - DNA, 103 bp, Oryza sativa
tcgttcctcgccgccccgcacgccgccgtggccatcacctgcggtcaggtcaactccgccgtctgtccctgtctgacctactcccgcatgttcatctttataa

SEQ ID NO: 412058 - DNA, 217 bp, Oryza sativa
ttcgttatatcattgattgctatcctcctcctcctccttcctcccctaaatctctagagaaatggaggacaatctaccagtcaatgtccgggagtatcaagaactcgccaaaaaagcgttgccaaagatggcttatgattacatcaatgggggagcagaggatgagcacacactgagggagaatatcgcagcatacacaagaattatattacgacct

SEQ ID NO: 412059 - DNA, 355 bp, Oryza sativa
aagcgaatgccccttttttgggttcttttttaattggtaggggggcttgccacttcatgaaccaatataccacccctatatgcccatgccattggccccatagagaccccccttcttatgaacttacacattgcttggaataaaaacccaccaaatgagaatgaccccggcccctttgtcaaacacaggcacaagaccccaaaatgggcgagggcaagaaagcaaaggcacacagaaaagagcaacaaaagggtataccaatagtgcatcaaatggacttgaggggcggcaacttaatgccacaatcaaaaccggtttccaggggtgggcaccccaaggcaaccttgcagccctg

SEQ ID NO: 412060 - DNA, 483 bp, Oryza sativa
tttagattggtgatataatggaagcggcacacaacgacaataatgtaacaatccattatgaagaatttattgctgcaactctacctcttaacaagatagaacgtgaggagcacctgctggcagcttttacatattttgacaaagatgggagtggttatatcacagttgacaagcttcaacgagcttgtggagaacataacatggaggattcactccttgaagagattatttcagaggttgatcaaaacaatgacggccaaattgactacgccgaatttgtagccatgatgcaaggcagcaacgttggactagggtggcaaacaatggaaagcagtttgaatgtagcattaagagacgcacctcaagtacattgatgcacgaatgtatagattttgttctcttcttttgtccattcattcttcacctacccaattcggggttgtgacttgtttgaaaagagatcatgtcaattaatttagttgg

SEQ ID NO: 412061 - DNA, 414 bp, Oryza sativa
gacaaaacaaaattgaactattatatcatctagtagtaaaaagagtttgtatatagtatctcaatgcaagcccatctgccgggggtggttaatggacacaagatagatgggggatgaactctagcgattagcaccgcaccgacactggaaatccgctcaatcatcatcatccaggtaaattattgttgtggcctagcacattataaatagtatataataaatatatattggagattctctgttaatcacacggtgtatgactgctggatggtctcaagatccaagcccttctgcttcaccaccgactccatccgccccttcagggtggtcagctctctcaaccttgcgatttcggctctcctacgggccttttctgcaagctggttgagatcgttgtagcttgtcatgtcgcgg

SEQ ID NO: 412062 - DNA, 455 bp, Oryza sativa
atttgtctctacaacatcgtcttttacttgccactggacatcatcaagttcctgatccgttatgcgttgagtgggagggcatgggatcttgttcttgagcaaaggattgctttcacaaggaagaaggatttcggcacacaagaaaaccagctcaagtgggcgactgctcagaggaccatccatgggctccagccagccgccaccgcggctgtctttcgcgacatgacaagctacaacgatctcaaccagcttgcagaagaggcccgtaggagagccgaaatcgcaaggttgagagagctgaccaccctgaaggggcggatggagtcggtggtgaagcataagggcttttatctttgagaccattccatattcatacacccttttattaaacatataatctcaatatatatcttatatttacttttttataaagtgcttggccattaacaatatta

SEQ ID NO: 412063 - DNA, 410 bp, Oryza sativa
aggatcaaaacatttctattaccacaactttttaaggatggaattgagtagcaatactttcaccccaaaatacagtttagcgacaatatcttagaaaagccgcttgctttgccgccatggctggcaagctgagcagagcagctaacacaaagaacacgagatcactataaaccaaacggcaacgaacgaagaaaatacagggtcttttttgtctgaagatacacgaagcggttcgttttcttttatttttagtctcctctcctcctcgatgatgggtgtatggcaatggcaatggcgatgggatcttggcttagttgatgggaaggggctcgccgttccactccttgaggcagtcgagcatggggtcgatgagcttgccctggctgatgccgaggaacaccttgttgcac

SEQ ID NO: 412064 - DNA, 125 bp, Oryza sativa
tcgtttccttttcctccggctcttcttcagtatcgaatgctctcttctccttgtgcccaccaccaccaccgtagtaatggcgggcaacgggccgatcaacatggaggacctgctcaattggggcg

SEQ ID NO: 412065 - DNA, 203 bp, Oryza sativa
tcggtaccatccaatgacgcacaagggtgggctgtgaatgatctaggcgtctaatatacattcgggccagacaaagtgtctgaatttcttgagaagcatgaattagaccttcatttgtggagcccatcatgttgtctaagatgggtaccagttctttgcttaccgtcaacttgtaacacatatttcggctcctaattactgtg

SEQ ID NO: 412066 - DNA, 218 bp, Oryza sativa
ttgatactatgtagcagaaatcctcttggcattagagtaccttcacatgctcggcatcatataccgcgatctcaagccagaaaacgttctcgttcgggaggatgggcacatcatgctatctgactttgacctctcactccgttgcgcggtgagtccaacactaataaaatcatctaatccgtacgctgaagcactcatgaagaacagccatggttact

SEQ ID NO: 412067 - DNA, 298 bp, Oryza sativa
gcgtgtaggcaccctctaggcgcgcccgccctttttttttttttttttgggttttttgacaaaacaaaattttactattttattatctagttgtaaaaagagtttgtttttagtatttcaacgcaagcccatttgcccggggtggctaagggacacaagatccatgggggatgaaccatagcgatttgcaccggaccgacactggaaatcccagcaagccataacaaccaagaaaaaaattggtggggcctaccacaatataaaaaggttttaaaaaacttatcttggcaaattttgg

SEQ ID NO: 412068 - DNA, 387 bp, Oryza sativa
ggcaaaccccaacttttttcagtttctgaattctggatggatcatatcagattcatcacagcatcgtacaatctgtgcaagcattggtacatcgagcgatggaaagagagagtagtctacaatggcggctgggccattcacgagcccggcgtgaacttgggggcgtaaacccaggcgttgttggcgacggggtcggcgagggggtcgagcaggttctccaaggggcccttgccggtgaccatggcctggaccaaaaagccgaacatggagaacatggcgaggcggccattcttgatctccttgaccttgagctcggcgaaggggacggggtcgtcggcgaggcccagcgggtcgaaatactggccgccggggtagaggtcgttgccc

SEQ ID NO: 412069 - DNA, 230 bp, Oryza sativa
gtattagctcagccgccgccgatggcgttcacgatcatggccccaacctcccgcgtcctcgccgccaagaccccctttcttggccatccccgcccctccaatgcccccctccgtgacatcgccgccgacgtcaccggccgcatcaccatgagcaaggagctgtggtacgggcctgacagggtgaagttcctggggccatactcggagcatatgccgtcttacctgagggg

SEQ ID NO: 412070 - DNA, 477 bp, Oryza sativa
gtgttggagatctccaagatcgcctcgtcgctcctgccgttcgggcccggagaggacgacgacgacgatgccgaggctgtgggcgtgaccgaggaggtggtggagttcgtgaggcacatctcgacccatcccgagacgtggctcgacttccccttgtttgtcaacgaccggcacgcggatgattttgaactgtcagacacacaatatggacatgcattggttatagagcgtgttgttccaagcttgtcatatcttaggaccgagctttgctctaccaatatgagtgaagcatgcttttggaagatctattttgtgcttcttcactcaaaactcagcaagcaagatgctgaactttttttaacgccacagatccttaaagcaagagaagtattattgcaaagttcaccgacaaagaaaaggctgggacctgatgatggttcattacaaaactggaatgttgcatttacaaaggtgtca

SEQ ID NO: 412071 - DNA, 431 bp, Oryza sativa
ggagcatcctcgtccatgcctccggccatgtcagctccggcgccctggtacatcttggcgatgatggggttgcagacgccctccagctccttcatcttgtcctcgaactcctcggcctcggcgagctggttgctgtcgagccagctgatggcaccgtcgatggcgtcctcgatcttcttcttgtcggcctccggcagcttggacgcgatcttgtcgtccttgatggtgttccgcatgttgtaggcgtagttctcgagcgagttcttggcgtcgaccttcttcttgtgctcctcgtcctccgccttgtacttctccgcctcctgcaccatcttctcgatatcctccttgctcagacggcccttgtcgttggtgatggtgatcttgttcttctgcccggtggtcttgtcctccgccgagacgttcaggatgcc

SEQ ID NO: 412072 - DNA, 273 bp, Oryza sativa
ttcctagaggctcatcggcgacgccgccaagaaccaggtcgtcatgaaccccatcaacaccgtcttcgatgcgaagcgtctcatcggccggcgtttctctgacacgtcggtgcagagcgacgcgaagctgtggccgttcaaggtgctacccggccccggcgacaagccgatgatcggcgtgcagtacaagggagaggagtagctgttttccttcgtggagatctttgtctttggtgcttcactagattatggtgaccgtcctctgtctttttt

SEQ ID NO: 412073 - DNA, 418 bp, Oryza sativa
ggaatcaaatatactatccagtttaaaagataataaaaattgatcgcaacacatccagttactacgatggccattgctgtactcggggcaggagcaggacaaataactccatacactggcatgaacaaaacgcatactgctacaagattctcattgtaagtaagtcggcaacctaagctgattctgaggtctcccattacatgacagccggccaagcagcactgcgactcgcaagaagttccagctaggagttatacagctaaggtgatcaaaacccaaagaaacctagctcggtagccctttctttctcgaatgtctcaaaatactggtagatgattgtaacagcgagcagtatcccaattcctgaaccaattgcacccatgaaatcagctaggacagtcaatgcaccaatgcagac

SEQ ID NO: 412074 - DNA, 270 bp, Oryza sativa
tatgtttgctccggccagccagccaccgtcgtcatcaccgacgagtgccccgggggcatctgcctcgccggcgccgcgcacttcgacatgagcggcacttccatgggcgccatggccaagcccggcatggccgacaagctccgcgccgccggtatcctccaggtccagtacagaagggtgccatgcaagtacagcggcgtgaacatcgcgttcagggttgaccagggggcaaacccgttctacttcgaggtgctcatcgagttcgaggac

SEQ ID NO: 412075 - DNA, 294 bp, Oryza sativa
ttgttttgagatgaattgttcgtagcattttagctgtagtatagatcgatcaatcgatcgttcgttcgttcgatcgttcgaggacgagagatttgctaacatggcgttggcagggacctccaaagtagtgctgggatgtgtcgcgtttgggatattctgggtgctggccgtcttccccaccgtcccgttcatgcccgtcggccgtacggtcggttttctccttggcgccatgcttatggtccttttccgtgtaatctcgtcggatgacgtctatgccgttcatttactctttat

SEQ ID NO: 412076 - DNA, 486 bp, Oryza sativa
ttagtttcacaatgtctttaacaagggattgcatatgtcccatggtcttgacaagaggaagtgaccagctacctgtcagtacaaagtttgatatgcgtagcgatcctggcgttgtaaggaattatggtcggctcttgctggagatggcttctgctgtgccagatggcatagtttgtttttttgtcagttactcttatatggatggcattgtcaacagttggaatgagatgggtttttcgcaggacattaagcattatatgttgttctttattgaaactgcttatgtttttgtgaccaacttttgcttttgtttatttcttgaaatgcttgttatttatctaattatgtttttttttactattctcttttcttttttttattttttttcctttctattaattattcttttattattttctctattctttttccctttctctttttgttattcctttatatatttcttttttcttgtttctttatatt

SEQ ID NO: 412077 - DNA, 364 bp, Oryza sativa
tcgatagtgcttggaagctaccttgctctgatgaccgttattttcttctgggccatgcacaagacagactttttcacggacaaattaggtgttagattaattaggatcacgttacatgagttgatgtttgtactgaccaacaagtttgatttgagagtcattttctttttttttttattttttctattttatattttttatttgtatactctattaaatttttggttatttatttatttttaattttatttctattattcatttttatactttcattttttattttttttttatcctaaattttttttttttttttttgtctaatcttttttttttatttaacattttatttttaatacttttt

SEQ ID NO: 412078 - DNA, 414 bp, Oryza sativa
agcatggaaaataagagagtagaagttaggaatcgtagttccgaacacagccttacatatttaaatacaataaattagggaagtacatggaattagtactctcaattttttttccaaaacagtaaaattgaattactgcatctataccttgaatgcagcaatgtcgttcatgaaacgcataatctttgcacaagctataacggcacttgaacgtactgttgtcaattcaaatgattccttcgttactgcatcaccctggccaactgcagcagtcacacagagtagtggaacagtactggacagggttgacaaagcaacccgctccttaaatgctggcttgtaattttgatgcaaccattcaaattcttgcaggtaatacgtggatagattttggaactcttttttcatgcaggt

SEQ ID NO: 412079 - DNA, 420 bp, Oryza sativa
actgggatgataacttcgatgttattcatttcatagaataatcgcaactcaaaaacaaccagaacacatgtattttttctggtaccctcatcaggcatctgattaaatttgaataaaccgaacatatgtgtccaaaatcacaagtgagaaccacaggtagcaataggtattacagtctttgaatagaagaaaatgataacagataggccggttgaaaactttgtccacgctaatgaagaaacagcaacaaaaagagagaaacaagcaggaggacggcgataacagctcctcttggcttagcattcttgggtccgaagaattagaagcatttcctgtgcacaatggatgggccagactcatcgtactcagccttggcaatccacatctgctggaatgtgctgagagatgccaagatggatc

SEQ ID NO: 412080 - DNA, 355 bp, Oryza sativa
  unsure (1)..(355): unsure at all n locations
aaacaacaacaaaccttaactataaggaataagttaaccggggttccctcaacttaacagggagattttttaagattccttaacaacaaaatcagaaatgggtacccctaaacttacacaaaacgttcaaatgaggtcccatggcagtatatgggaggggtttcgctgacggggcatcctagtcagaaaaaaataaaaaggtccatggggcccacatgtcagttgcacattttctttcttttcttttcttttccttctcttctttttaatcgggnaaatgggcgggcagcgtgcgagcatggcagttgagcgacggggggcggaaacagttgagcgcggcctgggggcgagcggc

SEQ ID NO: 412081 - DNA, 166 bp, Oryza sativa
gtcttctcctccttcttctccatcgccggcgagagagagagagttagctagctaggatgggttctacagccgccgacatggccgcggcggccgacgaggaggcgtgcatgtacgcgctgcagctggcgtcgtcgttgatcctgccgatgacgctcaagaacgccat

SEQ ID NO: 412082 - DNA, 196 bp, Oryza sativa
atgagcatagcttaatttggatcataattgtatgctcaatggagcatacaaactccagacattgaattgcctggcgaactcgaaagggttacacgggataacttggacactttgagagctaggcaaaactgaacgaaccggttagctacaagcaacagtgaggaacaatagctgtgtttagctgattctgcaatat

SEQ ID NO: 412083 - DNA, 372 bp, Oryza sativa
tctttgacgcgtgggtgagaattagcctgaataagaagagattggacaagaagaccttggacggtgcaaaattggcaagggaggaaagccatcgtctgagagccgacggtttaggtgatgacatagttcctttggacaactacctggacacgcagtactttggagagatcggcatcggcactccaccacagaacttcactgtgatattcgacactggaagctccaacttgtgggttccatcagtgaaatgttatttttcgatagcatgctacttacaccacaggtacaagtcaaaagggtcgagctgtttcaaaaagaatggagaatcttgcagcattttctatgggtctggatcaattgctggttttttca

SEQ ID NO: 412084 - DNA, 408 bp, Oryza sativa
ttatgtagattgtggcgtcaaggggtaaaaaaggcacatggtggattgagcgtgttgagcagctaacctttttgacccgtgtggcgaaaacacctgctcagaagcttgaaattctctttcatgtgatttctgcccaatcagatgtgcacgataggttacttggtcacatgccagtcaacatgtggaagaagtgtgttaataacatgcttcttgtgcttgatatactgcaacagtatcccaatattgtagtagacacatctgttgagccatggtgagaaggtaactcaaaaagggtgctgacttttgatggacaaattccatgtgactgggtatgcttgtttgcgttcctggataagaatgggtgttttagagctttatgaaatggaatatgagaaatccaacaatttt

SEQ ID NO: 412085 - DNA, 419 bp, Oryza sativa
gaagaaaaacaaatcaacctcagattacaattgcatcccgtgatgctgtcgctagtgtacacttaaaattacacagaatgacgtcgcctatcattctctccttccattagcctttcctctccagaacccaattcaatctgcaacgaagctcagggagatggtgaaccaaccatgcagggacgcacgcctaaacaaactgtgcatatacatccactgactagttctggccatcatcatcttcatcttcatcttcatctcgccaagaaatacgacaagaattgaaaagaggctattggcaatgcagctactatgatccactctcactttggttactgaatggcaacctgtctactcccctctcaatggcgtctctccacaaccgataccggataccaagcttgtcatatgatactggccag

SEQ ID NO: 412086 - DNA, 408 bp, Oryza sativa
aaaggcaagaatattattcataaatgacgcatgatttttatcaaaacgcttgcaaatgatatcagataagtagagtcaacaagacaaaactgtatctgccaaagcacacctccccaactccacccaattacgccattatttctgggcaaaagcaaacggcttcccattcctccccttcaccagtctcaaaccataaaccccacaacaaatcctcctaagtgacggcatataagatgatgaaaacaaagcaggatactccagagtcgtcatggcgaacttcaagttgacacttctcatgccacagccgctagtcgtgctgggcagcctagtaccggtagtgcgcgggcttgtagggaccctcaactggaacgctgatgtagtcagcctgcgacttggagagcttggtca

SEQ ID NO: 412087 - DNA, 389 bp, Oryza sativa
  unsure (1)..(389): unsure at all n locations
tctaacgggtcccagttcttcatctgcaccgtgccctgcagctggctggacgggaagcacgtcgtgttcggccgcgtcgtcgagggcatggacgtcgtcaaggccatcgagaaggtgggatcccgcggcgggagcaccgccaagccggtcgtcatcgccgactgcggccagctttcctagatctgtgctgttccccttcgcctttcccagtatcagtcgtcttgagtcgtcgagtccctaaataaggaggaggtggnggntggtgttttttttttttttcgttctattattctacctattttatcataactttctactcttttttttttcattatcacctactcttttttattctctcttctttacattatttttttaatatttttttt

SEQ ID NO: 412088 - DNA, 308 bp, Oryza sativa
tcttttactcccaaatcccaaccttccattcatcggggtcgtgtcgccgccgacgaacaacacggcgagcggcgccggtggcgagctacctaccctccatctctccagatcccttccagggacagtacaagacaagtcgcacaaaacagaaaatcttgtgatagtttaaatggcttcaaagcttcaagccttttggaaccatcctgctggccccaaaaccattcatttctgggctccgacatttaaatggggtattagtattgccaatgttgcagactttgcttaaccacctgaaaagatatcctatc

SEQ ID NO: 412089 - DNA, 289 bp, Oryza sativa
ttctgtgggacgccggcggattcgtattatgaggtccgctcggattgcacggatgacgtgcccaagagcaagttcaagatcaaggcaggaaaaacattgagtgtccggaaatggcaggctgcatttagcactgatggttgtcttgatattgcctcagtcctaagccggatacaaaaaggaggtgtgcatccaacagtaaggggagaggcttgtcatgtttttatttctttctttatttccatttttttttattttttttttattattcttttatctttttttttttttt

SEQ ID NO: 412090 - DNA, 437 bp, Oryza sativa
tttaagggcagagacatttgggatacccatacctgactgggtcaaaaacccagcaaagatggctgaagctgttgacaaggtgattgttcctgatttccaaccaaaacagggggttaagatagttacagatgagaaggctactagtctttcgtctgcatctgttgatgatgctgctgtcattgaagagcttattgcaaagttagaagcaatttccaaaacactgcaaccaggattccagatgaaaccaatccagtttgagaaggatgatgacaccaattaccatatggacgtgatagctggttttgctaacatgcgggcaaggaactatagcattcctgaagtggacaagctgaaggcgaagttcatagctggcaggatcatccctgtcattgccaccttaactgcgatggctactggtcttgtctgcttggaactgt

SEQ ID NO: 412091 - DNA, 176 bp, Oryza sativa
ctcggaggccttcgcggagctcaaggtgaaggagatcaagaacggccgcctcgccatgttctccatgttcggcttcttcgtccaggccatcgtcaccggcaagggccccctcgagaacctcgccgaccacctcgccgaccttttttttttcaatcgccatgggcctacgccatcct

SEQ ID NO: 412092 - DNA, 519 bp, Oryza sativa
ttggtcaagtacgccgacgtgatcaactccgtcgtgctgcaggatgattttttgccaagaacgccaacaccgttggagtacatttttgggtctatattctgcttgccctgcttgttgtttatcatgtgcctgagagatacatttaagcaagacaagagaaaatttaaagatccaagaagactctatgctcctggtcgaatgtatcatatagtcgagaggaaattttgcagatgtggaagattccctcctgaggtgagaactgctattccagtggaaggccgatttgagcatattgtgttgtcatgcagtactacttctgatcatgcgattgtatggattgaacgagaatcagaaaaggctttagagcttatgaaaggaaatgagaaaccaacaacttcgcctgcgcaacaaaagatggaaagactgcagagttttgaggaagaacacaagaatgcccttgagagagcaaagaccttagatgttcctcacgcagttgacttgtttgaagtggagatccag

SEQ ID NO: 412093 - DNA, 418 bp, Oryza sativa
gcttctgaaatatgtcgcaacaatgaaccagcaacaacagattcgctgatggaccttccaggggatagaacatttgtagaatcactcatcataagtgtaacgccttctttggagagctcttccaatgcttgccgatcaaatatttttccatccactggtgattcgtcaattttccagtcaccagtatggaaaattatgccatcagcacaacgaagcactaagccacagcagtccggaattgaatgagttacacggaggggctccacctcaaatggcccagcctgaaatctcttccttactctaaaaaccttaagcctggacgagagaaaaattccaaactccttcaaacgcctctttattagctccatggtaaaagatgatgcgaaaatcggtgtgcttgaatccagcgctgggatta

SEQ ID NO: 412094 - DNA, 424 bp, Oryza sativa
cctactggaagtgatccacaataataccattacacacaacttctgataacatgtcatcgttggaagttggacctgctgtgaattgaacaaacgcaatttgaaatgctgaacaggactacgacaattattgtcacaactaatatgacacggtcccatcaaaagactaatacaaagatatggccattttttggatagcgaaaactaactgaacagcgagtccactttgaaatcagcaaatgtgcccacagaagcataaaaagagcgacctagtagagttcttcctccttgtgggtgtgaatgacgcaatccgccttagggtacgaaatgcatgtcagaacgtatccctcgcccatctggttctcgtcgaggaaggatccttccgactgatcaacttctcccgatgacatcttacccgcacatgtgg

SEQ ID NO: 412095 - DNA, 213 bp, Oryza sativa
ttctagattgtgctttcctaaacccggcgcgggcattgttttggcgaccaagagcccttccttcattggttacgcaaagcaaacattgaacatgtcaggcctaaggatctccaacaagttcagggtgtccgcgacagcggtgcacaaggtaaagtttataggcctggacggtgtctagcacgagtttgaagcctttgaagataccttacattc

SEQ ID NO: 412096 - DNA, 215 bp, Oryza sativa
tttttaaacaagcctttggtggttcgataggacccgtcatattactccaaatgcagtagtttcttctcctgataagaatgtgacaattgcaaaaaggtgctcagtttttccagttgaatttgttgtgaggggatatgttactggtagcactgttacatctttgtggactgtctttatcaaacttgctaggaactattgtttatatgttctacttg

SEQ ID NO: 412097 - DNA, 354 bp, Oryza sativa
gaacaaaagccatattatttttcctcgcctatattatgtaacttgttcttacagccataggagcgtactatgcgtaagaaacagcaataagcttctgttccgtcctctattagctactccatatagcagtaagtaagttgtaagtagtactccagttactagtactataaatttaacaagggcgatggatggatggtgtgttacagtagtataattgagatggaagaggtaggatggatggtcaggcgaagagcttctcggcgaagatgtcaagaagggatagggcctcggcgacggtgagctcgaggcggaacttggggccgtcgtagtggtgcagcacgggcctgaaggcgt

SEQ ID NO: 412098 - DNA, 418 bp, Oryza sativa
caaatatcttccttcgtaatttgacagccgttccagttacaccacaaattttgctatagtgaccctgtttatttcacttcccatgggaacaaatcaaattgtctcgaaactactcaaatctcaccaaaattcagattcaagcctactacccaaaaattgacggccagtgaccttcccggagaacaagtaactgtaacttagtcatcagtacccgtagccggagttgtccatcgggttggtgacgggcgcaggctcaggctccttgatctcgacgacgacgacatccgatgtgaggaatgtcttggccaccgacgcagcatgcttaagacaacatctcaccaccttagtggggtcaatgataccagcagccatcaaatcctcgtactgtccagttgcagcattgtaaccaaacttgaag

SEQ ID NO: 412099 - DNA, 343 bp, Oryza sativa
tcggtaggctcgccatgaagtggcacccggaccggtgcgtgagctaccccggcgaggccaatcggcggttccagcggatccaagaggcgtactccgttctgtccgacaaggggaagcgagccatgtacgacgccgggctgttcgatcccctcgacgacgactaccaggatttctccgatttcatgcaggagatgctggtgatgatggataacgtgaaaaacgagaagcctgacacactcgaggactctgagaagatgctgtaagacattctctagaggcttactgctgaagtcctctattatctcttcacttttcccttttctctacctccatactctttctt

SEQ ID NO: 412100 - DNA, 291 bp, Oryza sativa
ttgtggtttcagtgaaagcagcaaatgtgcacagatttgcaaggtttttgaggatgcatacaaatctcagtttggcatcataattctagatgacatcgaaaggttactggaatatgttgccattggaccacgcttttcaaacataatctcacaaactctactagtccttctcaagagggttcctcctaagggcaagaacttgcttgttattggaacaacaagtgaagtaggctttttagaatccattggtatgtgcgaagtgttctccgtgacataccatgttcccaaact

SEQ ID NO: 412101 - DNA, 330 bp, Oryza sativa
ttggtatggtcgaacacagctagctagctgggctaggatcgccatggatcggggtgaccaccaccacctccagcagcagcaccagttcttgatgccaccgcctgcgccggtggtgccgccgcagctgtgcatgccggcgatgatggcggacgagcagtacatggacctgggcggtggcggggcggcggcggcgccggggaggggcggggccggggagaggaagcggcggttcacggaggagcagatacggtcgctggagtccatgttccacgcgcaccacgccaagctggagcctcccgagaaggcggagcttgcccgcgagctgggcct

SEQ ID NO: 412102 - DNA, 283 bp, Oryza sativa
tttgtctttcgtgagagcaaagctaaaggtaagggagctgatgaatactggcttatttggcgttatgaaggtgaggatacactattcgatctcatgcaaagcaaggagttcccttacaatgttgagactaagattctaggagatgttcaagacctgccaaagggaatagcaagagagaataagattattcaaacaggaatgagacaactcttatttgctcttgatggccctcaatcaacagggattgttcacagagaccttaaaccccaaaatgtgaattttt

SEQ ID NO: 412103 - DNA, 112 bp, Oryza sativa
agctgcagcagcagcagctgagcttgaagcagcagagcgaggtagacatggccgccgccaccatggccctctcgtccccggcgctggccggcaaggccgccgcgaaggtgtt

SEQ ID NO: 412104 - DNA, 289 bp, Oryza sativa
tggtgagcttggtgagctgcagagatggccccctccgtgatggcgtcgtcggccaccaccgtcgctcccttccaggggctcaagtccaccgccggcatgcccgtcgcccgccgctccggcaactccagcttcggcaacgtcagcaatggcggcaggatcaggtgcatgcaggtgtggccgattgagggcatcaagaagtttgagaccctcttctacctgccaccgcttaccgtggaggaccctctgttgcagaccgagtacctgctccgtttcaagtgggtgcctttcc

SEQ ID NO: 412105 - DNA, 434 bp, Oryza sativa
  unsure (1)..(434): unsure at all n locations
tngttgaccacggcaatcagtccaaggacagggaggagcaggctgagttcaagaagatgtacggtctcattgaccagtacaagttgaaggggcatatccgctggatctcagctcagttgaaccgtgttcgtaacggggtgttgatccgttacatttttgatacctattttgttttctttcaacccctttttctttaatttttatatttttctttttatctttccctttattatctttttttccttccatttttctttctttttcttacctcttattttttcttatttttttatctttcttttctttcttcattttatctcttttattttcatttcttttatattattttattttctactattttatatatttttcttttctaactttatcttctttttctctttcctatttatatatttttactatatcttttc

SEQ ID NO: 412106 - DNA, 306 bp, Oryza sativa
tttctatgttctctgaaccccacaacctccttggaggttttgccttcatcggagagggcatccctgttgctactggtgctgcctttgctgctaaataccgccatgaggtgctcaagcagtctagccctgatggacttgatgtaaccctggcattctttggtgatggtacctgtaacaatggccaattctttgagtgcctgaacatggctcagctttggaagcttcctattgtgtttgctgcggagaacatcctttgggcatttgttatgttactatcttacggctactttaagacccatagctttt

SEQ ID NO: 412107 - DNA, 470 bp, Oryza sativa
aaaatcacagaggatattagaaaatatgctgatgaacatggttacgggacagtggaggaagcggtgatacaaggaatgaatgctatgagtgctgagttttcagctgcaaggaaaacagtcagtggggagcaacatggtgaagctggaggggagatatatgttccagaaagctatacagctcgcaaataagatcgtcttggtgtccatctactccgggtggagcgtttatcagcagcactcctcaccatcctatgttaggaggtggggtgcctgtattctcaacgatctgaaggccttttggcctggattgttgtgaattgggctgagaaagtccctttgaacctgaacaggataatgcctgtgaagggagtgtgcatttctacttttatggtttcagggcactttcattaaaacccttttttggcggtaggacgagctatccatattgtccttctataaatctttttttt

SEQ ID NO: 412108 - DNA, 396 bp, Oryza sativa
atttgtacatacttggaacttgtttgctatgtggttcttctttcgatgactactcgccccgttgtcgttgcagccattgtagaatgctggtgctagtgtgctccacatgtcaggattccactaaggattatgtttgcgagttgtgccaaaagaacggaaagcaatgctgccaaacgtcaccaaggcaaggttgcaaaacagagtcagagctaatagattcttctgactttggaataccaatgattattaattaaagtgcaacttcaaccattcccaggagtaatggtagtgagcagcttaagaagctaaagatcctctgcttgcatggttttcgtcaaaatgtcttaaattttaagggcagaacatcatctcttgccaagaagtttaagtactttt

SEQ ID NO: 412109 - DNA, 402 bp, Oryza sativa
catatccaattcgcaccgatcgatcgatcgatcgatccagcaactagatcaacagtactagctaggaagcatggcccgtgcacagttggtgttggtcgccctggtggcagctctgctcctcgccgccccgcacgccgccgtggccatcacctgcggtcaggtcaacttcgctcgctggctctttctgacctactcttgcggttgattcttttatttatatctctttatatccatatattatttacctctattttatatttattttatttttttttatttttatttctatccttttattctattattatattttcttttccttttttcttctctttctttttttttttctatttttttaattttttcttattttatctttcttcatcttatttttactttttt

SEQ ID NO: 412110 - DNA, 162 bp, Oryza sativa
  unsure (1)..(162): unsure at all n locations
nctggagctcaatcagcaacaacatctatctccttcttgcttagttaagtccttcgccctcccaagaagaagaagatgtcttgctgcggcggcaactgcggctgcggcagcggctgccagtgcggcggcggttgcggcggatgcaagatgttccctgatgtg

SEQ ID NO: 412111 - DNA, 446 bp, Oryza sativa
ttgtaagcagccatgtcagatgaagaaattgaggaaccaaaacggaggagagaatctgggggacaatattgtgcggtggagaaccgttaagaatgctaatggcactacatcttgtgaaagtaatgcgcgcattgtaaaatggaaagatggaacgatgcagctgctgattggtaatgaagttcttgatatatctgtacatgaagcacatcatgatcagtcccatctgtttctgaggaatgggaagggtagttctttattacatggtaggcttttacggaaaatgagatttatgccatctttcttgtcttcgaaatcacatcgcttttttacttgcttttgtgaatatcagattaagaaatacttgtatgattcaataattgatcgattctaatgatccttgtatagtgctacatgtataatgttatgtcttttttttcaaaaatttc

SEQ ID NO: 412112 - DNA, 317 bp, Oryza sativa
gatgccattgaggaggacccttcaatgcgacaagcttcagctgcaagacgggtagacagcatgattgacaagatgccaaaaaagcttgctggacaaccaacgtttctgctatgtgttcttgctgagaggaagaattcagatatttatgggccctggatgctggaatgtcttgctgaatttgggattattacacaatgagaggaccctactagggttaatgattcagtatattacaaatgtactgttaaagataaatgcaaagcttggtggcttgaacttcctgattgaaattgaaacatcctcttacattcctcttg

SEQ ID NO: 412113 - DNA, 494 bp, Oryza sativa
tttgtcccaccatctctctcctcgcctagggtttcacgctctccgatcccgcggcggcggcggcgagaagcttccactcgcctcggcggcggcgccggccagaaagatggctggtggttttcgagtactgcatcttgtcaggccctttctggctttcctgccagaagtacagagtgctgataggaaaataccattcagagaaaaagtgatctataccgttatctctctcttcattttcctggtgtgcagtcagctcccactctatggaattcattcaactactggagcagatcctttctactggatgcgtgttattcttgcatcaaaccgtggcactgttatggagctgggtattaccccaattgtgacatctggaatggtaatgcaacttctagtgggatcaaagatatttgaaggttgcaacagtgtgagagaaggccggcctctttgaattggccccaaaagctgccgggttttttgattgtattggggaa

SEQ ID NO: 412114 - DNA, 305 bp, Oryza sativa
tcgttagtctcccccaaatctcctttgcgtcctctcgattcctcagcaaccatgtcggcctactgcggcaagtacaaggacgagctcatcaagaacgctgcctacattggcactcctggcaagggtatccttgctgcagatgagtccactggcaccattggcaagcgctttgccagcatcaatgtcgagaacgttgaggagaaccgccgctctctccgcgagctgctcttcaccacccctggtgcccttcagcacctaagtggtgtgatcctcttcgaggagacctctgttccagaagaccaagg

SEQ ID NO: 412115 - DNA, 353 bp, Oryza sativa
tcgttcgtcttctctctctcgcaggactcgatcgcgatggcggcggaggtggcgaaggcggcggtggtgccggagtcggtgctgaagaagcggaagcgggaggagcagtgggcggcggacaggaaggagaaggcgctcaccgagaagaagaaggccgtcgagagccgcaagctcatcttcgcccgcgccaagaagtacgcccaggagtacgacgcgcaggagaaggagcttgtgcagctcaagcgtgaggctcggatgaagggtgggttctacgtcagccctgaggccaaacttctgtttgtggtccggatccgtggtatcaatgccatggcaccccaaggacagggaagatc

SEQ ID NO: 412116 - DNA, 227 bp, Oryza sativa
  unsure (1)..(227): unsure at all n locations
ncgtaactttccagtggccgtgcctcagtgaatgcagcaactccagaactgcgcttgcagtgtgacgatgggcatgtgatctctgagattacatttgcaagctatggaactcctttaggtggctgcctgaacttcttcaaagggaattgccatgcatcgagcactctggatttggggacagaggcatgtgttgccaacaccaaatgtgtatcagtgtttcaacgatg

SEQ ID NO: 412117 - DNA, 341 bp, Oryza sativa
tctgtatgctcttgccaaatacacccaaggtttcagtggtgctgatattacagaaatctgccagcgtgcatgcaaatacgccatcagagagaacattgaaaaggacatcgagatggagaagcggcgggtacaacaagtccggcaccgacgacgactacgacagcggctacaacaacaggtcaggggctaacgagaagtacggccgcaacaagtccggcgacgacgagtacagcggcggcggcggcgccgaagccgacgaggagtacgtcgacgggttgtctgcctgggacgacccggagaagtacaggaaggaggagaaggagcacaagaacaaggtgcgc

SEQ ID NO: 412118 - DNA, 258 bp, Oryza sativa
  unsure (1)..(258): unsure at all n locations
tgnctggcaccaaagacagctgacagacagtcttccatagaacagattaagaagctctatgaactgttctgcaagtctgattgcacactgctcgagattaatcctcttgctgagacagctgacaacaagctggtcgctgctgatgcaaagttgaactttgatgacaatgctgcctttaggcagaaagagatatttgccatgcgtgacacaacacaggaagatcccagagaggtggctgctgcctaagctgatcttgtc

SEQ ID NO: 412119 - DNA, 219 bp, Oryza sativa
ttgtaagaaatggatctggctgacaagatgatccccctggtcaactatatgcatgaccaccttctgagggaaacacaactgcttagcatcaatggggtgcccattcctgcagatttttgctgcccgctgtccctagagctgatgtcagatcctgttattgtagcatctggtcagacatatgagcgggtttatatcaagttatggcttgatgagggttct

SEQ ID NO: 412120 - DNA, 453 bp, Oryza sativa
ctcatttcgcacttagagcacttgctcgatctggcatgaagattggtcgtattgaggatgttactccagtgccgactgatagcacacgcagaaagggtggtagaaggggtaggacgctgaaatatatgtgcatgatccgagcgcacccaggtgatgtttatacagtgaccggtattgcattttgactgttttgttcgtgagattcattatttttggatcatttaaatctcttatttgtactttttcatcttcatcaaatctttgttttaattcttttatttctccttaattttttatatctcttaatacttttttcttccatatcttttaattcttttttatcaatgattttttttttttttttattttttccttctctatcttatcttatcttttctttttaatttaaatatttattaatctatataataatttatctaatattataatttt

SEQ ID NO: 412121 - DNA, 329 bp, Oryza sativa
cttagtccaaggctgaccagcttgcaaagatacagaagcaagttggtcttcctactgagtatgcacagaaaataatcaagaatatcacaacaacaaagttgtcttctgcaattgaagcctctatttctcgaggacagattggtatacagcaggtccgaggattgaaagaagcaaattttcaattggacagcttgattgcagaaccacttcgagaaaacatttacaaaaaatccgttgaggagatcttttcgtcaggcacaggtgaatttgatgaagaggaagtgtatgtaaagatcccagctgactttattattaatgctgagaaggcc

SEQ ID NO: 412122 - DNA, 295 bp, Oryza sativa
tggagagcaccaaggacacgcgactagcagaagccgagctaccgccttctcgatccatatcttccggtcgagttcttggtcgatctcttccctcctccacctcctcctcacaggttcttggtgtagcttgccactttcaccagcaaagtttcatgtctgatctcgacattcagatcccaactgccttcgatccctttgctgaggccaatgctggagactctggtgcggctgcaggatcaaaggactacgttcattgacgcattcagccgcgtaatggccgtaagagccctgacca

SEQ ID NO: 412123 - DNA, 158 bp, Oryza sativa
tcggtcccgtctcctcgcccgccgccctcgactcccgtctcctcgcctgccgctgtcgccgatctccatcctgctagcagaggtggcgccggcgttcttctcctgctaccgccgaatttgctcaccggtgagcatactaaaccatactatacggcctc

SEQ ID NO: 412124 - DNA, 159 bp, Oryza sativa
gtaatgaccctacgtcacaggctgagcttgataacttcatggttcagcagcttgatggaaccaaaaatgagtgggggtggtgcaagctgaagcttgtagctaatgcattcctggctgtgtcactgtccttttgtaaagcttgtgctattcatcatgaat

SEQ ID NO: 412125 - DNA, 426 bp, Oryza sativa
ttggttacttccatctcattctcctaattgtcatcactagcttctagctagcttaattaattaattagccatggcggaggagaagcaccaccaccacctgttccaccacaagaaggacgacgagccggccaccggagtagactcctacggcgagggcgtctacacgtcggagacggtgaccaccgaggtggtcgccggcggccaggacgagtacgagaggtacaagaaggaggagaagcagcacaagcacaagcagcacctcggtgaggccggcgccctcgccgtcggcgccttcgtcctgtatgagaagcacgaggcgaagaaggacccggagaacgcgcacaggcacaagatcacgggggagattgcggtcacggcagtagttatccgccggctgctacctctttcacgagcaccactagaaga

SEQ ID NO: 412126 - DNA, 227 bp, Oryza sativa
ttggtaggtgttcgtgcgggccgaccttaacgtgccgctcgacgacgcccagaagatcaccgacgacacccgcatccgcgcgtccgtgcccactgtcaagttcctcctcgagaagggcgccaaggtcatcctcgccagccatctgggccgtccgaagggtgtcacccccaagtacagcttgaagcctcttgttccacgcttgtcttgagctacttggagttcgatgt

SEQ ID NO: 412127 - DNA, 289 bp, Oryza sativa
tttgttgtttagtcattggcggaccttatggtgatgctggtctcactggccggaagactcatcattgacacttatggtggctggggagctcacggtggtggtgccttctctggcaaggacccaaccaaggttgaccgtatcggagcatacgatcgcatggcaagctgccaagagcattgttgctagtggccttgctcgccgttgcattgaccaagtctcataccccatcggggtcccacagccactgtcctgattcttctacacatacagtactggcaggattcctgac

SEQ ID NO: 412128 - DNA, 210 bp, Oryza sativa
ttgttagcttgctggacgctcagctcgagctctactggaacaccttcgccgtcatcaagtccatggctctcaagtcggcgctagacctccgcatcgccgacgcagtccacctccacggcggtgccgccaccttggccgagatagccagcgaggtggccctccacccgtccaagaacccctgcctctcgccgcctttatgcgcgcgctcac

SEQ ID NO: 412129 - DNA, 352 bp, Oryza sativa
atgagaaaggcgtcttcgtactcgcctctctccgcgcctccgcgcttttcctcctcctctcccctctctcccttctccgccgccgtcgcagcatcaacccaatccgccgccatgagggagtgcatctcgatccacatcggccaggccggtatccaggtcgggaacgcgtgctgggagctctactgcctcgagcatggcatccaggctgatggtcagatgcccagtgacaggactgttggtggaggcgatgatgcttttaaccccttcttcagcgagactggcgcctgggaagcattgttccccgtgctgaatatgatgacctagagcctctcgcgactgatgtggtgaggtc

SEQ ID NO: 412130 - DNA, 194 bp, Oryza sativa
attaaccaacccaaccgccgccgcatcgccctcgttagaacgatggccgcgtcggcgctgcaccagaccaccagcttcctcggcaccgcccctcgccgggatgagctcgtccgccgcgttggcgactccggtggccgtattaccatgcgccgcacccgttagagcgcgccccagagcatttggtatggatctga

SEQ ID NO: 412131 - DNA, 478 bp, Oryza sativa
cttgtctgtaagctagctaactaactacgtggctatggcccccaccgtgatggcctcctcggtcacctccgtggctccattccaagggctcaagtccaccgctctccttcccgttagtcgtcgttccatcaacttgggctttggcaacttctgtaatcggcggttggatcatgtccctgcttgttgagttcttttgaggtcttcttgtatatcttgtctttttcgttttctttccttttctccctttttgtttcttttttcctttctcttctcttctttttttgtctatttattatctatctccctttttcttctctatctcttattctttctctttttttcttttcttttcttcttttatttttttttttactatttatcttctttttccttttattttttttttactttttattttatcttcctttttttttctttttctttccccttttttcttattcttccttttttatcattt

SEQ ID NO: 412132 - DNA, 341 bp, Oryza sativa
tcgatgaaggacagggctatctcgaacgacgaggacgatatcaggaaagaatatatgggcaataagagagaatggctatcaggttactggactggattcaagtcaccagaacagatatcacgaatacgaactcctggaggcaagcctgagactataaaacctgctggagaagcgatgactactttggctgaaagtgacaagcctgacaggtctgtcaaaaagacacttgagctgcgtagagagaagattgagacaggcgaacgcattgattgggctgttggaggagtacttgcttatgcagctctcataattgagggaaaccatggttggttatgtggtca

SEQ ID NO: 412133 - DNA, 214 bp, Oryza sativa
tttttatgatgtgtgccgctgacccgcgccatggccgctaccttacggcctccgccatgttccgtggcaagatgagcaccaaggaggtggacgagcagatgatcaacgtccagaacaagaactcgtcctacttcgtcgagtggatccccaacaacgtgaagttcagcgtgtgcgacattccgtcgtgcggtcttttcatggctttacaccttca

SEQ ID NO: 412134 - DNA, 316 bp, Oryza sativa
atcacttcctagcaattaagatcatggtgcagcgcacttcatccgattcggcggcgtcggctgaggccatggtcatggacctgagtcccaagcgtcccgccaagtcctacggcggcgaaggcggctcgtactttgattggtccccctccgagctgcccatgctccgcgccgcctccattggcgccgccaaactctcgcttgccgccggaggcctcgccctccccttctactccgatcctgctaaggtggcctacgttcttcagtgtaagggcacctgcttcgttctccttccctagacccccttcttgaagattct

SEQ ID NO: 412135 - DNA, 286 bp, Oryza sativa
tcgtttcattttccccaaataataatagaggaaggggaaaaacacatttgcagccacattatccatggcctctctccgcaccatttcggtgatcttcggcatcctcttctatgtccttgccagcactgccactgtcaccgacgcaccggactacgtcgtccaaggccgtgtctactgtgacacgtgccgcgccgggttcgagaccaatgtcaccgagtatatcaagggtgccaaggtcaggctggagtgcaagcactttggtaccgactaggtcgagcgtgctatc

SEQ ID NO: 412136 - DNA, 270 bp, Oryza sativa
tcgtttgacgcgtggggtttcatcccagccgccggcgccgcagcctcctcctctcgtcttctccttcgagttgttagctacctccttattcaaccatgggtaaggagaagacgcacatcaacattgtggtcattggccacgtcgactccggcaagtcgaccaccacggtccatctgatctacaagcttggaggtatcgacaagcgtgtgattgagaggttcagagatggaagccgttgttatttaacaagaggtcctttaagaactcctt

SEQ ID NO: 412137 - DNA, 102 bp, Oryza sativa
tctgtagatatttgtgaagaccctcaccggcaagaccatcaccctcgaggttgtgtcctctgacacaatttatattgtcaaggtcaagattcaggacacggt

SEQ ID NO: 412138 - DNA, 563 bp, Oryza sativa
ctcttctctagtctagaccaaaggaaggaaaccaacctagaggctaggcgaggctagtagaggagagtatgtggatgattttctttttttttatttttttttcttttttttattattttttttttttttttttttttttttctttttcttctcttcttttttttttttttttatttctcttttttttttttctttcttttcactattttttctcattttctttttttttattattcttttttattctttttttttttcctttttttttttcttcttcttttttcttcttatttttttttcattttttctttatttttttttttttttttattctttttcttttttttttcttttttttttatcttttctcttttatttctcttctttttttttatttttttttccctttttcttttttttttttctctctttttttttttcttttttttcttttttctttttctctctttttttttcttttttttttctcttttccttatctttttctttttttttctttcttttctttttttttctttttttcttttaattttctcattttt

SEQ ID NO: 412139 - DNA, 326 bp, Oryza sativa
ttttcatttacttgttggaactcctggtcggattttagaccttacaaagaaaggtgtctgcttcctgaagaactgttcaatgcttgttatggatgaggtagacaagcttttttttctagagtttcatctttctttattatgtatttgttttgtatttttcatatattttctcactattgtttttttttattactttacttttcttttttctaatattttaatatatttttcttttaactatatttttattttttttttttacttttttttattttttttatatctttttacctttttattttattttactttttctcatttaatat

SEQ ID NO: 412140 - DNA, 427 bp, Oryza sativa
tagatcttctcgctcatgtccagggatgaggcccggcacgctgggttcttgaacaaggggctgtctgatttcaacttggcactggacctcgggttcttgaccaaggcttggaagtacaccttcttcaagcccaagttcatcttctacgcgacctacctgtcggagaagattgggtactggaggtacatcaccatcttcaggcacctcaaggcgaacccggagtaccaggtgtaccccatcttcaagtactttgagaactggtgccaggatgagaaccgtcacggtgatttcttcttcgcgctgctcaaggcgcagccgcagttccttaacgactggaaggccaagctttggtcacggttcttctgcctttcggtgtatgtgtccatgtacccaaattattgcctatgtactccattctatgaaggga

SEQ ID NO: 412141 - DNA, 542 bp, Oryza sativa
tgttattaaaacaaaacacaccaagccaaataaaagcgacaatgggatcgctcaccaccaacatcgtcctcgccgtcgccgtggtggcagcgctggtcggcggcgggtcgtgcggcccgcccaaggtgccacccggcccgaacatcacgaccaactacaacgccccgtggctccccgccagggccacctggtacggccagccctacggctccggctccaccgacaatggtggcgcgtgcgggatcaagaacgtcaacctgcctccctacaacggcatgatctcctgcggcaacgtcccaatcttcaaggacggcaggggatgcggctcatgctacgaggtgaagtgtgagcagccggcggcgtgctcgaagcagccggtgacggtgttcatcacggacatgaactacgagcccatctcggggtaccacttcgacttcttcggcaaggcgttctgcgccatggctcgcccggggaaggagaccgagcttcgaagggcggcattatcgacatgcagttaggagggtgcgctgtagtccccggtg

SEQ ID NO: 412142 - DNA, 124 bp, Oryza sativa
tttaccttctcctgcggctcttcttcagcatcgaatcctctcttctcctcgtgcccaccaccaccaccgtagcaatggcgggcaacgggccgatcaacaaggaggacccgctcaactggggcgc

SEQ ID NO: 412143 - DNA, 128 bp, Oryza sativa
gtagctgcagcagcagctgagcttgaagcagcagagcgaggtagacatggccgccgccaccatggccctctcgtccccggcgctggccggcaaggccgacgcgaaggtgttctgcttggggctcatta

SEQ ID NO: 412144 - DNA, 376 bp, Oryza sativa
ctggtatggctatgtttaccagaaggcctatcttgagttcttctgttcaaaagagaagctggatcagctaattgagaagagcaaggcattcccttctcttacatacattgccgtgaacaaggacggagagtcattctcaaacattcccacaaacgctgtgaatgcggtcacatggggtgttttccctggcaaggaaatagtccagccaactgtcgttgactcagccagctttatggtttggaaagacgaagctttcgaaatttggtcaaagggttgggcttgcctgttccctgagggcgacttatctagggagatactagacaaggtccagaagagctactttttggttagtcttgtggacaactacttcatcaac

SEQ ID NO: 412145 - DNA, 351 bp, Oryza sativa
gtactatgccaccacaggctacgcaaaattctctcccttccttctccaccacctccactccgacgatcctcctcctgatcctgtgccggccggcgatggcgtaccggttgctggagctcacgctggtctccgcgagcgacctcaagaaggtcactctcttctcgcgcttgcatgtctacgccgtcgcctccatcttcgggagcaacgttcccatgcccatgcacggcacccacgccgaccgcaacggcggtagctaccccgtgtggaacaccgtgctccactttcctgtaccagcccgctttatcattttcggtcttgttcttcacgtccagtttcttgcccggttctctt

SEQ ID NO: 412146 - DNA, 292 bp, Oryza sativa
tcgctcaaccatcgtaaggatcttattcagcatctaacctgctcttttcgtcgtggcaacgaccaacagcgtagaatcggagtggatcatgcatttcatcaaggcggacgacggtaaacgggggagcggcaccagctgctagggcggaaggctacgattggccggatatggacggaggcgacgatttcactcgaagatcaaccggaagcggcttgacaagctctgatattattaaaatctgtgaggagacttagtacttgtcggtacctatgtcactaaggcttatcggatt

SEQ ID NO: 412147 - DNA, 487 bp, Oryza sativa
tcggttcactgaccagcttcttcaagttgaactcaacaccatttcaacatcatccaacggtcttgcttgcggtgtatgtgaacttcacagaaacctgattaggcagcatgagagggagctcggtttggatccagagagtgttgttgggaacacagcaattgctcagcatgctgaagcattagctggagcatgggctgagttcaacaatcaaagttcagtagttctggtggttgttcaaccagaagaaaggtacatgtatgaccaatattggataactgtcgccttgagagaaatgtatggggtgacgacaattcgtcaaacaatggcttgtatagatgcataaggagagcttccgtcctgacggtacactaacaattgatggattgccagttgctgttgggtacttcagagcaggttattcacccaaatgattacccttcagaagtcgaaatgggaagcaagactcttgtatgagtggttctttgtt

SEQ ID NO: 412148 - DNA, 186 bp, Oryza sativa
cttctcttcgccatctctctcagctctcacagcttactgcatcaatggccgcggccaccatggcgctctcctccccggtgatggcccgcgcggtgccgtcgaccttcttcgtgcttttcggcgaggcgcggatcaccatgggcaagaacgcccctaagcccaaggccggcggcgtctttggggagc

SEQ ID NO: 412149 - DNA, 329 bp, Oryza sativa
tcgttttcattttccccaaataataatagaggaaggggaaaaacacatttgcagccacatcatccatggcctctctccgcaccattccggtgatcttcggcatcctcttctatgtccttgccagcactgtcactgtcaccgacgcaccggactacgttgtccaaggccgtgtctactgtgacacgtgccgtgccgggttcgagaccaatgtcaccgagtatatcaagggtgccaaggtcaggctggagtgcaagcactttggcaccgacaaggtcgagcgtgcgattgactgtgtgactgatgagaccgggacttacatgattgagctt

SEQ ID NO: 412150 - DNA, 79 bp, Oryza sativa
tctgtgagccagactctacccaggtgtggatttagccatgaaggtggccaaatccaagggcgccgtcaagctcgactgc

SEQ ID NO: 412151 - DNA, 96 bp, Oryza sativa
tcgtttacatcttccacacggcgcgtaggtgataaggtgcagcacaacccaaagccatatatctacgaaagtggcgaactcaccgacgctgacaat

SEQ ID NO: 412152 - DNA, 331 bp, Oryza sativa
catttttctcgaagcgagagtgcgttgcgttgcgagcgggaagcgaaaactcgaaaccatggccacgggccgcgaccaggcagaccagcaggcggcggtggcgcatactggggaggtgaccgaagctgccgctaaagaagtggtgtccgtggagatacccgcgcccgaggggtggaccaagaagtttacttcccagagaggggggagatttgagattgtttttgtttcacccactggggaagagattaagaactagagacagctgtgccagtttcttgaggcaccccctggaggccctgcattcttagagttttgattggtgaactggtga

SEQ ID NO: 412153 - DNA, 122 bp, Oryza sativa
cttctttccatccgcttccaccccccagcccccgaattccatcgcagatcagatcaggtgaaaaaagaggagagaggaggggggaagatcttctttttctcttctcttttttttttttctct

SEQ ID NO: 412154 - DNA, 318 bp, Oryza sativa
ttatatagcagcgtcgcctctcctcctcctccctaacccctacgcttccagaaccttctcgaagctcccgctcccccccccttccgctccaatggcgaaggaaccgatgcgcgtgctcgtcaccggcgccgcaggacaaattggatatgctcttgtccccatgattgctaggggtgtgatgttgggtgctgaccagcctgtcattctacacatgcttgacattccaccagctactgaatctcttaatggccttaagatggagctggttgatgctgcatttcctcttttgaagggaattgtcgcaacatctgatgttgt

SEQ ID NO: 412155 - DNA, 159 bp, Oryza sativa
aaaagaaatttaagccattattattagatcactccaaatcaccaatacaatgtggcagttcgatagcaagcggctctggattgtgtggcaaaaacaacacctgatccaaggaccatctagcacctttaaaaccttatttcctcgcacttattcagaaac

SEQ ID NO: 412156 - DNA, 175 bp, Oryza sativa
gtttctgatgaagtgcgaggaaataaggtcttagaggtgctagattgtccttggatcatgcgttgttttctccacatattttttaactctttttttttcttatttattcattgtttatacttttctctttttattttttcttttctttatacttactttttttcttattcttttt

SEQ ID NO: 412157 - DNA, 402 bp, Oryza sativa
aacaacacaacgtaagattcatttttttattatgtaaatacaaatgtatgcaatttacagcttaaaatagcccttttattatgaagaacatggcgctatatattaaatatatagctagataaaaaaaaaagaaactatgctgaggaatcgatcaaggaaactcaatcgtgcagcagcatttctccttgttattatacaaacacacgtacagcatacttagattcagcatcaccatggccgaaaacacgtcgtggtcatgtcatctcactttgctttggatgcgctccagcgaagcagggttctgcctgaactcgagcagcttgtcggcgtcatccggcacgactccctttggccgcgttcggtggcgcggaaccgctccttccacgcggccagcgccggcgt

SEQ ID NO: 412158 - DNA, 319 bp, Oryza sativa
aaaattacctcaccatcatcgacccacttgttcctagcgatctagaacgagagacttggcaatggcgggaagcggcgagctgaagctgctgggcgtttggagcagcccgtacgcgatcagggtccgcgtcgtcctcaacctcaagtcgctgccgtacgagtacgtggaggagaacctgggcgacaagagcgacctcctcctcgcctccaacccggtgcacaagagcgtccccgtcctgctccacgccggccggccggtgaacgagtcgcaggtcatcgtgcaggacattgacgaggtctggccgggcggtgccggggga

SEQ ID NO: 412159 - DNA, 396 bp, Oryza sativa
gaaactaaaccggcaggagaactgccaattatattttaaataagcaggagtaaaaaccctaaacgggttacaagaaaagaaaaaacaactaccggttggctgaatagctgcaccgaacacgccaaaacttaactaacaacagaaaaccacttgacgggagcccaacatagaacgttcgtttaccaagtcttgaccaagacggcaaagggggttccgaccttgcaaccgggtaattgttgccgagcttgccgcctagggacacagtcagttccgatttaaaattggttgcataatccatacctaacttgttgtaaatggttcaagtggtttaaacttcccacgaagaactttagccaaagccgtttaaacgccaaaatctattcacggccccaaaca

SEQ ID NO: 412160 - DNA, 294 bp, Oryza sativa
  unsure (1)..(294): unsure at all n locations
aatctaacatacccaaactgatattatcacaatgttagccgatgacaatggaaagagtaatctaggtacaagcggatcattgacggtggagacaagacattggctgcaccacaacacccaccagtggcgccaacaaggagcgctatccgttataggacgagagaaaaagtaaaacatcacgatgtgaagtgaaactgaataattctagtagaccatgatgatgatggataggctccttaggacgcccgccgncctttagcgtcttgctgctcccatcttgtccactggaaggct

SEQ ID NO: 412161 - DNA, 488 bp, Oryza sativa
gtgtgttgtgtccctgtctcccctctccttcctgctgtcctttcccctcctctcttcccccctctcacaagagagagagcgccagactctccccaggattcagccatgaagggggccaaatccaagggcgccgccaagcccgacgccaagttggctgtgaagagtaagggcgcggagaagcccgccgccaagggcaggaaggggaaggccggcaaggaccccaacaagcccaagagggctccctccgctttcttcgtttttatggaggagttccgtaaggagttcaaggagaagaaccccaagaataaatctgtcgctgctgtaggaaaagcagccggtgataggtggaaatccctgaccgaagcggacaaggctccctatgtagccaaggccaacaagctcaaggccgagtacaacaaggccattgctgcctacaacaagggcgagagcactgccaagaggcacccgccaggaggaagaggaggacc

SEQ ID NO: 412162 - DNA, 426 bp, Oryza sativa
aaccaaaacataggaggtttcatttcttcttctcaaagtagggtagcatctttccttctttcaccattacataagcttaagcaataacagataacaaatcctcctcctcctctaggtaaaatattcaaacacaatacccttataagtacttattattaggaaagtagcggtgcatgggcataaatggcagcggggggcaggttaagaatcacaatgctgagcagcgaggaaacaaaacaccataatgggacagagcaaaagcctccgaagagggagcttttaggcagaaggcttttcccacttgagggggtttaccaccttccaaggtgaagtctggggtcgtcccttccgaagtgaccgtaagccgccgtcttgaggtagcgtccgttgccgcctttcttgaggtcaaggttgatgatgatcatg

SEQ ID NO: 412163 - DNA, 398 bp, Oryza sativa
tgtcctggctaccaagcttggcgctcgtcttacggaggttcgcaagaatgggacctgcgcatggctcaggcctgacgggaagacccaagtgactgttgagtaccgcaatgagagcggtgccagggtccctgtccgtgtccacaccgtcctcatctctacccagcatgatgagacagtcaccaacgatgagattgctgctgacctgaaggagcatgtcatcaagcctgtcattcccgagcagtaccttgatgagaagacaatcttccatcttaacccatctggtcgcttcgtcattggcggacctcatggtgatgctggtctcactggccggaagatcatcattgacacttatggtggcttgggagctcacggtggtggagcctactttggcaaggact

SEQ ID NO: 412164 - DNA, 342 bp, Oryza sativa
ttagtgagagagaggggatggaaatggcggatgagctgttgcactagctggtgttcggtttcctcttcaacctgggcggatacatggtggctcctgcgatgaccgacgtgaccatggacgccctttggcccggccaggacgagtgctgcatcggcatctacctaaccggcctatagcaagccgtacaatagcaagctataagccagttataaccatatatcgtgaagaaaaaagacgagagagaagaaaatgggctgcagatttatagccggctgcaacacgacttcaagactttacgtgtgtatgagagattacagggttgtgtgcttatgtggcaacttc

SEQ ID NO: 412165 - DNA, 422 bp, Oryza sativa
ttcttgttccttattggatgcctcggtgcccttgcgcccattccactgtctccaatctcttcccttggagccatcaatccacattactgacatgttgatgcatctgtcccagccatggaagcaattcagaaggtccctccagatccaagtgccgtagctgtaggctagactacaccagatggaactcgcaagatattaggagatatctctgcctacaagctgtggaaatgtgactatgttgcggctgcatgggcactgataaacctatcggcggggcagtttgtcattggtgccgacgataacgaatcaacaccgatctcagccatcccagtgcctcccatcagcttatcactagtggaagagatcggacctgggcgctcacccagggcaaagaagttcagcagcaggagcatcggattcct

SEQ ID NO: 412166 - DNA, 291 bp, Oryza sativa
tttcttccggtctccttcctcctctcttcccggccgcctcgcctcgcctccgccttcccgatcgcaattcgcctcctcctcctctcacccatggcgcggcgatccgcccccctcctccggcgcatcctgtcctccccggcccccgccccggcgcaccatggcggcgccggcgcgcgccgcacggtgacctacatgcccaggccaggggacgggaacccgcgcgccgtgacgctgatcccgggggacgggatcgggccgatcgtgacgggggccgtgcagcatgtgatggag

SEQ ID NO: 412167 - DNA, 364 bp, Oryza sativa
ggcaggcagaacacaattttttcaatttccaaacgggagcttttcacataaataagataaccgatagctcaaggttgagaatcaaaaaccgaaagaaataggttttttgagcagagggcagaactttaacaaaaatgcctgttgcaaattgcaagactacaggtaaacttaaatgccataaggagtttgtttgggcgcataagatgaaactactgggataaggctactttttaacttggcatccttttcctcggcattcatcatcagcaccagttgagggattgagagccattcaatttttcgacgagaactggccttcctttgcttgaaggttaactttttgaggttgaatcttttgggggta

SEQ ID NO: 412168 - DNA, 394 bp, Oryza sativa
  unsure (1)..(394): unsure at all n locations
gcaatgttgaggccactggggaggactactatgttgaaccagctgatgaaaggaggcctttccgtgctctcttggatgttggcctcattaggacaaccactggaaaccgtgtctttggtgccctcaangggagcttggatggtggtcttgacattcctcacagtgacaagaggtttgctgggttcaagaaggacgagaagcagcttgattctgatattcaccgcaagtacatctacggtgggcacgtggctgactacatgaggtctatggctgaggaggaacctgagaaattccaagcccactttagtgagtacctcaagaagggaattgacgctgatggcatggaatcactgtacaagaaggtccatgctgtcatccgtgctgatcctaccat

SEQ ID NO: 412169 - DNA, 389 bp, Oryza sativa
gatgtgtgttgtagagaagagagagcagagctaagctagctcatagtgagtagcgtgttgagcttgctgaagggagcggcaatgtcgaaggaggtgagcgaggagccggagcacgtgcggcccaaggactacaccgacccgccgccggcgccgctgttcgacgtcggcgagctccggctgtggtccttctaccgggcgctcattgcggagttcatcgccacgctcctgttcctatacatcaccgtcgccaccgtcattgggtacaaggtgcagtcgtccgccgaccagtgcggcggcgtcggcaccctcggcatcgcctgggccttcggtggcatgatctttatcctcgtgtactgcaccgccggcatatccggagggcacattaaccc

SEQ ID NO: 412170 - DNA, 142 bp, Oryza sativa
tggtggatcatgatccaatatgggttgagctcgggcattcccacatagcagatgcaagctaaagactgcatgacatgatgagcaattttgtgtccaagaatatagctgctcaactgcagcaagcatgatctgttggagagat

SEQ ID NO: 412171 - DNA, 423 bp, Oryza sativa
gcaaaaattattacttgttacacacatattttgtgataagaattggatcctccaagggttgaagcatagagaaacggtgtataatgactttgtccagaggttaacattagtgtagacccccataggtcatggtagactttctcacattaaagttggacaattcaattccttcgagtacttgctagcagctacacatgttgcttttggaaccaacaatagcttttctttcagacgcaccgacaacccaaactcttctgacatatcaacctccattgcatgtgcaggcagcgcccaatcaaatttccagagaaggttcgctagtgtgatctcgataactgccatggcaaagttcatcccgaggcacattctccttccagaaccaaatggcaagtattgatagttattcacccaaaagttgactga

SEQ ID NO: 412172 - DNA, 385 bp, Oryza sativa
tgatgataagcaaagcggcattcgcacgtgaagcagtggatataggccagattctttgctcattcacaaacgatctcgcatgccgtgttgtgtcaaggaagttagtcggggatgacaggcagaaaaagctcctccaagagttggttaataagacaataaagctgctttctatcttcaacgtggaggagtacttttcaattttagctcggattggcgtgattgggaaggtgatgtgcgcaagagctgagaggttgaaaaagaagtgggacatgctgctgaaaaagctgatcgccgaccatgagagcaagtgcgattcatacttagtatgtgcccgtatcagagatgactttgtggccattcgactgagtggtactatggagcctgg

SEQ ID NO: 412173 - DNA, 543 bp, Oryza sativa
gaatgaccgtgatacccttaccccgcagcccgcactgcagtgccctagcttgtacaggggcattttagtcttttcgggtgccccaaaaccctaatcctcggatctataagtagcgactcaagccaagccctagcaatcggatcccaccccagccgccaccatgtcgaagcgagggaggggagggtcggcggggaacaagttccggatgtcgctgggtctgcctgtggcggcgacggtgaactgcgcggacaacaccggggccaagaacctctacatcatctccgtgaagggcatcaagggccgcctcaaccgcctcccgtccgcctgcgtcggcgacatggtcatggccaccgtcaagaagggcaagcccgatcttcgtaagaaggtcatgcccgccgtcatcgtccgccagcgcaagccgtggcgccgcatggactgtgtctacatgtacttcaaaaatatgctggagtgattgtgaatcctaagggtgagatgaaagggtctgtattactggacccattcggaaggaatgtgcttgccttt

SEQ ID NO: 412174 - DNA, 272 bp, Oryza sativa
tggctgtgcggcggggcagttcggcgacacgacgctgactaaggtgttcgtggggggactcgcgtgggagacgcagaatgaggtgatgcggtgatactttgagcagttcggcgatatcctcgaggccgtcgtcataaccgacaagaacaccggtcgatgcaagggctacggatttgactctttcctctagtcgtatgccttgttttttgcttgtctatctcatatttcgttgttcttggttctcagtttatatttcattcttttttcctttt

SEQ ID NO: 412175 - DNA, 417 bp, Oryza sativa
gtaatgtaatcaaaacttatttttctttccataacagagacgacagccccaaatacttgacttgtccactatgattttcttgacaaacttaggtaccagataacattgagaaaagaaaaagaaaaacataacataccacctataacttaccatacttttaacctaacaaaattactctccgaatgctaaatgtgcgttggagtttcttatgggcggaactgaaatctcaagggcacgagcagattgattttgctcggggaaaaaacccaagaaatttcctcccaagcacccacactcacaggcccatcacaccaacatgaataactttagcaagctcttaattcacacgccagaaatccacctgccggaacatatcaccacggccgaagtcgtagccgctgggtatctctgggaaat

SEQ ID NO: 412176 - DNA, 359 bp, Oryza sativa
tggatgggaatttttctgagggtgaaatgatggcatttggacctatagcactgaacccatcttctggagtccttaattacggacagggattatttgaaggtctaaaagcatatagaacaacagatgactctatcttattatttcgcccggaggaaaatgcactgagaatgagaataggtgcagaaagaatgtgcatgcctgcgcctagtgttgagcagtttgtggatgcagtaaagcaaactgttttagcaaacaagagatgggtgcctcctaccggtaaaggttctttgtatattagaccgctactcatgggtaggggtgctgttcttggcctgcacctgctcctgagtattcgttca

SEQ ID NO: 412177 - DNA, 382 bp, Oryza sativa
  unsure (1)..(382): unsure at all n locations
gagtataaatttggcagccatgttggagtacaaagtagaagacatgcatgaacacataaaccatgttcattacagttcaggagggtattgtgtgaagccataaaccatacgtacaactgaaagtattctatactgattatcatagacagattatctcacaantccatgcttaagaattacgtctgcagattccagtgatggactccctttgggctacaacggcaaatatccatcatgccttcactttgatagcgggagcacgagatggaagttgctgatagcaggaaatgagtgaggtgacgaatccaaatgcccctgttacccttggagtgatcttcttgggtgacagctgaagaagccctacggccaccacaacattcat

SEQ ID NO: 412178 - DNA, 497 bp, Oryza sativa
gggtaggatgatgagcacgttagatgccacgcgagcagagctcggccttgttgttctgtacttgaacaaagccgaggccagggacaagatatgcagggcgatccaatacggctcgaagtttatcagtaacgggcagcctggcacggcacaggatgtcgacaggtccaccacccttgctcgcaaagttttccggcttctcaagtgggtcaatgatctgcatggtcttatcagccctcctgctaaggggactcctcttacactggtcttgcttgggaagtccaaaaatgcgctgctctcgactttcttgttcctggaccaatttgtatggttgggaagaacagggatatacaagaacaaggagcgcacagaccggattgtaaggatatccctctactgctggatggcctcttcagtctgtgcagggcttgttgagcttggagagcttaagaggctttcaaaataaatgagggagctggcgagagagcctgagggatact

SEQ ID NO: 412179 - DNA, 409 bp, Oryza sativa
aacattcaaatatggtcatttgtccattccctttttaaaagtttaaaccatttctgggtcccaaaatattacagaagaacatagcacgaactcaacacgagcaatacaaaacttttacaaatcgatcttcttgctgcccccctatgcacaaatcttcagaaatcgctgacgccctctctcagcagttgatgccgcactgcctgacgtcaggggcccctggccttgatggtgaagggatcaaatcctgacccagagcaagggaaaagatggaggcgagcagcacggaccagatgacaacaatggtggggcgtccggtttctgccttcccatgagccccttgaggaagggggagaggtggacgatgacccagaaggcgaaaaagaacttcccgaagagcggaccccacgcc

SEQ ID NO: 412180 - DNA, 203 bp, Oryza sativa
tgctttcctcctgctgctctcctccttcctgcggggccttcctgatcagccgcagctcgttgccggccgttgttgcgcggccatggaggcgagcgccgggctggtggccgggtcgcacaaccggaacgagctggtgctgagccgggggcacgaggagcccaagccgttgggggcgctgagcgggcaggtgtgcgagatatgcg

SEQ ID NO: 412181 - DNA, 107 bp, Oryza sativa
tactagtaccgctgcttcgtcggcggtctcgggtgggctacctgacgaccgctccctcgaagccgccttgtccacctacggagagatcctcgagtgcaagatcatta

SEQ ID NO: 412182 - DNA, 443 bp, Oryza sativa
ctctactactatctagccagtaagctagctaactaactacgtggctatggcccccaccgtgatggcctcctcggccacctccgtggctccattccaagggctcaagtccaccgccggcctgcccgtgagccgtcgctccaccaactcgggcttcggcaacgtcagcaatggcggaaggatcaagtgcatgcaggtgtggccaattgagggcatcaagaagttcgagaccctatcgtacctgccaccactcaccgtggaggatcttttgaagcagatcgagtacctgcttcgatccaagtgggtgcctttgctcgagttcagcaaggttgggtttcgctaccgtgagaaccacaggtctccccgatactactattgcaggtattggaccatgcggaagctgcccatgttcggctgcaccgattgccaccaggtgctcaaggagc

SEQ ID NO: 412183 - DNA, 221 bp, Oryza sativa
gctgttacgtcgtgccttctcctcctccttcctctgctgcccattccgccggccgccactgcaccccggccgctccttcgttcccccccgcgccgccatggcatcctccgacgcgccgtgccacatggtgccagagccagcgcgacgacacgacttttgatgcctatgttgttggaaaagagaatgctcctggaattgttggtttgcaagagtggtggggg

SEQ ID NO: 412184 - DNA, 202 bp, Oryza sativa
acggacacaatgattacggatcacttattcattatagagctacaatgctgctattccatagaaaaacctttgagacacaataaaactagagttaaggatacacattacagggaaacagcacacattgaaacgggacacgaccaaggtaccagacgagacaacaatagcgtccattggggtaagagcaaagaggcaacacttg

SEQ ID NO: 412185 - DNA, 394 bp, Oryza sativa
cggtcttcgttgggcctggcctccactccccgcgccgccgccgccgccgccgactcgccggtcgtcaccctcgccccgcagccatggctgagcagactgagaaggctttcctgaagcagccaaaggttttcctcagctcaaagaagtctggcaagggtaagaagccaggcaagggtggcaaccgcttctggaagagcattggccttggcttcaagaacccccaggaagcaattgaagggacatacattgacaagaagggcccattcactggaactgtttctatcagaggcagaatcattgctggaacatgccacagtgccaagatgaacagaactatcatttgtcgcaggaactacctccattttgtcaagaaatatcagaggtatgagaagag

SEQ ID NO: 412186 - DNA, 253 bp, Oryza sativa
atgggataatttaccgcacaagttgaacccattgcatccagtgtgccttacatggttggaagcggcaaccatgaaagagattggcctggatcaggttccttctatgggattttggattcttgttgtttcttcattgttttatttctttatttttttttttcattttttttttccttgtcacttttttatttttttcccttgctattttttttttctttcttttctttatattcctttttctctttgctctttt

SEQ ID NO: 412187 - DNA, 366 bp, Oryza sativa
gtcctggtgtttctacatcgtcacctacggcctcgggatctacctcctcaacctcctcatcggcttcctctcccccatggtcgaccccgaggcccacgccgctgcctcctccgacggccccgccctccccacccgcggctccgacgagttcaagcccttcatcaggcgcctccccgagttcaagttctggtatgcaatcacaaaagcttttcttatagcttttgtgatgactctcttctctgtatttgatgttcctgtcttctggccgatacttctctgctactggggttgctcttctctgcctgaccatgaagcgcccgattgtgcacacgttaatccacaaatttactttccctctctaccgtc

SEQ ID NO: 412188 - DNA, 230 bp, Oryza sativa
tcttctttttcttgcttctagatcacaacatgaactagaagtttccacaaaacaagcaatatttgtgggttctagcgtcagcgatactatcaaaacatgtattgccatgggaaatgaacgagctgcactcaaagtgaagtcagagtacatggttttgtaaatgccttcaaaaagtaaattgtggctgattaattttataattgtatctcttctattgtcctattcctttt

SEQ ID NO: 412189 - DNA, 142 bp, Oryza sativa
gaacaaacgcgcatattataagtgacgaagcggtctcacataaaacagggcacacaggttacaacaacgagggttgtaagcccatttaagccccaaacattcagatcaccacaagcaaatgttctcgaagacacacgtcaca

SEQ ID NO: 412190 - DNA, 230 bp, Oryza sativa
gaaaggcgtcttcgcactcgcctctctccgggccttcgcgcttttcctcctcctctcccctctctcccttctccgtcgccgtcgcagtatcaacccaacccgccgccatgagggagcgcatctcgatccacatcggccaggccggtatccaggtcgggaacgcgtgctgggagctctactgcctcgagcttggtcttcaggctgatggtcagatgcccagtgaccggact

SEQ ID NO: 412191 - DNA, 314 bp, Oryza sativa
tctggctgaagagctatctctgccactggaagctgggaagtactctggtgggacattcatttttcctgaagcacagccctctccacacaagaacttctctgaggaggttgcagccctgaaccgctacttcggcggtctcaaatctggtggcaacgcatacgtgattggagatcctgcaaagccagggcagaagcggcatgtttactatgccacccatttccctggagcaacctgtggttacctcttgtgatgcgcatgccttgggcttggacactgaagtaagctttctgttattttttcattgtctcttgttt

SEQ ID NO: 412192 - DNA, 136 bp, Oryza sativa
tctgttacctttgcttgaactccgacgatggagaagctgccaccgaggagcatatgtccatggctcgcacgaaggcgtggagaagcacgaggttaacacaaattgatgatgacgagcataacacagaagaaaggag

SEQ ID NO: 412193 - DNA, 442 bp, Oryza sativa
tgttccatcctcatcaacccccactattaatcctcttccccttccccccgctctccgtccatgttcaccccgcccccatgccccgcaatcccatccagcattgagatctacaagcataacaaagaagaaaggattgcacggacatggggaacaactgcacctgggctgccttatgttgatgaggcgattacaaatgctggtgattggttaattggtggtgacttggaggttatagaaccaatcaagtacaatgatggtcttgatcagtatcgcttgcctccagcccagctgcgtgaagagtttgccagacgcaatgctgatgcggtattcgcgattcagcttcgcattcctgtacacaatggacatgctttgctcatgactgatacacgcaaacgcctttttgagatgggttacaaaaaatcctgttctttttgctttattc

SEQ ID NO: 412194 - DNA, 422 bp, Oryza sativa
cttttctttctctctctgtctccagccatggcagctgctgaagaaggtccagagccactcaagtatcagactttggctttgaaggttagcatccactgtgagggctgcaagaagaaggtcaagaaggtgctacatagcatagaaggggtgtacaagacggacatagacgtgcagcatcagaaggtggtggtcatcggcaatgtctccgtcgacacgctcgtcaagaagctcgtcaagacgggtaagcacgccgagccatggccggagcccgctccgccgccgccggcggcagcagcggcggccaactctcccggcggtggcggcggcggcaagaagaagacaaagaataagaacaagaacaagaatcctgcgaacggccagcccggcgagccggcgccgcctggtgcgacggctgatgttgc

SEQ ID NO: 412195 - DNA, 424 bp, Oryza sativa
acttgttaaagcattaagaaaaagagggcatgttgttgctgtgactggagatggcacaaatgatgccccagctttgcatgaggcagatacaggcttctccatgggcatccagggaactgaagctgccacggagagctctgatattatcatgttggatgacaattttgcataggtcgtgagggttgtcagatggggtcgctcggtttatgcaaacattcagaaatttatacagtttcagttaaccgtcaacgttgcagccttgattattaacgttgttgctgctgtcagttctgggaatgttcccctgaacgctgttcatctactgcgggttaacctaatcatggatactttgggtgctttagtacttggcacaggtaccacctactgaccattattatgcatattcctccattttgtcttaatg

SEQ ID NO: 412196 - DNA, 206 bp, Oryza sativa
ctgtgctctcgcgtctctgcgggccctactccggggccggtcgccgtcgttcggctccgccgccaccgacgccgccatgagggagtgcatctggatccacatctggcaggccggtctccaggtcgggaacgcgtgctgggagctctattgcctcgagcatggcatccagcctgatggacagatgcccggcgacaagaccgttgggg

SEQ ID NO: 412197 - DNA, 242 bp, Oryza sativa
tctgggctcgcagggtctggaggtctcagagcgcaggggctgggatgcatgggcatgtccgccttctacggcccgtccaagccagagcccgacataggtggcgctcatccaccacgccgtacccggcgaagcgaccgttgtggacaccttcgacatcgacggtccccacaccaacgagcttctccttggcaaggcgctgcagggccggctgcgtgataaggttgagctggccaccatgttta

SEQ ID NO: 412198 - DNA, 431 bp, Oryza sativa
ttttgaaaagaaaaaaaaaagagataaaaaaaaatgtcctcctcctcctcctcgccgccgccgccatggacgcctccgccggaggcggggggaactcgctgccgacggtgggggccgacggggccaagcggcgggtgtgctacttctacgacgcggaggtggggaactactactacgggcaggggcacccgatgaagccccaccgcatccggatgacccacgcgctgctcgcccactacggcctcctcgaccagatgcaggtgctcaagccccacccggcgcgcgaccgcgacctctgccgcttccacgccgacgactacgtcgccttcctccgctccgtcacgccggagacccagcaggaccagatccgggcgctcaagcgcttcaacgtgggcgaggactgccccgtcttcgacggcctctacagcttc

SEQ ID NO: 412199 - DNA, 128 bp, Oryza sativa
gatcgtgcatttgaaccaacacaaactttttcctttattttatcaacgtatatattacccaacttgagatcatacagtcgaacaagcgaaacatttttacatttacaaacttgggactatatgcacac

SEQ ID NO: 412200 - DNA, 386 bp, Oryza sativa
ctcgtcatgatcgaggactcctcgatcgatcttaatcttattgccatgcataattagtgtgttaattacgtgcttaattgtatgtgtgaagtgtgcattagtcacagtttgtaatgtaataatgtttcgcttgttcgactgtatgatctcgagttgggtgatatatacgttgataaaataaaggaaaatgtttgtgttggttcatatgctctatcattaatatatattcttctttactattcttttttttcatcatttattttgtttttctatttttaattgttccttttttttctttctttttctttctatttttttcatcttttttttttttgttacttaaattctaattttatttgatctttattttattatttctttttttt

SEQ ID NO: 412201 - DNA, 166 bp, Oryza sativa
atacgaaaaccaacaacattatatatttaaaaatagagggaaagggcaagagtagactagttgaaactccaacgatgcatacaattaatcacataatatcaatatcacacgtttattaaagcatgaaagcccccacaatgatggagagtattaccaggtaaccatg

SEQ ID NO: 412202 - DNA, 239 bp, Oryza sativa
cttgtcagaaaaagaaagaaattaaaaagaaaatcacggcgcgtgagcttgcagagacagcaatggtgagagttgctgccgccgcggcggtgctcgtgctggcggcggcggcggcggcggcggcggccatggccgccgagccgcccaccgatgacggcgcggtccgggtggcggcggggctgactaagtgcgtgtccgggtgcggttgccaggcgaccttctgcttgctcggctgctac

SEQ ID NO: 412203 - DNA, 428 bp, Oryza sativa
gttatcgcgacggccgcccttttatcttttgtggagcattgcagactatcaggggtatgtttaaccaggtgtccacatcaccgttgtacagtatttgagttactgaaacaaaaggtagcagatcaatggtttacagaagggggctttcaaattgatgcacagaagtcataaacaagtagattcttagaatgataacaccttgtctaattaatttattcaccctatctttccatttttaattccataacagaacgttttttagagcacttgccgtcttttgtcttgagttgtagatgtcatatgttttcaaaggtactaaatggcggcttataatttcacttggttgcactgttgcggtatacataaaagtctaggccacttcattgattcctgctggcgtatacttagatttgccactctttttaaac

SEQ ID NO: 412204 - DNA, 370 bp, Oryza sativa
ttctccttggcttcagaaaattataactaacgaagagcaaagcagttccaaattgacagttgaagatgaaagcgcaaataaaagtgcaaataaatctcagttgttcaaacagtttgacactgttaaaaatttctctgatcatcattatgcagcaacatcaggggatgtgacaaagagagactgggtgaagaggattcagcatgactggaaacttttggagaaagatctaccagcatctatttatgtccgtgttgctgaagattgaatggacctttttagggctgctattatcggaccttagggaacacctttccactatgggctctctttctttgatattcaatttagtaactcttactttttttaattc

SEQ ID NO: 412205 - DNA, 430 bp, Oryza sativa
tctccgcctcgcctcgcagtgtggaagaaaggaaggaaggctaaaaccctagcgagcgcgcgagcgagcgagggctctctgcttccttgcgatgacggcgccggcggacaaggggaagaaggccaagaccgacgccgacggcggcgccgccgaggagaacgagcagatcgacggcgccctcgtcctctccatcgagaagctccaggagatccaggacgagctcgagaaggtcaatgaggaagctagtgacaaggttttggaggtcgagcagaaatacagtgagattcgcagacctgtctatctccgaaggagtgacattatccaaacaatccccgacttctggctgacagcgtttctgagtcatcctctacttagtgagcttttgaccgaagaggatcaaaagatgttcaagtacctggagtctgtcgat

SEQ ID NO: 412206 - DNA, 394 bp, Oryza sativa
gtctttacttgataccttcctctttacctcggagtctgtgaacgagggccaccctgacaagctctgcgaccaagtctcagatgctgtgcttgatgcctgcctcgccgaggaccctgacagcaaggtcgcttgtgagacctgcaccaagacaaacatggacatggtctttggtgagatcaccaccaaggctaacgttgactatgagaagattgtcagggagacatgccgtaacatcggttttgtgtcagctgatgtcggtctcgatgctgaccactgcaaggtgctttggaacattgagcaacagtcccctgacattgcacagggtgtgcacggccactttaccaagcgccctgaggagattgttgcttggtaccagtgtcatcatgatttttat

SEQ ID NO: 412207 - DNA, 430 bp, Oryza sativa
aaacatgcaacaatcatcatctcattgttcaagagttcaaacattatcgtcgtcatcatgggacgaggaaaatttgccagacacgcaccagagatgggagaacatctggactctggtctcttctaagtgaagctaacagtaaggctaaggtaacaactcccaagaggccaaagataagacaacagcaatcctgaaacaacatgagacccaaaaagaaacggtgcgggcgattcccaagcacaacgtacactggcagtcgttattcgtgatgtccgtcgaagatttcagcgctgctgccaatggtattatgttcttagaaccacttgaacagcagaccaccgtgtgtggcgaagaaaggcgcaaacacaagggactcgacggccatgagcttgatgaggatgttgagcgacgggcctgatgtgtccttgag

SEQ ID NO: 412208 - DNA, 387 bp, Oryza sativa
ttttaagggttttgccattggatcagctgctctggtgtcccttgcactttttggtgccttcgtcagcagagctggagtgaaggttgttgatgtcctgtctccaaaggtcttcatcggtttgattgttggagccatgctcccgtactggttctctgccatgaccatgaagagtgttggaagtgccgccctcaagatggttgaggaggttcggaggcaattcaactccattcctgggctaatggagggaactggcaagcctgactatgccacctgcgtcaagatctccactgatgcttccattaaggagatgattccccctggctgctttggtgattctcacccccctcattgttcgaactctctttggtgtggagaccctgtctggtg

SEQ ID NO: 412209 - DNA, 97 bp, Oryza sativa
tagaggtgaaggaccgactcttgtggagtgtgagacttaccggttcagaggacattctcttgctgatccagatgagctcaggtggtctgatgagaaa

SEQ ID NO: 412210 - DNA, 479 bp, Oryza sativa
tgtcttgcagcagcagcagcccgctgccaatgccagcggcagcaacagctctgccttcgtgaaggtcagcatggacggggcaccctacctgcgcaaggtggacctgaagatgtacaacagctacaaggacctctcccttgctctgcagaagatgttcggcaccttcaccgcaactgggaacaatatgaatgaggtgaatggctctgatgctgttacaacttatgaagacaaggatggtgactggatgcttgttggagatgtcccgtggcagatgtttgtcgagtcatgcaaacgcttgaggatcatgaagggttccgaagccattggtcttgcaccaagagcaaaggacaagtacaagaacaagagctgaaaatgttgcagtattaagatgctgagcatggtgccataagaatggtgttcttggagtgtgttatggttttcctagaaatataaggttttaccttgttaagctggattaa

SEQ ID NO: 412211 - DNA, 189 bp, Oryza sativa
tttgttgcagcaggagacgcttcacaagcagagggacctcttacatcccggggggaggttctgcccgcgcccaccgaatagacaggagaggtttatccggcgtttcgaccggcagctcgtgcacccaaaggtctcccctgagctgctggccattatgttcaactacctctcccagcgagatgagtcgtt

SEQ ID NO: 412212 - DNA, 297 bp, Oryza sativa
acgacaaaccacgaacttggatattaaagatgccacaaagaaggttcacataaacaacacaggtcacagcagcgaaagctacaagcaaaccctgcataatcgaaaagcaaatgtttttcaaaaccagacacacaaactgatagatagaagcccacacggacagatcataggatagcagcagtaatcaagcattgccaaggcaccaggcaagaaccctgatcctgttttgtactagaacccctcataaccctcatcaccatcgttgaactcggaacccacctcctaggagtccttttc

SEQ ID NO: 412213 - DNA, 449 bp, Oryza sativa
gtcgtcttcgtactcgcctctctccgcgccctcctccgccgtcgctcgccgccgttcgtctccgccgccaccgccgccgccatgagggagtgcatctcgatccacatcgggcaggccggtatccaggtcgggaacgcgtgctgggagctctattgcctcgagcatggcatccagcctgatggacagatgcccggtgacaagaccgttgggggaggtgatgatgcttttaacaccttcttcagtgagactggtgctgggaagcatgtcccccgtgctgtcttcgtcgatcttgagcctaccgtgattgatgaggtgaggactggtgactaccgccagctctttcaccctgagcagctcatcagtggcaaggaggatgcagccaacaacttttgcccgtggtcactacaccattggcatggagaatgttgatctgtgccttgaccgcatta

SEQ ID NO: 412214 - DNA, 411 bp, Oryza sativa
ctaatctggaacttcagcttttgtggaaaagagggagactgtgggtgacctcaatctgattgggcaattcggtgttggtttctattcagtatacttggttgctgactatgttgaagtgatcagcaagcacaatgaccacaaacagcacgtttgggagtccaaagctgatggatcattcgttatctctgaggattcatggaatgaacccctgggccgtggaactgaaatatgactgtaccttcgagatgaagccatggagaacgttggatttatgacaagttataggtatcgtagtagtatgattcttcagtttttcatttttttctttacttggatttatccttcatatttttatttgtattattatgactttattggaatttattatttaattttttaattatttttatt

SEQ ID NO: 412215 - DNA, 404 bp, Oryza sativa
atcctttttttgaacgaatcgacaagatcgagccgatcccatgtacatttctctctttcaggatgcttgctatcaacagcatccagcaatcatggacactagtatacattaagtctttggcactttattctacacattattaccaggtcaccgtacctatacagcaatcggctataactatagccctaagaggccaaaagataatgttacatgtatagacagtgaaattatgggtcaactgtcgcctatgaccaaattggtcagggtggtcagcaggactagtatcgatacagtattctgtagtatgataacctgttatgtaccaaaattgcctttaattgttgggtgtagcatggtgaattccctgaactgaaatcctagtacatcctgaatgaatctaaaaa

SEQ ID NO: 412216 - DNA, 450 bp, Oryza sativa
  unsure (1)..(450): unsure at all n locations
gaacgaatcgacaagatcgagccgttttcatgtacatttctctctttcaggttgcttgctatcaacagcatccagcaatcatgtacactagtatacatttctctttggcactttattctacacattattaccaggtcaccgcactcgatacagtcaatcggctataattatangccctaatgaggccaaaagataatgttacatgttattagacacgtgaaattatggtttcaacttgttcgcctatgnnatcaaaatttggtcagggttgggtcaagccaggactaggtaatcgaatccagtatttctgtagtttgattaacctgtttatgttcgcaaaaattcgcctttcattggcctggggtgttagcaatggtgaatttcccctgaactgaaaatcctaggtagaatccctgcatgaaatctaaaaaacattagcagggaagtact

SEQ ID NO: 412217 - DNA, 133 bp, Oryza sativa
tcctttgtcattggcaaatcagttccccagattgccgattttggaggaagctaaaaagttccaagaaacctgagctgaaacaaaacccagtacttcctgctgatgtttttagattcatgcaggatctacttgt

SEQ ID NO: 412218 - DNA, 486 bp, Oryza sativa
ctgttcacctcaccttatcctcagctctcagcacctcttcctccctcccccaagcttccctctaatggcgtccgccaacgccatctccaccgcctccctcctccgctctttctcctcccaggggagggtgaggagggccaagaatgggcgggcgcagcggctagtggtgcgggcggacgccaaggacatcgccttcgaccagaaatcccgggcggcgctccaggccggcgtcgagaagctcgccaacgccgttggcgtcaccctcggcccacgagggagaaacgtagtgcttgatgagtacggcagtcccaaagtggtaaatgatggagtcaccattgcccgggctattgagctatatgatccgatggaaaatgctggtgcagcattgatccgtgaggttgctagcaagaccaatgattctgctggtgatgggactacaaccgcctctgtccttgctcgtgaaatcatcaagctgggccttttgag

SEQ ID NO: 412219 - DNA, 504 bp, Oryza sativa
ctccgctcctccgctcctcgcctcttttacccgcttttccccccgatctccccggactcccacagccgcagcgaacaaatcccgcgcgggttgggaagagcgagctcgtgaggagagcagagggaaagcgcgagggggaaggaggaggaaaggtgcacaaggtcagactaagtttgcgttgaagaacaaaggagaggaaaaatgtcgcctgctgaggcatcgcgtgaggagaatgtgtacatggcaaagcttgccgagcaggctgagcgttacgaggaaatggtcgaattcatggagaaggtggcaaagaccactgatgttggtgagctcaccgttgaggagcggaacctgctttctgtggcttacaagaacgtgattggtgctcggagggcatcgtggaggatcatctcttctattgagcagaaggaggagagccgtgggaatgaggcatatgttgcatcaattaaggagtaccgtagcaggattgaaactgagctcagcaag

SEQ ID NO: 412220 - DNA, 470 bp, Oryza sativa
gctatacatgggattaactcatcactcactaagcttgttaaattttcgaccatgtcggacaagtgcggcaactgcgactgtgctgacaagagccagtgcgtgaagaaaggtaccagctatggcgtcgtcatagttgaagccgagaagagccacttctaggaggtcgccgtcggtgaggagaacggctgctgtatgtgcggcaccagctgcttctgcaccgactgcaagtgcggcaagtgaagtcacgaagcaacctgaacacttttcgacggtgagttacctaccttaatttgttccacaataaaaaaccacccaatttgagtgtggtttgtgtgtgtagctgataatttactttattcaatctgtgtgttacttgtttaattttaactattgttctactttttcgattttttcctttctttaatttatttatttttttctatttcttttgtaacactttcctttttttc

SEQ ID NO: 412221 - DNA, 467 bp, Oryza sativa
gtgctctcttgcaagggcaggcactacaggcactgcagagattttttgcttcactggtccagtctgcaaatacaagctttgacactttgttggattctcttatttctactgctaaaccatcgcagtcaggtggacttgccaaacaagcattgtcttccattgcacagtgtgttgctgtgttgtgcttagcagctggggatcagaagtgtgcctcaactattgaaatgcttaaaggcattttaaaagatgacagcactactaattctgctaaacagcacatggccttgttatgtttgggagaaattggaagaaggaaggacctcagcaattatgctcaaattgagaatattgtcattgagtcatttcagtcaccttttgaggagatcaaatctgcagcgtcatatgctttcggaaaacattggtgttggaaatttattctaagtatttgcctttattttgaattgatt

SEQ ID NO: 412222 - DNA, 474 bp, Oryza sativa
ctccccaatctcgcgaggctctcgtcggcgaatcgaatcctctcgcgtcctcaagatgcagatctttgtgaagacattgaccggcaagactatcaccctcgaggtggagtcctctgacaccatcgataatgtcaaggctaagatccaagataaggagggcatccccccggaccagcagcgtctcatcttcgctggcaagcagctggaggatggcaggacccttgctgactacaacatccagaaggagtcgacccttcaccttgtcctccgcctccgtggtggcatgcagatctttgtcaagactctgaccggcaagactatcacccttgaggtggagtcttctgacaccatcgacaacgtcaaggccaagatccaggacaaagagggcatccccccagaccagcagcgtctcatcttcgccggcaagcagctggaggatggcaggacccttgctgactacaacatccagaagga

SEQ ID NO: 412223 - DNA, 482 bp, Oryza sativa
cggttccgggcgcagggtgcgagtgcgtgaggcccaatccccaaatcccccccccccctcgccgccgccgccgcccgtctgcacgcaggcctcctcgtcgcttcacttcatcaacaatcaagatgagtcgtggtgggagtgccggtggtggccaaagttctctgggttacctttttggaggcaatgaggcccctaagccagctgctaaaccagcacctgcagctgcacctgcaccagcgccagcaccagcaccagctgcggctgtggctgctcctgctgagaaaccatcacctgcaaaggctgatgccaccaagcagattccagctgggattcagggcagccggagcaataacaactaccatagagctgatggccagaacactggaaactttcttacggatcgcccttcgaccaaggtccatgctgcccctggtggtggatcttccctgggctacctctttggtggaaactgaaggagtgat

SEQ ID NO: 412224 - DNA, 478 bp, Oryza sativa
gtctatatctctcccgccccgagctgaagcaggtctgggcaatcgctgattccaagcgtcagggttatcttggattctcggagtttatgaccgcaatgcagctggtttctcttgcacaagctgggaatgagattagtcaggacacccttgcacatgcagatttggagacgttgctacctccgacaatggaaggtctggacaaaaaactaaaaaataattctatgagcaagagcaactctgatattgtcgtacgtcatccgtcagaattgcctgcatcagccaactggtttaactccaagtcaggaaagaagattcctttaagatcagttacttcgatcatcgatgggttaaagaaatcttacattgagaagttgaggccactagaaaaaacatatcagttcgatgactttgtttcacctttgctgactagcagtgatttcgttgcgaagccaatggtcatgttgctgggtcagtattc

SEQ ID NO: 412225 - DNA, 469 bp, Oryza sativa
gagtgcgcccctgataattgcgtcgttgtgcctgggctgtgagggctctcagccacatggatagttcaatgtgctcatcagcgcctgacccgaagatgtggatcatccaaggcacattagcatggcgtactcctcctgtttgaatcggagtttgaaactaaacaaacttctcctcaggaggatagatggggcgattcaggtgagatcccatgtagatctaactttctattcactcgtgggatccgggcggtccggggggggcactacggctcctctcttctcgagaatccatacatcccttatcagtgtatggagagctatctctcgagcacaggttgaggttcgtcctcaatgggaaaatggagcacctaacaacgcatttttacagaccaagaactacgagatcaccctttcatttggggtgactgagggatcgtaccattcgagcctttttttcatgcttttcccc

SEQ ID NO: 412226 - DNA, 326 bp, Oryza sativa
gtctagccggaggccgagcctgccaaggaggaggtggcgcacagagcccgtcgccgtcgactaggcggaggtcaaggatgccgagccggcggcgcaggtggtcgaggaggtgatggaggaggttatggaggaaatcaaacaaaatgatgacattattctctttattgatgaagtgcacacgctaattggagcaggtgctgctgaaggtgcaattgatgctgccaacattttgaaaccagcttttgctagaggtgaactgcagtgcattggtgccacatcacttgttgagtacaggaaacattattgagaaagatccagctttagag

SEQ ID NO: 412227 - DNA, 213 bp, Oryza sativa
cttatgtagaatggggacggtacaaaaacaaatgaaggaaagaaggatattactctcgacatggggctactagttgttggtaccaaggaccgatgagagatatatgaaagactgaggaagcttatggaggaaaaaaaacaaaatgatgacattattatgttgatagacgaagtgagcatgctaattggagcaagtgctagtgaaagagtaata

SEQ ID NO: 412228 - DNA, 498 bp, Oryza sativa
tttcttgttacagctgtgccgcctcttgcttcctgctcctcatcgtccgccatggcttctctcaccgatctcgtcaacctcaacctctccgacaccacggagaagatcatcgccgagtacatatggatcggtggatctggcatggatctcaggagcaaggctaggactctctccggccctgtgactgatcccagcaagctgcccaagtggaactacgatggctccagcaccggccaggcccccggcgaggacagtgaggacatcctgtacccacaggctatcttcaaggacccattcaggaagggaaacaacatacttgtcatgtgcgattgctacacgccagccggagaaccgatccccaccaacaagaggcacaatgctggcaagatcttcagctccccttgggttgcttctgaggagccctggtacggtattgagcaggagtacacccttcttcagagggcatcaactggccccttggctggcctgttggtggct

SEQ ID NO: 412229 - DNA, 339 bp, Oryza sativa
gtcaggttcctcctcgttgcgcttctactcgccaggcgcgccgacactgtccctcgcctcaccacccacatccgcacgctcctcgacgactccaagaagaccctccaagaagccgactacaaggagtggaagcacgtcgtccaagaaatcgcgaggtatatcagagctgactccccctttatcaacatgagaccactcaggtacagctacgcatttgatccttcccctgatactcttcctaccgtcccacctactgtcaagaagcgaggtctggtcttaagtgatgtcatgctttgcagttactatcaaatcgagatcaaatttacagacctcaccata

SEQ ID NO: 412230 - DNA, 222 bp, Oryza sativa
gtcttctcgctgcaacttcagcgcttgcgcggcagggaaccgtgttgtcctttttggaggggaaggtgttaacatgcagccaatgaatgatacatttgcgcttgatttgaatgccagcaagccagaatggaggcacatcaatgtgagatcggctcctcctgggcgctggggtcataccctttcttgcctaaatggatcacggttggttttgtttggtggttt

SEQ ID NO: 412231 - DNA, 478 bp, Oryza sativa
caaaaagatgcttatgtcggtgatgaggcccaatccaagaggggtatcctaaccttgaaataccccattgagcatggaattgtaagcaactgggatgacatggagaaaatttggcaccacacattctacaatgagcttcgtgtagcaccagaagagcatccaattcttcttacggaggctccacttaaccctaaggccaacagggagaagatgacacaaattatgtttgagacattcagcgttccagccatgtatgtcgctattcaagccgtgctttccctctatgctagtggacgtactactggtattgtcttggattctggagatggtgtcagtcacacagtcccaatctacgaaggttatgcccttccgcatgccattctccgtcttgatcttgctggtagggatctgactgattccctcatgaagatcctgactgagaggggttactcattcaccacctctgccgagcgggaaa

SEQ ID NO: 412232 - DNA, 217 bp, Oryza sativa
gcttttgtggttcctgggtctgctcatcatcggcatcaacatgtacttcctgagcacgagcttcgtcggctggctcatccacaacgacctccccaagtacgccaacgtgctcgtcggcgccgccgtcttcccgttcatgctcgtctacatcgtcgccgtcgtctacctcaccatcaggaaggactccgtcgtcaccttcgtcgccgactcctccctc

SEQ ID NO: 412233 - DNA, 413 bp, Oryza sativa
gagtggtagagcttggaaattcccttataggaacaacaaagaggggaattgggccatgctattcaaacaaagttataaggaatggacttagagtcagtgatctgcggcatatggatacatttggtgctaaactcaataccttgctgagagatgcagctctgcgctttgaaggatttgaatacagtaccaagacccttaaagaggaggttgagaagtacgaaaagtttgccgagcgtctaggaccttatattactgataccgtgcactttatgaatcaatcaatcttgcagaataagaaaatattggttgaaggtggccaagccaccatgttagacattgactttggtactttacccaattgttacttccttgagttccttaatttggtggtattttcacctggacttggtatt

SEQ ID NO: 412234 - DNA, 486 bp, Oryza sativa
tgttatcttagctagccagccatggcgaggcgctgtccttgcctagccgtcgccatgctcctgcttggggcgtcggcggaggcgagcgccttcattgatgaagcggctgctgctggccgggggctcgggcatggcgcccgcttcatgagcaagcagggtcgtgtgacatacgataagctgccggatccggacccgaagcgcaaagccaaagcctcatcctaaacccacgccaaaacctgagcccaaggcagagccggagccaaaaccagtacctgagcctgagcctaaaccggaaccaaagccagaaccaaaacctgagcctaagcctgaacctaaaccatacccagagccaaaaccggtgtctgagccagaaccaaaacctgagccggagcctaaacctgagcctaagccagaaccaaaaccagaacgcaaagcctgacccagagcccaatcctgagctcaaaaccggaaccgaagccggaacca

SEQ ID NO: 412235 - DNA, 188 bp, Oryza sativa
gtaaccactcctcaccaagtcaaagtttcttcctcgcgaccggcggcgagcggcggcggcggcgatgtctgggagaggcaagggcggcaaggggctcgggaagggcggtgcgaagaggcacaggaaggtgctgcgcgacaacattcaggggatcactaagccggcgaaccggaggctgtctagtaggg

SEQ ID NO: 412236 - DNA, 453 bp, Oryza sativa
gttgaggggctatgttctggagcactggaacggtttgagggtagagtggtgggggggctatttgtatatgtggaccaacaaatgtcagaacaaaacacatggaatcacacctcgtagatggctccggttttgcaacctagagttgagtgaaatagtaacaaaatggctaaaaacagatcagtggacaagcaaccttgatcttgttaccggacttaggaaatttgcagatgatgaaaagcttcatgctgagtgggcatcagctaagttggctagcaaaaaacgcctagccaagcatgtgttggatgtgacaggtgttacaatcgacccaaatagcacttttgatatacaaattaaacgcattcatgagttcaagagacagctgctaaacattttgggagctgtttacagatacaagtagttaaagggaatgagtgcagaggagataccaaaagt

SEQ ID NO: 412237 - DNA, 373 bp, Oryza sativa
cttattgccgccgccgccgcctgcctcgtactccaactcttcggcgactagatgacgaagcgcaccaagaaggcaggaatcgttggcaaatatggtaccaggtatggtgccagtttgcgtaagcagatcaagaagatggaggtttcccagcactccaagtacttctgcgagttctgtggcaagtttgctgtgaagaggaaagcagttggaatctggggatgcaaggactgtggcaaggtcaaggctggtggtgcctacaccatgaacactgccagtgcggtcacggtcagaagcacaatccgtcgcctgagggagcagacagaagcctgatcaggatctgtttgagaaagtgttcttggagtttttataagac

SEQ ID NO: 412238 - DNA, 290 bp, Oryza sativa
gtgagtctatggagaaaagggctaacggttctccaagaaatgaacctgaccggaagccattgaggccactatctccttggatcacagacatattgcttgctgcacctctgggtattagaagtgactattttagatggtgtggtggagtcatgggaaaatactccactgttggagaattgaagactgtttcaactgctttcagtctgaggatctggtattgccccacaacttatgctattccttgcctagatggttttgagtcattgtagctgtagttaaactaatatttt

SEQ ID NO: 412239 - DNA, 346 bp, Oryza sativa
gttaaatctatagttgctcccttgagaaggggaggtggcaagcctacagcaaaagctaggggacaccccatgctcttacctgatcgcccgcctcatgtcactattctctgtcttgtaagagatgctgctgccaggttgcctgcaagaactggaacaagagctgatgtgtgcacacttctcaaagattcacagtatctaaaccacgaagaatctaataaagaggctgctgttaaccaagttgtcagcggtgctcttgatcgtctgcattatgagcgcgatccttgtgtactgtatgacaatgacaaaaaattgtggacctacctgcacaggggtagagaggaggaag

SEQ ID NO: 412240 - DNA, 491 bp, Oryza sativa
gaaatgattgctgaccaaagtaccactcatcgaaaatacagaggatcttgaagattttgaatccgtcttcattaatctttcaacattgcaatcagcaacagccaactttgatgaaagcaacaggcttggggaaggaggattcggtgttgtttttaagggtgttctccctggtggacaagaagtagcagtaaagaggctttccaattgctccatacaagggctaggacaattgaagaatgaactatctctggtagccaagctgcagcacaagaatcttgttaggcttattggcgtctgcttggaagaaggagagaagatccagataaaagcaaacaacttgattggggaaagagatacatgattctgaacggaattgctcgaggcctgcaatacttgcatgaacattctcaattgaagataatccatcgggacctgaaagcgagcaatgttttacttgatgcggatatgaaacccaagattgcggattttgg

SEQ ID NO: 412241 - DNA, 203 bp, Oryza sativa
gtgatacagcaaaaaaaatcaaacaaaaagaaaaagtagttccccatctgtgaaattcgcaaaaccctagcgcggcggcgatgtcgaacacgagggtgttcttcgacatgaccgtcggcggagctccggcggggcggatcgtgatggagctgttcgcgaaggacgtgccgcggacggctgataactttcgtgctgctcttgct

SEQ ID NO: 412242 - DNA, 406 bp, Oryza sativa
tctagaagagggagagcaccaaggacacgcgactagcagaagccgagcgaccgcctcctcgatccatatcttccggtcgagttcttggtcgatctcttccctcctccacctcctcctcacaggttcttggtgtagcttgccactttcaccagcaaagtttcatgtctgatctcgacattcagatcccaactgccttcgatccctttgctgaggccaatgctggagactctggtgcggttgcaggatcaaaggactacgttcatgtacgcatccagcagcgtaatggccgtaagagcctgaccactgtccagggattgaagaaggaatttagtttcaacaagatccttaatgattcttaagtaagaagttttgttgtatgctactgcttttcaggtcccattgcttg

SEQ ID NO: 412243 - DNA, 425 bp, Oryza sativa
gccttatcgagcatcttatcccatcttaaagttggtttattcggcagcagcaaatgctactcattatagggatttcgacaaagcaaatttattcatcactaaagccgaagtcagtaggagtactattatgaataaattcagacctcgggctcgaggacgtagttctcccataaaaaaaaccatgtgtcatataacaattgtactaaatatagtaaagaaatcgaaataatctttagatccatctaagatttgattcccggtaaaaaaaatagaatagaaaaatatgggacaaaaaataaatccacttggtttcagacttggtacaacccaaaatcaccattccttttggttcgcacaaccaaaaaattattctgaaggtctacaggaagataaaaaaatacggaattgtatcaagaactatatac

SEQ ID NO: 412244 - DNA, 492 bp, Oryza sativa
caacttatcgcctccctcgcatcgcccctccccgaccccgccgagatcggagcaggcgccgcctccctcctcccgcctcctcctccgccatggcgccgtctctgctcggggggttcaccaagtcgctggccatgacggtgctctcggagatcggcgacaagaccttcttcgccgccgcgattctggccatgcgctatccccggaagcttgttcttgctggttgtctcacctcattaacagtgatgacggctctatcagtttcacttggttgggttgcgccaaatctgatatcacgcaaatggactcatcatgtgaccactctgctattctttgtgtttggcattttgtcattgtgggaaggcttcaaagaagatggagattcagaagaattggctgaagtggaagctgagctggatgctaattttaaaagcaacaaagcagaatcgaaaagtaaatctaaggcaaatgatgataaaaagaagcagcaaagac

SEQ ID NO: 412245 - DNA, 217 bp, Oryza sativa
gcgccatttaccatccatccgcgcgcggtgcgtagtagcgagaagagaagggggggggggcaaagcgatggctccgatgaagctgtacgggtcgacgctgtcgtggaacgtgactaggtgcgtggcggagctggaggaggtcggttccgagtacgagaattgtgctcttagatttttacaaaggcgagcacttggctcctcttccactcttatcagg

SEQ ID NO: 412246 - DNA, 428 bp, Oryza sativa
gggtatcattaacaataatcgcttcaggaacagatgaagctctgcagtgtactggcagtgttctctcagcactaagtgagaagctttatgtcatcaaaggaggatgtggagctgcaagttctgtaaagatggtaaaccaacttcttgctggggttcatatagcctcagcagctgaagcaatggcatttggtgctcgattaaatttgaggacaaggagactttttgaaattattcaacatgcaagaggttattcatggatgtttggaaatcgtgtgccacacatgcttgataatgattatactccttattctgcagtggacatattttgtcaaggaacttggtatagtattttatgaaagcttcaacccaaggatcccactgcttgtctctagtattgctcaatcaacttttttcttttaatgatcttc

SEQ ID NO: 412247 - DNA, 357 bp, Oryza sativa
gccgtagcatcctgcgaggacctgcacacttgagtccgacgaggaagccatatgctgggggattgcatactgagtcaaaggggggcttaaaaaggagcaagaagcaatgaagtacttggaaagaagagagtgtgagtatgaccagaagatctatgtggatttctacaaggaaggagattctttgaagccagctgtgacaggtgtactagtctttgtatccactcctgatccagtaggcaacaaatactatctagggcctgcttctttggaggacattggcaaggaaaatttgctacagtcaatggctccctattgggaatatcagtggattaccctgtctctcaatgtataaagttt

SEQ ID NO: 412248 - DNA, 308 bp, Oryza sativa
cagctaacgagcaccacacaccagcagcagcagcaagtcgatcgatcgtcagcacacacgaccaagatcgagatggcccgtgcacagctggtgttggtcgccctcgtggcagctctgctcctggcgggcccacacaccaccatggccgccatcagctgcggccaggtcaactccgccgtgtcgccctgcctcagctacgcccgcggtggctcctgcccgtttgtttctttcttctacttttttcttttgttttttttttttttttatttttctattttttctttttttttcttctttcttctcttttt

SEQ ID NO: 412249 - DNA, 355 bp, Oryza sativa
gctgtcttcctcccaccttccgacgacgccgccgtcgctcttctcttcgctccgccgcgcaggtaagaaggagaggaggagaaaatggtgaagcacaacaacgttatccccaatggccacttcaagaagcactggcagaactatgccaagacatggttcaaccagtcctcccgcaagcagaggcgccgcattgctcgccagaagaaggctgtgaagatcttccctcgtccaacatctggccctatttgacccattgttcagtgccaaactttgaagtacaacatgaagactagggcttggtgaggctttacccttgaggagcttattgcttccgacattcataacatttatgttt

SEQ ID NO: 412250 - DNA, 296 bp, Oryza sativa
gctgagcggagcagaggaggacgaagaagtagggggcggatttagagcacggtgacctagcccgacctcgcaaccatggtaaggggttttgaagatgcattttaagagtctaaatgttttctagtattgatttgcttttaaagtttgaataatatttttgatttcattaactaatttgtaaatttcttttttattaattttttttttttcaaaaaaaatatattttttatttttcatctttattttttattttttatatttcattatttattttctttctttaattataacttttt

SEQ ID NO: 412251 - DNA, 177 bp, Oryza sativa
gctaattctacagttgctgccaggagtgattcaggaaatgcaacatccctgcaatgagtgcaagggaactggtgagaccatcagcgacaaggatagatgcccaggctgcaagggtgagaaggtggcgcaggagaagaaggttcttgaggtggagtcttatttttaaaattcaaattc

SEQ ID NO: 412252 - DNA, 392 bp, Oryza sativa
agcaatgtaaatactcgcattccaaaacagccgatggacaataattggactcagagcatcagttttaaccgaacagaaataaacgagagtattaaacgactgacatagttgcacatttgcgagcagtatattaacggctccatgtaaacgaggagcctatgcccgggggtcaaaacttaacaaattctagaactagatattctcaacttgcagtacatgtcaaaccaccatttgaaacgaggactcactttattcttggccgtgcagcccttgagccacacttggcaccggtttggggtccttcttttccacgtatcttgatgacgccaacagtccaccgtttgcctcatgttacgcaccggaaaacgaccaaaaggagggtcctcaaagaa

SEQ ID NO: 412253 - DNA, 496 bp, Oryza sativa
gttcttttggggagatttactgtgacattgcgaagtttgctacacttcccaggagtagtgaatatccgagacacctctgatgtatgcttatcagagtctcatgtatttcctgtctttgagatacacagatattctcatggctagaacctttccttttccacctctagctagacggaaaatcgcttacctcaagttgctgataccatgtgttctagttctttcaggggctgatattgttgttacgcagtatttccataatatctgttaccttctgcggccactgtgggacacaccacctaagccatttatccgcatcccacactactatgcccccaacatcttcatgccgcagctctgtcagctccatggttggggtatcctccccacccctcggcgtgtctttggcgccgtccttttagtaatgaacctggttttctagaaattcgctacggtgagctcctttcgatgttgacagggttgcatccttggagctaat

SEQ ID NO: 412254 - DNA, 243 bp, Oryza sativa
gtgtaaggtgcctgaaaggcaggatccaatgcttgttctgaagcccatatggatggagaagaacagtggcatagccctagaccagttaggtcccggctatggcagcattgcagtaagcccatactacttctggccacggaaagatgcctgggaggagctaagagcatacgctggtggagaacgaggggaacttttataaacagatgaacatacatatggatcaggccactgaggtcagcaacc

SEQ ID NO: 412255 - DNA, 261 bp, Oryza sativa
gctcgaggttccccagactgaaaggtttcttttccaacgtgtttgtacaaggggttatcacatgttccgctgtattgcaaggtacggctacaaagataagaaccaggagagccaaagcacatttgagcgccttctgattgaaggcctcgagaagttcatacagcgggaggcagtagagctatccctacaaagtggagacgacatcgactctgacgaggagcctccatccccatttaggacaatcgtagcgccaaatggtag

SEQ ID NO: 412256 - DNA, 410 bp, Oryza sativa
gacagaaaattcaagttcagtaaggaaaatctcgagtacatccaagctcagatcattaagataagatatgatgctaatttaatctagggctaccagtacaagatgagaaacatggtgccattgcaaacagctaactaattccagtagatcacatcttgttgcagtccttcccttttcacggtttccacttgctttcaattttgagctcttccttcttccttcgctatccattcctctgacaggtacttccttagtccttggaccttgtgccgtcccgccttgcttgccatacgcttgtcgtaggctgcttgcggttgcctcttcgcttgctccttccggctacctttccacggtagtaattcgtgggctaccttccacggttagtaaatcgttcgtgcttccctggaccg

SEQ ID NO: 412257 - DNA, 302 bp, Oryza sativa
tgatgcccccgcctgcacaacaagccgtcggtctcgccgacgctgctgctctccaacatgtacctgcgtccggacatgatcacccctggaattgatgctcagggcaaccccatcgaccctgagaagatccaggccgacttcgaggatttctacgaggacatctttgaggaactcagcaagtacggcgagatcgagagcctccacgtgtgtgacaactttgccgaccacatgatcggcaatgtgtatgtccaattcagggaggaggatcatgccgccagagcgctgcatgcgcttgaccgggc

SEQ ID NO: 412258 - DNA, 327 bp, Oryza sativa
tttcctcttcctcttcccatcgcgatacctcctgcttcccgtcgaaccctctccagtctccactccactgaatcctcccacctcggctcgaaggaatggcaagcggtagtgaagctgagaagtcacctgaggttgtgctggagtggcctaagaaggacaagaagaggcttctacatgctgtttaccgtgttggagatttggatcgcaccattaaatgttacacagaatgctttggaatgaaattactgaggaaaagagatgtgcctgaagagaaatatacgaatgcatttcttgggtttggacccgaggacaccaactttgcacttg

SEQ ID NO: 412259 - DNA, 447 bp, Oryza sativa
  unsure (1)..(447): unsure at all n locations
gaacaatcatggccaacgaggggctaacaacagtttagcacagtacaaaaagtaaacacacataacaggaatatgcaatgcaatggaaccggagtatactgacaaaccaatcattaacctagagaactacttattaaccagctacttaatagtcttcttccattcgtcgttctttcgtcgtctgcacccctcggtcacccgactttcctcattagtcctttctcatagggcagctcaaagtcctcacggngctttctgagnaatttcacnctttcttcccatttccctcaccaacgttaccatgtgcacaaatcgcacgcttagcatacattcaagttcgaacttgtggttcgatgcgcgaggaaaacctcagcaacagcagtgttgttgctgaatcatgcacactgcacgctgaaccttagccaggtcaccaccagggacaacaga

SEQ ID NO: 412260 - DNA, 182 bp, Oryza sativa
ctaaatcacaactctgattcagtgatgaagagaacttcacttctaaaagagtatcaacttgttttttacatcggttacatcatagtacaagtacacaatcaacaaggcatgcagtgctccatccacaattacattcccaattacatccaccatccatttcacagccctacttccgattcgga

SEQ ID NO: 412261 - DNA, 371 bp, Oryza sativa
ttcctttccaggaacgcgtgtcctatcctctcttctcttctctctccggcggcggcggcggcggaatccgatccgaaccaagcaaaaatgacggccggatacattgctgggtccttggttggatccttcgccattgcttacctgtgtgacacatttgtttctgacaagaaggcatttggaggttccattccaaagactgtctctgacaaggagttggtggcaagccactgacaccaagttccaggcctggcctcgcaccgctggaccaccagtcatcatgaaccccattaggcggcaaaactttattgttaaggccactttgaccagagaaactggttcatgtgtcggattttacccattaatattaaaat

SEQ ID NO: 412262 - DNA, 146 bp, Oryza sativa
cggtccccaaggagacaaaagatgagatttggcttgagtatgccgtaagttgtctcttccaaggcatcaaatatggagttccaaactcaaggagccatcttgcacgaattctcttacttctgagctccgatacacaaattgaacct

SEQ ID NO: 412263 - DNA, 82 bp, Oryza sativa
aaatacttaatagtaatagactctttgatggagttttacaacaggcagaagagccattaatacgcccagtacatttaattaa

SEQ ID NO: 412264 - DNA, 117 bp, Oryza sativa
ccctgaaaaatttgtacgcaatctagcgaggctctcgtctttgaatcgaatcctctcgcgtccccaagatgcaaatatttgtgaagacattgaccggaaagactatcaccctggagg

SEQ ID NO: 412265 - DNA, 222 bp, Oryza sativa
ttcgtcccttttttgcaataccgttgtttagatggtttctacttcgcaagaccaacaatgacattcaaaggaggaacatggccagagaacagcgagctcaggaacttgcattgccagaatcttctctcagaagaaagttactcagtgcacgcgacatggctcaacgtaaggtaatttctccagaggagatcgtctacactaccgaaaaggatcttttggatc

SEQ ID NO: 412266 - DNA, 438 bp, Oryza sativa
aaatacttaatagtaatagactctttgatggagtattacaacatgcagcagtggcattaatacgccagtacattaattaagttacacatatgcaggcctccatttttggtttcttttaatttatccgtattacagaatttttctgtagccctttgcagtatgattcactttggatattcatgtacctagttaatttaacaaattaggatgcattaccaaaagatgggcccaaacgaacaaacatgaaagatgccgtgccatcttgcacattggtctggccctttattttggttggttaagtacctccaaattaatttaaacaaggaagatgaatgcatttctttgtgcccttagtttttcttacacatgccttggctttcacgttgaagcctaattcgcaaatcttcacccccaacgaccttaatcacactgggagag

SEQ ID NO: 412267 - DNA, 255 bp, Oryza sativa
tcgtctctcactcccactaccatggatccttgcaagttccggccgtcgagctcgttcgacacgaagacgacgacgacgaacgcgggagctccggtgtggaacgacaacgaggcgctgacagtggggcccagggggccgatcctcctcgaggactaccacctgatcgagaaggtggcgcacttcgccccggtagcgcatcccgtagcgcgtggcccacttccgaggagccctcgtcaagggctttttctagtgctc

SEQ ID NO: 412268 - DNA, 333 bp, Oryza sativa
tgtattcacacgccggactctccccttctctctgtctcgctccttcgttcgctcgctttatcccccccgaataaaggcgagaagccgcagcggcggacgaagaagagggcagatagaaatggcggcggagacgttcctcttcacctccgagtccgtgaacgagggtcacccggacaagctgtgcgaccaggtgtcggacgcggtgctcgacgcgtgcctcgcccaggaccccgacagcaaggtggcgtgcgagacgtgcaccaagaccaacatggtgatggtgttcggctagatcaccaccaaggccaccgtcgtctacaagaagatcgtccg

SEQ ID NO: 412269 - DNA, 92 bp, Oryza sativa
cttttcggcggccctccttttttttttttttttttacagcttaaaatagcccttttattatgaagaacatggcgctatataattaaatatat

SEQ ID NO: 412270 - DNA, 180 bp, Oryza sativa
tcggtagcagcagcagctgagctcgaagcagcagagcgaggtagacatggccgccgccaccatggccctgtcgtccccggcgctggccggcacggccgccgcgaaggcgctcgtggagggacgccccaccatgcgcatgtccgcttcttaatcctttcctcgtattcttcttttccttcc

SEQ ID NO: 412271 - DNA, 252 bp, Oryza sativa
ccctcgaccatgggacatcaagcttccctgtatctgcagtgcacaggattggcatacttgacatcagaatattcaacacggacaggcacgcaggaaatcttctggttaggaagcttggacctgggcctgacaattttggagtgcagactgaactcattcctattgaccatggtctctgtcttcagaaagtctagaagacccttactttgaatggattcactgcccaccgtgcttcattcctttcactgtgga

SEQ ID NO: 412272 - DNA, 406 bp, Oryza sativa
acagcttaaaatagcccttttattatgaagaacatggcgctatatattaaatatatagctagataaaaaaaaaagaaactatgctgaggaatcgatcaaggaaactcaatcgtgcagcagcatttctccttgttattatacaaacacacgtacagcatacttagattcagcatcaccatggcgaaaacagtcgtgtcatgtcatctcactttgctttggatgcgctccagcgaagcagggtctgcctgaactcgagcagcttgtcggcgtcatccggcacgactcccttggccgcgtcggtggcgcggaaccgctcctcccacgcggccagcgccggcgtcctcgccgggtcaatcagcctgcgaccgatcagcttggtcatcgccgtgaaccacccgaggtagcc

SEQ ID NO: 412273 - DNA, 285 bp, Oryza sativa
ttctttaaaaacctcaccatcatcgacccacttgttcctagcgatctagaacgagagacttggcaatggcgggaagcggcgagctgaagctgctgggcgtttggagcagcccgtacgcgatcagggtccgcgtcgtcctcaacctcaagtcgctgccgtacgagtacgtggaggagaacctgggcgacatgagcgacctcctcctcgcctccaacccggtgcacaagagcgtccccgtcctgctccacgccggccggccggtgaacgagttcgcaggtcatcgtg

SEQ ID NO: 412274 - DNA, 398 bp, Oryza sativa
cttcaaagaggaatggatcactgtctcagcagttcttcaaagaggaatggaccacagtctcactgataaactgtttcatataccattacaaaaaaagcatggatatgactagatctcactggaaaaggaacatgctccacatgtatgccacaagctcggctgcctttgctatttcaattcctcccattggacagaatggcactaattctagggtttacattcagaggggattaattacatttaaatccatgccagggggtcctggtagtgggacagaaccagcacaatgggcaagaagaatattgtgaacatgggatggagcataaggaagtatgccaatccattctcgggctgggctgttgcatacttgcaattgtcccaaagttccaaacttgcag

SEQ ID NO: 412275 - DNA, 321 bp, Oryza sativa
  unsure (1)..(321): unsure at all n locations
gcatgacagaatggagaggcatcgatcatagatcaaaactgatcaaaattttacagagcatgccatgcacgcttcagctgcgattttacagccaaatcgaatcgattgagataactacatactgtgtgtcccttcgggcaacgaccagttctaaaattcattcatgggacacaggttgatgcccatttagaagagggnaggttgtcaccgtcagggaaggttgaaccgccgatcgaaagcagtcgcaagattcacccagatacggcaggcaaggttcacattgaggagccttttccgatttcccaggttacccctgctgca

SEQ ID NO: 412276 - DNA, 136 bp, Oryza sativa
gtcctaacagtcctcattattggccgtctactgtgtggtatgtgttctgcaagagctgtcaatcgccgatacatcagtgattgtgtccctgcatggatacgcatgcaggcttcagcaggatttgtcagtgcaagct

SEQ ID NO: 412277 - DNA, 60 bp, Oryza sativa
tctctcctgctttcccgatgggcaacattgatcaaacacgtatgtggaaggtgggtgttt

SEQ ID NO: 412278 - DNA, 335 bp, Oryza sativa
aacaaaaacagttctattcattaattcgtttatttggcataatccagcatgcatgcacacttacataatactccagattcaagtccagtgcatgtgcatgcagttaattaaacaactccttggttcggatacaaattaaaacactagaacacagtacgtacgtacgtagtagaactcatcacgcacatttttttttgttgtctacgtacatagcacagcacgtacgtataatagtacgtataatacgagactaattaatcaagatacgtaggtaattaattaacacgggtcgattgcataacacatttggggggtacgtaattaattaactgatt

SEQ ID NO: 412279 - DNA, 137 bp, Oryza sativa
ctctatgcgaaagacatcactgctgatgacaagcaggtgcttgatgaggccctgcagcgggagattcaagcagctctcagaactgatgaaatccgcaggactcctcccactcctcaggatgaaatgcgcgccgggat

SEQ ID NO: 412280 - DNA, 324 bp, Oryza sativa
ctcatcagcagcatcaggggaagggtctagaagcttctagaagcttcttccgagatgaaggtgatcgagaagatccaggaggcggcggcggatgggcggacggtgttctcgttcgagtacttcccgcccaagacggaggaggggctcgacaacctgttcgagcggttggatcgcatggtggcgcccggccccaacttttgcgacattacctggggcgccgggggatccaccgtcgacctcacccttgagatcgccaaccggatgcagaacatggggtgtgtggaaacattgttgcacctgacttgcaccaatttgccatttgag

SEQ ID NO: 412281 - DNA, 384 bp, Oryza sativa
acgacaaaccacgaacttggattttaaagatgccacaaagaaggttcacataaacaacacaggtcacagcagcgaaagctacaagcaaaccctgcataatcgaaaagcaaatgtttttcaaaaccagacacacaaactgatagatagaagcccacacggacagatcataggatagcagcagttaatcaagcattgccaaggcaccaggcaaggaaccctgaacctttttagtactcgtcacccttatcaccctcgtcaccatcgtcgaactcggagccgaccttcttgtagtccttctccagcgcggcgaggtcctcgcgggcctcggagaactcccccttctccatgcccttgccgacgtaccagtggacgaaggcccccttg

SEQ ID NO: 412282 - DNA, 204 bp, Oryza sativa
ggtgacttcgtactcgcctctctccgcgcccttctccttcgtcgctcgccgccgttcgtctccgccgccaccgacgccgccatgagggagtgcatcttgatccacatcgggcaggccggtatccaggtcgggaacgcgtgctgggagctctattgcctcgagcatggcatccagcctgaaggacagatgcccggttacaagatc

SEQ ID NO: 412283 - DNA, 399 bp, Oryza sativa
  unsure (1)..(399): unsure at all n locations
acgacaaaccacgaacttggatattaaagatgccacaaagaaggttcacataaacaacacaggtcacagcagcgaaagctacaagcaaaccctgcataatcgaaaagcaaatgtttttcaaaaccagacacacaaactgatagatagaagcccacacggacagatcataggaatagcagcagtaatcaagcattgccaaggcaccagggcaagaaccctgaacctctctagtactcgtcaccctcatcaccctcgtcaccatcgtcgaactcggagccgaccttctngtagtccttctccagcgcggcgaggtcctcgcgggcctcggagaactccccctcctccatgccctcgccgacgtaccagtggacgaaggcccgcttggagttcatgaggtcg

SEQ ID NO: 412284 - DNA, 268 bp, Oryza sativa
actgcaacctcaacaggcttgtgtcccaggtcatctcctcactgactgcctccctgaggttcgatggtgctctgaatgtggatgtcaacgagttccagaccaacctggtgccctacccgaggatccacttcatgctttcctcctacgccccggtgatctcggccgagaaggcctaccacgagcagctctccgtggcggagatcaccaacagcgccttcgagctcgcctccatgatggccaagtgcgacccgcgccacggcaagtacat

SEQ ID NO: 412285 - DNA, 300 bp, Oryza sativa
ctccttgattactatttcatttcattccgatagatagcaacaagcagttcaaacaccataaccaaagcgaactcaattaatggtaacatcacggccgaagaacacctaacactggatggatggatagagggcttaccgacttgagagagccaatggcacacgataacgaacttgacttgatgataagcatgataactgaacacggaatggctaaggataacatggccacgatggcgcccgaccaatcagaccctccagattcccgccggagttcgccgacgttagccgccgccacggttg

SEQ ID NO: 412286 - DNA, 464 bp, Oryza sativa
ttcccctgtaccacaagaggaggcccccaagaagtcgtatgcttcaattgtcaaagtcatgaaagaaattccaccacaaatatctgcaattccttccaggccggcaccaccaaaacaagagaagcaagttgctcctgcacctgttgctccggttgctgatgctccaactttcagtcctaatcctgaaagcagcaacattcaagaggctgaagttgatgcacatgcgatatatgtacggaatctgcttttaagtgccacgcctgaacaattagaagaagcattcaagaaatttggcgctatcaagccggacggaatccaagttagaagtcacaagattcaagggttctgcttgggtttgtagagtttgaagatcccagttcagttcaaagtgcaattgcgggttctcctgtgacgattagtgaccggcaatgttatgtggaggaaaagagaactgcttgttcacg

SEQ ID NO: 412287 - DNA, 556 bp, Oryza sativa
ttattcccgatgcatgcccttctatagtcctcatcctccccggcgccagccaccaccaccacccgtcagccgacaggtcgctgcccgacaccgccaagcgccgtcggcgccagtcagccaccaccgccaagcgccgccgccacgccaccgaaggagcggcgccgccgccgcatacggccactcctcagccaccgtccaccgaaggaactcaacgccgccaaccccatggccatcggtgccgccgggctacgaatcctcaactatctcaatctgtcccacaacgcgccggaatgcagagcctaacggccgtcgatttctccgacaacaatctctccggcgaggtcccagcgaccggtcagttcgcctacttcaacgccacgtcattcgccggtaacccaggcctctgcagggccttcctctccccatgccgcttccacggcgtcgccacgacgttgaccttcggctccctcttgtcggcgatgaagctgctccttgggcctggcctcctcctttgatattttcatgtaacaatttaacgtactatcattatgcatgc

SEQ ID NO: 412288 - DNA, 266 bp, Oryza sativa
gtactaagtaagtaagtattatcagatacagcatttccaatagttcactagtattatatttctcattgtctcacaggctgccgacacacaagtcatttcggaatatgtacgctattttctccaccaacacacaattcagcttgggcaaccagctactgtgaaagttgcagccaacttaattaggttgttggcttatcagaacaagaacatgttgcaagctggcatgattgttggtggatgggataaatatgagggtgtcctttttt

SEQ ID NO: 412289 - DNA, 446 bp, Oryza sativa
  unsure (1)..(446): unsure at all n locations
gcatggccaacacgcatgtcaaagccattagcgcaatggccgaaacactggtgccaataaccacttgctctgctgtagtacgcagaggtcgacatccataatttgtaccatcagatctttttcctaacttgcatttgcataaatatcctcctggtgtgcttgtggcagaactcctttcctgcaaggatatatatccttcatacttgggnatcctgcttacgtaatgcgcactcaatccacgtctttggcagccgttcagaagataagggttgccctcataccctttggagcactggcataagtaccctggaccattgttcgcgtccatgcagtagctgtttgcgctgatgcacgcataatcaccaggtatgcctttcccctcttccgggcatgagccattcctaaaggcccaatcaggcccaacaggtgctcccctctgagctctg

SEQ ID NO: 412290 - DNA, 485 bp, Oryza sativa
ttgtatccttataacagacatggcactttggtggacgatcaagtaccagacagttctccagaagttatccaagtatcctgtgattgatttcagcaaggatgaccaagtgcactgcttcaagcatgccattgtcgggctgcatgcctatatggagttcacaatcgactcaaccaaggcaccgcacaactattcgatggctgatttcaacagattcatgcgtggagcttactcgctgggcagggacagtgtgaccgtgctcggtgagtaccccaagatcaagccaaggttgctcatcattaagaggcaccgtacaagtaatgtttctaacctggatgagtccatcttcatggtccatgatctttcctttacctctgtcatttactttgttcatttaccttttttatcttttttatgctctcttttttcattttctttcttttcctctttatttttatattattccactttattttctattctttttc

SEQ ID NO: 412291 - DNA, 384 bp, Oryza sativa
  unsure (1)..(384): unsure at all n locations
gggaaacgaataaaatcattattgcaaaaacatcatcttcttcttcatcttcttagtgtacacaacaccaactcgatcatcatctcgtcgcactaaacccatcttccccaacccaaagacaacgaactcgctggccacaaatccatccaaccacaattaaccactgctaagctacggtacccccacttcacttgccgggngacgaagttggtggcgtacgcccaggcgttgttgttgacggggtcggcgaggtggtcggacgaggcttctcgagggggcccttgccggtgacgatggcctggcacgaagaagccgaacatggagaacatggcgaggcggccgttcttgatctcctttaccttgagctccgcgaacgcctcgggg

SEQ ID NO: 412292 - DNA, 104 bp, Oryza sativa
actggctctcacagatcactgcatcaatggccgtggccaccatggcgctctcctccccggtgaaggcccgcgcgaaacactataactattttatacacatctta

SEQ ID NO: 412293 - DNA, 513 bp, Oryza sativa
ctggaaatggcatacattcctttggacgaggacatgaaggtcaaaggtaaggcagcaattgatgtggtctgcaacccattggggaagtctggaggcgccttgatccagcagttcatgatcttatcatttggatctctcgcaaattctacaccctacctgggaggaattctattggtaattgctcttgcctggttgggtgctgtaaggtcccttgactcacagctctccccactggcaaagctagagcttgtgaaggagaaaatgcttaaagctaagactgtctaaacatctgttcaagttgtttttgcaggaaatggttctttccattaatctttagttcaatctgacctttcttcttggttccatcttcaacaggtttatagtcccttcttaatctatttttttaatatttctttttactttttttccttctttattctttcttatttcttattcctctactttttttctttatatcttttactaattcctctatctttttctcattttctt

SEQ ID NO: 412294 - DNA, 428 bp, Oryza sativa
  unsure (1)..(428): unsure at all n locations
aggggggcatgagcatgatcatacgactacatttgttgtcatagaaatattccactaaatttgctgtcatctacatttataccacaacccggcagcaaggggctgatattcttactagcttcttcctagcagtagcaaaatttccatgcacacgtataataacccgtgtgcaggagcaaaaagaaaagncttgttactgcggcatcaccagcagtatagcctgcagcctgcaaaaattagaaatcaagcattcgcccacccagatagcttataaagatctatatactatggtaaggtctgtaacaaccaacattttggtgcttaacacaacactagtcactcaaacaacaacctttcgctgtctaaggactgggaagaaagtcacagctgcctatttacatggtgtcctttattcattttgcagtgaa

SEQ ID NO: 412295 - DNA, 402 bp, Oryza sativa
ttcatttggaaaagtgaagattgcagagcataagcttacaggacacagagttgctataaagatcctgaaccgccgccaaatgagaaatatggaaatggaggagaaagcaaagagagaaatcaagatactgagattgttcattcatccccatatcattcgcctttatgaggttatatacactcctacggatatatatgttgtgatggagtactgcaagtttggagaactgtttgattacattgttgagaaaggcaggttgcaggaagatgaggctcgccgaatcttccagcagattatatctggggttgaatactgccacagaaacatggtggttcatcgtgatctgaagccagaaaacttgcttctggattcatgacaaatgtaaagttttctgactttggt

SEQ ID NO: 412296 - DNA, 434 bp, Oryza sativa
  unsure (1)..(434): unsure at all n locations
agggatcacttattcattatagttcttccatgctgctctaccacagcaaaacgtttcagacaccatcaaaccagacttaaggatacacattacaggtaaatagtacacaatgaaacgggacacgaccaaggaccagaccagacaaccatagcctccattgggngaagacaaatagngcagacttgtgaaccctagaacagcagcagcttccatggcctggaggacttactgggccaccacggagggcggagcaccaggtggngttgtggaactccttctggattgttgtaatccgcaagggttgcgggccatccctaaagctgcttaccaggcaaagatcagacgctgctggtccgggggggatgccctccttgtcctggatctttgcctttacgttgtcaatagcgttggacgacttaaccttaagggcaatg

SEQ ID NO: 412297 - DNA, 221 bp, Oryza sativa
cataatcgcagagaaaaaaaaaatctcccctcgaagcgaagcgtcgaatcgccttctcaagatgcagatctttgtgaagaccctcaccggcaagaccatcaccctcgaggttgagtccccggacaccatcgtcattgtcttggccacgatccaggacatggaggtcattctccctgtctagccactttttatctttgctggctagcagcttgtggtcgttc

SEQ ID NO: 412298 - DNA, 374 bp, Oryza sativa
aaacaaaatttcatgtcgataactcgagaattctgtcttattgaaaagagccaagggagcctcaggggggccattttcacaccgaagataagcaagaggaaaggctaggcgtaaaaggaagatttgggtagttccggggccagcaatgcggtttttacaaaggaaattgctcgctgttgcccacgagcaccaaaaagttttccaaggtttttttactggcccatttgctctccctattttaacattccgggttgcttgaaaatttcgaacatagttgaaccaatcttcgctggtgactcaacaacagtaaccccagcctttttgagagccttgattttgccttgggccgaacccttgccccctgacacaattgc

SEQ ID NO: 412299 - DNA, 348 bp, Oryza sativa
acctcacaagccaggtcgtgttgggatagtatctcgctctggtaccttgacatatgaagcggtgtttcaaacaacagccgtaggcttggggcagtcaacgtgtgttggcattggtggtgatcctttttttggtctctcttttgttgcctccttcaatcctgttctcttattttctttcttctctccttctctgtttatctttttactttttctctacttttcttcttctcttttatttcttcttttatctcctcttttcattctcccctctcatttttttcttccattcttcttttctcttcctatttctttcctctcttttcctttccctttctctttctctttttc

SEQ ID NO: 412300 - DNA, 410 bp, Oryza sativa
acctcggacgcgtgggtgagcccaagccacacgctaagtctgtgcctaagtctgagcccaagccagaaccaaagccagagccaaaacctgaaccaaaaccagagccaaaaccagagcctgaaccgaagcctgagccaaagtctgaaccaaaaccagagcccaaaccatatccagagtctaaaccggatcccaaaccagaacccaaaccacacccagaaccaaagtcagagcccaagccacagtcggagccaaaaccagagccgaagcctgaacctacaccagagtctaagcccgaaccaaaaccggagcctaaaccatacctagtgccaatgctttgaaccgaaacttaagcctaagccctgtgctaaaactagaagctccctttaagaaccacatgtttacttctatac

SEQ ID NO: 412301 - DNA, 483 bp, Oryza sativa
tacgctgagactagcttgcaactaggctcgatgcttttgagaggactgggtgtcatgtctgatgatgtatccttctttagtaagcttgtgagagactcaatggagttacaagctcaggaagcactcaacaacatcgaaaatcgagaaattgatatcatgaagccacttgagataagaatatcagacttggttgagcgcaatgggaatggttcaagaatgatagcccaggaggattcactaaggctaagtagtcgcccaaacataccactaattgaagcaactctagaggaccgaatacccgaaactacaggggaaaatgaccagactggatatgacttcaacaacatagattctgaagatggtgtcaaatattggcttctggaagcttgtgatgaccaaagccaatcctcccaattcagcaaggaaatgatcgaccatctgtatagcccactggtaagaaccaagaatctaacttccacttta

SEQ ID NO: 412302 - DNA, 104 bp, Oryza sativa
gtccatcatcaagagcaccgtgacggccgccgtgaacaactagccacgcatgggcgcgtctctgctcaggctgtactttcacgattgcttcgtccaaggttttg

SEQ ID NO: 412303 - DNA, 193 bp, Oryza sativa
tttcttgaatccagcagcagctcagccgccgtcgatggcgtacacgatcatggccccaacctcccgcgtcctcgccgccaagacccccttcctcggccatccccgaccctccaatgcccccctccgcgacatcgacgccgccgccaccggccgtatcaccatgagcacggagctgtggtactgtcctgtcagg

SEQ ID NO: 412304 - DNA, 80 bp, Oryza sativa
agaaaccatttaatttaacatacccaaactggttttatcacaatgttagcccgtgacaatgggaaaggaggaatctaggg

SEQ ID NO: 412305 - DNA, 537 bp, Oryza sativa
ttctatcaagctcaaggccgagtacaacaaggccattgttgactacaacaagggctagagcactgccaagaaggcacccgccaaggaggaagaggagtgactactagtacaagtttatcgaagcccttaacatcattcaaaattgtgaaatcgatattatgaattcacttgagattagaatattcttacttggttgagtttatattatttttttttgtatgttagtttttatttctttatttttctcttttactttacttattttatttattattttttcatctttatttttatctatttccctaattttcttctgttatttactattttttatttttttttcactcatctattatttatttttgtttctttttttttttttttttattcttttttttttttattttacatttttcttttatatatcttttatcatccactttctttttttttattcttttatatttattatttatctttattcttaattttctattatttttttatttttacaatctttttatttttatactatta

SEQ ID NO: 412306 - DNA, 162 bp, Oryza sativa
actgaagaaatctccccgtctccttctccttgcctcctccgctccttctcgcgccgccgccgccaagacgagtcgcgtcgcggctgaacaggggagggccgggcggcgatctccatctggcgagcagcggaggggagggatccttctctttctagttttttt

SEQ ID NO: 412307 - DNA, 285 bp, Oryza sativa
  unsure (1)..(285): unsure at all n locations
ggaaggttcacccatcatgcattcaggagtaccgattgattgttgtgtcctgaatttttgctagtatatgcatataagtagatactactccactacagtacagaggcagaggattgacattgactagcctagtccacttaanccgtctccttactactatcagaagaagctaatttaattaagtggagtcaaaagccaaaatgagggcgtggcgctgggcctcattggtcgtccgtttgtcggtcgggtgacgaaactttgcccggttccgggggttgatggcgg

SEQ ID NO: 412308 - DNA, 140 bp, Oryza sativa
actaacatatcgtattttgtagtaatttagcagctagctagtgcagctgcacgctattagcgactgcatgctttgatcgatccatctagctaattgttgaatccatccaagctctaatggctctgcagcagagcatggtc

SEQ ID NO: 412309 - DNA, 338 bp, Oryza sativa
ttatattctcgatctgcacatgggcagccactcatatcttggtgcacttgcaactgcccccattattccggctgctgcagagaaaggctggagtgagtctgcaagtcctaatgtgagaggccctactgcacttgttttcaccttctcacaaatggaagacagactcaaggctgcctacaaggccaccacagaaggtaagttcccagaagccctgaggcagttccttaacatactgcataccatccctcttatcgtggtagactcgaggagggaagaggattaagataatgactttatcttttatgctatagattcttctttataattatattataatc

SEQ ID NO: 412310 - DNA, 379 bp, Oryza sativa
gggcccactaagattcattcattcattcatttgatcaaagcaaacgagacgagctttcttcttgcgatcaaaaacacagatgggcaaccacacagttaacacaaactagatagttccacacaaaactaacgatgataacgatcggatgatgatcgatggtagctcgattagatagtatagataaccttggccatgagggccccaccggtccagttcctccagttcccgtcggaagttgccgccgccgggggttgccgtaagccgccgcccgtagccgccggcaccacggccgccaccgtagccaccgtcaccgcccgtagccgccttcacggcgcttggccgttgccaccgcccacgtcaccaccaccgtagccgccgc

SEQ ID NO: 412311 - DNA, 162 bp, Oryza sativa
gatgatcgcggggccgtgcaaggcgacgaacccgatctaccggtgctggaggtgccgcgcccactgggtgacggacaggaagcggctggcgcggtgcgcgcaggggttcggccggaacaccaccggagggctggccgttaagctctacctggtgactgactg

SEQ ID NO: 412312 - DNA, 432 bp, Oryza sativa
agcaatgtaaatactcgcattccaaaacagccgatggacaataatcggactcagagcatcagttttaaccgaacagaaataaacgagagtattaaacgactgacatagtgcacattgcgagcagatattaacggtccatgaaacgagagccatgcccgtgggcaaaacttaacaaatactagaactagatatctcaactgcagacatgcaaaccaccatttgaaccgaggctcactttttcttggcggcagccttggtcaccttggcaccgggttgggtccttcttctccacgttcttgatgacgccaacagccaccgtttgcctcatgtcacgcaccgcaaaacgaccaagaggagggtactcagagaaggtctccacaaccatgggcttggtaggaatcatcttgaccataccagcctcaccgttcttca

SEQ ID NO: 412313 - DNA, 306 bp, Oryza sativa
ttcgccgccgcctcctcctcctctcgccttctcccgtcttctccttcgagttagctacctccttattcaaccatgggtaaggagaagacgcacatcaacatcgtggtcattggccacgtcgactccggcaagtcgaccaccacgggccatctgatttacaagcttggaggtatcgacaagcgtgtgatcgagaggttcgagaaggaagccgctgagatgaacaagaggtccttcaagtacgcgtgggtgctcgacaagctcaaggccgagcgtgagagaggtatcaccatcgatatcgccctgtgg

SEQ ID NO: 412314 - DNA, 451 bp, Oryza sativa
tcttcgcaatctcgagcatctacatcgaagagagcaatgactttgcacactggaaacgtaaaggggagggaagcagtactacagcgtaacggtgctgacgaggacggcggacggcgacgagggcggcaagcaccagctgatcacgggcaccgtcaacgacggcaagctgtacatgtgcaaggcgcaggccggcgacaagaggtggttcaagggcgccaggaagttcgtcgagagcgcagccagctccttcagcgtcgcatgatcgcggaaatctatatctcagcttctctttaatccctagcgaatcaaaatcaaatcaatcgagttcgttgctcagagagatgcagtgcacgcatgtgtgtgtgcgtgtgtgtttttttgtttgtacatgttaatcaagaacatgttatttgtgagggtatattccttcttttttctatcgttttaagga

SEQ ID NO: 412315 - DNA, 221 bp, Oryza sativa
cacagaaaccaaggcccaaaactaccatgtaaacaaacataataatgtgtccgatcttgctcaattacaacatcatcaacatcaaacacagagaaacgaggggttcggaagccatacattatcatcttgggcaagctgttttggccctgaatacttggaggcctaggacaaggcaacctccttcaaacctaaaagtggccaaatttaccaaaatattccca

SEQ ID NO: 412316 - DNA, 257 bp, Oryza sativa
tcgtaccgaagggcagctgcatcaaatcttggaaagtttgcagccacagttgaacagaactatctaaagacagaagtcatgtcgatatttgatgatctaacccaagatgatcaagattccgtacgcttgttggcagttgaaggctgtgctgctcttgggaaattgttggaaccacaagattgcgtagcacatatccttccagttattgtcaatttcttccaggacaaatcatggcgagttcgttatatggttgcctc

SEQ ID NO: 412317 - DNA, 491 bp, Oryza sativa
ttccaacgctcagcagcagcagccgcctccctccccagctcagctcagctcccccccgcatggaggcgccgccggggccggagcccatggagctggacgcgccaccgccccccgccgccgtggcggcggcggcggcgaccgccggcatcagcgagaagaagaaggaggagggcgggggcgacgccgtgacgggtcacatcatctccaccaccatcggcggcaagaacggcgagccgaagcggacaattagttatatggcggagcgagttgtaggaactggttctttcgggattgtgttccaggctaagtgcttggagacgggggaaacggtggccatcaagaaggtgttgcaggaccggcgttacaagaaccgtgaactgcagcttatgcgcgcaatgggacaccccaatgtcatctgcctgaagcactgcttctttctaaccacaagcagggatgagctgctcctgaatcttgtatggagtacgttcctg

SEQ ID NO: 412318 - DNA, 472 bp, Oryza sativa
  unsure (1)..(472): unsure at all n locations
ttgttatcctctcctacaaccagctcaccggcccgatcccgcgcgacgacgcgcaggacgagatcaacaccgtcgacctctcgcacaaccgcctcaccggcgacgcctccttcctcttcgccgccggccggcccatcggcaaggtggacctctcgtggaacgacctcgacttcgacctcagcaagctcgtcttcccgccggagctcacctacctggacctcagccacaaccgcatcaggggcaccgtgccacgctccctcgccgcgctctccacgctgcagacgctggacctcagctacaaccgcctctgcggcccgctcccgaggctgcacggcgtcatccgccacggctgcaagccgtacgagcacaaccagtgcgccggcggcgccccgctcggcgggggccaccaatcgtgagcatccatccatccatcaccgncggcaagctgatgctgccacgtaaggtggagccc

SEQ ID NO: 412319 - DNA, 392 bp, Oryza sativa
  unsure (1)..(392): unsure at all n locations
attggaagcccagcaagaactttatataaaggtgatcactaataacaatgatgataaaaccacatgtggaaaggaggacgatgatccacaggatgggcacaagtaccgtaggtacggccattattggaggattacacaangagcacccaaacgcactcacccaaaagacgaagaaaaagggagctaatctaaatgnngcagatgagcaatgttagttagtagtggttagcatggccaaccaaatcgaaattggaatgagaatcttctttttggcgtgatttctcctttttttttcctctttccttttnttttttactttttcccaagcacaaatgccaattcaccaaaatcgtcccgatcaatgggagcaaccggagccgacacggcgagct

SEQ ID NO: 412320 - DNA, 302 bp, Oryza sativa
tgaccgccatggcttctctcaccgatctcgtcaacctcaacctctccgacaccacggagaagatcatcgccgagtacatatggatcggtggatctggcatggatctcaggagcaaggctaggactctctccggccctgtgactgatcccagcaagctgcccaagtggaactacgatggctccagcaccggccaggcccccggcgaggacagtgaggtcatcctgtacccacaggctatcttcaaggacccattcaggaagggaaacaacatccttgtcatgtgcgattgctacacgccagcc

SEQ ID NO: 412321 - DNA, 282 bp, Oryza sativa
tcgtaacaatgtcggcctactgcggcaagtacaaagatgagctcataaaaaatgctgcctacattggcaccccgggcaagggtatcctcgccgcggacgagtccactggcaccatcggcaagcgcttcgccagcatcaatgttgagaacgtcgaggataaccgccgtgccctccgcgagctcctcttctgcacccctggcgccctccagtacatcagcggcgtgatcctcttcgacgagaccctgtaccagaagaccaaggatggcaagcccttcgccgatg

SEQ ID NO: 412322 - DNA, 428 bp, Oryza sativa
  unsure (1)..(428): unsure at all n locations
aggataagataccatgctccattacatcctaaataacccaccattacaaaattcagtctctcagaaaattgcaactcaaaggatgatcagacacgggcagacaagaaacagcacttcatgatactaggggcaagatagggagtttacgcatacctttgtggatggtaccccttgttcgctcacgtagataccattccaagaaacttcctgatataccttggtctttcacggggncattttctggttgatgaggggctgcctgagcgagagacgagctcgatgttcgtttgccgttcgaggnacgagcctcgtccttcaccttctccgaccgcaagatggtcacccccttgagcatgtcaacctttctcacctttttttcgcccaagaagttcctgatctcgatggcggtgttggagttggtgatggag

SEQ ID NO: 412323 - DNA, 566 bp, Oryza sativa
tacaagcccaagtcgcgtcgcaccgaagcagagtagagaaggagaggagcttcctctccttcatccgttcgatcgagtgatccctactctttttgttttcttcacctctttcttttttttccctactcttaattttccttctcttttcttttttatttttattttttattcttttttttcttcttctcttcctctctcttttttcttctcattttcttctttttttctcttctcttctttctctcttttcttttttttctctttttttctctttttttcttctctcttttttctcttattctcctttctctctttctctccttttctctttttatatctacttttttttactttttctctttctcttttccatatattctctcttctttttctatcttctttctcttttctctttttctttcacactttcttcttttctcacctatttttcttttctctcttttctacctttattttttccttctctttcttcactttacatctacctttttttttctttcttcttttatctctatcttcctcttttatccttctcttctattctt

SEQ ID NO: 412324 - DNA, 334 bp, Oryza sativa
caagaagcctgctcaaagctcaggaaacactatatttattaaaggctttgatacttctcttgacatacaccagatccggaattcacttgaagaacattttggctcgtgtggagagattacacgggtttcaattccaaaggattatgaaaccggtgcaagcaaagggatggcgtacatggattttgcggacaacggttccttgtcgaaagcatacgaactgaatggatctgacctcggtggatacagcttgtatgttgatgaagcgaggcctaggcccgataacaacagagagggtggcttcagcggtggaagagactttaacagcagcgggaga

SEQ ID NO: 412325 - DNA, 227 bp, Oryza sativa
gctgagtggaaaagcgaagattgcagagcataagctcacaggacacagagtggctataaagatcctgaaccggcggcaaatgagaaatatggaaatggaggagaaagcaaagagagaaatcaagatactgagattgttcattcatccccatatcatacgccttttatgaggatatatacactctcacggatatataatgtcgagattcatctttcctaactattact

SEQ ID NO: 412326 - DNA, 251 bp, Oryza sativa
atccggcaagcatggggttcaattatcttcattgccagaaagctgctattagtacatcaaacacaggagttgaggaggcgatgaattggcttctctcacacatggatgatccagatatcaacgatccaatatctaaagattcacaggctgctgaacaaactgttgatgaaactagcgttcaaactcttgtttccttcggatttcaagaagatgctgctcgataggccttgactgcttttggcagaaatttt

SEQ ID NO: 412327 - DNA, 424 bp, Oryza sativa
  unsure (1)..(424): unsure at all n locations
atgaaaagttcattacgacaattatgactaattggcagcattccaaaatattcctcaacgttgacactccatgccacacaatacaatcgaaatttctagaataggcaacatttccgagcatctcggagacaagaccaacatcaccactcgaatgacactgaggggngaaatatacaggnggaagaagcaaaaatgctatctttaggtagttcgtttgacgacagacaagttaagtgtagtgcacctgttgtagcactcgcttactcccccttgtgctccttatctttcagagcatttcctgtgatttacgaacaatgcgtctaacctttttcttgaaatcgtcccttttttctctccaatccttagccgcttcaatatttgctggagactcatcatttggactagagaggcatcgaaatgatgc

SEQ ID NO: 412328 - DNA, 192 bp, Oryza sativa
ctcgcctccacaaataaagctcgtcccgaggaagggcggtgacccaccccccccaatcgccaaaaccctaactccgatccgatcgagctctgcttcccatggcgactgccgcgagccaggcgagcctcctgctccagaagcagctcaaagatctcgcgaagaaccccgtggatgggttctcggcggggcttg

SEQ ID NO: 412329 - DNA, 443 bp, Oryza sativa
  unsure (1)..(443): unsure at all n locations
aaacggaacgaaagaatgggctgtgacaaaaattaaacacgatatatgaacttggtcgtaatacaaaaagtacagcagcctggtgtctcctagatcctcaagcacaaggaacaaaagcacaaaccaaatgacacctcacagctgcgttgatctatgaatgacctagcaacggggtaaaatcagctatatatngccccaagcataggggnaggnatcaccaactgggcagtaaaggagcaaatattgagtatgataagtagatgcatcaggactatttggaccatgcaaccgcatcaatttctgcttgagcactccgatatagctccagcctcttcgcaagattagtcctccgttccatgacggccgggtcttcatcaagaagcttagaaagttgtttaatctctcttgctcccaattcagtaaagaagtgatcgagcagtgag

SEQ ID NO: 412330 - DNA, 437 bp, Oryza sativa
aaaacccgcgtcctcgctgaggagtgcctacgtactttcttcatagaagaaagatcagggttgctttcgtagttctttcgaaatgatttacggtcattcttctttattttattgaatacattacagctagtaccggatttttccaattttttagaaaggtttatccagtccctgtaagggtatacttctttacccttattgaggatttccatgagcgactaagttggtgccttttgcttcatttccagaatccatcccggtcccgggctctaattgggccatgcgcatcgataatatcctttcttaataaaaatgattgaggtctatctcatcgtccgcttacttccctttggggagttcaagtttcaagtctgcttcttataacatcatgttgaattgggtggtttgatggcccggcattttcttctccaagttga

SEQ ID NO: 412331 - DNA, 83 bp, Oryza sativa
gcctcggtattctatttcgtctgtgcgagcattaaaaccatccatttccgacgtcaagatcaataggaagaaaagggagtcat

SEQ ID NO: 412332 - DNA, 455 bp, Oryza sativa
  unsure (1)..(455): unsure at all n locations
cacaagcaaaaaagtagactcaggtccatatcatcagcatcgttacaacttacaagtaggtagattggaaaacaaaatgcaactcattatcccaactagcattaacagagggtggtgggttcctgatgaacaccgtccacgttttattctcagcatagtacaaagcataccggtattctccggctcggtcggtccatgngaataccatggtcaagtcaatataggattnctacttgggtcttggcccatgttggcggattcaggttcgaattgacacggtttgcttgtaaccccactcgtttgtcgttacccaggcgacaaggcttgacaaagtttatcgttaagagccaattccagccttggcgtccgaagtatgcttgacctgctgtcaccaacaaagtcagtagaaaccaggtcttcctcaacatatcctatgattcccttgagctttccct

SEQ ID NO: 412333 - DNA, 265 bp, Oryza sativa
ggagaaagtcaaggttagataaatattgcttcacttgtacaaagtacagataaaaatacattgatacatgacacggagagagccatgcacaccaattatttggacacacagagggcaaggctgcagagaaaatcaagccaacacaagctgaactcacgtgacccacctgtttagtgcttttactggttcgaggaccggtagacttcttggtgaaaaacagccaacacacatcgcatgccagaagtaagcacaagatttatttaca

SEQ ID NO: 412334 - DNA, 162 bp, Oryza sativa
aaacgaataaaatcattattgcaaaaacatgattttcttcttaatctttttagagtccacaacaccaactggatcattatctcggcccactaaacccatgtttcccccaactccaaagacaaacgtaacttggccttggccactaaattccattccaactca

SEQ ID NO: 412335 - DNA, 72 bp, Oryza sativa
gtacaaagtactgataaaaatacagtgaaacatgacacggagagaggcatgcacaccaattatttggacaca

SEQ ID NO: 412336 - DNA, 392 bp, Oryza sativa
  unsure (1)..(392): unsure at all n locations
agtaatgcttacctttacttcaatcacagaattttatatgtcaatcacactttcaggttacagacacatttcaataatcacatggatagtacataatgtatgttccaaccgggaaaccttatttccattgttttttcagatggacaaacatgatgtggctatangctatagtccacacaacaacacacacaagcaatcaagcacattcccaggtgcccggtgacgatgaaattaggaggctacttctgcttctcatgtgcctcccttctctgctgggcaattcgactcgaataggcctcccatcgaagcagcggcgaacagcctccttcctgaggaatccttcctcatctttcgcaagcacgtagagcaatatccactcccccttactcgcg

SEQ ID NO: 412337 - DNA, 151 bp, Oryza sativa
atatgttaattacacttttaggttacagacacattttaataaccacatggatagaacatagggtaaggtccaaccggagaaacccttattttccattgtctttttcagatggtacaaacagtgatagtggactataagctatagtttcaca

SEQ ID NO: 412338 - DNA, 280 bp, Oryza sativa
  unsure (1)..(280): unsure at all n locations
aggatcaaaacatttctattaccacaactttttaaggatggaattgagtagcaatactttcaccccaaaatacagtttagcgacaatatcttagaaaagccgcttgctttgccgccatggtctggtcaagtcttgagcagagcagcttacacaaagaacacgagnatcactataaagccaaacggccaacgtaaacgatagaaaattacagggttctttttttggtcttgaagattacaccgaagccggttttcgttttttctttttattttttttagtc

SEQ ID NO: 412339 - DNA, 392 bp, Oryza sativa
  unsure (1)..(392): unsure at all n locations
acatgataaaattattattgtcttgaattatgtaaacgatgataacaaatccttttccagctacaaaagaaccagcataacaacaaagaattataaagttgcttaagtaatctctcccttcatctcaaaaagagctatatctagggggtcctaggtccacagcaacactttcacttaaagggtacttttccatctctgcgacacacaagncttcccaggattcaatctacttggcccttgccgtttctcgacagcaagcagttcgaggggtttcagcttcatcccaggcccttgattccaggtgtaccatgngcattggcaagccttgacgaagttaggggttcgatcttgccgagccttcttccctgacctgcttggcgagggagaggtag

SEQ ID NO: 412340 - DNA, 497 bp, Oryza sativa
acgcggtctccttttccgtctccggcgatggccaccaaggccgggcgtcgctccccgtcgctctcctcctcctcctcaacatcctactcgcgctcccccgcatcgccctcctcctccccgtcgcgcagccgctcccctccccgccccgcggggggggcccgctcgccttcgccgtcgccgccaccgcctcctcccaggaaagcgtctccgccccctgagtccaccgtcctccatgttgaccatctctccaggaacgtcaatgaggatcatctcaaggagatttttgaaaattatggcgaagtcgtcaatgtggagctctccatggatagggtggtcaatcttccccgtgggtatggatatgttgagttcaagaatagagctgatgcagagaaggctcttccttacttggatggtggccaaattgatggaaatgttgttaaagtcaggattcgcgccttcaccacagcaggcaagagctgctgcttctccaaaagctc

SEQ ID NO: 412341 - DNA, 278 bp, Oryza sativa
gcccggactgacttgctggacccacccacgcgaccttgttcacccagatgacggagccatagactgggaggtctttgttgagcgtcaggggcggaaccatggccgccgcgctcacccgcccgcctccaggcacggtccagtgcttcgggcgcaagaagacggcgggtgccgtttcctactgcaagccggggcgcgggctggtcaaggtgaacggcgttccgatcgagcttatcaggccggagatgctccggcttaagtgcgtcgcggcctatccctgc

SEQ ID NO: 412342 - DNA, 449 bp, Oryza sativa
atttttgtatgtggattttgctgaatactaccgggggggaaaattatttcagcagacccaagaaatggttgatatcctgagcagaccaagaagagaatcaaaagaacttacttttgccaccaagtattcccaaccattctttgctcaatatgctgcttgcttatggaagcagaacctgtcgtactggagaaatcctcaatacactgcggtccgattcttctacaccgtcatcatttccttgatgttcgggacaatctgctggaaattttgggtctcgaagggagacccaacatgacatattcaatgccatgggtgccatgtacgcagcagtactcttcataggaatcactaacgccacctctggtaacctgggatttccatcgaaagagtttgcttgtacagaaagagggcagctgggatgtcctcggcactgccttttgaattttccc

SEQ ID NO: 412343 - DNA, 485 bp, Oryza sativa
ccttattgtgttacagttcttgatggacctcaggagggcgcatatgaatgggttaccatcaattatctgctggggaaattgggaaagacttacgcagacacagttggagtggttgatcttggaggtggatctgtgcagatggcatatgcaattgcagagaaggatgcagtgaaggctcctaaaccatcagagggtgaagattcatatgtgaagaaactgtttcttaaaggaacaacatattatctttatgttcacagctatttgcattatgggttgctggctgctagagcagagatcttaaaagccggcaatggcaaaggttacagctactggacattggaggggcatcaagggcaatacaaatatggcaatggcaaatttgaagcgtcggcttcaccatttggtgctagttattcaaaatgcagggatgatgtagtgaaagctcttaaaggtgaccaagcatgcactcacatgaaaagttcttt

SEQ ID NO: 412344 - DNA, 243 bp, Oryza sativa
gatcataaggcaaagctgcgagcgccagatcatcttattactacagcttcttggcgatatgctacagtagcttcttcctcccttgcaaaaagaaacccaaaccttatctacaacgcaacacacacaccggacacagagcgctcgatcgatcgaagcagacgagacgacgatggcgaactactactaggtaagcgacaacacctaggctatacagggatacagcgcgcggcggcgacgggcggc

SEQ ID NO: 412345 - DNA, 148 bp, Oryza sativa
tggtcgcgtgggctctttttccactacgcactaggggtagcactctggtattctgccatggcgactgcgaccgaggaggttgccgctgcggatgctgcccgcggcgaggcgccgccgtcgtcggcgacagcagtggaagaggaggcta

SEQ ID NO: 412346 - DNA, 275 bp, Oryza sativa
ttctgaccaagctgcctgagccctagccggcgcggccgtcgtcgagcgccaccaccgcaaccatggccgccgcgctcacccgcccgcctccaggcacggtccagtgcttcgggcgcaagaagacggcggtggccgtctcctactgcaagccggggcgcgggctgatcaaggtgaacggtgtcccgatcgagctgatcaggccggagatgctccgcctcaaggcggtcgagtccatcctgctcgctggggccctcgctcttcaatgtcatcaatat

SEQ ID NO: 412347 - DNA, 120 bp, Oryza sativa
tcttaaaaagaaagaaattaaaaagaaaatcacggcgggtgagcttgcagagacagcgagagtggtgagagttgctgccgccgcggcggtgctcgtgctggcggcggcggctgcggcggc

SEQ ID NO: 412348 - DNA, 426 bp, Oryza sativa
atacgaaaaagagctatatatttatgtataatccacaacgtacacgcacgtagtacaagtagtactccatgtacatgcagaagtacatatgcatatggtacaaaaactgatctctagctctcaggtacgtatagtcgatcgacgaataaattaaggaaacagatagcgtagtgaccggccgggcgatcaaccatgtatgcatggcgatggatcgacctagctagctagctcttattttattcagcataaacacagataacacaagatacaaagcgtgagacgacagctgcatctcggccggcgctgcatgtcatcctccggtagcgatcgatcggattagttcacgctggagcagtcgatggaggggctgatggtgtaggggatgctgacgccgcacctggaggggatgctggcggcatagccggc

SEQ ID NO: 412349 - DNA, 209 bp, Oryza sativa
ttgtttttatgcaaacgagcaccacacaccagcggcggggagtagtcgatcgatcgtgagcacacacgaccaagatcgagatggcccgtgcacagctggtgttggtcggcctcgtggcagcggctctgctcctggcgggcccacacaccaccatggccgccatcagctgcggccaggtcaactccgccgtgtcgccctgcctcagctac

SEQ ID NO: 412350 - DNA, 365 bp, Oryza sativa
cccttttctagcactcaccaagtttaatttggagcacacatttcagctcaccactgctagcttgggaagaggaggaggagcttgagcttggagagagacaacaatggcggctcaggctcttctctctgggaggcagctgctggggaggccattgcaatcttcagtctccaggtcttcttcctccaggaaggcacccttcatggtcagggcagaggccactccccctgccaagcaaggtgctgacaggcagctgtggttcgcatccaagcagtccctgagctacctggatggcacgccttcgggagacttcgggttcgacccgctggggctatcggacccggaggggaccggtgggttcattgagc

SEQ ID NO: 412351 - DNA, 289 bp, Oryza sativa
agaatggagaaagtcaaggttcgataaatattgcttcacttgtacaaagtacagataaaaatacattgatacatgacacggagagagccatgcacaccacttatttggacacacagagggcaaggctgcagagaaaatcaagcaacacaagctgaactcacggccccacctgtcagcctctcactggtcgaggccggagactcttgtgaaaaacagcaacaccacgcatgcagaagaagacaaattattacacacacaaatggacgacacggcggccggtgacgtaccg

SEQ ID NO: 412352 - DNA, 249 bp, Oryza sativa
cttattgttactcccatctcagtctcctaattggcatcggtagcttctagctagcttaattaattaattagccatggcggaggagaagcaccacccaccacctgtgcgcaccaacaagaaggacgactagccgctcaccggaggagacatactaccgccagggcagatacacctggcagacggttaccaccaacgtggcttacctgagctggccctagttcttgaggcgctcctcggtggcgctttcag

SEQ ID NO: 412353 - DNA, 420 bp, Oryza sativa
tttttcctaaagtagattgaagaatgctagtcttcactaactttggttttagtggggcatggccattatggttatgatctttagtggtccattaccaaatcaatgttggggtggatgaatgatagttgtctcatgtttagtcgttattcagtgtaattgcaatagccagatgacaacttaatattgattttttttccgatgtgcttattcatttgaatatctttatgcagcttgatgcatgtgcacatcctttctttgatgagctgcgagagccgaatgcacgcttgccaaacggacgtccatttccaccactattcaacttcaaacacgaactagcaaattcttctcaagagctcatcagcaggctcataccagaacatgttcgacggcaagctacccacaacttcttcaatactggga

SEQ ID NO: 412354 - DNA, 251 bp, Oryza sativa
tcttgatatcaaactactgccctcactgaggataaacctgctgatgatggctacaactggcggaagtatggtcagaaggcagttaagggtggggagtttcctatagttattttatttttatcctttttattttttctcttttatatattagttcttttttttttttattcatttatattttctaacattttttcctattttattattctttctttttttattttttttacatactctctttcattttcttt

SEQ ID NO: 412355 - DNA, 375 bp, Oryza sativa
  unsure (1)..(375): unsure at all n locations
gtaccaccagtaactaacatgcaacaantcatcattctcattggttcaagaagatttcaaaacatttatccggtccggttcaatccattgggggcaacggaaggnaaaaaattttttggcccccaggtaaccaaccggcaaccccaggnaagtattggggggaagggaaaccattccttgggaccttccttggttccttcctctcttaagttgaaaagcttaaacaggtaagggctaaggtaacaactcccaagaggccaaagataagacaacagcaatcctgaaacacatgagcccaaaaagaacgtgcggcgatcccaagccaagtacactggcagacgtattggatgtccgtcgaagatttagcgctgtgcc

SEQ ID NO: 412356 - DNA, 159 bp, Oryza sativa
ttgttatgttcggacccttggacccaacctatggtacggttataatgacgccgggatcggtgacaccattgtagaccccctcaaggacacattaggcccgttgcttaacattcttattatagcttatggccgtcaagtcccttgtgtttgcccctttct

SEQ ID NO: 412357 - DNA, 125 bp, Oryza sativa
caaaaccgaccagactaaactcaaagtgaaccctatgaaggtaaaatgtttgcgaataacgcctccgtctattacaatgtttggagataaactttttcaccacggggctaaaggggcttacacaa

SEQ ID NO: 412358 - DNA, 395 bp, Oryza sativa
cacccgtctaactttgtcaccaatcttcatcacgcccccaacttttgcgtaatgagcgccaccgccctccatctcaaatactttaaggacaacaatggatagagcatccctcctttcaacacctccatgaacgttcagctccaggggctcgacaaggtcaagcaaaccatctgcttctcctctaaagagtgcagggaggtcttgtccaacgccctgtgcccatttggctaattctatagacagcgactacaccataaggagctacggacccagggccttgtcaatggtggaatcaacgttccaatgatgtcggcctctccaatttttgctaatgctccagctgagaaaggtggcaaaaactccatgattgatttcctcatgggtggaggtgtcag

SEQ ID NO: 412359 - DNA, 522 bp, Oryza sativa
ccctgctttaccactgaaccagcaggaagatcttatagtgtggatgcgtacggctgctcttccccaatttcgaaagctctatggtgtcattgaagaggatctacaggctgatgaaatcattacgatgcacatagcaaacaattacaatacctacagttttggcggcaagaaaagcctaattcttacaacatcaacctggctaggtggcaagaatgactttcttggatacgcatatcttatcactggctccttgagccttttcttaaccattctctttgctctgattcacgtgaaaaatccaaggccacacggtgatgccaattacctatcatggaataggccaaacagcaatagctaagctgcctacataactgtacgatatgtaaggtaaacatttgacaaatacagtgatgttgtttccctgtaaaaccaagactattcttctttcatatgataacatagagttcagactgaattttctggcagcgcaaatagaacacccaattttgtcattgccttttc

SEQ ID NO: 412360 - DNA, 425 bp, Oryza sativa
gacagcaactcaataatctttcgatatttcaccgagggtaatgtatggtaggaaaatcgccagacataacagagccggccagactcaactcaaactcaaccctatgatggtaaactgtttgcgattaacgcctccgcctatgacaatgtttggagataaacgcttccaccaaaaaacgaatgtcggggagtgttctcccctacaagaattattattgttttcaatgttaaaaaggcaaaattcaccagatcccgttagtgcaggaccaggaataaacacttgttcgtcatcattttctgccagtttaggcaccgcccgagccgtacttctttccaaagaagaggatctgcagctggtcatagcctgagagcacaccagcaccagcaatggcacgtaggatgttggcaccagcacccttgaacagt

SEQ ID NO: 412361 - DNA, 498 bp, Oryza sativa
gctctctcctctctctccctcttccgccgccgcgcttggggaaggaaggagaaagcaagccatcggcccccgtctacgcctccgaagggacattgttgctagttggtgatggctgagcaggctaatcaaccgactgtccttcagaagttcggtggccagttccaccttggctccagcttttctgaaggtgtacgggctcgcaacatctgcccatctgtctcatcctatgacaggcgctttaccacaaggagctacatgacccagggccttgtcaatggtggcatcaacgtcccaatgatgtcgtcctctccaatttttgctaatgctccagctgagaaaggtggcaaaaacttcatgattgatttcctcatgggtgggagtgtcagcccgcagtttcaaagactgctgctgctccgattgagcgtgtgaagctgcttattcagaaccaggatgaaatgatcaaggctggtaggctctcagagccatacaagggtattg

SEQ ID NO: 412362 - DNA, 435 bp, Oryza sativa
cactgagcttatcattggagcggcctcagctgaggtcccaaccagctgcagcaggagcagcagcaggggcagcctcagttcaccgcccggcgccgccgcatccatctgcattgctcgctcggaggcctcagtaatcattgttggagaaaatggttgcagaggcctttacagtagatttgaatgaacctcttgtatttcaggttggacatttaggtgagcagtatcaggaatgggttcaccaaccaattgttagcaaggaggggccaagactttttgccaacgatgtcttagagttcttaacacgcacggaatggtgggcaattcctcttatctggttgcctggtgattgtgtgggggcctgactaaatccagtcgaaatggggacacacactttcagaagtagctctgatgggttgtgtttggaatatgcctatg

SEQ ID NO: 412363 - DNA, 140 bp, Oryza sativa
gtagtgactgcagaaacgagagctagctagccagagggtgcaagaagattctgcacccatagatcgactaccatggccacaaacccaggactcttgacggggtggccattgaagaagcttgtgagctctaaaacctgttg

SEQ ID NO: 412364 - DNA, 336 bp, Oryza sativa
ttgctctactgcgaccaaaaatcccccgctcgctggggcgctccggcgatcccctcccccggcagcggaggcgaagctcactgtcgcaatcggcgcagctgagcggagcccttgcccgccatgacggagtactgggtgagccaaggaaacaaatggtgtgacttctgtaagatttacatagctaataacccgctaagcattagaacacatgaaattggtaagcgccacatggacaatgtcactaaaagattggcaaccatgcaaaaggagggcgctgccatagaaaaggagctgcactaagcagtccggtccctccagcaaatagaagctatagct

SEQ ID NO: 412365 - DNA, 445 bp, Oryza sativa
ttattcgtagacggcgttcatgccaaaggaggaatatttttctgtcagatttggcacgtaggaagagtctctaataacacttttcagcctaatgggcaggctccaatttcgagcaccaataagtcactaaaacctgcagtaagagccaacggcatagatgtggctactttctcaactcctaggcgattagagactgatgagatcccttttgtcgtgaatgattacagggttgctgctagaaatgcaattgaagcaggatttgatggtgttgaaatccatggagctcatggttatttgatcgatcagtttctaaaagaccaagtcaatgatcgttctgacaaatatggtgggagcttagagaatcgctgccggtttgcgctagaagtggtccaagccgtaactgatgaaattggagcttacaaggctgggataaggctgccaccct

SEQ ID NO: 412366 - DNA, 485 bp, Oryza sativa
ccgactgcgaccaaaaatcccccgctcgcttggccgctccggcgatcccctcccccggcagcggaggcgaagctcactgtcgcaatcggcgcagctgagcggagcccttgcccgccatgacggagtactgggtgagccaaggaaacaaatggtgtgacttctgtaagatttacatagctaataacccgctaagcatcagaacacatgaaattggtaagcgccacaaggacaatgtcactaaaagattggcaaccatgcaaaaggaagggtgctgccaaagaaaaggagcagcagcaagcagcccgggccctccagcaaatagaagctaaagctaaaaagagctaccaaaaagatttagagaacagtcaaaggaatgtgggacggtgacacttctgcggcacctggagatggatggggaattccgactctactccaggatactatttctgacacacttactggactttttttttgactcaaatttc

SEQ ID NO: 412367 - DNA, 139 bp, Oryza sativa
cactaactcagatggtcaagcctcgtgagaggaagtccaggtatgatgatgctggcatgactgaacccaagggaaccttgttccccatgtgtggcatgaaccttgtttttacccttatctaattgtcctgcaaattact

SEQ ID NO: 412368 - DNA, 497 bp, Oryza sativa
gtggctcttccgacgggagcatctctgtcatgaccatgcgcccggatggaggatgggactccacaacaattgagcaagcacaccctgttggggtgatggcagtctcatgggctccagcaaccgcactcggttccattgttggctcaggggaacttgtccagaagctcgtctctggtggcttcgactgtgttgtcaaggtgtgggcttttgtcaatggcagctggaagctggatagcgttctgccctccgacatgcacacggactgcgttagagatgtatcctgggcacctgttttgggcctcgcaaagtttacaatcgccagtgcctctgaagacggtaaggttgtcatctggaccaaggggaaagagggcgacaaatgggaagggaaggtgatgcatgacttcgaggctccggcatggagggtgtcctggtcactgaccggaaacatactgtccgtggcggcccgctccggcgatattacactgtggaaggaggca

SEQ ID NO: 412369 - DNA, 409 bp, Oryza sativa
gcaaaggttattaaatacaataacaccatttagcaaccaaagcacgactatcaaaattacatgataaaattattattgtcttgaattatgtaaacgatgataacaaatccttttccagctacaaaagaaccagcataacaacaaagaattataaagttgcttaagtaatctctcccttcatctcaaaaagagctatatctagggggcctaggccacagcaacactttcacttaaagggtactttccatcctgcgacacacaagctcccaggatcaatctacttggccttgccgttctcgacagcagcagtcgaggggttcagctcatcccaggcctcgatccaggtgaccatggcatcggcaagcttgacgaagtaggggtcgatcttgccgagcttctccctgacctg

SEQ ID NO: 412370 - DNA, 395 bp, Oryza sativa
catcattatctttctccagccatcacaaagcaaattaatatcgttccaaacatttaaggagctcatgaatccaataatccggaggtttttttaaaaggggactcattctcaacattccattaacaagggcaaacgattagtttgttttttccgacacccaacatttagaccattaacgaggttcaactgacaaccaattagacttagaccaaaaatacccgcgggactgcatagataaaacattcagtgttcgagcagaaggaaccgttttcagcacttgacctccttcagcccatgagagaagtaaaggaaggttgggttcggtggctccgtccttgtagtaggcaaacaccaagccgccatcatcatgcatgcttttaccaacaaagaactga

SEQ ID NO: 412371 - DNA, 111 bp, Oryza sativa
cgcgccgttactcccccctcgccgagagagctctagggtttccgctgccgaatttttttttaattcggggggagagatttgaagaggcggcaccatgttggtctaccagga

SEQ ID NO: 412372 - DNA, 328 bp, Oryza sativa
acgcgctctattaccagcagctcaagcagcaacagttcaaacggaggaagatctcatcgccatgaccaccggcaatggcgacgcaccggtgatcaagaacgcccacagcgacattgacagcaccaacaagacgctgttcaagagcgacgccctgtacaagtatgtcctggacacgacggtgctgtccacgggagccggagtgcatgctcgatctgcgcctcatcacggacaagtaccagtgggggttcatgcattcgtcggcggatgaggcgcacctgctggggatgctgctgaagatggccggagcgaagaggacaatcgaggcggg

SEQ ID NO: 412373 - DNA, 140 bp, Oryza sativa
ggttaactagtcaaagccggtctgtcattgctggagaaatggattactgatgccacggatgagtttgcaggaacatctatgcatgagctaaattatatcagacaagctgtcggatttttggtcatacataaaaaaggaag

SEQ ID NO: 412374 - DNA, 357 bp, Oryza sativa
gaaaacacatcaactttattaagcaggaacagatctagggaataaaccccattacatatccaagcaaaagagccatccttaagaaaggagagttaactgaactacgaaagcaaccttcctgaaataacctaacatcagaacagaaaaaggagcaagtcgacagggatctgcggcgaagccgcgacgactgctaccctgggcctcaaaagatgtgcagtccgcttgacaaaccgttaatccccatcggctgcctccacggaaacggcacaagaccgaggttttgatgctgagccgtagattttggggggtgcgtcaccggactcagcaaaggatccccacgggggctcattaggtggt

SEQ ID NO: 412375 - DNA, 347 bp, Oryza sativa
gtttctttcaaggaattggcagccacagagaaatgtgcggggaaagattcaatctgtccagtttgcttggaatgcccacataatgctgcccttctactttgttcggctcatgataaaggctgtcgttcatatatatgcgcaaccaattaccaccattcaaactgtcttgatcaactcatagattcgcggagaagctcaaaagattgtgaggacctagactccatagagcttacatgccccctttgccgtggcgaggttaagggatatacattggttgaacctgcttgggaacagttgaaccaaaacaagaggagctgtctgcaagatggctgctcatacatgggtag

SEQ ID NO: 412376 - DNA, 174 bp, Oryza sativa
aattccctctcactcccactaccatggatccttgcaagttccggccgtcgagctcgttcgacacgaagacgacgacgacgaacgcgggagctccggtgtggaacgacaacgaggcgctgactgtggggctcagggggccgattctccttgtggacttctcattctgttcgagaa

SEQ ID NO: 412377 - DNA, 395 bp, Oryza sativa
tttttcctctaatctcaagtctctgtctcgtcgggctcgcatctccactcgccatgggcaagattaagatcggaatcaacggtttcggaaggatcgggaggctcgtggccagggtggcccttcagagcgaggatgtcgagctcgtcgccgtcaacgaccccttcatcaccaccgactacatgacctacatgttcaagtacgataccgtgcacggccaatggaagcacagcgacatcaagatcaaggactccaagactctgctcttgggcgagaagccggtcaccgttttcggcattaggaaccctgacgagattcctggggctgaggctggtgctgagtatgtcgtggagtccactcggtgttttcactgacaaggagaaggctgttgctcactt

SEQ ID NO: 412378 - DNA, 315 bp, Oryza sativa
attttagtcgccgccgccgccgctcacccgcgcgggggggagctccagcccgtagacgtggccggatctccccgatggccgggaccttcaccgacctccacaccgccgacgggctcaaagccctcgagcagcaacctctccggcaagacctacgtctccggaaacgcgatcagcaaggacgacatcaaggtgttcgccgccgtgccatcaaagcctggagctgagttcccgaacgctgctcgctggtatgataccgtcgctggcggcctcgcttcaagggtccctggcaagggcagtggagtgaatctggctgga

SEQ ID NO: 412379 - DNA, 400 bp, Oryza sativa
ggtatgaagtattttaatttcacaggttgaaccaatacttaggtacatcaccttgatagtgccaagcctgaattatgggataaagttaattattcatgcatacaagagttcacacataaaagttctactgacacagtgtaatatctaactgatcagtctccttgaagaaggcacatgcatgattgagatagttgcatgatacggatccatatttatctttcatctgacataaaggcctttcggtcctcctgttcaggataatactgaggctgatgcatgatgttgaattgcaggaagtttcttggatcataatggatcatattttgcacgtactcgctcgtagaagctgaacccatcatgttcactggttgcagtcctctttcactctcagcaactttgc

SEQ ID NO: 412380 - DNA, 381 bp, Oryza sativa
gcattctctttctgtgtgtagtgtgtgcaactaggaggcttgttccatactagtttgctaggtcatggaaaagagcgagattttcgtaggagcacactcatatgcagctatatgtgcttttacactcatcataggatggttagctcactgggtatacagatggataaatcctccatgcaatgggaggcttcctccgggctcaatgggcttccctattgttggtgagaccttccaatttttcagaacaagtccatcaatagacatgccaatttactacaagcgaagactggagaggtatggacctatatttaaaactaacataggagggcagcacgtggtcatatcctttgatccccgagtgaaccagctcatattttcaac

SEQ ID NO: 412381 - DNA, 341 bp, Oryza sativa
ggataataagagcaaacacatgagagacacttgcgggagccttactaccggcggctatgaagaagctgctgaatgaagggcgacgagggaggcgtaggcgccatccttgatgttcatcaagacaaacggtgagcaacgatcacggttgtccggttgaccatcactctgtccagcgcgttttgaaccaccctttcggattcagcatccagcgcactggttgctttatccagcagaaggatcttgggatccctcacaatcgcacgagcgaccgccactccctgctttcggcctccagacaacttagctccccgctctcctactgctgggccatatcccttcca

SEQ ID NO: 412382 - DNA, 415 bp, Oryza sativa
agttttctctcccccctcgctgtcgatgccgccctgtccgttgttgatcccgctcacccggacctcctcgacctccgagatatccgcgtcgttaagaagcttggtggcaccgttgacgacactgagctcattcgcggcctcatcttcgataagaaggctagccatgctgctggaggaccaactcgggtcgagaatgctaagattgctgtcatacagttccaagtttcacctcccaagacagacatcgagcagagtgtcatcgtatcagattacgcgcagatggatcgcatcctccgtgaggagcgcaattacattcttgggatggtgaagaagatcaaggcttctggatgcaatggtctgctcattcagaaaagcattttgcgtgatggcagtactgatttgtcacttcattatc

SEQ ID NO: 412383 - DNA, 422 bp, Oryza sativa
aaccaaaacataggaggtttaatttcttcttctcaaagtagtgtagcatctttccttctttcaccattacataagcttaagcaataacagataacaaatcctcctcctcctctaggtaaaatattcaaacacaatacccttataagtacttattattaggaaagtagcgtgcatgggcataaatggcagcggggggcaggttaagaatcacaatgctgagcagcgaggaaacaaaacaccataatgggacagagcaaaagcctccgaaagggagcttttaggcagaaggcttctcccacttgaggggcttcaccacctcccaggtgaagtctgggtcgtcccttccgaagtgaccgtaagccgccgtcttgaggtagcgtccgttgccggcttttttgaggtcaaggttgatgatgatcatg

SEQ ID NO: 412384 - DNA, 329 bp, Oryza sativa
  unsure (1)..(329): unsure at all n locations
aaccaaaacataggaggtttcatttcttcttctcaaagtagtgtagcatctttccttctttcaccattacataagcttaagcaataacagataacaaatcctcctcctcctctagggaaaatattcaaacacaatacccttataagcacttattattaggaaagtagcgtgcatgggcataaatggcaagcgggggggcaggttaagaatcacaaatgctgagtcagcgaggaaaacaaaacaccataatggngacagagcaaaaagccttcgaaagggaagcttttaggccagaagggctttctccccacttgagggggcttcaccac

SEQ ID NO: 412385 - DNA, 383 bp, Oryza sativa
  unsure (1)..(383): unsure at all n locations
attacaagataaccttttcataactagggcaaacatccgacaagttacaagcacacctgatcttacgattccattttttttctgtttgcttttccaacaaatgcaacaatagcctagtcacatcaacatacaaacaagtcaatgctaaaagattagaaaagtctttacagttgaagnatccaatccggcatgcacgatctatctttgngatttaggtctgcagactgggttttgctagctctgctgatgatgtttgacgttcctggccaattgggcacccccggtttttccgtggggaggccggtcgtttccccactttccctttcgggacttccaaagggtttcaaatcacttttaacaggatccatcttgaaaagcccaac

SEQ ID NO: 412386 - DNA, 246 bp, Oryza sativa
aacaaaagccatactctctgtattaaagatccaacaggttcagagaacacgcaagctcagaactacacatcaccaaaattggagcaagtttgggggtacatatccgctcatacagtggaggatttattttttgattctacgagctttttaactagagtttcgacccgggaaagtcaatttacggattgaaatgaggcattccttgtctttcacaaaaacccattgcaccacaacagttggggcatg

SEQ ID NO: 412387 - DNA, 284 bp, Oryza sativa
  unsure (1)..(284): unsure at all n locations
aggttcaaatccaacttattcataaagcatactgctgtcccacaggaaactgtttcataaaactaacatatcatacggactcgatggtccattaaaccagacacaagtagacatcagcaccacaaatacttgacgaacagaggtctcggtgatgaccaggncacattcggcaggctccaccaaactggcttgatttactgaaccaaccaacggagggcgtgagcacccaggtggtaggggtgggacttccttcttggaatgtttgttagttccggcgagggttg

SEQ ID NO: 412388 - DNA, 374 bp, Oryza sativa
  unsure (1)..(374): unsure at all n locations
gataacttaagaattaagatctccatcacataaaaacatacagtgactgagtactggattacacgattgagttgttcagggttcagataggaaaaacatcttggggactagagatagagggaatcgacagatgcgcagcagtagtcgcgcgggtaaacaggacatcacggattgcgttgcatgtcgttcggctgccgcagtcggtcggccgcgggtgcttaagaaacctgctcttgaatgnggatacgccctgatgattcaccttggtggttagatggtcagccccagggcagcggccaaacgaagggtaccaaaccccagaagtatccaatggctcatttccaggcatgggtccttgttgtagattgatggca

SEQ ID NO: 412389 - DNA, 296 bp, Oryza sativa
  unsure (1)..(296): unsure at all n locations
caggacaaattcaagctatctacaagcttgccagcatcatcatattataataattgctttaatagtcagcaaactcgtacagaatagccagatccaaatttccacaaactatatatcatcatcaggaattttaaaaagagaactcggaatcgatttcgcatgatatttcgaggacaccccaangccaaacctgacgattaaccgatgacctaacgctaaataccctacctacaaccaccaggttgcctggccccttattttgaataacctttgcgccttgccgaagaatttcttag

SEQ ID NO: 412390 - DNA, 205 bp, Oryza sativa
gaagaaacttaaaagtgttcctgatgtgtttcatcatccgttctgtcactcacaaatggactcaaaatacagacccagatcaagtgtggtgttcaaccaaaatgttaactggtcgaatggcaaggatggccgtggttttttctagcaacactgcagtatttttgtaccagaccaattcctcctagacagtaaggaaattccggac

SEQ ID NO: 412391 - DNA, 183 bp, Oryza sativa
acgtcaaaccacgaacttggatattaaagattccacaaataaggttcacataaacaacacaggtcacagcagcgaaagctacaagaaaaccctgcataatccacaaatgcacatgacttgtcaaaaccagtacacacaaatcttgactagaatagaagacccactacggtacaagatgcatag

SEQ ID NO: 412392 - DNA, 293 bp, Oryza sativa
gataacttaagaattaagatctccatcacataaaaacatacagtgactgagtactggattacacgattgagttgttcagggttcagataggaaaaacatcttggggtactatgagatagaggtgaatcgacagtattgcgcagcagtagccgcgcgggtaaatcaggacattcacgtattgcgtttgccatgttcgtccggcctgcagcagcggtcggacgcggggcctttaagaccctgcctctttgaaatgggattcgcccctggatgaatcacctggttggttatgatgg

SEQ ID NO: 412393 - DNA, 147 bp, Oryza sativa
aggttcaaatccaacttattcataaagcatactgctgtcccacaggaaactgtttcataaaactaacatatcatacggactcgatggtccattaaaccagacacaagtagcacatttaggcaccacaaatacttgactgaacagtag

SEQ ID NO: 412394 - DNA, 107 bp, Oryza sativa
acaggaaactgtttcataaatgtaacatatcatacggacttgatgggtcattaaaccaggacccaaggtagacatcagcacccaccaagtactttgacgtatcagag

SEQ ID NO: 412395 - DNA, 157 bp, Oryza sativa
tgggttttttttttttttttttttttttttttttttttttttttaagaattaagatctccatcacataaaaacatacagggactgggtactggattacccgattgggttgttcagggttcagatagggaaaaacatttttgggggctttgagatagg

SEQ ID NO: 412396 - DNA, 415 bp, Oryza sativa
  unsure (1)..(415): unsure at all n locations
acgtaataccatccattttttttattgtcgacgaatttatcagatatgctctagatacatatcttgtgtgtatatagccggagctttgttttcacatatcctcacccaacgataattgtagtactcttacaataaaaccggttcggagaggggagggaagagattattacatatgtgttaagagcagnaggnccattgagatggtacataaccaaattgttaaaataaaaatatataggcatattatatattgatattatcatncaacattagcccaaaacaaagctgcatactattattataggcagcaatccaccagcgcgatgcttgatcttagcttagttgccaccagactcctcgcaacctgggggcttgtaggcgatgaagctaatcaactgcacctgcctgacgttgt

SEQ ID NO: 412397 - DNA, 406 bp, Oryza sativa
  unsure (1)..(406): unsure at all n locations
aggaattagcaatgtaaatactcgcattccacaacagccgaagggcaataatcaggctcagaacaagtttaaaccgaacagaaaatagagagttttaaacgacacagtgcacacagcggngcatatgataataacggttcaatgcaacgagtgccatgngccgtgcacaaaacttaacgaattagttaaaaggcctagatattcttaaattgcagnacacgccaaacccaccacttgaaacggaggnaatcaatttctttctttggccggcagcccttggttcaacctttggccaaccggttgggttccttcctttcttccacgtttctttgatgaacgccccaacaagccaccgttttggccttcatgttaacgcaacccgcaaaacgaccaaataggaggggta

SEQ ID NO: 412398 - DNA, 333 bp, Oryza sativa
aaaaaaaattagtcacacataaagtactattcatgttttatcatccaataacaataaaaatattaatcataaaaaaatttcaaataagacgaatgatcaaaagttgaacatgaacagtgcaaaactgcacttattttgggactgagggagtagtgctgtggcttgtcagttccacaaagcatacttactcgtccataaaaaaaattttggtcatatgtacgttttgcagcttgcaggctttccattccaaaacctcactgtctggcctatatctgcatgtttggggtgtatgtggattgcttctttgcaggaccagagacaatatggatcttt

SEQ ID NO: 412399 - DNA, 241 bp, Oryza sativa
agagaatctgattcaaggaaaatttgcacaatggctaactagagaacaaaaaatagggcacagacctgaacagcccacagtaagaaccaaaagatcaatcaatgggccacgtgtaaaagaattacaacaagataaaggctgtgaccagtgtgaaacctttggttcctatcgccgcttctaatttacctttccctgtgatgactttacaaccctagtgcttagcctcttgaaatcaagttcc

SEQ ID NO: 412400 - DNA, 206 bp, Oryza sativa
gatcataaggcaaagctgcgagcgccagatcatcttattactacagcttcttggcgatatgctacagtagcttcttcctcccttgcaaaaagaaacccaaaccttatctacaacgcatcacacacactggacacagagcgctcggatcgatcgaagccagacgagacccaccatggccaaactactacttaggttaagccgacaac

SEQ ID NO: 412401 - DNA, 193 bp, Oryza sativa
tttagaattaacaaaaaaatagggggtttaatttatttttttaaaagtattgtagattttttccttctttaaccattacataagtttaagcaataaccagataacaaatcctactcctgttttaggtaaaatattcaaacacattacctttataagaacttattatttaggaaagtagcgggcatgggcataa

SEQ ID NO: 412402 - DNA, 264 bp, Oryza sativa
aaccaaaacataggaggtttcaattcttcttctcaaagtagtgtagcatctttccttctttcaccattacataagcttaagcaataacagataacaaatcctgctactactttaggtaaaatattcaaacacaatgaccccttataaggaccttattaattaggaaaaggaagcgggccatgggccataaaatggcagccgggggggcaagtttaagaatcacaatggctgagcagcgagggaaacaaaacaccataaagggac

SEQ ID NO: 412403 - DNA, 260 bp, Oryza sativa
aaccaaaacataggaggtttcatttcttcttctcaaagtagtgtagcatctttccttctttcaccattacataagcttaagcaataacagataacaaatcctcctcctcctctaggtaaaatattcaaacacaatacccttataagtacttattattaggaaagtagcgtgcatgggcataaatggcagcggggggcaggttaagaatcacaatgctgagcagcgaggaaacaaaacaccataatgggacagagcaaaag

SEQ ID NO: 412404 - DNA, 179 bp, Oryza sativa
aacaaaacaaaccaccacacaaaggaaaaaatcaaacacaaaaccctaaaaaggaacaaaaaaaaggaaagaaaagagaaagggcaaaaaaggaaacggggggcaggtaaagaatcaaaatgctgagcagcgaggaaacaaaacaccaaaacgggaaagagcaaaagccaacaaaaggg

SEQ ID NO: 412405 - DNA, 466 bp, Oryza sativa
  unsure (1)..(466): unsure at all n locations
aagagtctatcacgtatgcatcgcacgccgttacgtctgggtatgcctcttgtttggccgccctttntttttttttttgaactttcaaattcaaaaaccacgatttataaagtgccggagatgaagtacacaaattaacattacatcgagttttaataaaacatcatgcgaaaagccagcaaaaacaaaaggcagcatacagctaatgaagctctactggagtagctcgcaaaaggtccgacttattttcagtagcactctactccatttcttccgaaagagtgaccatcttctactgggtgttgtacatgtgaacggatcagggtcaacaacgcgagagcctgtaatccccattcgttgtcataccaagacacaagcttaacaaagttgtcattgagagcaataccggcctttgcatcaaagatgcttgacctgttgtcaccctggaagtctgtggaaacaaggt

SEQ ID NO: 412406 - DNA, 385 bp, Oryza sativa
attaattaaaccaaaacaactggacattattattcagattacaaaacgggattttaccatgcaaatcattttactggaaaagtaacaaggcgaacacaccaaaattttccaattggttatctaccaaaatttaagaggggcttcttctttttgtccctattggagcccgggccttattctttcaaaggacaactttgcttgggatcaaaggactaaaaacggttgatcctaattttagattggcctgggttttgaaaaggtttggccctggttcatttatgctggaacaggcttccaaaaaacctgcacccgaggggggttatgtcctttgcggcatcttggtcattccttgacaaggacttgtcgacagctgcagcagcttgcc

SEQ ID NO: 412407 - DNA, 399 bp, Oryza sativa
cttcttctcaaagtagtgtagcatctttccttctttcaccattacataagcttaagcaataacagataacaaatcctcctcctcctctaggtaaaatattcaaacacaatacccttataagtacttattattaggaaagtagcgtgcatgggcataaatggcagcggggggcaggttaagaatcacaatgctgagcagcgaggaaacaaaacaccataatgggacagagcaaaagcctccgaaagggagcttttaggcagaaggcttctcccacttgaggggcttcaccacctcccaggtgaagtctgggtcgtcccttccgaagtgaccgtaagccgccgtcttgaggtagcgtccgttgccgcctttcttgaggtcaaggttgatgatgaacatgcc

SEQ ID NO: 412408 - DNA, 185 bp, Oryza sativa
tttttgtacgaaaaagagctatatgtatgtgtaataatctctagctctctctggtacacgttacccctcgaaaaggagcaaaacgttacgaagacgaacacatcaagaagaaagaaagcctagctaagcgtgatccgggcccgaatcaacccattgggattgcaacatcaacatgcaattgcatg

SEQ ID NO: 412409 - DNA, 404 bp, Oryza sativa
gaagagaaagacaattggaatcacataaaaagatggcccaaagcacactaatttttattacaaccgccacgacagggttgatcgtaccgcccctaaggcccaaaatgcaaagcggcattaaccttttgggggatatcccgctctctaaaggctttttattcctcagcaaatcccagttcagagagctttgaggtgggtcctcggcggtaattccgcaaagaagggcgtcctcatccgccagcatatttcctccaccagtggcacggaaggcctgggttcagcccatgagggcctttgagcacttggcagctgaagaaggccttcctttttgccactcacaagcttggtgaagtaagagttgtcaaagatcaaagggttggacgtccaggctccctcaaagccag

SEQ ID NO: 412410 - DNA, 432 bp, Oryza sativa
  unsure (1)..(432): unsure at all n locations
ggacaagcaagaagtatatatattcatccatttctcaaactactacaagaggtcgagaggaacacataatcaggagggattgcgacaatttacagcaacaggagtctggtagatcgaggcaagaacaagacaggcagcagcagagctacccctcttcatttccactgaatttttacacatttggaatccatggnnaaaccgagccttccctcccgntcgtcgtggttgtcaccggttagtccgattgagaaaaaatggtcattggcgtgctcataatccggatcgctcgccggcgttcggtgaaggaggcggggcggattgttcgggcggcctgttgaggagtgggttcagagccttgacgacgatgctcatgttgggcctgaagtccgnctcgtactgcacgcacagcgcagctacggcagccatcttggc

SEQ ID NO: 412411 - DNA, 382 bp, Oryza sativa
  unsure (1)..(382): unsure at all n locations
aatatcagaaattttatactgaaaactcaaggaacccaacattttggtcgcactgggcctactatcacaactcttaaggaaattctgaaaagaacaaggtaacaaaaatgttgggtttcataccatgngctttgaaccaaccttttttaacagttagggtcactatgggagttggttcatttcaacaatgacagtatttgaggaagtctgcggccaattaaaaacatttgcaatttgaattttctgaaacgataaaacaacccaggaaccgggcggttttattttgaggccaaggcaccttgcccaaaaatctcggcaaaagttacttgaaaaccttaggacattagtacacattccatggccaaacatgnngatgccaaat

SEQ ID NO: 412412 - DNA, 430 bp, Oryza sativa
  unsure (1)..(430): unsure at all n locations
gatgccatcatagggatgtgataaccgcatatcaaaatatcgatccatgagagtatgtatgtcagttcgaaccacttcactcgcggcagcgaggaagtcgaaaagcttattcacgactcatctagcaaaacttgacgataagcctatctcaagttcttcatacaagcattgacattgcaaagttacaccgagaggtctgaaacaaaagtgcagactgctgatggatgacaangccgaattagcttacgcttcatcaagggcaagaacacctgggnagggttcttgccttccagcaactccaagctagcaccaccgncggtggagatgtggctcatcttgtcggccagcccagccttctcgaccgcagcaacggagtcaccaccaccgatgatggtcgtggcgccctttgtggtagtaagatcagccaact

SEQ ID NO: 412413 - DNA, 360 bp, Oryza sativa
ggatgaattatggtgccagtatcacatatggtatccttcatattgaaagagacagtattacagatgcggttacacaacaacctgaaaaaaaaaaagaacaggacaaactgatagagcaaactgcagtagctctcttgcagtttcagcatagactcaaaaataatgtaaacaaaaggataaaacgtccgaagtaatatctagaacacttaataactaattggctgcatacacgccgatattcaactagccaacctttcgcaaggtcgaattctcaaacccctttcatccatgcttccccatgctttctttcttacttgccatgggagcaaaccagttcactacctgggatcaaagaacaca

SEQ ID NO: 412414 - DNA, 417 bp, Oryza sativa
  unsure (1)..(417): unsure at all n locations
agcagaaggcaaaggaaatttcccgcaaatacttattcatatgttttgacaacatttctcccgacgcatgctcattgtggcagacgcagctgaccacctagagcttttagttcaccattattatttagaccaagcattacgtcccaaggatcagaacacatgcttacaangcgaaaatactaatangcctggcttggctgctttccacagaataacccagaacgacaacctcaacaggataaaaatggccaacggaatgaaaacaaagcagcgaatcgtcaccagaagtcccatcttactcatcaaacactccatcattctcctccaacgcatcctctccccaggggagaagattgcccagtttaccttccttaacaggagcagggttcaccatattctcagccttgaagcagtgca

SEQ ID NO: 412415 - DNA, 397 bp, Oryza sativa
cgataaatattgcttcacttgtacaaagtacagataaaaatacattgatacatgacacggagagagccatgcacaccacttatttggacacacagagggcaaggctgcagagaaaatcaagcaacacaagctgaactcacggccccacctgtcagcctctcactggtcgaggccggagactcttgtgaaaaacagcaacaccacgcatgcagaagaagacaaattattacacacacaaatcgacgacacggcggccggcgacgtacggcgaggttcgtcgccgacgtcggcgacgttgtgatgaggtcgatcagcctaagaggtggtgcttcttctcgccggtggactcctcggcgcttttgtggtccttcttcttcttgtggtgctcgtggaaggc

SEQ ID NO: 412416 - DNA, 201 bp, Oryza sativa
acagcttaaaatagcccttttattatgaagaacatggggctttatattaaatatatagcttgataaaaaaaaaagaaactatgctggggaatcgatcaagggaaactcaattcgggcagcaaacatttcctccttgggtattatacaaacacccgttacaggcatacttagatttcagacattcacccatgggcgaaaaca

SEQ ID NO: 412417 - DNA, 489 bp, Oryza sativa
cgtcttggtatgcctttttatttggccgcccgtcctttttttttttttactcaacgaaacgcatactcatcaaaacttgcacagtaaaaatggacggatgtactttgacatagcatatgtttcgccattacaagccgctctgcagttcaactacttcaagataagaggcactaatgacaggcatcactcaaaaataaactcaaactagcacttctgtgaaggataataagatgggatgaaaaatgcttccagaacaaccagtcccagtcccagtttttggataagtagcaacatccccttttgatattttaaatcttgttgaacgcaacgatgtcgcagctctggacaaattcgttgatcggctcttcagtcagatgttcttcgataaggctatccacagacaccaagtcatcaacaatggtcaacatgatctgcaacttcttgatcccgtaacccacaggcacaagctttgatgctccccaggtgaga

SEQ ID NO: 412418 - DNA, 433 bp, Oryza sativa
  unsure (1)..(433): unsure at all n locations
atgtataaggccttctcattacgagcttataaataagcaaatgcctacaaaattttttagccttggcggcaacccaaacatgacaaacccaaatacccaatgtctaagacgtttgtgctcagttcatcatagatctggcttctgtggtgcagttctgnctcctatcctacctttgggnctaagaaaaggttatgcctagaaattgcaagccacattaatccttccatgggatcacttcttcgggcctcactttagaagggctcaacaacttccgtcgcggnaacctttagaagnactctacctcaaccgttggattcgctggtggcggctttcagactcctccggtcttccccatctcccgccaagagcgatggtcatcatctcgtagatcttgccacccaactcagctgggctgtcaggagtatatccactg

SEQ ID NO: 412419 - DNA, 385 bp, Oryza sativa
atgtaaatggttgatttctattaggtaaccgttcagcaaactgtcggtttgggcagcagagagttcagcaaaggggtcaggtgcttgggacccgagtatctgacatggcatacatggaaagaaaaggtgctgcttcttgtcttaacatgaatagtagaaggtatatatccccgaagtactggttttagaccatgtatgttaacatatgtcgtactattgatgagaaactgttcagtgaatcatgtagcctctgcagttgatcagctggagatcacttcctcaagctcttaatgatgtaggcgccgtagaggtccattgagtacttgattgcgttgatggcatcttttggtgggagaaactcattgacagcaacttctttgttctc

SEQ ID NO: 412420 - DNA, 382 bp, Oryza sativa
acagaagcaaagcaacgggttcccaaaggtccacacttacagtacgttcaacgtacaactgatccaagcaaatgaaacaggtttgatgatgcactgatgcgagaaactaaacggttggatcggagtacggagacgtaggcgatcatggacaagcggtcggacggcggccgatgaggcttagtagctccggtggatggggaagctgcctcgatgggctgttggggatgatgtaagaggaaccttagaaagaatgaccgccggctgagagccaaccgaacgattgaggtgggtcccaacccaagtacaccccaactggggacttcccccaggaccagccttgacgcaggggcccgggtccgaaaggaggacggcgcgggtttca

SEQ ID NO: 412421 - DNA, 225 bp, Oryza sativa
gaccattctatttctgagctcttatagttcgagtgagagagcagcttaagggggtagtgcaagaggccaatccgcactatcggcgctgggagccaccaggaggggtcccacccgggagcactcaaggcagcgccggacgagatcatctgcaccctcatcttcgtgttcgccagccagggctccaccatggcctgcagctaggggaccggcggttgatcgccgact

SEQ ID NO: 412422 - DNA, 112 bp, Oryza sativa
gggacccaatgattaggggtcacttattcattatagtttttccatgctgctttaccacaggaaaaccttagagaccccttaaaaccagagcttaagggtccacaattacagg

SEQ ID NO: 412423 - DNA, 300 bp, Oryza sativa
gagaataaataatctcccctcgaagcgaatcgtcgaatgggcgtctcaagatgcagatctttgtgagagaccctcaccggcaagaccatcaccctcgaggttgagtcctcggacaccattgacaatgtcaaggccaagatccaggacacggagggcatccccccggaccagcagcgtctcatctttgctggcaagcagcttgaggatggccgtaccctggccgactacaacatccagaaggagtccaccctccaccttgtgctcaggctcaggggaggcatgctgatcttcttaagacct

SEQ ID NO: 412424 - DNA, 456 bp, Oryza sativa
  unsure (1)..(456): unsure at all n locations
ccctctctttcgccgaggtgtccctcccgcacaatccatcaggaaaggtttttagcacagaggaactgcttatcattgctcaagcttgtcagaaaatggactgctttgcaataactgatgaggtttatgagtacattacttacgatgagaacaagcatatctcattggcttcgcttccaggaatgccagaaaggaccatcattaccttcctcactgtcaaaaacctacagcgtaactggttggagacttggatgggcttgtgctccagctaatatctgcctcatcaataagaaacatccctgtcatgctaactgattcaacccctgcaccattccaagaagctgcgttggttgcgttaacaagcccaccagaccncctattcatccttgaaacatgactacacggcgagaagagacttcatccttcaggtgcttactgattttggcttccgcatta

SEQ ID NO: 412425 - DNA, 483 bp, Oryza sativa
gagcgggttcgccagctcgagctgtttgctgggggggttcttgtttttctttgccgggatctctgggtgatggctgctgctgcggcggcggagacgtcggaggcgtccacggtcgggctcgcgctcgcggaggccaacatcaactggcagaggttggacaagaccaggttccatgtcattggagctatcctatttactgctcagcaaggtgttctgcaccctacggccgttgtgaagaccagaatgcaggttgcagaaggagggctttcacacatgtctggcttttctgttttcagaaggatattgagaagtgatggcatccctggtgctttcagaggctttggcacctcagcagttggagcactgcctggccgggtctttgctctgacttcattagaggtgtccaaagaaatggcattcaaatactctgaacattctgatatgtcagaggcatcaaggattgctgtagctaatggtatagca

SEQ ID NO: 412426 - DNA, 393 bp, Oryza sativa
gatcccaattgacctgattgattgatagcgatatcataaaagcagggacacgaattaggatttaaaaccaaccccaagaaggatcgaagatccaacttcaccgaatcgatccaagaactccgcctaatccaaccaaaccatgggtcgatctgatctaaccaacacgtacacgaactcataaaaagactaacaccaccaccacctaacttcttatttaggagactgagacgcactcatagacgactgatactgagcgaaaggttgaatggggaacagcacagatttaggagagctggccgtagtgggctatgaccaccgcctaggcggtgctcccagcgcgggatcccaccttttcgatggccttgacaacgtccatgccatggacgacgcggc

SEQ ID NO: 412427 - DNA, 102 bp, Oryza sativa
gtatctgctgaataaatcaagcaaagagaaaaaggagtgggcatctgagaaattcgcagggcgcctagcgcggtggcgatgtcgaacacgagggtgttcttc

SEQ ID NO: 412428 - DNA, 410 bp, Oryza sativa
ctcttttctcctcttcctcctccccccacccgccttgtcgcggatccgatccgcctctgcctgcgcctcgcggcccggcctgcctgcctcgccgccggtggtcccgatccgaggctgctcttgctgggcatcaaacatgggtctggtgaaggatggcgccgccgatttggaggaggggaccctggagaccggcatggagtacaggactgtttctggtgtggcaggacctctggttatcttggataaagtaaagggcccaaagtaccaggaaattgtaaacatccgactgggagatggcaccactcgccgtggccaagttctggaagctgacggcgaataggctgctgtgcaggtctttgaaggcactccaggaatagaccacaaattcaccactgtgcagtccacaggat

SEQ ID NO: 412429 - DNA, 416 bp, Oryza sativa
ctcttttccattttgggccgttccacttattgcaattgtgctgccctgggttgtctttggtggaatttacttcaaaaagaaaaatgtctatgatttacaccatggcatactggggattctatattcggtacttataactgctgtgattactgatgcaattaaggatggtgttggtcgtcctcgcccagatttcttttggcgttgtttccctgatggaatacctaagtttgataatgtcactacaaatgtcatatgccatggagaaaagagtgttatcaaggaaggccacaagagctttccaagtgggcattcttcatggtcttttgctggtctaggttttcttgcgtggcacttggctggtaaacttaaggcttttgatcgcaaaggccacattgcaaaggtatgcataggatttt

SEQ ID NO: 412430 - DNA, 492 bp, Oryza sativa
ctttgttttctttggtgtgctgagagatggcaggagatctgcggtgaagaagctcgactccagcaaacagcctgatcaagaattccttgcgcaggtttcagccgtttcacgactgatgcatgagaatattatccaacttatcggatattgcgctggagggagcatccgtgtccttgcttatgagtatgcaccgaggggctccttgcatgacattctccatggtataaagggtgtgaagggagctcagccaggaccagctctatcatggatgcagcgagtgaagattgccttgagtgctgcacaggggcttgagttcctgcacgagaaggctgtgcctcgtgttcgtcaccgtgacattaaattcagcaacattatgctctttgacaacgatggtgctaacgcaggagacttcgacgtatccaatcagtccccgtacatggtggctcgcgctcactgcactcgggtctcggcacccttgggtattatgcttcc

SEQ ID NO: 412431 - DNA, 558 bp, Oryza sativa
cggactcgtgggctgggaatgaggaggagaagatgagggctgcaattggtaagtttggcctgtctgggaaggcgcaggtgatgccaatgaggaatctctctgatgggcagaggagccgcgtcatctttgcgtggctggcttacaggcagcctcaactgctgctgcttgacgagccgacgaaccatctggacattgagaccatcgattctctggctgaggcactgaacgagtgggacggtggtttggtcctggtgagtcatgacttcaggcttatcaaccaggttgctcaagagatttgggtgtgcgagaagcaggcggtgaccaggtgggaaggtgatatcatggacttcaaggagcacttgaggagcagggctggtctctctgactagttctatctgcccttcgtttttatcttcctctcttgacagctcctcggaggtttattataatagccaaaccaagttctggcttggatcttggagtctaatttatttgtagtagcctgctatcttaattatcactattgcacttggagagctataagagattatatatttt

SEQ ID NO: 412432 - DNA, 455 bp, Oryza sativa
tgcttttgctgagtgtcaagggcttgttgcgaacacagctgaattatatgatctcagcaggattggtaggttcttagacacttggggaatcatcaattaccttgcgtctgggtcggtgcaccggggtctaaggatggcaacatcgcttctaagggaggagccaaccggggagttgcagctattgactgggccactgtaatcaattgctggcctaattttgtttgatcgaccgaaatgtatcctccaagcagaggacatttcttcattggcatcaaattcggaggtgcgtcattctgacgctgggcttgccgaattggacgtaaagatttgggagcgattattataagagtctcgccgtattgctttcagcccttgaccagtccgcactttctggcactataggagtgctatatcgcttttgccttgatctgctttctctgccccgagttattctc

SEQ ID NO: 412433 - DNA, 174 bp, Oryza sativa
gcaattcattaggatgattcagaaatagttgcaatgataaaagagttgctggagactcgcattcgaccagctgttcaagatgatggtggtgacattgaatatcgaggatttgatccagaaacagggatcgctcagctaaaaatctatggcgcctgcagcggatgtccatgttcg

SEQ ID NO: 412434 - DNA, 378 bp, Oryza sativa
  unsure (1)..(378): unsure at all n locations
ataggatcaaaacatttctattaccacaactttttaaggatggaattgagtagcaatactttcaccccaaaatacagtttagcgacaatatcttagaaaagccgcttgctttgccgccatggctggcaagctgagcagagcagctaacacaaagaacacgagatcactataanaccaaacggcaacgaacgaagaaaatacagggtccttttttgttctgaagatacacgaaggcggttcgtttttcttttatttttagtcctcctctcctcctcgatgatgggtgtatggcaatggcaatggcgatgggatcttggcttagttgatgggaaggggctcgccgttccactccttgaggcagtcgagcatggggtcgat

SEQ ID NO: 412435 - DNA, 484 bp, Oryza sativa
ccttctcctccggctcttcttcagtatcgaatcctctcttgtgctcgtgcccaccaccaccaccgtagcaatggcgggcaacgggccgatcaacaaggaggacccgctcaactggggcgcggcggcggccgagatggccggcagccacctcgacgaggtgaagcgcatggtggcgcagttccgcgagccgctggtcaagatccagggcgccaccctccgcgtcggccaggtggccgccgtcgcccaggccaaggacgccgccggcgtcgccgtcgagctcgacgaggaggcccgcccccgcgtcaaggccagcagcgagtggatcctcaactgcatcgcccacggcggcgacatctacggcgtcaccaccggcttcggtggcaccttccaccgtcgcaccatggacggtcccgtcctccaagtcgagctcctcaagcatctcaacgccggaatcttcggcactggctccgatggccacacgctg

SEQ ID NO: 412436 - DNA, 376 bp, Oryza sativa
aattcgatcatcccttggatgcggcctgcggcttacattaaatctcgatccaaagaagcaaagatgatgacagacagaaattaattaagctagaaatctcctcgatcgatcacacacacacacacaattaaggtacatacatacatgcactgctgcaactgcaactgcagggtcggtgcgtggctactacaagtgtacacatggtacgttggttggcaccatctcgatcgtgtcgttgtgctcacttgccggggacgaagttggtggcgtatgcccaggcgttgttggcgacggggtcggcgacgtggtcgaagaggttcttggtggggcccttgccggtgacgatggcctggacgaagaagccgaacatggagaa

SEQ ID NO: 412437 - DNA, 328 bp, Oryza sativa
caaaatacctacccaaccgccgccgcatcgccctcgttagagcgatggccgcgtcggcgctgcaccagaccaccagcttcctcggcaccgcccctcgccgggatgagctcgtccgccgcgtcggcgactccggtggccgcatcaccatgcgccgcaccgccaagagcgcgccccagagcatctggtatggacctgaccgtcccaagtacctgggcccgttctcggagcagacgccatcgtacctgaccggagagttcccgggagactactggtgggacacggcggggctatcggccgacccggagacgttcgcgaggatcagggtgct

SEQ ID NO: 412438 - DNA, 529 bp, Oryza sativa
caagatgagtgagagcaccaaggacacgcgactagcagaaggggagcgaccgcctcctcgatccatatcttccggtcgagttcttggtcgatctcttccctcctccacctcctcctcacaggttcttggtgtagcttgccactttcaccagcaaagtttcatgtctgatctcgacattcagatcccaactgccttcgatccctttgctgaggccaatgctggagactctggtgcggctgcaggatcaaaggactacgttcatgtacgcatccagcagcgtaatggccgtaagagcctgaccactgtccagggattgaagaaggaattcagctacaacaagatcctcaaagatctcaagaaagagttttgctgcaatggtactgttgtccaggacccagagcttggccaggtcattcaacttcagggtgatcagaggaagaacgtatcaaactttcttggtcaggccggcactgcgaagaaggaacacatcaagaatcatggtctcctgagcaactgccacaaccattgc

SEQ ID NO: 412439 - DNA, 454 bp, Oryza sativa
cttagtctggagtttcttggagacgctgttttggagtatgtgataacttcgtacctctactctacttatccggatataaaacctggtcaaataacagatctaagatcgttagctgctggtaatgattcgcttgcttatgcggcggttgagaaatctatccataagcatcttataaaggattcaaaccatctcacgtcagcaataagtaaatttgagatgtatgtgaagctctccaattcagagaaagacttgcttgaagaaccagcatgtcccaaggctcttggtgatattgttgaatcttgtattggcgcagtgcttttagattcaggcttcaacctgaactatgtttggaaggcaatgcttatgcttctaaagccagtattgaccttcgccaacatgcacactaatccgatgagagaacttcgagagctttggcagtgtcatggatttgagt

SEQ ID NO: 412440 - DNA, 96 bp, Oryza sativa
gttggtatctactccccctcccggttcggttcggttcggttcgggtccggttcgatttcgatttttccttcggttcgggagctggtgggaaagcaa

SEQ ID NO: 412441 - DNA, 467 bp, Oryza sativa
gtcgcgtcgcggctgaacaggggagggccgggcggcgatctccatctggcgagcagcggaggggagggatcctgatcctggattttgggcaaaggtgggggtgaatttgcacgagggttttggttgatggcgaacattcgggctcttctcatcgggttggtacgtgccaggggttccttggtggacattgggcgatgcgtttcttcttcaaggccttcatatctagcgtcactgggcagacattacaaggttcccatggaaattcgttggttatcctcaacagggtttcctcctcatctggtggttgggatgcctgcattatcccctactatgaatcaaggtaacattgcaaaatggagaaaacaagaaggcgaaaagatagaaagtggtgatgtgatctgagagatagaaactgaccaagctacccttgagtttgagagccttgaaaaggggtttttggccaagat

SEQ ID NO: 412442 - DNA, 323 bp, Oryza sativa
gtgagtagcggcgcaggcagatacaccggcagaggagcggcatggcccttcaggatgttgaggaagaagcgagtgccaacatgttcgccgccaccactgacagcgaaatgggctccagcaccgagcgggtgcccaagaggctgaccgatggagacctcgatgagctgaggggatccatggagctcggctttggattccacgaggagaatggtgggcagaacctctgtgacacgctccccgtcctcgacctctacttcgccgtcaaccggcagctctcggagcccaagatgcgtttgttcactagcttcttgccattacctaca

SEQ ID NO: 412443 - DNA, 421 bp, Oryza sativa
gcttgttgtggacacttcatgttgcggcatttgcagtatcaggctatgcttcaactgaaggtcggcaatgcaaaccgttcaatcctttactgggtgaaacatatgaagctgattatccagataaaggacttcgattctcttctgaataggacatgtatcatccagagcccacccgcgtttcgagtgcgacttctagccctattcctaaacctatgtacctctataatatctacaactttataactaacctgtataatttttgcccttttttttctttcttcttactaccccctgtatttacgttattctgtcttacgcctaaactgtttgtgacaataatatttatttgcattttaaaaaaaaaaaaattttacttcatttccttcttctccttatatatttccaagttttacccccccct

SEQ ID NO: 412444 - DNA, 164 bp, Oryza sativa
catcgtcttttctctcagctctcacagctcactgcatcaatggccgcggccaccatggcgctgtgctccccggtgatggcccgcgcggcgccgtcgacctcctccgcgctcttcggctaggccctgatccgcctggggctgaccgtcctgtatgcccatgccgc

SEQ ID NO: 412445 - DNA, 396 bp, Oryza sativa
  unsure (1)..(396): unsure at all n locations
ataatgcaataatattattgtctcaacatttatacatatatcaaataacgttttccagtacctttcaaattacaaaaaaaaagggcaaaattatacaatttagttataatttataaatttataaatgacttagttcttgggcatcggcccggaagtcgccactcgcgacggnncggtgggcttcactttgnnacgcggcggcaagagggggtgatgccgtccgcccgaccggggggagctggccagattcttcgaaccgccggtgggtccggccggcgaggggcctttgttgagcctcgaagcaccgaagttcgcggttagtaaaccggatgttacttgccgcattgggggccgtttcggcggggaagcaccgaacggagccccggaccgcgtggg

SEQ ID NO: 412446 - DNA, 337 bp, Oryza sativa
ggctccgtcgtgctccccgccgacgcccccatgcgcaagtacatccgttactaccgcgacttcgtgctcgagctcaacaaggccctcgccgccgaccaccgcgtcgagatctgccagctccccgtcggcgacggcatcaccctctgccgccgcgtcaagtgagcccaccgccgtcgcgagtgcgactccggccgatgcccaagaactagtcatttataaatttataaattataactaaattgtataattttgccctttttttttgtaatttgaaaggtactggaaaacgttatttgatatatgtataaatgttgagacaataatattattgcattat

SEQ ID NO: 412447 - DNA, 408 bp, Oryza sativa
gtcgtttcgtccttgcccgatgggacggcggagaggcgctcctctgcatggtttatttacgcgtttattggtgttggtgtaatactcttcattacatccatctttggttgcgctggagcatcgaggggcgggtgctgcttatccttttattcgttcctcattattctgttcatactggtagagcttgctgcaggaggtttcattttcttcaaccatagctggaaagatgtaattccagttgataaaactggtaactttgacatgatgtacagctttttgaaggagaattggagaatcgcaaagtgggttgcacttggagctgtactatttgaggcagtgctggtcactgtagctctcatagtgcagtcaggcaatcaagcagactatgacagtgatgacgagtacatt

SEQ ID NO: 412448 - DNA, 403 bp, Oryza sativa
  unsure (1)..(403): unsure at all n locations
ggagttgtggcagtgtgcagggccgccgggaaagggagggaggtgctcancggcgtggtggtccagccattcgaggagctcaagggggagctctccctcgtcccccaggccaaggaccagtctcttgctaggcaaaagttcgtcgacgagtgcgaggccgccatcaacgagcagatcaatgtggagttcaatgcatcgtacgcgtaccactcccttttcgcctactttgaccgtgacaacgttgctctcaagggattcgccaaattcttcaaagaatccagcgatgaggagagggatcacgcagagaaactcatgaagtaccataacatgcgtggaggcagggtgcggctccagtccatcgtcacacccttgacagagttcgaccatcctgagaaaggggatg

SEQ ID NO: 412449 - DNA, 211 bp, Oryza sativa
cacactctttcctctgtcgcatctggactgtctgcgacaaccttaagctgcccagcagatgtaatcaaaactaggatgatgaaccagggcatggatgcaaaagttctatacaggaattcttatgattgtttggtcaacgactgtcaaacatgaggggttgacagcattgtggaagggattcttacctacatgggccaggcttgttccatgg

SEQ ID NO: 412450 - DNA, 478 bp, Oryza sativa
gttctctcgtgacaggaaaagttgtgattgccaaaaacccttgcctccacccaggtgatatacggattctccatgctgttgatgttcctgttttgcaccacatgtttaactgtgtcgtctttccacagcaaggacccaaggccgcattctaatgagtgttcagggagtgatcttgacggggacatatattttgtttcttgggacccatctctcattccgcctcgtatggtgacacctatggactatactccagcaccaacagaaacattagaccatgatgttacaattgaggaagtagaagagtacttcacaaattacatagtcaatgagagttcaggaatgattgccaatgcacatgtagtatttgcggataaggaagaccttatggcagagagttcaccatgcattgagctggccaagctcttctccattgctgtcgacttttccaaatctggagtgccatccctttttcctcctg

SEQ ID NO: 412451 - DNA, 202 bp, Oryza sativa
ctgcttgagaaccggatactatgatgaggcaagacaagttgcccaatcatctcgtgctgcattcaactttgctcccctgcttgtagaatggattactactaatggtgctgaatccccagagactgctctgacagcttctgaggaatgtgacaaaatgctgagaatgggcgatcgacctggccgtcctggttatgataggaag

SEQ ID NO: 412452 - DNA, 179 bp, Oryza sativa
cttgatagataaggttattgcctttgaacgtggagatttggtttttgtttttaattgtcatcccaacaaaacttacaagggctacaaagtttgatgtgacttgcccggttagatcaaaatatcaactaacttccaactcctctattatccttcattatctactttcatttttttcccaa

SEQ ID NO: 412453 - DNA, 422 bp, Oryza sativa
ctggattaattaactagcatatttaaatttaaaacgtaactgtttgagcaaataccacgaaatgttcaggcgctaagatacggcaataccgatacatccagcatagcaaaaatggcgaagagcacagagtcagataaagctatagtagaactagggtctccaggagatgggggcccgaattgacaacccatgtgcgctttagtccgaccctccttccattcttggctctcggccggccgtcgttccttccaagccgggcggcattgttcggccgtccagcccttcaagcagaccttcgtccttcgtccgatgcctcaggccccgagcttgaagcattccggttggaatcctggttgcccgaaggtgtttggggttcctcaaggcttgaaagcccggaggttcagggagggcaagtcttcgaa

SEQ ID NO: 412454 - DNA, 311 bp, Oryza sativa
ttcctaccgtgtggtggactctccctgctgtctagtgagtggggtgtatggctggactgctaacatggagaggatcatgaaggcccaggctctgagggactccagcatggccggctacatgtcgagcaagaagaccatggagatcaacccggagaattccatcatggacgagctcctgaagcgtgccgatgctgacaagaacgacaagtctgtgaaggacctggtgatgctgctcttcgagactgcccttctgacctccggcttcagccttgaggaccccaacacctttggcaccaggatccaccggatgc

SEQ ID NO: 412455 - DNA, 173 bp, Oryza sativa
atctctgccacccaaaagaccgttgatggaccgtccaggaaggactggaggggtggcagggcggccagttttaacatcattcccagcagcactggtgctgccaaagctgttggcaaggttcttcctgatttgaatggcaagcttacgggaatgtccttccgtgttcccactgg

SEQ ID NO: 412456 - DNA, 112 bp, Oryza sativa
cccattttctgtagcagcagcagctgagcttgaagcagcagagcgaggtagacatggccgccgccaccatggccctctcgtccccggcgctggccggtaaggccgtcgcgaa

SEQ ID NO: 412457 - DNA, 171 bp, Oryza sativa
gatcttctatagaaactagactggccaaaacgatataatatgtgccttgtaacagcaaaaggcttgtgctatctccatgaagaatcaacattgaaaatcatccatagagatattaaaccatcaaatattcttcttgatgaaagactgcaaccgaaaatatttgattttggt

SEQ ID NO: 412458 - DNA, 256 bp, Oryza sativa
  unsure (1)..(256): unsure at all n locations
gagttccaaattttgaatcccttctcaaattccaaggtagtacaccaagcactatcaagcttgctacttgctacagtgtatacacacacacaacccggcctagctagctacccagtacatacgcaagtacatgaatgtattgtacgtacaacgtgtacagtgcagcttaattaatnttaattctaaatttaaattgatttaattagaccgttgaccgaagcggccgagcccggttgagggaaccttcggtgaaagg

SEQ ID NO: 412459 - DNA, 110 bp, Oryza sativa
gtttcttgagcggatcaacgggcggctggcgaaggtggggctcgtgtcggcgctcgccgtggaggcgcctcgcgagggcgggctcctggagcaggccggcagagggggcg

SEQ ID NO: 412460 - DNA, 498 bp, Oryza sativa
agcatttatgacacagatgtattcatgccaatatttgatgccatccaccaattggctggcaatggaattcaatcatactcgggtaaagtaggtcctgaagatgttgacaaagttgatatggcttacagagtagttgcagatcacataagaaccctttcgtttgctattgctgatggttctcaacctggaaatgagggcagagaatatgttctgaggcgtattcttaggcgcgctgttcactttggtcatcaaaagttgaaagcaaagcaaggattttttagctctcttgtacatgtatttgtccaactgatgggagatgtattccctgagctgaaggacaatgaaaagaagatcaaagatataattaaagatgaagaggaaagctttgagaacactctaacaaagggttttgaaaaatttaaaaagcggcagatgctgttaagagagtggaggaacagtacttactggacaggatgcattttgtctgtgggacaccct

SEQ ID NO: 412461 - DNA, 383 bp, Oryza sativa
gtcgcttctctaccaatccgcctcggtccgagcgcgcgggcgctttccccccctcgccggcggcgacgagctcgaggcggtggcgcgctcgcctacctcctgagggcggagcggggggatggagcccatgagcgtggacggcggcgggggatgcggcggtctggacacgcagatcgagcagctgatgcagcgtcccccgctcgccgagcaggagggtaaagcactgtgcgagaaggccaaggagatattgacggaggaaatgaatgctcaacccgtcaaaagcccagtaacgatctgtggtgatattcacggacaattccatgaccttggagaaccttcccggatcggtgggaagtgcccagatactaatatttatttatggg

SEQ ID NO: 412462 - DNA, 133 bp, Oryza sativa
gcgccttgtcttggttgatggcaaggtcaggactgacaagacggacccagctggtttcatggatggcatttccatccccaagactggtgtgaactacaagcttctgtacgacaccaagggacgtttccgcctt

SEQ ID NO: 412463 - DNA, 453 bp, Oryza sativa
atcaatttctttaatggaactgtagcgatgcccaaactttgtccagaactagatggtcttagttccatctggaagctcttcacagctgtccctgttcttgtcactgcctacatctgccattacaatgttcacagcattgacaatgagcttgaagacagaacacatattaaacctattgtgcgaacatccctgttcctctgctccagtgtttacattgctacaagtttctttgcatatctcctcttcggcgagggtaccctagatgatgttctcgctaacttcgatgcaaatcttgggattccatttagttccgcctttgatgatatagtgcgagtgagctatgctgctcacgttatgcttgtctttcccatagtcttctttgcccttaggctcaacttggatggactgctcttccccacattaaggcacatttctcgtgacaacaagagattt

SEQ ID NO: 412464 - DNA, 381 bp, Oryza sativa
acgacaaaccacgaacttggatattaaagatgccacaaagaaggttcacataaacaacacaggtcacagcagcgaaagctacaagcaaaccctgcataatcgaaaagcaaatgtttttcaaaaccagacacacaaactgatagatagaagcccacacggacagatcataggattagcagcagtaatccaagcattgccaaggcaaccaggccaagaacccctgaaccttctctagtacttcgtcacccctcatcacccttgtcaccattcgtcgaactcggagcccgacctcctcgtagtccttttcccagcgcggcgagggtcctcgcgggccttggagaactccccctcctccatgccctcgccgacgtaccagtggac

SEQ ID NO: 412465 - DNA, 522 bp, Oryza sativa
cgtcttcgttctcgcctctctccgcgccctcctccgccgccgctcgccgccgttcgtctccgccgccaccgccgccgccatgagggagtgcatctcgatccacatcgggcaggccggtatccaggtcgggaacgcgtgctgggagctctattgcctcgagcatggcatccagcctgatggacagatgcccggtgacaagaccgttgggggaggtgatgatgcttttaacaccttcttcagtgagactggtgctgggaagcatgtcccccgtgctgtcttcgtcgatcttgagcctaccgtgattgatgaggtgaggactggtgactaccgccagctcttccaccctgagcagctcatcagtggcaaggaggatgcagccaacatctttgcccgtggtcactacaccattggcaaggagattgttgatctgtgccttgaccgcattaggaagcttgccgacaactgcactggtctccagggcttccttgtgttcaacgcctgtggaggaggaacgggctccgt

SEQ ID NO: 412466 - DNA, 305 bp, Oryza sativa
gttgcttcatacaagtaagcagcagctagttgccgacaaggcctgagaaggaagaagaagctctcatcatcatcaccatgtcgtgctgcggtggcaactgcggatgcggctccagctgccagtgccggaaccggctgcggcggatgcaagtactctgaggtggagcccacgaccacgaccaccttccttgccgatgcaaccaacatggggtctggcgctgcttccggaggatcagagatggcggcggagatacgcagctgaggatgcttcaccctgaagtgcggcaccagctgcttgctgcttct

SEQ ID NO: 412467 - DNA, 390 bp, Oryza sativa
cggacgtctttgatccaccctcgccgccgccgccgccggaagtggccactttagccgccggcgccgtcgtctccggagaaggagaggagcagccatgggtcgcgtgcggaccaagacggtgaagaagacctcgaggcaggtgatcgagatgtactactcgcggatgacgctcgacttgcacaccaacaagaaggtgctcgaggaggtgtccatcctgccgtcgaagcggctgcgcaacaaggtggccgggttcaccacccacctgatgcgccgtatccagcgcgggcccgtgcggggcatcttgctgaagctgcaggaagaggagcgcgagcgccgcatggacttcgtcccggagaagtctgcgcttgaggtggaggatatccgcgtcta

SEQ ID NO: 412468 - DNA, 308 bp, Oryza sativa
gctggtcgctgtttgcaattgcaaatggtggattcctcggaggggctccgacggctcgccgcgttgctgttcaagtgctgcagccttgacagctccaatcgtcccaacggcctgcaggatcctgaacggctggcgagggaaacagtttttaacgtaaatgaaatagaggcgctgtatgagctgttcaagaagattagcagcgctgcggttgatgatggcttgatcaatacggaagaattccaactggcactgtttaagaccagcagaaaagacagcatgtttgctgatcgggtttttgatctgtttga

SEQ ID NO: 412469 - DNA, 540 bp, Oryza sativa
agagtttgttgccggcactcgttcgaaatgatagccgaggcgtgaataccccttcaggaaaagcagggtccaagtttccttgattgtgaagacgctgaagtttcgatattcatccctgggagtacctatgtgcgtagtcgacattagtccatagaagcgtgaagccggagcaaacctcggaatggcgaaaattctcccgccgcaaatcatcgacgaagcttctctacaacagggacgtgtcgattgtaagaacgctccgatagtcagacccatcgtctacggaaacgaggcacggtattttcggtaaaaaacgggaaggggatggacatacacacgagtggaaagtatatttgaagccttttaacaatgaggacatgagcacctggatcaagaaagtccattttaaactgcatgacagctattagaacccgaatcggatcgtcatgaaccccccgtacgaggtggccgagacaggctggggagaattcgacatcgttatcaagggctatttccttgacccaaacgagagaccggtgaccc

SEQ ID NO: 412470 - DNA, 119 bp, Oryza sativa
ggtcagtatgccttaatgcgctcgatatcatatcgctctgaaagggatttgatttgccggggcgcgtctcacacccgcctgaggcagccctacaacccggcgctcccctcccccatgac

SEQ ID NO: 412471 - DNA, 130 bp, Oryza sativa
ggctactctcctgttggatacacttgacaaggacatcaagtctttctccatgagagtgagggaatggtttggatggcactctcctgagttggtcaaaatcggcaatgacaactacatctatgctaagctt

SEQ ID NO: 412472 - DNA, 337 bp, Oryza sativa
ctcactctcagcagcagcagcagcagcagctgagcttgaagcagcagagcgaggtagacatggccgccgccaccatggccctctcgtccccggcgctggccggcaaggccgccgcgaaggtgttcggcgaggggcgcatcaccatgcgcaagtcggcggcgaagcccaagcccgccgcgtcggggagcccgtggtacggcgccgaccgcgtgctctacctcggcccgctctccggcgagccgccgagctacctgaccggcgagttccccggcgactacgggtgggacaccgcggggctcttcgccgacccggagacgttcgccaagaaccgggagct

SEQ ID NO: 412473 - DNA, 420 bp, Oryza sativa
ctttttatgggacaactaagaaaccttctgggtaaaggggcatatgatccgcagtcgtgtgcttggatgtctggggtgaatgtgattgatttggagaaatggagggagcataatgtcacagagaattaccttcaactactgaaaaagttccaacacaatgatgatgaagcttcagtgcgagctgcagctttgccaataagcttgcttgcctttgaacatcttatatatcctctcgatgaaagattgactatatctgggcttggatatgactatgccatcaaagaggaacttgtccggaattctgtatcattgcattataacggtaatatgaagccttggcttgagttaggtataccggactacaggaagtactggaagaggtttcttacacgagatgaacgattcatggatgagtgcaat

SEQ ID NO: 412474 - DNA, 285 bp, Oryza sativa
gtgtgtttgatgtttttggacatggacagtgagttatttgaggagtgccagcagcagtacatagagaagcaagcaagagcaaaagatatggaggagcaaagattgtcagcatggagacaactggaagctgctgccgccaaggcttcgggagatgacatggttttggtcaactagcatccataaatatgcaagcgacgcttcaaagatcatgcttgctcagatgattggtgctcactttatcttacaagcactcgcgcgcaccagtcgacttggtatcgatgttgc

SEQ ID NO: 412475 - DNA, 386 bp, Oryza sativa
gcctattgtcgagcctgagatccttgtcgatggctctcatgacattgagcgctgtgcctatatcaccgagaaggtcctcgctgcctgctacaaggccctcaacgaacaccatgtcctcctggagggttccctcctgaagcccaacatggtcaccccaggatctgaatccaagaaggtttcccctcagctcatcgccgagtacaccgtctgcgccctccagaggactgtccctgctgccgtgcctgccattgtcttcctctctggtggacaaagcgaggaggaggcgaccgtgaacctcaacgccatgaacaagctcagcaccaagaagccgtgggctctgtccttctcctttggccgtgctctccagcagaacacgctcaaggcct

SEQ ID NO: 412476 - DNA, 386 bp, Oryza sativa
gagatggcacaactacttctgttgtgcttgctcaggggctgattgctgagggtgttaaggtcgttgcagctggtgccaatcctgtgcaaattacacgtggtatcgagaaaactgcgaaagcactagttgaagagctaaagaaattgtcaaaggaggttgaagacagtgagcttgcggatgttgctgcagtcagtgctggcaacaattatgaaatcggtaatatgatagcagaggctatgagcaaggttggcaggaagggtgtggttacccttgaagaagggagaagttctgagaataatctctatgttgcggagggaatgccagttgaacgtggttatatctccccgtattttgcaactgacagctagaaaatgttcttgctgaat

SEQ ID NO: 412477 - DNA, 291 bp, Oryza sativa
gatatctcaaccaggtcttgatcctaaattgtctgaaattcatcatcggataactgttcgtaaaaaggggtggagtttccacagaaaagttaatcggggaaacaaagattgtgcaaaagagggaccgccttgttctggatgggttgagggcatggcaccagttttctcgagatctgcttggcgatgtgcttggcatcttatccagaatgatcttatccacggatggggcattgattacaaatttgggtactgtgctcagggtgactgaacaaataacattggagtagatgt

SEQ ID NO: 412478 - DNA, 325 bp, Oryza sativa
gatggacgtgaaccctcatgagttcgtcaaggcctactccgcccacctaaagcgctgcggcacgatggagctccctgagtgggttgacatcgtgaagactgcgaggttcaaggagctccctgcctatgatccggactggtactacacgagggctgcctcgattgcaaggaagatctacctgaggcacggtattggtgtaggtggctcccataaacattacttgtgggcgttctacgtactcctcaagccttccctgctctgctcttgacacttgcgcactttcctttttgatgagctacgagagcccaatgcacgccctgcaaat

SEQ ID NO: 412479 - DNA, 510 bp, Oryza sativa
tgttcttgcagagttacttcttggtcagccactgtttcctggagagagtgctgttgaccagctagtagagataatcaaggttcttggtactccaacccgtgaggaaatacgatgcatgaaccccaactatactgagttcaaatttcctcagattaaggctcatccttggcacaagattttccacaagagaatgcctccagaagccatagaccttgcttcccgtcttctccaatattcaccaagtctacgctgcactgctcttgacgcatgtgcacattccttctttgatgagctacgagagcccaatgcacgcctgccaaatggtcgtccattccctcctctgttcaacttcaagcatgaactagccagcgcctctccagaactcatccacaggctcataccggatcatatcagacggcaacatggcctcaactttgcgcatgctgggagctaaagggcaccgcgacgccaccgttttgttcgtttatttttccatgagctggacattgc

SEQ ID NO: 412480 - DNA, 365 bp, Oryza sativa
tcataggatgcttgtgtatgagtatgtcaacaatgggaatctcgaaagttggttacatggagagttatcccaatatagttctctcacttggctagcgcgcatgaaaattcttttgggtactgcaaaggcccttgcttacttacatgaggcaattgaaccaaaagttgtgcatcgtgatatcaaggccagtaatatattgattgatgatgagtttaacgccaaaatatctgactttggtttggccaagatgctaggtgctggtaaaagtcatattgctactcgagttatgggtacttttggctatgtcgcgcctgagtatgctaacagtggacttttgaatgaaaagagtgatgtctacagttttg

SEQ ID NO: 412481 - DNA, 263 bp, Oryza sativa
gtctttggcatgatgtgcccgtacatgatcgtgtgttccgtttttattggcaccatcatctcgtgcggtgtaatttggccgtacatcgagtcaaaggagggcatctggtacccaagcaaccttgggcccaacagccttaacgggattagaggattcaaggtgtttatcggcttgttcatgataatggctgactgcctcttcgtctttcctctgcatcatggtgcggacaacatgtggcatgatctaacggcgtctgtaggcaa

SEQ ID NO: 412482 - DNA, 383 bp, Oryza sativa
ggcaggacatgtacaatttcttgcttgactccggcatggacccggtgttggcagacttatcggtgaggagtgctcttatcgtctatttgggatgggaagagcagcgctgaggatttggagaaggttgataccgacctcagggccagcatttggaagcaaatggttgacgctgggatcatgtacatttctagcaacaccttctagtactatgatcaggttcttgacacggctgccatgcttggtgctgttccagagcgctacttatggactggtggagagattgggttcagcatctacttctcgatggttaggggcaaagccactgtcctctgcatggagatgaccaaaggggcttggcaccaacctaccactttattgttcct

SEQ ID NO: 412483 - DNA, 261 bp, Oryza sativa
cccacgcgtccgcccacgcgtccggtgaaggaaggatacaaagttgcagttgcgttgccgaatcttgatgaacttttggagggcactctaacccatgattttgtatcagtgtggaatgaatggcggaaaacaaaatactaccccttgcattacagtgagctagtacgccttgctgctctttacaaatacggtgggatataccttgactctgatgttgttgtttttaaacctttaaacgcactccggaattctatttgttgt

SEQ ID NO: 412484 - DNA, 474 bp, Oryza sativa
gcttcctccccctctcccacgaaagatggcgtctcacattgttgggtacccccgcatgggccccaagagggagctcaagtttgccctggagtctttctgggatgggaagagcagcgctgaggatttggagaaggttgcgaccgacctcagggccagcatctggaagcaaatggctgacgctgggatcaagtacatccccagcaacaccttctcgtactatgatcaggttcttgacacggctgccatgcttggtgctgtcccagagcgctactcatggactggtggagagattgggttcagcacctacttctcgatggctaggggcaatgccactgtccctgccatggagatgaccaagtggtttgacaccaactaccactttatcgtccctgaacttggtcccaacaccaagttctcctactctttccacaaggctgtgaatgaatacaaggaggctaaggcgcttggcgttga

SEQ ID NO: 412485 - DNA, 116 bp, Oryza sativa
aaggtcgacccctctctgattttactaagcagaagatagttgtggtgggagctggaagtgatcaacattgctagctaggaagcatggcccgttcacagttggtgttggtcgtcctg

SEQ ID NO: 412486 - DNA, 350 bp, Oryza sativa
gctgcaggtcatctcctcactgactgcctccctgaggttcgatggtgctctgaatgtggatgtcaacgagttccagaccaacctggtgccctacccgaggatccacttcatgctttcctcctacgccccggtgatctcggccgagaaggcctaccacgagcagctctccgtggcggagatcaccaacagcgccttcgagccgtcctccatgatggccaagtgcgacccgcgccacggcaagtacatggcgtgctgcctgatgtaccgcggcgacgtggtccccaaggacgtgaacgccgcggtggccaccatcaagacgaagcgcaccatccagttcgcggactggtgcc

SEQ ID NO: 412487 - DNA, 318 bp, Oryza sativa
ggttaaccaagtgatgcacgattcaaacgccccacaggcgttgccgtggatgatacaggaaatgtctatgttgctgatacagcaaacttagcaattcggaagattggggaatcaggagtgaccaccattgctggtggaaaatcaaacatcccaggttatagggatggtccaagtgaagatgcaaagttctctactgattttgatgtggtatatgtgaagaaaatgtgctctttgctggttattgaccgtggaaatgctgcacttaggaaaatcgccctttcgcatgaagattgtacctaccaggatgcaattttttta

SEQ ID NO: 412488 - DNA, 109 bp, Oryza sativa
aaattcagtgcttcctggtgtggaccatgtcgtgttattgcacctatttatgctgagatgtcaaagacttatcctcaactcatgttcttgacaatagatgttgatgacc

SEQ ID NO: 412489 - DNA, 169 bp, Oryza sativa
cattttagcacaggagaagccgcagccactgagatttgaccttctgtttctaccagaaaaacacaaacagtgaagatgtcgcagcctgctgagctttcccgtgaggagaatgtgtacatggctaagcttgcagagcaggccgagaggtatgaggagatggttgtgttct

SEQ ID NO: 412490 - DNA, 421 bp, Oryza sativa
catctactagggtttctctctctctcctccccccctagacagccgtcgatgacgccacaccaccgatggggatggcgagggtgagggtgatttgcatctcacagggcaacttggtgacgtaatttatgagtcagcacagttagtctctgacatgggtgagagcatttatcttccgaccttaatctgtcacctacttctgatatcaacttattggagagtcgtgatattcacatacttctttccttgtggcgcggtgctcaaaggatggttcttctgctggagtgacattggtaacatcattagtgtcactatttagccaccgaaaagtcagagctgccactgctatgacaggagagatgactcttaggggctcttgtgttgccagttggccgtgttaaggatatggcacttgcaacacata

SEQ ID NO: 412491 - DNA, 494 bp, Oryza sativa
  unsure (1)..(494): unsure at all n locations
ggcattggcatgatgtgcccgtacatgatcgtgttctccgttttcattggcaccatcatctcgtgcggtgtaatttggccgtacatcgagtcaaaggagggcatctggtacccaagcaaccttgggcccaacagccttaacggcatcagaggttacaaggtgttcatcggcttgtccatgataatggctgactgcctcttcgtcttcctctgcatcatggtccggacaacatgtgccatgatcaagcggcgtcggcaggcaatgcaaggtggtggcggtaatgcgcagccattccagggtatcgacatcgccgatcagccggtgaagagcttcgatgatcgccgcagggcgcaggtgttcctccgggacgagataccggactcggtcaccattggctgctatgttcttctgtcgaacatcttcatcgncgccatccctcacctctacccacagatgagggacagccatgttgcgcttatctaccttgcgggccc

SEQ ID NO: 412492 - DNA, 384 bp, Oryza sativa
gttggcttctcctccccctcccggttcggatcgggtcggttcggatccggttcgagttcggattttccttcggttcgggggttggtgggaaagcatggtggagaccgatgatgcaatccgatgctacgaaggggtacccttgtgaggaatgagtgaacactcacctgaagcaagaggcttgacctaagagagattgataacaccaagatcatccgccaggcttaccggaccatgcttgtcaccgaaccggactcggaacagtacatctacggtgccatcctgtacgaggagacatctgaccaattaattgatgatggtaaaaaagattgttgacatctctcacagagcagaaaattgttcaacgtatcaaggccgacaagggtt

SEQ ID NO: 412493 - DNA, 466 bp, Oryza sativa
tctaggagtgtcagttgggcttgtttggacttcatttggtggggaggtacaatttgtcgaggctacagcgatggtgggtaagggtgatttgcatctgacagggcaacttggtgacgtaattaaggagtcagcacagttagctctgacatgggtgagagcaagagctgctgaccttaatctgtcacctacttctgatattaacttattggagagtcgtgatattcacatacattttcctgctggcgcggtgccaaaggatggtccttctgctggagtgacattggtaacatcattagtgtcactatttagccaccgaaaagtcagagctgacactgctatgacgggagagatgactcttaggggccttgtgttgccagttggcggtgttaaggataaggtacttgcagcacatagatatggcattaagagagtaatattgccagaaagaaacatgaaggacttggct

SEQ ID NO: 412494 - DNA, 287 bp, Oryza sativa
cactcctcagcagcagcagcagcagcagctgagcttgaagcagcagagcgaggtagacatggccgccgccaccatggccctctcgtccccggcgctggccggcaaggccgccgcgaaggtgttcggcgaggggcgcatcaccatgcgcaagtcggcggcgaagcccaagcccgccgcgtcggggagcccgtggtacggagccgaccgcgtgctctacctcggcccgctctccggcgagccgccgagctactctgaccggcgagattcctggagtcttcgggtgtgac

SEQ ID NO: 412495 - DNA, 406 bp, Oryza sativa
atcatgttgcccttcctcctggttctatggggaaaattagttacattgcaccagctggccagtatagcttgcaggatacagttctggaactggaattccagggcatcaaaaagcaatttactatgctccagacatggcctgtccggtcaccaaggcctgtttcatcaaagcttgctgctgacacgcctcttctaacaggacagcgtgtacttgatgcactatttccctcagttcttggaggaacttgtgctattcctggagcattcggttgtggaaaaactgtcattagtcaggcactttcaaagtactccaattctgaagctgcggtttatgtggtctgtggcgcaagaggatacctgattgctgaagtcctatgatctacttctattgatattactttccttta

SEQ ID NO: 412496 - DNA, 400 bp, Oryza sativa
gtcgacggctcctcctcctctcgccttctcccgtcttctccttcgagttagctacctccttattcaaccatgggtaaggagaagacgcacatcaacatcgtggtcattggccacgtcgactccggcaagtcgaccaccacgggccatctgatttacaagcttggaggtatcgacaagcgtgtgatcgagaggttcgagaaggaagccgctgagatgaacaagaggtccttcaagtacgcgtgggtgctcgacaagctcaaggccgagcgtgagagaggtatcaccatcgatattgccctgtggaagttcgagaccaccaagtactactgcactgtcatcgatgcccctggtcaccgcgacttcatcaagaacatgatcacgggtacctcccaggctgact

SEQ ID NO: 412497 - DNA, 245 bp, Oryza sativa
ctttattagcaccaaccccgtctccttcctccattcctccgccgctagaaccttctagaagctctcctcctcctcccatggcggcgacgatcgtgtccgtcaaggcgcgccagatcttcgacagcaggggcaaccccaccgtcgaggtcgatgtgtgctgctcagatggaacctttgcaagggctgcagttcccagcggtgcatcatctggtgcctatgaagtcttcgaatctgagggacggcgg

SEQ ID NO: 412498 - DNA, 190 bp, Oryza sativa
tcatcatattttacattggtcaaaggagtggagggcatcactggggtaatcatggttgtatgcatgataattgcttttactctagcaacccggtggttccgccgtagcttggttaagcttcctaggccatttgacaaactgactggcttcaatgccttttggtattctcactcatctgttcatcattgtg

SEQ ID NO: 412499 - DNA, 106 bp, Oryza sativa
ctgtatggggtgaaaatggcgcaggcggtggtgccggcgatgtagtgccaggtcggggccgtgcgggcgaggccggcggaggttgcggcgtcagcggtggggaggt

SEQ ID NO: 412500 - DNA, 180 bp, Oryza sativa
gagtgttgaagatgctgctgaccaccccgttcgtgtcgtcccctgtgagggtccagggcaatgggggcagcggcgcctcgccgtgggcgggcgcggcgacggcgctgaggatccaggcggcgaagcagctgacggggcgtgtggtgacgacgaaggcggacaagacggtgggggtggtgg

SEQ ID NO: 412501 - DNA, 540 bp, Oryza sativa
aaataaaggaaaaaaaaacaaaacacaccaagccaaataaaagcgacaatgggatcgctcaccaccaacatcgtcctcgccgtcgccgtggtggcagcgctggtcggcggcgggtcgtgcggcccgcccaaggtgccacccggcccgaacatcacgaccaactacaacgccccgtggctccccgccagggccacctggtacggccagccctacggctccggctccaccgacaatggtggcgcgtgcgggatcaagaacgtcaacctgcctccctacaacggcatgatctcctgcggcaacgtcccaatcttcaaggacggcaggggatgcggctcatgctacgaggtgaagtgtgagcagccggcggcgtgctcgaagcagccggtgacggtgttcatcacggacatgaactacgagcccatttcggcgtaccacttcgacttctccggctaggtgttcggcgccatggcttgccccgggaaggagaccgagctccgcagggccggcatcatcgacatgcagtttaggagggtgcgctgc

SEQ ID NO: 412502 - DNA, 338 bp, Oryza sativa
ttctaatcgcagagaaaaaaaaatctcccctcgaagcgaagcgtcgaatcgccttctcaagatgcagatctttgtgaagaccctcaccggcaagaccatcaccctcgaggttgagtcctcggacaccattgacaatgtcaaggccaagatccaggacaaggagggcattcccccggaccagcagcgtctcatctttgctggcaagcagcttgaggatggccgcaccctggccgactacaacatccagaaggagtccaccctccaccttgtgctcaggctcaggggaggcatgctgatcttcgtcaagaccttgactggcaagaccatcacccttgagg

SEQ ID NO: 412503 - DNA, 531 bp, Oryza sativa
aagttgcagtccaagatgatttgaaggctgctactggtgaatttacaaaagatgcagatgacgcaaacagactgaatcgcattcttcaactaacagggttcagtgatcctgtgtatgctgaagcatatgtaactgttcaccactatgatattgtgcttgatgttacagtcataaaccgaacaaaggaaacacttcagaacttgtgcttggagttagcaacaatgggtgatctcaaacttgttgaccgcccccagaattacacgctggctcctgagtcaagcaagcaaattcgggccaacatcaaggtttcatcaacagagacgggagttatattcggtaacattgtttatgagacctcaaatgtaatggagcgatcagtgggggtcctaaacgatattcacattgacatcatggattatatctcacctgctacttgtggcgatgttgctttccggaacatgtgggcagaatttgagtgggaaaacaagggggctgtgaacaccgtctttaagatgagaaggaattttggat

SEQ ID NO: 412504 - DNA, 324 bp, Oryza sativa
atgtcgactccatagatcccctcttccacgtgctccgcgtgctccccttctccttcctccggccgccgcgcacccgcctgaggctgccctccaacctggcgctcccctcccccatgaccgtcttcgccctcatcctcctcacctacttcgccgtcgtctccggcctcgtctacgacgtcatcgtcgagccccccggcatcggcagcgtccaggaccccgccaccggcgccgtccgccccgtcgtcttcctccccggccgtgtcaacggccagctcatcatccaggggcttcttcttcggtatatgttcgtcatcggcggtatcg

SEQ ID NO: 412505 - DNA, 320 bp, Oryza sativa
gtcgcctctcctcctcctccctaacccctacgcttccagaaccttctcgaagctcccgctcccccccccttccgctccaatggcgaaggaaccgatgcgcgtgctcgtcaccggcgccgcaggacaaattggatatgctcttgtccccatgattgctaggggtgtgatgttgggtgctgaccagcctgctattatacacatgcttgacattccaccagctactgaatcttttaatggccttaagatggagctggctgatgctgcatttcctcttttgaagggaattgtcggaccaactgctgttgtggaggcctgcactg

SEQ ID NO: 412506 - DNA, 228 bp, Oryza sativa
gtagattgcatccctaccttttcagcccctagtatctgtttcccgtgattaccttgcacgttcgctattctggtgcatgctcttgggtcactacatccgagggcttgaggacaggttagaatcggcgcagcttctgaggatatttaccgatgtagagtctttccccaggggtgatgagcttatgatttgagaaagtttttgaccggtcgatcgatcgtgctaaccaat

SEQ ID NO: 412507 - DNA, 222 bp, Oryza sativa
gtttccgctgccgaatttttttttaattcggggggagagatttgaagaggcggcaccatgttggtctaccaggatctgcttaccggtgacgagctcctgtcggattcgttcccctacagagagatcgagaacggcatcctctgggaagcccatggcaagtgggtcgttcaaggagctattgatgtggacattggtgccaacccatctgctgagggtggtggt

SEQ ID NO: 412508 - DNA, 228 bp, Oryza sativa
cataactgcacgggggcgccgcacccggaccgggggaagttcacggacaaggggaagacgtacctggcgcggccgtggaaggagtactcgcggaccatctccgtgcagaacgagatcggggcggtggtggatccgggggggtggctggagtggaacggtaacttagccctggacaccctctactacgaggaggttgacaaccatggcccccggggcgagcatgagcaa

SEQ ID NO: 412509 - DNA, 406 bp, Oryza sativa
gctgtctgtctctctctctctctctgactatctggggctgtgaaaactctgagcatgtgaagaactcatacgttacctgtgatctgagaagcttgagctgaagctgtgacagcgtctcactgatcgatgatcactcaacttggctgctactgcgcattcactgcgtggttagctagctaactgagcacaagagctttagcaatggcgacgcctgggcagcagctgccgccggggttcaggttccacccgacggacgaggagctggtggtgcagtacctccggcggagggcgctgtgccggccgctccccgccgacgtgatcgaggacgtccactacgccggcgtgcttgacccctgggacctccccggcgcccgcgatggcgaggcctacttgttcagtttccggc

SEQ ID NO: 412510 - DNA, 421 bp, Oryza sativa
attttctgaaagtgtttgttgcgcagccttatagggaaaaccttggtttatatgcagaaagacttggagcaataaatgttgtctgctcaacacctgaagtcgcaaacagggtgaagagccagctgaaaccattggcacgatccatgtattcgaatccgcctattcatggtgctaggatagctgccaacgttgttggggatccaaccatgtctggcgaatggacacaggagatggaagatacggcaggggcctatcaagaatgtaagacagaagctttatgatagcttggctgcaaaggcccacagtggcacggaccggtctctcactctgaggcagataggcatgttctcctacacgggcttgaacaaaactcaaagtgataatatgaccgacaaatggcacatatacatgacaaaagatg

SEQ ID NO: 412511 - DNA, 463 bp, Oryza sativa
ctttccgcaactatcgacggcggcgaagtacgggacgatgatgatggtggaggtgcggtctcacccatatattggtatgatagcggaacaactcattgctgagtttgaggtatcatctgacgaacatgcatattggaattggcaatcaaagccagccattatcaaacttatgaagctatctctgcccatagaggttctctccaagaagaatcttgaacatgaataccttgaccatggagttctcactcttctaaaaaactggtttgagccattacctgatggaagcatgccaaacatgaatactcgatctgctgcacgtgaaatcattagctgattttccaattgacttggaacaatatgaccgaagagagctccttaagaaaagtggcctgggaaaggtcattttttttttgtccacatctgatgaggagaccactgcctaataggaaattggcttaagagc

SEQ ID NO: 412512 - DNA, 453 bp, Oryza sativa
gttttgttgtgtagcagtagtccaccgttgagagggtagcaaagccagccatccatggagcgcagtactctcgggagagctagaagcgatctattctagccacaaggaggagagataaacgtatcgaaatggagcacatcgcgaggttcttctttggagtgtccggcaatgtgatcgctctcttcctgctcctttcgccagttgtcaccttctggaggatcatcatgaagagatcaacggaggacttctccggcgtgccttacaacatgacacttctgaactgcctgctatctgcttggtacgggctgacgatcgtgtcaccgaacaacatgctggtgacgacgatcaacgggacggggtcggtgatcgaagccatctacgtggcgatcttcctcatcttcgcggagaggaaggccaggctgaagatgatgggcctcctgggcctagtcacct

SEQ ID NO: 412513 - DNA, 338 bp, Oryza sativa
aattggcagaaataatcaagcaaatcgcaggaggtggtgctctatctgggcaatgcgggtagaccgtagctcggcggccatgtcgaacacgagggggtgcttgcgacatgaccgtcggcggagctccggcggggcggatcgtgatggagctgtacgcgaaggacgtgccgcggacggcggagaacttccgcgcgctctgcaccggcgagaagggcgtgggcaagagcggcaagccgctgcactacaaggggagcaccttccaccgcgtgatcccggagttcatgtgccagggcggctactttcacccgcggtaacggcacgggaggggaggtcgatct

SEQ ID NO: 412514 - DNA, 193 bp, Oryza sativa
cgtcctccccggcgtaggcgacggcaacgacctggaccccggcggacagtactccgacccgctcggcctcgccgacaaccccgtgaccttcgccgagctcaaggccaaggagatcaagaatggccgtccctccatgttctccatgttcggctcatccgttcagaccatagccaccggcatgggacccttggtg

SEQ ID NO: 412515 - DNA, 301 bp, Oryza sativa
gctccaccttcacctcctcgccccttgctgccggacgacgaggtcctcccccctcgccctccgccgacgtcgagccagcagaagatggctgacgccgaggatattccagcccctcgtctgcgatagatggaactggtatggccaaggctggcttcgccggagatgatgcgcccagagctgtcttccccagcattgttggccgccctcgccacactggtgtcatggtcggaatgggccagaaggacgcctacgttggcgacgaggcgcactccaagaggggtatcttgaccctcaagtaccc

SEQ ID NO: 412516 - DNA, 534 bp, Oryza sativa
gttttccgtcgtgagggtgtcggctcgcgcggaggacgtcggcgaggaggtggaacggatcagggcgtgtatggtcggggacatcgacgtgagcctggactgcgccgggttcagcaagacggtggcgactgcgctggaggccacacgcggcggcgggaaggtgtgcctcgccggtatggggcacaccgagatgacggcgccgctgacctctgcggcgatcagggaggtggacgtggcggggatattccggtacaaggacacgtggccgctctgcatcgagctgctccgcagcggacagatcgacgtgacgccgttcatcacccaccgatttgggttttcgcaggaggacgtggaggaggcgtttgaggtcagcgcccgtggtcgcgacgccatcaaggtcatgttcaacctgtagatcgatccatccatcgatcgatcgacagcagaatatgtgacgggtttggaacgtatgtcgatcgtacaacacaatgtgagcttgctctgctggttgccgtgtctgcctgtccttacatg

SEQ ID NO: 412517 - DNA, 254 bp, Oryza sativa
tctaaccgccggcggatcgccctcgttagaacgaggggccgtgtaggcgctgagcgagacgaccagcttccttggctcggacgcttggcgggatgagattgggcgccgagtcggctagtccgggggccgcttcaccctgcgccgtaccggcacgagggcgccccagagcatctgggatggaccacgaccgtctcagtgccttgtgtctgtttctggagcagacgccatctctccctgactggagagattccggt

SEQ ID NO: 412518 - DNA, 453 bp, Oryza sativa
gtttaaacaaacccctctcactcccactaccatggatccttgcaagttccggccggcgagctcgttcgacacgaatacgacgacgacgaacgcgggagctgcggtgtggaacgacaacgaggcgctgacagtggggcccagggggccgatcctccttgaggactaccacctgatcgagaaggtggcgcacttcgcccgggagcgcatcccggagcgcgtggtccacgcccgcggcgcctccgccaagggcttattggagtgcacccacgacgtcaccgacatcacctgcgccgactttctccggtccccgggcgcccagacccccgtcatcgtccgtttctccaccgttatccacgagcgcggcagcccggagacgatccgcgacccgcgcgggttcggcgtcaagttctacacccgcgagggcaactgggacctcctcggcaacaacttgcc

SEQ ID NO: 412519 - DNA, 361 bp, Oryza sativa
gctgggttggcttctcctccccctctttaccttttcctcctcggttcggttccgtggttcgtctagggtttagtgggttgagatggcggcgcccgatgtcgagtaccgctgcttcgtcggcggcctcgcctgtgccaccgacgaccgctcccttgaggacgacttcttcacctacggagagatcctcgactccatgatcatcatccacagggagacggggaggtcacgtgggtttgggttcgtcaccttctcctacgagcagtggatgcgcgacgccatccagggcacgaacggcctggtgctcgagggtcgtgacatcaccgtcaatgatgaccatgcccgccgctccggcagcggaggc

SEQ ID NO: 412520 - DNA, 184 bp, Oryza sativa
cctgttgatcatgagcaaccaattcgcaccgatggatcgatcgatcgatccagcagctagatcaacagtactagctaggaagcatggcccgtgcacagttggtgttggtcgccctggtggcagctctgctcctcgccgccccgtacgccttcgtggtcatcacctgcggtcagtgtaactccgc

SEQ ID NO: 412521 - DNA, 325 bp, Oryza sativa
atgttcctgcaggtcatccgctagaaccttgcgaagacgtgcgcggagctctttttcgcgagcacatgagaccagggaagcactacaccaagatcgacgggtgtttctgcaggaaggtcaagatcgactgccaagaagagaccaccaacaggaccaacatggcttgactgctgaggtaagactgcaccaagagtggtgatgagttgaccagcctcaatggatgcgaagcccggatgaacgagggacatagcgagagctatagcagcactggtgcgagcaagaaggatgatgagaacttcccattgcctgagaaggtgataaagac

SEQ ID NO: 412522 - DNA, 506 bp, Oryza sativa
ctttaagtctgaatggggtgccacccgccaggctgccgcccccaagccggtgactgtctccatggctgtccgcgctggtgcctacgacgatgagcttgtcaagaccgcgaaaaccattgcatcaccaggaaggggtatccttgccatggatgagtcgaacgcgacctgcggtaagaggcttgcgtcaattggccttgagaacaccgaggccaaccgccaggcttaccggaccctccttgtcaccgcaccgggcttgggacagtacatctccggtgctatcctcttcgaggagactctgtaccagtcaactgtagatggcaagaagattgtcgacatcctcactgagcagaaaatcgttccaggtatcaaggtcgacaagggtcttgtgccccttgctggctccaacaacgagtcatggcgccaaggtctcgacggccttgcctcgcgcgaggcggcatactaccagcagggcgctcgcttcgccaagtggcgcactgttgtcagca

SEQ ID NO: 412523 - DNA, 423 bp, Oryza sativa
gtttttaagctcaggataaaccgcctcctaatgggagataaatccgttaatccgagtcattaatccacggataatcactgcggcatcgtaggccttttttgagctataaatagagctcctgatcccctcctccactccacaccaaaacctctccaatccccaaatcctcctcatctactcttccagaacctttctttttcgatttcgtgtccgagttctttgtgattgcagcgatggcgtccgtggatctgaccccgaggcaggcgaggaaggcgtacagcggcgatggtgggacctactacgagtggagccccgcagacctgcccatgctggaactcgccaacatcggcggcgccaagctgtcgctcaacgccggtggcctcgccctgcccagcttttccgactccggaaaggttgcgtatg

SEQ ID NO: 412524 - DNA, 439 bp, Oryza sativa
tctgaagcttacacgagcgctagctaacgaagggacagcgcgcttcgcgcgaaagatcggaagaaatgtcgaggccggccaggagcgacgcgcacctgtccccggagggggaggcggcgatggaggccgaggtgcgggagtactacgacgaggcggcgcccaagcgccactccaagccctcccgcagcgagccctccgccgtctacaccgacgcgctcgtccccgacgactcccaccccgagctcgacaggttccagcagctcgaagcccacaccgagaaattggtgtgcgagggtggcaaggcaggggatgagttcgtggagacggagttctacaaggatcttggctgcgtcggcaagcagcaccacacgactggaacagggttcatcaagatggacaagccctcggcggacgccttgtttcatctgtctgatgaccc

SEQ ID NO: 412525 - DNA, 313 bp, Oryza sativa
cgaatttccgggttgagaccaagccgtcgcgatttctcaaaaggagaggaaaccgagggcgaggaagcccctatcggcggggccacaccacccgccctacttcgagatgatcaaggaggcgatcatggcgctggacgggaacggcatggcgggatcgagcccgtacgcgatcgccaagtacatgggggagcagcacatgggggttctcccggcgaactaccggaaggtgctcgccgtgcagttgcggaacttcgccgccaagggccggctcgtgaaggtgaaggccctgttcaagctgtcggctgtcgaggag

SEQ ID NO: 412526 - DNA, 123 bp, Oryza sativa
gctgccaacaactttgcccgtggtcactacaccattggcatggagattgttgatctgtgccttgaccgcatcaggaagcttgccgacaactgcactggtctccagggcttccttgtgttcaac

SEQ ID NO: 412527 - DNA, 540 bp, Oryza sativa
ggagccacacgcgcgcgttttgtctaaccggataaaaccccaatctctaggcgcccccgccgtgatgtctcgccggtacgacagccgcacgacgatcttctcgccggaggggcgtctctaccaggtggagtacgcgatggaggcgatcgggaacgccgggtcggccctcggcgtcctggcggccgacggcgtggccctcgtcggcgagaagaaggtcacctccaagctcctccagacctcgcgctccgccgagaagatgtacaagatcgactcccacctcgcctgcgccgtcgccgggatcatgttcgacgccaacatcctcctcaacacggcgcgcctccacgcccagcgctacgccctctcctaccaggagcccatccccgtcgagcagctcgttcaatccctctgcgacaccaagcaggggtacacccagttcggcggccttcgccccttcggcgtctccttcctcttcgccggctgggacatgcaccatggcttccaactctacatgagcgatccctcccgtaactacagtggctg

SEQ ID NO: 412528 - DNA, 469 bp, Oryza sativa
ggtcatgggtggttggcgtttggagatcggtttggtcgtcccgcgggtcgagacgatcttgagttatatggagtcgggggattttgtgcaaaagaacgatttgtttcccttcctttctttctcgtggagcttcggattcggatgcgtacgagcgtaggttcgccagagatggatttcttcagcgaatatggtgatgctaacagatacaaaatacaggaagtcattggcaaaggaagctatggtgtagtttgttcagctattgaccaacatactggcgacaaggttgcaatcaagaaaatacacaatatctttgagcacttatctgatgctgtccgaatcctccgtgagatcaaattactccggctattacggcatcctgatataggtgagatcaagcatataatgctacctccatcaaggagggacttcaaggacatatattgtgtctttgagctgatggataccgatc

SEQ ID NO: 412529 - DNA, 477 bp, Oryza sativa
gatgttctatgccatccatggattcgtgatcacggagttgctccagatcggcctgttgatccagctgtcctatctcgcatcaagcagttctctgcaatgaataagttgaagaagatggctttgcgggtaatagctgagagtctctcagaggaggaaatcgctgggttgaaggaaatgtttcagactatggatgctgataacagtggcgcgatcacatatgatgagcttaaagaaggcttgagaaaatatggctcaacacttaaggacaccgagattcgcgatcttatggttgccgcagatatagactacatcggatcatctgattatacctgatccattgctgccacattgtctcttcaattcactggttccggaggaacatcttgtggcacttcttcttaccattggtcacctattgaggtcctccctttattatttgagaactgttttctgcttgaattagttcccctctccctc

SEQ ID NO: 412530 - DNA, 539 bp, Oryza sativa
gtttgctacttcaagaacatccaggtggtggacagcagcatccagctgaaggcccccaagggggtgggcacctacaccgagcagtccaattgctacgatgttcagaacggcaacaatggcgactggggcacctacttctactatggcggcccggggaagaactcgaattgcccatgaatttggtgatgaagaagctgatgatatatatatatttatatatatatatataatatatggtgacagttttaatatttcttttattttttagcattttgaaggcaatttgtattttcctaattgttatctaatatttgttcattcatttttaacagggttgtttatattcgttattttatctatattttaattaggtttaatatgcttttttttatttcatttcattcatttattaacttttttattttttaggcgactttttggttgttctttgtttatttatttaccaaccttagtttgttgtatttaacatctatttttttaattctcttatatatcttttactattttatttatatttt

SEQ ID NO: 412531 - DNA, 499 bp, Oryza sativa
cttatctccatcccgcgagcgagcaggggcgccgggcgctggcgccgtcgttcgtcctgttgcttccgcccgcatcctgaataaatgggagatagggaaagacgaactgtgtttgtcacagtagggaccacgtgttttgatgctcttgtcaaggcagtagattccccgcaagtcaaagaagctctactggaaaaaggttatactgatctaataattcaaatgggccgaggtacatatgttccatctaaggtctcaggagatggaactcttcaagttgattatttcactttttcgccaagcattgctgattatataagggatgcttccctggtcatcagtcatgcaggttcaggaagcatattcgagacgttgcgacatggcaaacctctaattgttgttgaaaatgaggatttgatggacaatcatcagagtgagttagcagaagaactggctacaaggaaacaccctttttgtgcaagcccacatacactaggagaga

SEQ ID NO: 412532 - DNA, 500 bp, Oryza sativa
attacttaatgtcagtaagggtgaaactgcaccggcaaccaagttaacatcagaggtgagcagtgcttttttcccacgattcagtccagatggaaagtatcttgtgtttatctcagcaaagagtgctatagatagtggaacacacaatgcgacaaattcaatgcataagattgactggcctgcagatgggaaattggagggcctcagcgttgctgatgtggtacctattgtgatgtgccctcaggatggttgttttcctggtctgtactgctctgtcatacttaggaatccatggcttactgatggacaaactatgattttatcttctatttggggaagtaaggaagtaatactttctgtaaatgttgcgagccgtgaagtttcaagagttagtcctcaggattcggattattcatggaatgttcttgccctagacaaggataatatttttgcagttttaagcagccttattacaagttctaaatatactatgggtctga

SEQ ID NO: 412533 - DNA, 350 bp, Oryza sativa
gtttgaagcaattcttgagctcaatcagcaacaggatctatctccttcttgcttagttaagtccttcgccctcccaagaagaagaagatgtcttgctgcggcggcaactgcggctgcggcagcggctgccagtgcggcggcggctgcggcggctgcacgatgttccctgatgtggaggccacagccaccaccaagaccttcgtcctcgctgctccatccaacaaggcgagctctggaggaatgcagatggcggtggagagctgctagaacggctgttgctgatgcaacacctgcaagtgtggcaccagctgcagcggttgctcctgctgttcctgcaactgaacttatcg

SEQ ID NO: 412534 - DNA, 183 bp, Oryza sativa
ggatactcttcctactctgcaactgacagtgaaaagatggcattacagcatgagaagggcatgctgctccttgtggacaagaaaatcaacaatgccagagatcttataacaattctggaggatgctattaggggtggactcccaatcctaatacttacgggaggctatatatcaagaacctct

SEQ ID NO: 412535 - DNA, 160 bp, Oryza sativa
gtatgcaagaagatacacgatatctttgaacacatgtctgatgctgcacggattctccgtgagatcaagcttctgaggctgctaagacatcctgacatagttgagatcaagcacattatgttgcctccatcgaggagggatttcaaagatatttatgtag

SEQ ID NO: 412536 - DNA, 423 bp, Oryza sativa
attgaaaggcgtcttcgtactcgcctctctacgggcccttctccgacgacgatcggcgccgttcgtctccgacgccaccgccggcgtcatgagggagtgcatctcgatccacattgggcaggccggtatccaggtcgggaacgcgtgctgggagctctattgcctcgagcatgggatgcagcctgatggacagatgcccggtgacaagaccgtcgggggaggtgatgatgcttttaacaccttattgagcgagactggtgctgtgaagcatgtccgcggcgctgtttataccgatcttgaacctagcgtgattgatgaagtgaggactggtgactaccgtcaggtctttcaccctgagcaggtcatcaatgggcaaggaggatgcaaccaacaaactttgcccgggtcactacaccattggca

SEQ ID NO: 412537 - DNA, 379 bp, Oryza sativa
aaacccaaatccaacatcacctccatatccatatagaatctaaatttggtcgcatttcctacgtagataagatcactaggttgaacacagcatgataaaagaccatcctacttggggcatctatacaattgttgtttttgggtacgcgactcatgataaaggcagagcattttcacattcactgatgaaaacgtatttgaacaccatgtgacgcgatgcgaggaactcagtcggctgccctgaagagggtcatgagggagaggaagaggttgatgacttctaggtagagggagacggtggcccaaacctactggtcgtaggtgtagcgcttgatgatgttgacccggtcgtaaacgatgtaaccactgaagatgagcga

SEQ ID NO: 412538 - DNA, 407 bp, Oryza sativa
gcggccgtccttttttttttttttttttttttttgagaagaagagattatatcccaccatcgatcgattacaccatcatcaataactgaagagcagcctgacagatgattaaaattacatgtccatccacccaaaacacaagtgattaataggtggattatgagagaagatgaagaagaagaagaagtctagatgtcgaagacgttcttgccggtgaacttgacctcgatggggctgacgttcttgccgatgctgcggaagttctggccgacgccctgcctgccggagttgaccttctccgggtagacgccgtccttggggtggaggtactgcacctcgccattggggaagacacggtagaactggatagttgatcttgcacttggagcggagcctggtgcccaggg

SEQ ID NO: 412539 - DNA, 467 bp, Oryza sativa
tacggtaccctcctctctcctcctccgaccaccatggtcatggccacgcaggcctccgccgccaggggccacctcctggccgcctgggcaccggcgaagccgcgctcatccaccctttccatgcccacctcgagggcacccacctccctcagagcggcggcggaggatcagcccgccgcggcggcgacggaggagaagaagccagcccccgcggggttcgtgccgccgcagctggaccccaacacgccgtccccgatcttcggcgggagcacggggggactcctccggaaggcgcaggtggaggagttctacgtcatcacatggacgtcgcccaaggagcaggtgttcgagatgcccacgggcggcgccgccatcatgcgcgagggccccaacctgctgaagctggccaggaaggagcagtgcctggccctgggcaccagggttccgttccagtacaagatcaacta

SEQ ID NO: 412540 - DNA, 392 bp, Oryza sativa
ctagtgggcggcctgtccttttttttttacgatttgttggacaaaattgctttgaaacgacttggatctatcgaatacacattctgtcctaactgacagtacagttacaggaaattttgaaccccattttcatgtttggacaaaactcctataagtttccacattgaacctctctttgggaaaaaaaaaattctatcaaaacatttcaggcattccatgatgccgaccgtcgcatggtcggtttcaccggccggtcttcctccatggagatcatcatcagcgtcgacgggtcctccagcatcatacgggctacgaggtagccagcgatggaccatgtctggaacttcctggcctgcttgccgatgaaccgtcccagcttgccatcgtagtac

SEQ ID NO: 412541 - DNA, 451 bp, Oryza sativa
tgtgggatcatggccagttcttctgtggcttgttacaagaacctgcataagaactgggccgtcgcaaatggcgaaagcgcgccattgagctcgccgagtccaggcttctgaaggacggctggccagagtactacgatggcaagctgggacggttcatcggcaagcaggccaggaagttccagacatggtccatcgctggctacctcgtagcccgtatgatgctggaggacccgtcgacgctgatgatgatctccatggaggaagaccggccggtgaagccgaccatgccgacggtcggcatcatggaatgcctgaaatgttttgatagaattttttttttcccaaagagaggttcaatgtggaaacttataggagtttttgccaaacatgaaaatggggttcaaaatttactgtaactgtcctgtcagttaggacagaagtgtttaccata

SEQ ID NO: 412542 - DNA, 478 bp, Oryza sativa
  unsure (1)..(478): unsure at all n locations
tgtacttttcaacttggatataattggaatcttggtttttccaagttttctggccttttccctttctaagagcggattttttcgattgataacctagtactactgcaattcacattgtcagctcttgcttgttcccaggaggatcagtttcttgctgagcaatggatcctgagttcgggagaggcatggcgcctcgaaagagagagccatggcggacgacgctgctgctggcgtaccagagcctcggggtggtgtacggcgacctgagcatctcgcccctgtacgtgtacaagagcaccttcgcggaggacatcacccactcggagtccaacgaggagatcttcggcgtcctctccttcgtcttctggaccctcaccctcatccccctcatcaagtacgntttcatcgtcctccgcgccgacgacaacggngaaggagggacgtttgcgctctactctttgatctgaggcacgccaat

SEQ ID NO: 412543 - DNA, 344 bp, Oryza sativa
gaggagaagagattgtatcccaccatagatcgaatccgccattacaattagctgattaataagaagtcctaggataagaaacgcgagaacattctacactaaacacaggtgattaatagggcgattatgagagaagaagaggaagacaaagaagtgtgggtgacgaagacgtttttgtcggcgaacttgacctccatggggctgtcgttcttgacgatgctgcggaagttatggtcgccgtgctggctgacagaatgggcctattctgggaaactgcgggcataacaggggtggtgctgcaaatcctttgttgtgcatgaaagcctgaataggaaagctaaaat

SEQ ID NO: 412544 - DNA, 471 bp, Oryza sativa
tgtcctccctcctatgcaccatcctctcccttgttcttatccttgaagctttcacaactagccatggcgagttcgtctaccatggcttttctggtgttaacctcacccttgatggaaatgccatggtcacaccagacggcatccttgagctcaccaatgacacaattaatctaggacacgcattttatccaactccacaaaacttccgtaaattttccaacagcacagtgcaatcattctcactcagctttgtgtttgcaatcctctcagtgcatgatgatataagtgcagatggcatggccttctttgttgctccaagcaagaacctttccaatacatgggcacagtatataggtctcctcaatagtaggaacgatggcaacagaagcaatcacatgttcgcggtcgagcttgatactacccaaaatgatgagttcaaagacatcgacaacaaccacgttggaatcaaca

SEQ ID NO: 412545 - DNA, 446 bp, Oryza sativa
tgtgacagacgacacatagaaggttttcatggagaaagtactggtgctctccttgatatgtatttcactctgccaaggatgggtggtgcaatctttagaatatgatcatacagcaagtattgagtgccttcgcgatccgatgaagccgctgtacaacggcggcatcatccagaacggcgagttcaacagcggcctcatgggctggtccacgcaccgcgacatcaaggccggcctgagcagctcgccgtccggcaacaagttcgccgtggtgcagcgcgccgactccctctccggcgccgccgtgccgtcgcgcagcgtctaccagaagatccagctgcagggcgacacccactactcgctgtccgcgtggttgaaggtgtcggccggcgccgcgcacgtgaaggcgttcgtcaagacgcccaacggcgagcgcgtcgtcgtcgaca

SEQ ID NO: 412546 - DNA, 480 bp, Oryza sativa
ttactttttgtttttcttttttttttttttttttttttgtttttttggaaaacacaaatccttaaacggaaaggactttttgagggaattttgcaccccattttcatggttggacaaccctcctatatgatttcacattcacctttgctgggtcaattaggggtttttttaattaaacgaaaaacaaaacatgtggcccctcgcaaaagaccacttggatatgagggccttgtatttaacaataggatgcttacaaaagagggcccaaccacaacaaaaaaggcggccatgtgacattggctggcctaatttgggggcggtcctccaattaattaacaggagaggatccattttggggccttagttttttaacatgctgggcttaacgttgggcctattggaaattttaacccccaacgacttattacactgggagaggttgttgacccaaatggcgcggagctcaggggagaccttggg

SEQ ID NO: 412547 - DNA, 454 bp, Oryza sativa
  unsure (1)..(454): unsure at all n locations
tgcagaaacaaacccctctcactcccactaccatggatccttgcaagttccggccgtcgagctcgttcgacacgaagacgacgacgacgaacgcgggagctccggtgtggaacgacaacgaggcgctgacagtggggcccagggggccgatcctcctcgaggactaccacctgatcgagaaggtggcgcacttcgcccgggagcgcatcccggagcgcgtggtccacgcccgcggcgcctccgccaagggcttcttcgagtgcacccacgacgtcaccgacatcacctgcgccgacttcctccggtccccgggcgcccagacccccgtcatcgtccgcttctccaccgtcatccacgagcgcggcagcccggagacgatccgcgacccgcgcgggttcgccgtcaagttctacacccgcgagggcaactgggnacctctcggaacaactttccc

SEQ ID NO: 412548 - DNA, 522 bp, Oryza sativa
ttgtgatagtaaattaactgcaaaggctggtgatggctctgtgaaaaaggatgtacttggttctcatggaggaagcagttcaagtgcccaagggatgggccaacaagcagcataaaatcaaggaatgggttatatgcaacctcagtaccataatggggatgtctcaaactgaagataggaccttttcatgcaactgttgctaggtggattttatttggtgctgcagtcgttagctaatatatatacctacacctcatggtgagcagtgaaggaagtaacttgctaccacctctaggtcccatgtttgtcaaccaggaactgatgctgcttggaagcgtcgagccaaggctgcttctcagatgtaaattactccccgtgaggatagtttcggttcgtggtctagctctgttgttgtatgtatattcaggataatttaacaattggtctttggctgtcattcggttccatataatctgtattgggaggcataaatattcatgttgtatttcgtcctgaactagc

SEQ ID NO: 412549 - DNA, 435 bp, Oryza sativa
aaagaaaatccaaacacctccaagatttgcgttttgcgaacatagtaatagattcagtacacagagataacggttttgacaaagtatgagctagtagtattccgaatttccgataggccaaacaaggggacaaccagccaaaattttcactcagccaaaagccacaggctatataataatctgatctaacaaacaggcagaaggggggcaaagcttccttttttaggccttcctggctgcgatctgagacttaggctcttttttcactggtttttccttttttgacaggataagctcaatggggcacggggaggacatgtaagggttgatgcgtccatgagcacggtaggtacggcgcctctgcttttgggcctggttaacttgaatgtgggacacataaagaggattaacatccagaccttttacctcaggatt

SEQ ID NO: 412550 - DNA, 549 bp, Oryza sativa
tgcgaacaaccccaccaagtcctccaaggccatgggccgggacttgcgtgtgcacttcaagaacacccgtgagacagcttttgctatcaggaagttgcctctgggcaaggccaagaggtaccttgaggatgtgattgcccacaagcaagctatccccttccgtaggtactgcggtggtgttggccgcactgctcaagctaagtcacgccattcaaacggtcagggacgctggcctgccaagtctgctagattcattctggatcttcttaagaatgcagagagcaatgctgaggtgaaaggtctggatgttgatactctttatgtgtcccacattcaagttaaccaggcccagaagcagaggcgccgtacctaccgtgctcatggacgcatcaacccttacatgtcctccccgtgccacattgagcttatcctgtcagagaaggaagaaccagtgaagaaagagcctgagtctcagatcgcagccaggaaggcctagagaaggaagctttgccccccttctgcctgtttggtagatcagattattatata

SEQ ID NO: 412551 - DNA, 401 bp, Oryza sativa
cgtcgttaaggcaggaattgaaaggccaaggtttcaaaaaaccggtttccatttggggaaactacactaggcggtaggcgccaaatccaaccgacgatgtcgctgatccgccgcagcaacgtgttcgaccccttctccctcgacctctgggaccccttcgacggcttccccttcggctccggcggcagcagcagcggcagcatcttcccgtccttcccgcgcggcgcctcctccgagaccgcggccttcgccggcgcgcggatcgactggaaggagacgcccgaggcgcacgtgttcaaggcggacgtgccggggctgaagaaggaggaggtcaaggtggaggtggacgacggcaacatcctgcagatcagcggcgagcgcaacaggagcaagaggagaag

SEQ ID NO: 412552 - DNA, 482 bp, Oryza sativa
gccttcgtggagcacaaaagagatggattgacgattcacggatcacattctttttttgtgaacaagaaagatccatgcttgtattgtggtcgaacacgccttctctgactgctgctgcttgctcattcattcgtaggggttcctgaagctcttgaggagatcggggatgtcgtaggcgagcatgtcgtcgacgccctgcaccagcttgggcttcagcctctcgaacttgtcgaagttgtaggcgctcagtgtctccctgtactcatccacgctggggaagtcgccggccggcaagtgcaactccttctgaaccttggcgaactgctcgtcgagggtgtcgagcagccgctgctgcgccttggccttgcccatcagcgccggcatctccttcttcaggtggctgattatgtgagcatggaccttggctgaccttgaacgcttcacgaattcgttgattcgacggtcacaggtttttttggaat

SEQ ID NO: 412553 - DNA, 460 bp, Oryza sativa
tccagccacacctctcttcaatctctcgttctctttttggctcctctttctttttcccccaacggagaggagagaaggcaaggagccgggggagatgggatcggactcgccgcccaagaaatggggcctcagggagcagcgcgaagcctacctccggtgtttctccctcgccgacgacgatggagatgggcgcgtgacggggaaagacgcgctcaagttcttcgccatgtcgaatctctcccgccccgagctgaagcaggtctgggcaatcgctgattccaagcgtcagggttatcttggattctcggagtttatgaccgcaatgcagctggtttctcttgcacaagctgggaatgagattagtcaggacacccttgcacatgcagatttggagacgttgctacctccgacaatggaaggtctggacaaaaaacttaaaaataattctatgagcaagagc

SEQ ID NO: 412554 - DNA, 250 bp, Oryza sativa
ttcctccgtatcctcctccagatagcggcggctgcctcgccttctccgacgagctccaccgccgagtcgccgccccttgccaggacaggatggtggtggccacggaggaaatggcggtctactgcttcgacgccctcgtctcccactacagcggcgaccagccgccgccgcccgccttcgaggagggcatccacccattgtttgtcacctggaagaaggctaccaatggttcagaaccacgccttcgagg

SEQ ID NO: 412555 - DNA, 400 bp, Oryza sativa
aaaacggggcatgcaaccccccaaaaaaaaaccaggggggggggggggtttaaccttgggttatccattagggacggtggaccaaaagggggaaacttcttggggagagggcggcccaattttggggcatttttacagcataacaggataggaaggagtccctttaaactaccaccaacacattttttatccttaaagggcccaccccatttttttttaaggggaaaacaaaaggtttaatcctttgggggggctaactacagaggggctaggccggggccctgatttgagggatatgatggggggaaaacagccagttttgtttaagaagaccacatccccaaaatgggaacagggcctccaggggggggtcttcccttgccggccataaaaatgttgg

SEQ ID NO: 412556 - DNA, 552 bp, Oryza sativa
  unsure (1)..(552): unsure at all n locations
tgcggagcagctcgtgctcgacctctgcgaccccgagctgcgggagaacgccctcctcgacctctccaagaagcgagagatttttcaggatcttgctccactcctgtggcactcttatggaacaattgctgcactactccaggagattgtgtcaatctatccatcactttcacccccaacattatctccaggggcttcaaaccgtgtctgcaatgcacttgcacttcttcagtgtgttgcctcacacagtgacacaaggattcctttcttgaatgctcacatcccactgtatctgtaccctttcttgaatactactagcaagacaaggccttttgagtacttgaggcttaccagcttgggtgtcattggcgcacttgtgaaggttgatgattctgaagtcattgggtttctgctgcaaactgaaataattcctctgtgtctccgtactatggagatgggcagtgaactttcgaaaacgggtgccacctttattgttcaaaagattctgcttgatgatgtngggcttcgctacatatgtgctactggctgacg

SEQ ID NO: 412557 - DNA, 451 bp, Oryza sativa
tcaggggagaaaaccctaatctcaaggccgcggctgtgagcgctcctcccgtctctcccccaacccgccgccagccaccgagctcgccaccgtctccgttgcctcgccgtgctctaggttctcggatggaggccgaggcggcggcgaagagggcgcgggagagcggtgacgcggcggtggccggtgccggcgagcaggcgggtatctctgccgtcatccctggatggttctccgagattagccccatgtggcctggtgaggcacactcattgaaggtcgaaaaggtactattccaaggaaagtcggactaccaaaatgtgatggtgtttcagtcctccacgtacggcaaggtgcttgtgctggatggagtgattcaggtcactgagagggatgagtgtgcttaccaagagatgattacccacctccccctttgctctatcaaagatcccaa

SEQ ID NO: 412558 - DNA, 411 bp, Oryza sativa
tttagacatggatctatgacaaaattcatcatgagataaaccagttctgtagtgcccacagtttgcagcaagtttacatcgacttgtttgatcagattgatgaaacgatgaaagaagctattcaaagagactgtacacgctatgctcctggtattgagataatcagtgttcgtgttacaaagccgaacatacctgatagcattaggagaaattttgaacttatggaggaggagcgtacaaaggcattgattgccattgagaagcaaaaggtagcagagaaggaagcagaaacgcagaagaaaattgcactatctgaagcagagaagaatgcacaggtgagcaagatcctcatggagcagaagcttatggaaaaggacagcttcaagaggcagcaacagattgataatgaaa

SEQ ID NO: 412559 - DNA, 335 bp, Oryza sativa
acgttatgttggacaaaattgctctgaaacgacttggatctattggatacacttctggcctaactgacaggacagttacagtgaattttgaaccccattttcatggttggacaaaactcctataagttttcacattgaacctctctttgggaaaaaaaaaattctatcaaaacatttcaggcattccatgatgccgaccgtcgcatgggcggttttaccggacggtctttctccatggagatcatcatcagcgtcgacggggcctccagcatcatacgggctactaggtagccagcgatggaccatgtgtgggacttactggcctgcttggcgat

SEQ ID NO: 412560 - DNA, 496 bp, Oryza sativa
gcacacttagattcattcattcattcatttgatcaaagcaaacgagacgagctttcttcttgcgatcaaaaacacagatgggcaaccacacagttaacacaaactagatagttccacacaaaactaacgatgataacgatcggatgatgatgatggtagctcgattagatagatagataacttggccatgagggccctaccgctcagttactgcagttcccgaaggagttgtcgacggcgcggatgtcgtagccgccgacgtagacgtcgtcaccacggtcgtcaccgtagccaccgtcaccgccgtagccgccttcacggcgctggccgtagccaccgtcgacgacaccaccaccgtagccgtcgccaccgtagcctacgcctgcgacgtgctggccgtagacaccgtcgcctccgactccggagcggctcgactgggcctcgttgacggagatgttgcggacgtcgagctccttgccgttcatcctctcatggc

SEQ ID NO: 412561 - DNA, 426 bp, Oryza sativa
tttggcttctcctccccctcccggttcggttcggttcggttcgggtccggttcgatttcggtttttccttcggttcgggggttggtgggaaagcatggcggcgccggatgttgagtaccgctgcttcgtcggcggcctcgcctgggccaccgacgaccgctccctcgaagccgccttctccacctacggcgagatcctcgagtccaagatcatcaacgatcgggagacggggaggtcgcgcgggttcgggttcgtgacgttctcgagcgagcaggccatgcgcgacgccatcgaggggatgaacggcaaggagctcgacggccgcaacatcaccgtcaacgaggcccagtcgcgccgctccggaggcggaggcggcggtggctacggccagcgcggcggacgcggaggctacggtggcggcggcta

SEQ ID NO: 412562 - DNA, 517 bp, Oryza sativa
gaagagatcactagcattggcacaagaccatcaaaatttcaattttcaggtacaatgctaataagattttgcacaacagacgatgtccttgaggacggcagtacaacaagaatatggtcatgctgttgcaaaaaagaacagaaaaactcccctgttattcacctttagggagggagtcaggacggtaaatctacttacgacatgcacgccaatgtgctggtgacaatttacatgtctccaggaattaacacctgctggaaaagcctacagctgggcttcagggatcagtcatgcttgcacatctacatttggtcccagtcaatagaactgttgttttcaaaattataacttggttgctgtagacggttgcgacccaatcggctcatcatggcaagtccttccatgactttgtatagcgatgaccaccacctatcagatggaacctcatactgagcgagtgtatcatcaatttcggtgttgtgctttcccttgaggacattttgtagagtgattactg

SEQ ID NO: 412563 - DNA, 450 bp, Oryza sativa
tccttattggcaatatcttttaatcattaatgggcaggaaaaagggtaggaataggttggcaaaacaggaactggtaaatctagcatgctgaatgctctgttccgtattgtggaactggaacgagggagaatattggttgatgattgtgacacttctaaatttggaatttgggacctacgaaaagtactaggaattataccacaggcacctgtcctattttcaggttctgttcgatttaatctggatccttttaatgagcacaatgatgcggatctctgggaagcgcttgaaagggctcatctaaaagatgtcataaggaggaatgctctgggactagatgctgaggtctctgaggctggtgaaaattttagcgttggacagcggcagctactgagtttagctcgtgcattgctgcggagggcaaagatacttgttcttgatgaggcaac

SEQ ID NO: 412564 - DNA, 515 bp, Oryza sativa
tgcggcggcggcgacgctggagaggcggtcctgcgacgatggtccacgtcagcttctaccgcaactatggtaagacattcaagaagccacgtcgcccttacgagaaggagcgtcttgatgcagagctgaagctagtgggtgagtacggactgaggtgcaagcgtgagctgtggcgtgttcagtatgctttgagccgtatccgtaacaatgcaaggcacctgctcacacttgatgagaagaatccacgccgcatcttcgagggtgaggcactgcttcgccgcatgaaccgttatgggctccttgctgatgggcagaacaagcttgattatgtccttgccctcactgttgagaactttctcgcaaggcgtcttcagactcttgtcttcaaggctggcatggccaagtccatccaccatgctcgtgtcctgatcaggcaacgccacatcagggtcggcaggcaaattgtcaacatcccgtcgttcatggtgaagggtgagtctgagaagcacattgac

SEQ ID NO: 412565 - DNA, 474 bp, Oryza sativa
ggattataaaggtgcgccatttattcaggatttaccgacctggtacaggacaagcagataccacgaaaagtacaaaatagtattatcagacaatccaaagcatctgaacatagtgaacttctccaaaatctataccctcctgcccccagggagaaactgcgaaaaccgaaatgatatcgccattcagatatcaatattcatttaactggtacacgactgtaggtctaagcaccaaggacgtgaagcatgatagcattctgggcgtgcattctgttctcagcctgggggaatacgattgagttgggagcttcaatggcgccggctgttacctctatccctctctgtgcaggcaaacaatgcataaggaaggcatttggcccagccatgtccatcatagcttcatgcaccgtgaatacttggaacactatatttgtatattcagcttccttcttttggcccatgctgggccagaca

SEQ ID NO: 412566 - DNA, 435 bp, Oryza sativa
tctcggctcccctccgattcaccgcgatgtcggcggcgatctccggcgccagcctcgtcctctcctcgccccccgcgcccggggcccggccccagccgcgccccgcgcgggtgtcggtcgccgccgccgcgcccgccgcgcgacgcggggtcgttgccgccgcagcggtgtcgagccccgccgtgtcgtcctctgctggtaaagatgccaaacagattcctaaggactttcttcatattgatgatttcgacaaggatacaatcatgaagatccttaatcgggctattgaggtcaaggcaatgataaagtcaggagacaggagcttccaacctttcaaagggaaatcaatggcaatgatatttgccaagccgtcaatgagaacccgtgtttcatttgagacaggattctttttgcttggtggccatgctatctacc

SEQ ID NO: 412567 - DNA, 504 bp, Oryza sativa
ttggcgtgatgtcgctgcgccgcctggccgcgtccgccctgcgccgcggcggcgccaacgacggcggcgtgctggccgccgtccgcgccgagatcgctcatgagctctcctcctccccctcctcctctcctccgtcgctccaatcccaggtacccaccaccgcatgctgcctcgcccccaaatccagcgccactcactcccccctcgttctcgcaggacattcctgatttctccaccgtgtcggacgcgccgcgcgggcaggaggtgctcctgcgccgccgggatgcttccgaggaggtcctcgtgtcggcggtgctcgcgccgctgcggttcgaaggggaggagcccctgcccagggacgcgctcatgaaggtgttcgtcagtaagcctgatgtgaagccggtgatgcggttcgattgccgcgcgtttgcagctgaaggtgatggcggctctgctgactatgatgttactgctggttggtaccacccgtttgctggcgagtgc

SEQ ID NO: 412568 - DNA, 485 bp, Oryza sativa
ttgttttttaacaagaggatctgtgcattgcatctttggggaaaaatcttcccctcgggtacaatttcagactttcagcctgtcatcaaccgcatcaattttccttttcgccatattggtgcacaatagtagaagctgcaaactaacatgttggaagcacatgatcaacctctaaatcaacataaccaaaaaaaaaatttcaaaattggcgccttggctttgtttctgcaactgtaactcggatctgcctgccgtccaggtcaacgccgtcaagatttgatatggcattgttgacttcttcagcggagccataggtgacaaaaccaaagcccttcgacctgccgctctccctgtcgtagatgaccttggcatccagcacggcttcctgcttactgaacaggtttctcgagtgtcgagttgtcgacaccccaagcaaggttccctacatagagcttgttggatgaatcaaagttgctcccaccacc

SEQ ID NO: 412569 - DNA, 497 bp, Oryza sativa
ctccttggtttctatttcatttcattccgatagatagcaacaagcagttcaaacaccataaccaaagcgaactcaattcatggtaacatcacggacgaagaacacctaacactggatggatggatagagggcttctcgactcgagagagccactggacacgataacgactcgactcgatgataagatgattctgacacggatagctaaggataactggccacgatgggccccaccaatcagttcctccagttcccgccggagtcgccgccgtagccgccgccacggctgccaccgtagccgccgccgccacctcctccgtagccgccgcctccacgaccgccgccgtagccgccaccgccgccgccgtagcccccgcctccgccgacggagcggcgggactgggcctcattgacggtgatgttgcggccgtcgagcttcttgccgttcatgccctcgatggcgtcgcgcatcgactgctcggaggagaaggtgacga

SEQ ID NO: 412570 - DNA, 505 bp, Oryza sativa
ttcttctcctccccctctttaccttttcctcctcggttcggttccgtggttcgtctagggtttagtgggttgagatggcggcgccggatgtcgagtaccgctgcttcgtcggcggcctcgcctgggccaccgacgaccgctccctcgaggccgccttctccacctacggcgagatcctcgactccaagatcatcaacgacagggagacggggaggtcacgtgggtttggcttcgtcaccttctcctccgagcagtcgatgcgcgacgccatcgagggcatgaacggcaaggagctcgacggccgcaacatcaccgtcaatgaggcccagtcccgccgctccggcggcggaggcgggggctacggcggcggcggtggcggctactgcggcggtcgtggaggcggcggctaccgaggaagtggcggcggcggctaccgtggcagccgtgggcggcgctacagcggcgacttccgcgggaactggaggaacttgattgtggggcccat

SEQ ID NO: 412571 - DNA, 499 bp, Oryza sativa
ttgaagatgattacatttttcagactgtatgtccttggtgagaaagacatttaaaattcaactttggtcctgaatggattggtgaggagagtacatatgtatcagctgatgaatttgagccactgcccatcaagattagtgcaaaaaagatgggaaatgtctcacgtttcatgaaccatagttgttccccgaatgttttctggcagccagttcagcatgaccatggagatgacagccacccacatatcatgttctttgcactgaagcacattcctcccatgacagaactgacttttgactatggtgttgctggatctgagtcttcaggttctcgtagaactaagaactgcttttgtggatcatcaaactgccggggagtattttaattgatggatgtattttcattgggttggatcaacacacaaacctatttgccagaacttcctgcctgtacccccagattcgagctctggtattatccctgagaatgaccatgggt

SEQ ID NO: 412572 - DNA, 550 bp, Oryza sativa
tgcgattcctgccatctgaattcggcatggatccatcaaggatgggggacgctctagaacctgggagggtttcatttgatgagaagatggtgataaggagagcaattgaggatgcaaacatcccccacacatatgtttctgccaattgctttgcagcttacttctgtcctaacctctgtcagatgaaaactctcctccctcccaaagagagagttggtgtgtatggagatggcaacgtcaaggtgtttttcgtggacgaaaatgatgtgggaacatatgcaataaaatcaatcgatgatcctcgcaccttgaacaagacaatatacataaggcctcaagataactgtctcactcagaacgagttgatctcaaagtgggaaacactcactgggaaaagtcttgagaaattccacatacctggtgatgaatttttggcttctatgaaagatttggattttgctagtcaagtaggaataggacattattaccacatcttttacgagggctgcctggcaaacttcgagattggtgacaatggtgccgaggcaac

SEQ ID NO: 412573 - DNA, 420 bp, Oryza sativa
gggaccgtaaccagcaattggtatattaactcgagcaaacttaaaatgctcgaaaaagttgttcagcaacgaacaaaaaaaaagctctaagcaaaataaaactaatcacattgttgcccaatggcagataaactttgagcataccaactgacgacggttacaaaatcctaccagctgagagcatcttcctcttgtttattggcccgggggaaaaaagggtaaaatgcggctaactctttcgagtttatgctcagttattagcatcaaagatgctcaaagagttaaaggaaagaataaataaccgcaaccgtgtaggcgtgtgtagcttcaagcagcaaccttcttgcggtggttctccagccactccatggtgacactttttggtctttcgagcgggaggccaagagcacggtcccaaat

SEQ ID NO: 412574 - DNA, 499 bp, Oryza sativa
tcgatatggtccttggtgggatgagagggatgactggaatgctttgggaaacatcattgcttgacccggatgagggtattcgttttaggggtctctcgattccagagtgccagaaagtgctgccgacagcagttaaagatggggagcctttgcctgagggtctactttggcttcttttgaccggaaaggtgccaaccaaagagcaagttgatgctctatcaaaggaattggctagtcgttcgagtgttccaggtcatgtgtatgaggcaatcgatgctcttcctgtaactgctcatccgatgacccagtttaccacaggagtgatggcacttcaggtggagagtgagtttcaaaaagcctatgacaaaggaatgtcaaaatcaaagttctgggagcctacctatgaagattgcttaaatttgatagctcgccttcagcagtggcttcatatgtttaccggaggatattcaagggagggaaactatagcagctgataatg

SEQ ID NO: 412575 - DNA, 457 bp, Oryza sativa
  unsure (1)..(457): unsure at all n locations
agtcatggaataaacacattaattttgcattcagtttttcctccccttttgcatcaggcataagactgaggcaacacaaattatctaaattatagcctacttttagggcctaaatccttttctaaaaaagtttgcttctgaattgtacgctacttttagggcatacaccctttttccccccttatgtattctggggctttactgcccagaacatttctacttcttttgctgttcttccagggattcttccagctataagttcccacctgttcccaacaagcctgtgcattctgaaaacgagatcttcctcttcttccgtgaaatgaacaaaattctgtgcagngttattaacttcttttgtttcacaaccatcactggttttggaattctttccctggctaccactgctgctatccattaggcgtgaaaaactccaatgaaatgccgagttgagatc

SEQ ID NO: 412576 - DNA, 547 bp, Oryza sativa
tcttacagataagggagccaatggaagactaggggaaatccaacagccagcagcattagtcagtactcaggacagctagatcagaaggtgactaccaactcccatctctttaaaaaccagagttttgctcatctttacccagagaagggccctagaaaacataaggtcataacaagggtctgaggatcttagctagcacaagatctcaactcggcatttcattggagtttttcacgcctaatggatagcagcagtggtagccagggaaagaattccaaaaccagtgatggttgtgaaacaaaagaagttaataacactgcacagaattttgttcatttcacggaagaagaggaagatctcgttttcagaatgcacaggcttgttgggaacaggtgggaacttatagctggaagaatccctggaagaacagcaaaagaagtagaaatgttctgggcagtaaagcaccagaatacataaggggggaaaaagggtgtatgccctaaaagtagcgtacaattcagaagcaaacttttttagaaaaggattt

SEQ ID NO: 412577 - DNA, 532 bp, Oryza sativa
tttctcatcccagagcaagaagctcatctcctcctcctctcgcatggcagccatggccaccaccgcgtccagcctcctcaagacctccttcgctggcgcgcgcctccccgccgccgcccgcaaccccaccgtctccgtcgcgccgcgcaccggcggcgccatctgcaactccatctcgtcgtcgtcgtccactcccccctacgacctcaacgccatcaggttcagccccatcaaggagtccatcgtgtcccgcgagatgacccggcggtacatgaccgacatgatcacctacgccgacaccgacgtcgtcgtcgtcggcgccggctccgcggggctctcctgcgcgtacgagctctccaaggacccctccgtcagcgtcgccgtcatcgagcagtcggtgtcccccggcggcggcgcgtggctcggcgggcagctgttctccgccctggggttgcgcaagccggcgcacctgtttctcgacgagctcggcgtcgcgtacgacgagcaggaggactacgtcgtcatcaagcac

SEQ ID NO: 412578 - DNA, 475 bp, Oryza sativa
  unsure (1)..(475): unsure at all n locations
ttttgcagtggctgatgttgccgcggccattaaagctgggttctacgacatagggattggtgcaggcctggaatccatgtcagtaaatgctatgggttgggaaggacaagtaaaccctaaagtaaatgaagtccagaaagcacaggattgtcttttgcccatggggataacgtccgaaaatgttgcgcaccgatatggtgtaacaagacaagagcaggatcaggctgctgctgagtctcataggagggctgctgcagccacagctgctgggaaattcaaagatgagattgttccggtgcctacaaagattgttgaccccaagactggagaggaaaagaaagttgtgatatcagttgatgatggaattaggccagggaccacagcatctggattggcaaagcttaaaccagnttttcggaaggatggtaccacaactgcaggcaactctagtcaagtgagcgatgggtgctgagct

SEQ ID NO: 412579 - DNA, 496 bp, Oryza sativa
tttattcagtgaatgaagggcatgcttaaaactgggaatggtccaaccacaaagtatgtaaagaaatgcaggtttcctaaagatggttctttcgctaagtctctgagatatgtgggaagtatggtagccgatgttcatcgcacactgctttatggaggaatcttcttgtacccggctgacaagaaaagccccaatgggaaactgcgtgttctgtatgaagtcttcccgatgtccttcttgatggagcaagccggaggacaggccttcactggcaagaaaagggcgctagaccttgtgccggagaagatccatgagcgttctccaatatttcttggtagctacgaagatgtagaggagattaaggctctgtatgctgcagaggaatagaagaaataagattctcattctttttatttcatcaactcttctctcttatatctatggcttcttctgttgagacaaacaaatgacttatttatacaagggagactttttt

SEQ ID NO: 412580 - DNA, 518 bp, Oryza sativa
tttggcttgggatattctgaagaattcatcggttctgtgttctagagacagagtcaagaatatcagtggcatggatgaagcttattatgggtggatagcttttaacccatcaatttggaatatggcttgggcaccctcatctttctaaaaggacatatgggttcacttggatttaggggggatcatcattacaggtgacatttgagactgataattccattcaggatgaaacaagtatgagtctaaggattggttctatcagtcatcaacttagtgcttattctctgtctggttatgggctaaatgatgcatttgacaaatctgttgcacatcttgtgaagaagttgggaggggcagctggtaatgaaaaagttcaggttaagcatccttgtctacaaacgggatacaaagaagattatatttgttcttactgccacccgctcaaactaggtggaagtcccagtgttggagggaagacaacaggcaaagagaagcagggaatgcagttgaactgatcg

SEQ ID NO: 412581 - DNA, 476 bp, Oryza sativa
aaatcgaagtcatcttcattattcattcgagataaactttttttttctcctgaggaaactactatccgacggtactacaatttgttacaatagaaaattggtaaatcttagtagtcgcctaattttggtgcgcatctgagtttacagatcggtgttacataaccacgtataacaccaacagaggatcatctcatgttgccctctcttaggacatcaatcatatcatataatttcttgttggcaccagattgtatctttttatggagaaacagggcagcatccacagttccctctgcgtaaattgaacggccacatacattgtgttgaaactcaaatgaaactgtctcatccggtgaagtgagatggtacatgtgaaatgcgtgaccaggaagatgttcttctgggacaccaaccaatgtaagctgttcctgaggatcccggacctgcttaacctcgttcaagttaaatgacacacc

SEQ ID NO: 412582 - DNA, 486 bp, Oryza sativa
  unsure (1)..(486): unsure at all n locations
tcttggaaaggttgaaatttgtgatagggaaatttatattcgtgacccatctgaaggagaaagtattctcccttcgattgctaaggattacccagatatgatagttgttgactacactgttcctgatgctgttaatgctaatgctgagctttactgtaaacttggattgccatttgttatgggcacaacaggtggaaataggcaactgttgcacaaaacagttgaggacgcaaacgtgtatgctgtgatatccccacagatggggaagcaggttgtcgcgtttcttgctgccatggaaatcatggcagagcaattccccggtgcattttcaggttacaaactagaggtcatggagtctcatcaagctacaaaattggacatttctggcacggccaaagctgttatctcttgctttcagaagttgggtgtgtcatttaactngaacgaggttaagcaagtccgggatccttaggaacagcttacatt

SEQ ID NO: 412583 - DNA, 462 bp, Oryza sativa
tgaagagagacaggggagaaaaccctaatctcaaggctcgcggctgtgagcgctcctcccgtctctcccccaacccgccgccagccaccgagctcgccaccgtctccgttgcctcgccgtgctctaggttctcggatggaggccgaggcggcggcgaagagggcgcgggagagcggtgacgcggcggcggccggtgccggcgagcaggcgggtatctctgccgtcatccctggatggttctccgagattagccccatgtggcctggtgaggcacactcattgaaggtcgaaaaggtactattccaaggaaagtcggactaccaaaatgtgatggtgtttcagtcctccacgtacggcaaggtgcttgtgctggatggagtgattcaggtcactgagagggatgagtgtgcttaccagagatgattacccaccttcccctttgcttatcaaagatccccaaga

SEQ ID NO: 412584 - DNA, 514 bp, Oryza sativa
tatttccactgctgttatgactgttggcattgcccttgtcagttggttgggccttccttacaccttcaccatctttaactttggtgcccagaagacagtgcaaagctggcaattattcttgtgtgtggcggttggtctttgggctggtctaatcattggatttgttaccgagtattacaccagcaacgcatatagccctgtacaagatgttgctgattcttgcagaactggagctgccactaatgtcatttttgggcttgctttgggttacaaatcagtcatcatccctatttttgctattgctttcagcattttcctcagcttcagccttgctgccatgtatggtgtttgctgtggctgctcttggaatgctgagcacaattgccacaggtcttgctatcgatgcctatggtcccatcagtgacaatgctggaggaattgctgaaatggccgccttgagccacagaattcgggagagaactgatgctttggatgctgccggaaacacaactgc

SEQ ID NO: 412585 - DNA, 492 bp, Oryza sativa
  unsure (1)..(492): unsure at all n locations
tttctaacacccatcagcaacaatggcatcctcttgtctccttctggcctgtgtcgtggcagcggccatggtgtctgcagtgtcatgtgggccgcccaaggtgccgcctggccccaacatcactgcggcctacggcaaacagtggctggaagctaggggtacctggtacggcaagccaaagggtgccggccccgacgacaacggcggcgcttgtgggtacaaggacattgacaaggctcccttcctcggcatgaactcatgtggcaatgaccctatcttcaaggatggcaagggctgcggctcctgctttgaggtcaagtgttccaagccagaggcctgctccgacaagcccgtcatcatccacatcaccgacatgaacactgagcctatcgccgcctaccacttcgacctctccggccatgcttttggtgccatggctaanggaggcaaggatgaggaactccgcaaggcgggaattatcgatatgcagtt

SEQ ID NO: 412586 - DNA, 516 bp, Oryza sativa
  unsure (1)..(516): unsure at all n locations
tggaactcttaccctcatcatgcactaatgtctttaaaacagtttcaaaatttgtgtttatctaaataatcgttacaaaatctggactggattaggtatggcaatgcaagctatgtagatgaaaggcaccgccaccgatatgaggtgaatcctgaaatggttccagaatttgagaaggcaggtctctcttttgttggcagggatgaaagcgggacacgcatggagataattgagctaccaactcataggttttttgttggcgcacaatttcatcctgaattcaagtcaagacctggaaagccatccccacttttcatgggtaaatcagcctttcacctctacctcatcttgcctgaaacatatatgctatttatttatcttttcaagccaaatgatcaatttcgtttgcaaagccgaatagttaaactaaacaatatgcctgaatttcaagccaaatgatncaatttgctggcaaagctgaatacttaaactaaactaaatgcctgaatgataaca

SEQ ID NO: 412587 - DNA, 442 bp, Oryza sativa
ttctattgtgcgaacatccctgttcctctgctccagtgtttacattgctacaagtttctttgcatatctcctcttcggcgagggtaccctagatgatgttctcgctaacttcgatgcaaatcttgggattccatttagttccgtctttgatgatatagtgcgagtgagctatgctgctcacgttatgcttgtctttcccatagtcttctttgcccttaggctcaacttggatggactgctcttccccacatcaaggcacatttctcgtgacaacaagagatttgccataatcactatctcactcctcacagtaatttatcttgctgccattttcataccgagcatttgggatgcattccagtttactggtgcaactgctgctgtcctgattggtttcatcttccctgccatggttatacttaaggatccttatggaatcgca

SEQ ID NO: 412588 - DNA, 505 bp, Oryza sativa
ttgatgtaaaggcaatcgatctacaatccccaattagcagtctcatcggaagacaggttgtcaaagttggaaggagctctggtttgacgacagggaccgttgtggcatacgctcttgaatacaatgatgagaagggcatatgcttcttcacagactttcttgttgttggggagaaccaacaaacatttgatcttgaaggggatagtggaagccttataatcttaacaggaaaagatggcgaaaagccacagcccatagggattatatggggtggcacagccaatcgggggaggttgaagctcaaaagtggtcagggtcctgagaactggacaagtggggttgatctcggacggcttctggatctattggagcttgatctaatcactacaagtgaaggactacaagaggccctagaggaacaacgaattattctagctgctgctgcagcagcagctaattcaactgctggggaatcgtcacctgttgctggtcctcaagaaaatga

SEQ ID NO: 412589 - DNA, 392 bp, Oryza sativa
gggaaccatgtgaaaattaatatagattatcttattcaattccagagcctacaagtaaaatcaacataacatataataatccaaacttgttccccgtaaaagttactcgtaatttagcacatcaagtaaccaacaaaatttgaacaggtacatccctgtgacggtatgacggtcaggctcattagccctggactttcctcacttgaatgtggtgagtagactcctctctccagatcgacttcactccactctgaacaagggtcacgtagtccccttctttcacgaattgggcgttcagcaagctactaattgctctagagaaagtttcctctgcatcatcagaaaacttcatgtaaatgggaaccacaccctggtagagtgccagacgttgc

SEQ ID NO: 412590 - DNA, 532 bp, Oryza sativa
tatgttattcatgaactgaaggactaccttaaaagtgctaatgcagatatacatgtcattccaaagattgaaagtgcagattcaataccaaacctccagtccattattgctgcttcagatggggcgatggtggcaagaggggatcttggtgctgaacttccaattgaggaagttcctttgctgcaggaggagattgtcagaacatgccgaagcatgcagaaaccagttattgttgccacgaatatgttagagagcatgatagaccatcccactccaacaagagcagaagtttctgatatagcaattgcagttcgtgaaggttctgatgccatcatgctgtctggtgaaactgcccatggaaagttcccactgaaggcagtcaaggtgatgcacacagtggcacagagaacagaatccagcctgtataacccaactacatctcctagtcttgttgcacatcctcaggctctgctcaacgaggaattttcgcaaagccaactaagcacaatggttggatctcatgctacaatga

SEQ ID NO: 412591 - DNA, 513 bp, Oryza sativa
tttagtttactcagtttggcaccttaataattttttggcccttgacccttaaccggcctttggattaatctggcaggaaaagagtatagttaatggaaattctgttatgcttgttcagtctgctaactggctggatgtattacttgtggtagttcagaacaagttgactccaagcacctcttccagaggagatgcgacagtacgacaccttgctcgtctgaaaagcaagggttcccggaaaatcatttccagtgctacctcaactaatggaactatgttggcctattcagattgtgtgaaaccctgcctttttgcactaagacataagggtggaaaaaagtttactctagacaaactagagctgccaaagggattgctgaattcttaatgtatgctggtttctattgactcatccagtttgattctagctggccgtgatggaaagatttatgttgtagacattgccacaacggaaatttaaatgtctttcacctatgagaaaaatgatggagc

SEQ ID NO: 412592 - DNA, 449 bp, Oryza sativa
ttttcattccagtccttaacccagcttaagaatggcaatgatggatccccattcattaggggatcgtcgtttcagggtttgtgaccggattagctttgggagtaggccaagtgatgttgacaccagtatgagatatggtgggtcatctgatgatgagaatattgacgaggaatcacctagtggtatatacatctcaccaatgccatacggttatggtgctccactatgctatgatgataacaaaagacagttgataaacactagatattgcctagttgccagcaagcaaatggttggtgtttttctcatggtttgggtccgaagtgatataagggaacatgtgaagaacttgaaggtttcatgtgttggcagaggtttgatgggatatctcggaaataagggatcgatatcaatcagcatgtctctgcatcagacaagcttttgctttg

SEQ ID NO: 412593 - DNA, 461 bp, Oryza sativa
gccctcaagtgaagactaaagacgttaaatatcgattcagttttaacagttgtagcactgagaaaaagaaggaaaaaaaatcgggagccaaagaaattaatctagtggcggatagtctattggttgttctccatcatgatgaataaactctcagacatagatgctgactcggactcccaaggatctgatttaaccagttccttccaacagttttcgacaaaaggggtgaatgaaaaaagcatcacaattcgctggatcgcggaaggctataggtgatggttaagcgatcttcccgtaaacaatccagcttggctcaagcggtcaggtcgacgccactcgatttaaacgtggcttcaccggtgccttagaagggctcaccctgacaggcagcgtacccaaaatcatcccactgcaattcagagccatgatggcacactcggcatggacaaactcaacaaagc

SEQ ID NO: 412594 - DNA, 519 bp, Oryza sativa
  unsure (1)..(519): unsure at all n locations
ttcgacgcctaccagcagcgtcggaggaggaatggatacctcagtcaaggaaggaggaggatgaacgagagagcaaggcatgcagacagggaagacagcattcggcgaactgtttatgtttctgatattgaccatactgtgacggaggagagacttgctgatatatttgctaactgtgggcaagtcgttgactgcagaatctgtggtgatccacactcagttctaaggtttgcattcattgagtttgctgatgaagagggcgcaagaactgcacttaaccttggtggcacaatgcttggtttctaccctgttagagtcttaccttcaaagacagctatattgcctgtgaatccaaagttccttcctaggacggaggatgagaaggaaatggtcataagaactgtttattgtacaaacatagataagaaggttactcaattagatgtaaagaatttctttgaagaactttgtnggaggtctctcgtttgagacttctaggggataatgtacattctacaa

SEQ ID NO: 412595 - DNA, 532 bp, Oryza sativa
tttccagcagcaccagctgctcctgctccaatgccagacctccttggtgatttgatgggtatggataactccattgttcctgttgatgaaccaacagcaccttcaggccctccactacctgttttgttgccatcaaccactggccaaggactgcagatcagcgcacaactagtgcggcgtgatggccaaatattctatgatatatcttttgataatggcactcaaactgtgctagatggattcatgattcagtttaacaaaaatacctttggccttgcagccggtggtgcacttcaggtctctccactgcaacctgggacctcggccaggacgctgctacctatggtggcattccagaatctctctcctggagcgccaagctcactgctgcaggttgcggtgaagaataatcagcaacctgtgtggtacttcaatgacaaaatccctatgcatgccttctttggtgaagatggcaaaatggaacgaacaagttttcttgaggcctggaaatctttacctgatgacaacgaat

SEQ ID NO: 412596 - DNA, 486 bp, Oryza sativa
tcttacacagttcacacaaccacaagcttcaaagctccctactacttctcctcctccttcttctccggcgccggcgacgatgacgctgacgatcccggacgacgtgcgggcgaaggcggaggtgtacgtcggcgacgaggccgggcaggagaagacgcggctgctgctggaggagacggggctccccagcggcctcctccctctccgcgacatcatcgagtgcggctacgtggaggagaccgggttcgtgtggctgaagcagcggcggaaggtggaccacttcttcgccaaggccggccgccacgtcagctacgccgccgaggtctccgccgtcgccgagaagggccgcctccgcaagatcaccggcgtcaaggccaaggagctcctcatctgggtcaccctccacgagatcgccgtgcggacccccccaccggcaagctcacctgcaaggccatcggcggcctctcccgcagcttccccgtcgac

SEQ ID NO: 412597 - DNA, 506 bp, Oryza sativa
ttccaaaaccctagctcaccggcgtcggcggcggcgtaaggcggtcgccggcacgccacagcaaaggcaaacccgcagcagcacgaacaaacaggcgagcgatgggaggaggcgaggccaccagcggaggaggaggagggttccgcgcgcgggtggagcactacctgtacagcggcgagaagaagcacgtcgtcgccggcatcggcatcttcgccgccatcttcggcgtcccctggtacctcatgacccgaggggcaaagcattagtcgcaccaagattacatggaaagagctaacaaggcgaggtcggagaggctttcttctggacaggcatcttcgccaaaagagtgaaacagtcatcccctaactcagatttgcaaaacctcaggccgacacagctatgataatctgagaattcgatcctgttgtgaaataagcagaccatctcgattctcatctttcagttgtaggaaacatgggttgaatgtaatacgtcacatgaaattt

SEQ ID NO: 412598 - DNA, 537 bp, Oryza sativa
ttgggggcggcgcggcggcggcggtggatggcgatggcgggcggcggggggctcaaccggtcgtcgtcgagggggcagctgccgccgcaggagcttctcgacgatctctgcagccgcttcgtgctcaacgtgcccaaggaggatttggagtcgttcgagcggatcctgttcttgctggagcaggcgcactggttctacgaggacaactccgtcgagcacaacccctccctcaagtcgctctccttcaaggacttcactacgctcatgttcaatagctgtgctgcgctcaggccataccgcgcgcaccttgatgacatttacaaggatttcactcactataagttccgtgtccctgtctgcggcgccatcatcctcgatgacacctacgagaagtgcttgcttgtgaagggatggaagtctagcgccagctggagttttcctcgtggaaagaggagtaaagatgaagaagatcatacatgtgctgttagagaagttctagaggaaactgggtgtgatgtttcgaagcttttaaaattg

SEQ ID NO: 412599 - DNA, 518 bp, Oryza sativa
tcagatctccctgttcgggttgattcagtgtttgcacttcgttcttttgttgaagcatgcaaagatctcaacgagatacgacctatactccctcaactccttgatgaattttttaaactgatgaatgaagttgagaatgaggatcttgttttcactcttgaaaccatcgttgataaatttggtgaagagatggcaccatatgcactggggttgtgccagaatttggctgctgccttctggagatgcatggctagtcaagaagctgatgatgaagctgatgattctggtgctttggcagctgttggttgtttacgagccataagcacaatccttgagtctgttagcagtctcccacacctttttattcaaattgagccaactctgttgccaataatgcgcaggatgttgacttctgatggtcaagatgtttatgaggagttctagaaattgtctcatatatgacttttttctcaccatcaatttccgtggacatgtggagcctgtggcccgtgatgatg

SEQ ID NO: 412600 - DNA, 452 bp, Oryza sativa
gaattgttctttatgatggcaacatcagtcatttcaattttaaattgtcacttagtttcaggacaacaaaccgatcacagccggtgagggatttatgactgtgtgcacaacagagggccagggattttactgccaaccctggatagtgaagccctggccatgcaggctgtactttttttgagcggaaagatgatactgataagcggctactatgagacccccccaccttgtaccacgcccggacaccgaaacattatcctattgcacagttgccaagaaagcattggccctttcaaccttggagggtgcaccccctaactgtttttcatttgcaggaacagcaggcaccttgttctttgggtttttataagacttcaagcctccaagagcattggaataaggccacccttgggggaaaggggcaagtgacttgccccatgatcctttaacca

SEQ ID NO: 412601 - DNA, 509 bp, Oryza sativa
tgtcggcagccggacgccgtcgcccaagacgcgggcgtcggagctggtcggccgcttcctcgccgccgccgagccggccgtgtccctgcagctcggcgaccttggccacctcgcctactcccacgccaaccaatccctcctccgcccaagatcctttgcatcaaaagatgacattttctgcctgtttgagggagtcctggacaatctgggcaggctgagccagcagtatggcctgtccaagggcgccaatgaggtgctcctggttatcgaggcgtacaagacgctgagagacagagcaccttaccctgctagcttcatgctctcgcagctcaccggcagctacgcctttgtgctcttcgacaagtccacctcttctctccttgtggcctctgatccagagggcaaggtgcctctgttctgggggataactgctgatggatcttgtgccttctctaacgacattgacctggctaaaggatcatgtggcaagtcacttgcacctttcccac

SEQ ID NO: 412602 - DNA, 430 bp, Oryza sativa
ttcgtggtctgtactttggaatgtatgattctctgaagccagttgtactcactgggtctctccaggacaatttctttgcaagctttgcccttgggtggctgatcaccaacggtgcaggtcttgcctcttaccccattgataccgtccgcagaaggatgatgatgacctctggagaggctgtcaagtacaagagctccatggatgctttctcccagatcctgaagaacgagggtgccaagtcactgttcaagggtgctggtgccaacatcctacgtgccattgctggtgctggtgtgctctcaggctatgaccagctgcagatcctcttctttggaaagaagtacggctcgggcggtgcctaaactggcagaaaatgatgacgaacaagtgtttattcctggtcctgcactaacgggatctggtgaatttt

SEQ ID NO: 412603 - DNA, 446 bp, Oryza sativa
  unsure (1)..(446): unsure at all n locations
ccagcaaaagacagcgtatataatccactagaagaattcgatcagttttctcttctcaaaaaaacaagaacaacaagaattcagtttcacccacagctacttaaagactacagagacagtggtagtaaaactgacatcattgtgggtttcacagggaaacgatgacttgtacaagccaaacagaaacagaagtgaagtgaagtgaagagaaaatttgcataaatgagaattcagacctcggccttgtgctcggggcgatgggtgaactcgaagtcgacgtgcacaaaggcgcgctcgctcgganagggttgctccagcttctcctggagcgactncccgatgtcgggcgcgtggctgagcggcatgtcgccggggaggaccgatgtccacctcacgaagtagtgagtcccgaagggtgtaggccctcaccgtgtcgatgtgccgga

SEQ ID NO: 412604 - DNA, 556 bp, Oryza sativa
ttgatcgagttgcgtgctcctgatcatatcgctgcctctgcaccggcctagccatggggagccgaggacgacgcggcggcggggagagagagaccgagacggaggaggatgagacgtggaagctgcgggtgggcgacgacttcaccgtcccggagcgcttccaccgcaagccccccttcttctccaggatcttccccgccggctcccatggaaagcatcggaaaattgcaaaatactacaagaagcaggaaaatctcctgaaggatttcagcgagatggaaaccatgaatgagattggttccttagatcagaatgctcctactgaggaagagttgaggcaaatggcaaagggcgaacgattggccatcaacctgtcgaatatcatcaatctgattcttttcattgggaaagttcttgcatcagttgaaagtttatcgatggcagtaatagcatcgacactggactccctactggatcttttgcaggtttcatactctggtttactgcacatgctattgaaaaagcccacaagtatagctatccaattgggaagaga

SEQ ID NO: 412605 - DNA, 456 bp, Oryza sativa
gaaagaatattcagtctgcttgaacgaagatgataacatcagtggtagctgagagtctatttacaaaggaacctgatcatcatcattatgtacaaaggatgaagaagccacaagcaaccaaggaagtctataaatttcagtggcagtatattgacagttgagagtttctcccttcatttcagcagccataggcatgatcaggaaggcgttttcaacgaatattgtcaggtatcatcgcgaccgtcaccaggaagtactcacatcccacaggcagattgtacgggttcagcatggaagcgggcgaccggcggtcaccgctatcaaggcgtgaagcttccatctggtcaccgtgcgagggcagctttgctatgcgccgttcgatgtgcacaatctgcccgattatgtaagctgggtgccgaggatgctgctccgtgaatagggccactgattcctttg

SEQ ID NO: 412606 - DNA, 506 bp, Oryza sativa
  unsure (1)..(506): unsure at all n locations
tctgccactgagcgtgaagctgaggtaagaaggcgagaggccttctttaggacatggagtaagtacattccagaagatatcatgggttccatgggactttttgattccccaagccagtgcgatgtaacagttgctccatttgattgcaatcttctctcaattgatgttgatgatgtggaaaaacttgcaccccaatctttggtcgggtcttttctgaaatctgagagatcacaactgccaaagtcctccttgagcaattctggtaccagtggaaatttgagtaaatccgagcaatatccgccgaatgctgatgataagatggatttccaagactttctggggggttttgacagtgtggatattgctggaactagtaaattggaagttgaaaatgccagattaaaagcagaacttgcttctgcaattgcagttctctgcagttttggtgccgaatatggatatgaatctattgatgaagggcanattgataatgtactgaaagatgc

SEQ ID NO: 412607 - DNA, 488 bp, Oryza sativa
  unsure (1)..(488): unsure at all n locations
cagtctcagatcaaattggattgataagccaagcatcccaaattctcaatgtcacaatgtacaaattggcttacggcacagcagcagtaagcaacctgagcttcggcgagatcctcacgaggccagggtggtggtggggcagttgtcgacgccgcaggcgaggatgtcgcggtagtcgcgggagacggtgaagctgtcgtgcacgctgccgtcgcggctccggacgtactcgaacagcagcgccgtgtggttgaaggccgtcagcttggcgaacccgtagtcccggtcctggacgtggctccaccgcgcccgtacgccgacgtagtccgccaggctcgccccgccgccgcccaccacccacgtgcgtcgntcgccgtgaacgcgccgctgtagtggctcgccgccttcgccacgcacacattctcgtagactgggcaggttctctcgtagccatggacatggccgtactggcgaatgtcgaccttgta

SEQ ID NO: 412608 - DNA, 492 bp, Oryza sativa
ttatgcttcaatacaaacaccagagtaccgacctatcaatgtgtttgtgaatttctactcagaaccagaatacaagttcaaagttgagaggacaaattttttccctcaaccgaaggttgatggtgctgttataagctttaagctaaagaattcaggggattatccaccagttggttctcacaaaggtttcttttcaatggtgaactctgctttcaatgggaagcgcaagatgcttcgtaaatcactccagcacctgtgttcttcctctgagattgaggctgctctggccaacattggtcttccaaccttctgatctgttgttggatgattttgtgaggttgcacaatcatttgacaaaagcatgaatatttggtgccttcctaatgctcatggaactatctgttggtttgccggctgccctctaagcatatcgcctaagaaattttgtccccatagtatcactaccgactgcaggttcttgtagctgacact

SEQ ID NO: 412609 - DNA, 534 bp, Oryza sativa
ttcctgtcaaacaccaccctatgacaagtgggtcccactcgaaccaaccgtacggccccccacccaaacccgctcccccctcgctccgaaaatatccacctctctagatctttctcgtcgcaaacgcccttccgcccccgcctcgccgcgcccattccaccacctttccgaaccttccactcccttccagactccacccccacgtcacccctatttaaacccctcctcccaccgagcaatcaagcgacaagatcgagaagccacaaaccccagcgcgatccgaggtagaagaagaagaagaagaagaagaagaagaggcgatcgagagatggagagcgccatgttcgggctggagacgccgctgatgacggcgctgcagcacctgctcgacatccccgacggcgagggcggcgccgccgggaagcagggcgcgaccggtggcccgacgcgtgcgtacgtgcgcgacgcccgcgccatggcggcgacccccgcgacgtgaagatctgcccgggcgacgcgtcgtgtgacatgcct

SEQ ID NO: 412610 - DNA, 521 bp, Oryza sativa
tcccagtttcccccaaagctcctttcccagagaccccaaaccaaagcagcttgcttgcttgcttgattgtttgttgcttcttgagcccctctcctccttgcccaagtctgtgtttttgtggcagacttcagcataagggtgaagcaaagcatagggtctggttttgggttcttgacagaagtcatgtttcatggtggcaggcctttgtccctcaggggctctctcaaggcgcttgaagctgatatccaccatgccaacaccctggcgcatgctatacacagggcctatgggggtgcctgtgtgcagatgaggctgtcttacagctccatggctccaatcatccttaacctcatccagtggatggattgcagctgctccctttcatataccctccctagttacctaggtctccttgaggttcttgtgtacaaggtatatgttgatgaggatgcctctatatccaccaacattgaaaggagagcatgcctcaaggaattctattgctgaatatatccattctt

SEQ ID NO: 412611 - DNA, 458 bp, Oryza sativa
tcttcaaccattgggaaatcaaccaatatactgtggcacaattgcccaattggacaatctgagaggcagaacttgttggggcaaaaaggatgtgtcatttggatcacaggactcagcggctcagggaaaagcactcttgcatgtgcactgaatcgggagttgcattgcagcggccaccttacttatgtccttgatggtgacaacctaaggcatggcctaaatcgagatctaagcttcaaggcagaagaccgtgcagaaaatatacgaagagttggagaagtggcaaagctattcgcagatgctggaatcatatgcattgctagtttgatatctccatataggagagaccgtgatgcgtgccgtgtgctgcttccagagtctagatttattgaagtatttatggatttgccactagaaatttgtgaagctcgtgatcctaaaggtctatacaagcttgc

SEQ ID NO: 412612 - DNA, 525 bp, Oryza sativa
ttgtgtcggatctaattaatttacctcctccacctcctcctcctccccccgatcggatcggcccggctcctcctcctccgccgccgccaccgccgccgcagataggagaagatggccgcacttgataccttcctctttacctcggagtctgtgaacgagggccaccctgacaagctctgcgaccaagtctcagatgctgtgcttgatgcctgcctcgccgaggaccctgacagcaaggtcgcttgtgagacctgcaccaagacaaacatggtcatggtctttggtgagatcaccaccaaggctaacgttgactatgagaagattgtcagggagacatgccgtaacatcggttttgtgtcagctgatgtcggtctcgatgctgaccactgcaaggtgcttgtgaacatcgagcagcagtcccctgacattgcacagggtgtgcacggccacttcaccaagcgccctgaggagattggtgcttgtgaccagggacacatgtttggatatgcaactgatgagacccct

SEQ ID NO: 412613 - DNA, 419 bp, Oryza sativa
  unsure (1)..(419): unsure at all n locations
gggggaattaccatgaaacgaatccataaaacagcattaaccacaagtctatgccgaatgcaaaaacatttccagatatatctttaattcgagctatctaacataatgccaaaaagggctaacataaaccaacatattaagggcacaacctgcttgaattctgaaacccagataagcaagctacagaatttgggcccagttactcagcacagaaggttttatgatcgttacggaaacaactagcttaaaacttcttttttcattcctcatctttttcctaaccgngaccaccaccgccggttgcctttttttggttcttccgcttcaccctaccaggggggcctccaccgaatgggcttgtcagtgggaagtcaatgtgctttttagactcaacccttaccatgaatgaggggatgttg

SEQ ID NO: 412614 - DNA, 532 bp, Oryza sativa
  unsure (1)..(532): unsure at all n locations
tttaagctccagcaatcggcggcggcggcgacgcgggagaggcggtccggcgacgatggttcacgtcagcttctaccgcaactatggtaagacattcaagaagccacgtcgcccttacgagaaggagcgtcttgatgcagagctgaagctagtgggtgagtacggactgaggtgcaagcgtgagctgtggcgtgttcagtatgctttgagccgtatccgtaacaatgcaaggcacctgctcacacttgatgagaagaatccacgccgcatcttcgagggtgaggcactgcttcgccgcatgaaccgttatgggctccttgctgatgggcagaacaagcttgattatgtccttgccctcactgttgagaactttctcgcaaggcgtcttcagactcttgtcttcaaggctggcatggccaagtccatccaccatgctcgtgtcctgatcaggcaacgccacatcagggtcggcaggcaaatngtcaacatcccatcattcatggtgaggggtgagtctgagaacacattgact

SEQ ID NO: 412615 - DNA, 479 bp, Oryza sativa
  unsure (1)..(479): unsure at all n locations
taattagtacagttacaacaaaatcctcaaggatctgaaaaaggaattctgttgtaatggtactgtagtccaagatccagagttaggccaggtcattcaacttcaaggtgatcagcgtaaaaatgttgcgacgttcctagttcaggctggaattgtaaagaaagagagcatcaaaatacacgggttttaggctacacataatgcctatgtgctattatatgatacaaaatattgaagtgtctgaagcctgaagttgtgataataccagtttttactacttctaagacatttgaatttgtgtcggtgtgagctcttggttattgatgcaacttgtttcaatatggtttgtacgtgctacctatatgaaaattcggttctgttatattgtctactaaacaaaagtatactgtgtttatctaagctttcgcttctcatgcaattgttgtttggatttggcattcacacnaaaaaagacatgg

SEQ ID NO: 412616 - DNA, 514 bp, Oryza sativa
  unsure (1)..(514): unsure at all n locations
caattgaactctgacctccgcaagctggccgtgaacttgatccctttccctcgcctgcacttcttcatggtgggctttgcgccactcacctcgcgtggctcgcagcagtatcgcgccctcactgtccctgagctcacccagcaaatgtgggacgccaagaacatgatgtgtgccgctgacccgcgccatggccgctacctcacggcctccgccatgttccgtggcaagatgagcaccaaggaggtggacgagcagatgatcaacgtccagaacaagaactcgtcctacttcgtcgagtggatccccacaacgtgaagccagcgtgtgcgacatcccgccgcgcggcctctccatggcgtccaccttcatcggcaactccacctccatccaggagatgttccgncgcgtgagcgagcagttcaccgccatgttcaggaggaaggccttcttgcattggtacaccggcgagggcatggacgagatggggttcaccgaggccgagagcaacatgaac

SEQ ID NO: 412617 - DNA, 536 bp, Oryza sativa
  unsure (1)..(536): unsure at all n locations
tctccattgctttctcgggttctcctccactcctctcgtctcgcgtgagtactcgcgacctcaccgccggcggcgacgagcggcggcggcggcggttgaggaaggaagggggagggagagcaggaaatgcggatgctgtccaaggcgtgctcgctcgtggcctcctccctcccgcggtgctcatcctccgctgcccccacgatcagagggcagccgtcgttgctgccaagcgtgcgcaaggaatggcttggcaagccgctgctgtacggaatcggcacgctgctcgtcatgcctctgaggacgctgcacggggtggacgngatgtttggcgctgggcggttcctctgcaacatgaccagcgtctcgtcgtcgctgcaaattgagctcgtaccctgccttcaagataactatgcttacatcctaatgatgntgatactggaacagttggagtggtggacccttctgaagcaacngccatcataaatgcactagaaaaaagaaaccagaacttgacctacatactngacacccatcat

SEQ ID NO: 412618 - DNA, 515 bp, Oryza sativa
tcccacgcgtccgctagcattaattccgttggaaccctcaacatcatcgttttcaattgctggaggtcctgcattttcaaatggtttttcatctggatttggttccagtttttcccaagataatagctttagtcctttattaagggacgcagaagatggttatagtttctccaatggcacaaaggatgatatccatggactgagtggtttacataacttgggaaatacatgtttcatgaacagtgctatacaatccttggtgcatacacctccattggtggagtactttttacaggattacagtcgggagataaatacagaaaatccacttgggctacagggtgaacttgcaacagcatttggagaattactgagaaaactttggtcagctggtcgaacttctatagctccacgtccattcaagacaaaactttctcgttttgctccacagttcagtggatacaatcaacatgattctcaggagttacttgcatttctattggatggtctgcatg

SEQ ID NO: 412619 - DNA, 487 bp, Oryza sativa
ttctttccgtttcttgctccatccatctatccatccaaggagtgtggaacgccacacgtattttttttttatctatgctaatctgatcattagcagaggagagttttagcagtaggattggattaaattggagtagtttcatagtttgtgtgtagcgatcttaattagctttgattagacagacagtacagtagagtagaggatgttggctgtgttcagcggcgcggtgggtaaggtgccaccggagctggtggccgacggcagtgcggcatcgacgcccaagaccggggcgaggaagatggtcggtcaggttctcggcgccgaggaagaggacgtggacctgcggcttgtcgaccttggtcaccttgtctacttccacgccaaccaatcccttcttcgccccaggtatactagctgctgcttctactctgcttcaacttgaatttgctgaaaaaacatttgccgttttttttaccctgaactcccc

SEQ ID NO: 412620 - DNA, 466 bp, Oryza sativa
  unsure (1)..(466): unsure at all n locations
cctaaaccgtgatcatggatacccacttcgtgttgttgtacctggagtaattggcgcacgctctgtaaaatggcttgacagtatcaacataattgaagaagaatgccagggtttttttgtgcaaaaagattacaagatgtttccaccctccgtagactgggacaatattaattggtcaactaggaggccacaaatggatttccctgtgcagtctgctatttgtaccctggaggatgnggatgttatcaaggaagggaaggctaggattgctggatatgcagtctcaggtggtggccgtggcattgagagagttgatatatctgtcgatggggggaaaacatgggtcgaggctcatagatatcagaaaagcaacgtgccatacatatctgatggacctcngagtgataagtgggcatgggttctattcgaggctacatagacgtttcagcanacgctgagatagtag

SEQ ID NO: 412621 - DNA, 428 bp, Oryza sativa
tctttctttagcatctaatgaacctacctactgcgggtcctatctcgtgcgtcggcccggatcgacccggctacggcgactagggcgccggcaccctcgtcggaaatgggagaggacggccggactcgattccttcctctttacctgggagcctgcgaacgagggccaccctgccaagctctgcgaccaagcgttaaatgctgtacttgatgcctgcctcgccgaggaccctgacagcaaggacgcttgtgagacctgcaccaagacaaacatggtcattggtctttggtgagagcaccaccaaggctaacgcgggctttgacaagactgtcagggagacatgccgtaacatcggttttgtgccagctgatgtgcgtctcgatgctgaccactgcaaggcgcttgtgaacatcgagcactattcccca

SEQ ID NO: 412622 - DNA, 524 bp, Oryza sativa
  unsure (1)..(524): unsure at all n locations
gatgacgacggtggggggggcggaccagagcgatcacagttactacacgctgaagagaacactagggcactcattagccgccggcagcgcacaggcgacaaaaaaccgcctctttgtggttgacgccaagcataccaacgtctccggcggcggcctcgacgtcccaggccccgggcatgcgctgccgttcgtggaggcggacctgaagaagagcttcatgctcgatatctagagggccagggagctctgcacccatgcgagctaagctctgatagaagtgctggaaggggacgccaggaaagttctttgtgagtgtgttgataggcatcatgcggatatgttggttcgaagaagccatgggctatggagcaattaaacgagctgtnattggaagcgtgagtgactactgtactcatcatgcgcactgcaccgtgatgatagtaaaaaagccgaagcacaagcactgagtccatgagcggcggccccagcctggactgaacagtatcattcatgtatatatctac

SEQ ID NO: 412623 - DNA, 539 bp, Oryza sativa
ggttcactctactatttatttgtgtaaacatccagatagtgcaacctaacaaacggaggcgcgcgaattcgccacggcatgctaagtcgaaacgtcaaaaaataaagaaattgtttgtttctacggatgtatctctaagcctgcctgtataggaaggatcggatcggagtaaggtctatcccctgagcatttgaagcacctgctgcagcgtgggagcaaatctggtgacgttgagcttgatatcctgctcaatccagtagtacttcatcccgaactgccacccttgcttgtgtatagattccgggtccctgatcgccgggtggtccttgccgtacttgtcgtagagcgtgctctcctcggcggcgatgctgtactcgacgtcgcgcagcctcatctccctggccggaccaccgtagaacaccatggatgggtgttccatgtggccccacggcaccacctgcagcatcaccgcgttggtgcggaggaaagaagaagttgtgagttccgccccgtgcgcgcccatgagcacgtcacatgag

SEQ ID NO: 412624 - DNA, 514 bp, Oryza sativa
cgaggcgctgcagctgttcgatcgtgattggaaaaagattgaagcatacgttggctcaaaaactgtgatacagataaggagccatgcacaaaaatactttttgaaggttcagaaaaatggtacaggtgaacatctgcctccacccaggccaaagcggaaggcagctcatccatatccacagaaggcctctaaaaatgtttcgccagctgctatatcacaaccccctcctctgggggagcaaggttgtgttatgtccatggatacatctcctgtcatcagaaatacaaatgccagtgctgtagtaccctcctgggacaattctattgctcaacctttaagtgcaagtcgcacgcaaggtacaggtgctgttgctacaaataactgctctagtagcatagagagtccttctactacttggccaacttctaagcagttgaacaagaaaatatgcttcgaccctacgtgctatgccagattttgacaagtatacagctttctgggaagcatatttgat

SEQ ID NO: 412625 - DNA, 461 bp, Oryza sativa
  unsure (1)..(461): unsure at all n locations
gggaagtcatcagttatcaacacgttacgctccaagagtgtttgcaaagtggctccaattcctggagagacgaaggtgtggcagtacattactctgactaaaagaatatttctgattgactgccctggggttgtgtaccaaaacaatgattcagaaactgatattgttcttaagggcgtggtgcgtgtgacaaatttggcggatgcttctgagcacattggtgaagttctgagacgtgtaaaaaaggagcatcttaaaagagcttacaaaattgaagactgggttgatgataatgattttcttgtccaactgagcaagaccactggaaagctacntcagggtggggagcctgatcttacaacaaccgccaagatggtgcttcatgactggcagaggggcaagatttcctttttttgtgcctccaccacagcaaggtgaagatagtccatctgaaacagctg

SEQ ID NO: 412626 - DNA, 439 bp, Oryza sativa
  unsure (1)..(439): unsure at all n locations
gaaaatttaccaggagattgcaggagactagagagcgccactcccaatggggagtaggagcagaggagggagacacctcctcctcctgcttcacctcctctccctccattcctctctgctaccatgggcggcggtgtcggctgcgggagggggtggttccggggacccgtacgtcggcgtgacgatcgggacggcggtgacgaacctgctgtcgccgtcggacctcgccgagttcctccgcgcgcagcgcatcacccacgtgcgcctctacgacgccgacccgcgcatgctgtcggcgctgcgtcgtcgggcgcccgcgcccatcggcggcgtncccaacgacgagctcctcgcgctggggctctccccgccaccgnctctcctgggtcgccggcgngtgcttcctacgccggcgccactncagcaccccgggctcatc

SEQ ID NO: 412627 - DNA, 466 bp, Oryza sativa
tttttggtttactttactttttatttgtgtaaacattcatatagtgcaacctaacaaacggaggcgcgcgaattcgccacggcatgctaagtcgaaacgtcaaaaaataaagaaattgtttgtttctacggatgtatctctaagcctgcctgtataggaaggatcggatcggagtaaggtctatcccctgagcatttgaagcacctgctgcagcgtgggagcaaatctggtgacgttgagcttgatatcctgctcaatccagtagtacttcatcccgaactgccacccttgcttgagtatagattccgggtccctgatcgccgggtggtccttgccgtacttgtcgaagagcgtgctctcctcggcggcgatgctgtactcgacgtcgcgcagccttatctccctggccggaccaccgtagaacaccatggatgggtgttccatgtggccccacggcaccacctgc

SEQ ID NO: 412628 - DNA, 523 bp, Oryza sativa
tttatgccaatattacgcaagttcacgaaggcttggagttttcgaatgatgatgatgggttctcctttgccatattttctgttaagttttcaaaagatggccgagaacttgttgttggaaacaacaatgaatcaatatgtatttacgatattggatcaaacaaagtaacagaacgcattcacgctcattcggctgatgtcaatgcagtcacctttgctgatgaaggtagtgatgttttatactctggaagtgatgatagcctctgtaaggtctgggataggcgctgcaacaagagaggaaaacaagttggtgttttgacaggtcatttagatgggattacatttattgatagccgtggagatgggcattattttatttcaaattgcaaggatcaaactattaaactatgggacatcaggaaaatgtcgtccactgtgaaagactgcacaccaaaagcatatgaatgggattacagatggatgacatatccctcagaagcccgatattttaagcatccatatga

SEQ ID NO: 412629 - DNA, 513 bp, Oryza sativa
ggcttcctttctcctgttcagtgcatatatggatgaagtagctgctttcgcacaattgccattcaaagaggttgacatagcaatcccagaggtttttgttggtggtttacttggttcaatgcttatattcctgtttagtgcatgggcttgttctgctgttggcagaactgcacaagaagttgttaacgaggtcaggagacagtttattgagaggcctggcattatggactacaacgagaagcctgattacggtcgttgtgttgcaattgtggcatctgcttccttgagggaaatgataaggccgggggctttagccattatatcaccatggctgttggtattatcttccgtatgttgggtcacgctactggccggcctcttcttggagccaaagttgtagccgctatgcttatgtttgcaactggttctggtattctcatggcactcttcttgaacactgctggtggtgcctgggataatgctaagaagtacatcgagactggcgctcttggt

SEQ ID NO: 412630 - DNA, 397 bp, Oryza sativa
  unsure (1)..(397): unsure at all n locations
ctttggtgtcgagagaagtcaaatcacaaccacttcaagagaaaaaggccccaggaaagaagccacctgctggtgctcctgctcctgcacctgttccagctgttgatgcttatcagaagattctctcgtccattcctgagttctccgggtttggaaggctcttcaagtcctcagaacctgtggagctgacagaggcggagactgaatatgcgattaatgtggttaagcacatatacagtagccatgttgtgttgcagtacaactgtacaaacactatacccgaacaactgctagaaaatgtgactgtttatgttgatgccactgatgctgaggaattttcagaagtttgttcaaagccacttagaagtttgccttatgattcacctgggcanatttt

SEQ ID NO: 412631 - DNA, 457 bp, Oryza sativa
tttttggtagcacaagacaagaggcaagctagcctctgtttattattattaccgttgatctcatgaagcggaaatgctcccaaggagcgccttacaaattaacaacagattatttaatgtacaacatagctgcgagcttctcgagttgaccgtgagttcacaacagcttgaaagcttcagccggaacagctcagaccttggatggtggaggatcctgaataccgcatagcaaattcgcgggcacgggtacatcgatcatcttgggataggccaagttcaagttgtccataattttcttgaatggtcccttatcctttgttaggggggcattatacggaacctactcttcaacagtacttactgtgaaacctttgtagtcatggccaggataaaggagggtattctttggcaatgtgaatatctgcgaatgcaccgactcatacagttcaacagaact

SEQ ID NO: 412632 - DNA, 525 bp, Oryza sativa
  unsure (1)..(525): unsure at all n locations
gccaaatggtggcgctgcttcgctcgtgccgccgcctgatcccgcacctgtccgcctgcgccgccgccgcgccgtcgtcgtcatcgtcgtgcgctcctcgggctaggccgatctcgcggggactgcggctgctgccggtggtgctcgcaatggcggggtacagcagcggctccgccgcggaggggaggaggctgctgttcaggcagctgttcgagaaggagagctccacctacacctacctcctcgccgacgtcggggaccccgagaaacccgccgtgttgattgaccctgtggacagaacagttgatagagatctcaatcttatcaaggagttgggcttgaagctagtctatgctatgaatacccatgtgcatgctgatcatgtcactggaacaggattaataaagactaagttacctggagtaaagtccgtgattgaaaagtaagcaaagcaaaagcagaccattttattgagcatggngacanaatatacttcggtaacctcttccttgaggtacgatctac

SEQ ID NO: 412633 - DNA, 523 bp, Oryza sativa
ggttacgtcacttgaccctgtatcaaagcaaatgtcttccacgtctaattcagaagcccgagaagctattcttcccaaaaaggctgcagtcctgtctgtttcccaaactcctgcaatatcgaggccttcaagtgctcctctgttccaggtaccaagatcaactttaccacctacgccagcagttcaagttcccccaatgctttcccgctcaatgaccctggctgggcgatcgaggaatgaaccatccccttctgttccaagttatacagcacagacctaccgaaatgccatcattggtaagagtaatcttgatacagcatcagcaagtcttgatcattcaacttcttttggccaaaacgtcgcactttcacagccactatcatcgtatgcatcagcagcatctgccatggtacctccggtcggaaggaatggccaattaccaggtaaacagggcttcatgtttgggcaaggaaagtccgaagcaattgataactggaacccatggaaaggtgatagtaatgct

SEQ ID NO: 412634 - DNA, 396 bp, Oryza sativa
aaaaattaccgggcagtatatgatacatcaggcgcaaagggctccactgggtacactggttacatcattcaaccattactgaaaggggcaaataaaaacccccatcattcagtcatttgaagcaacagttcagcatattactgatagcaacaagcatgctacagaccattggccagaacactgaatacacaaactggggctcgaataaccatcccaggcattcattatgggctgacctgggggggtcgccaaggaatagcattatatctttgggaaagattggattttgattgggaactctaatatttttcagcagcactggcagcactcaaatcgacactgagatcaacagtctttccagggatcaggggttacatattaagaacgtttggcacc

SEQ ID NO: 412635 - DNA, 520 bp, Oryza sativa
agcgctctcaaagtagcatatattattcaatcttgatgaaagagggacacaagccatcatctatagtgatggtgcctcttacaaacttcaacacacgggtaacaagcatacactcaagagtcaagaggtggctaggttttgtgtgtacaatggaacacgcaggcatgtacacaaccaagtatactccaccccaaactatagtctttgcaatggttttggcagttgctcagaaaccatgaatcttgatgtgttccttcttcacaatgccggcctgaacaagaaaatttgatacgttcttcctctgatcaccctgaagttgaatgacctggccaagctctgggtcctggacaacagtaccattgcagcaaaactctttcttgagatctttgaggatcttgttgtagctgaattccttcttcaatccctggacagtggtcaggctcttacggccattacgctgctggatgcgtacatgaacgtagtcctttgatcctgcagccgcaccagagtctccagcatt

SEQ ID NO: 412636 - DNA, 500 bp, Oryza sativa
gccaagaagagggagagcaccaaggacacgcgactagcagaagccgagcgaccgcctcctcgatccatatcttccggtcgagttcttggtcgatctcttccctcctccacctcctcctcacaggttcttggtgtagcttgccactttcaccagcaaagtttcatgtctgatctcgacattcagatcccaactgccttcgatccctttgctgaggccaatgctggagactctggtgcggctgcaggatcaaaggactacgttcatgtacgcatccagcagcgtaatggccgtaagagcctgaccactgtccagggattgaagaaggaattcagctacaacaagatcctcaaagatctcaagaaagagttttgctgaatggactgttgtccggaccagagcttgccaggtcattcaactagggtgatcagaggagaacgtatcaattttcttgtcaggccgcattgtgaagaggaacacataagattatggttctgacaact

SEQ ID NO: 412637 - DNA, 486 bp, Oryza sativa
  unsure (1)..(486): unsure at all n locations
ccgccaccgccaccatcgccgccgccgccgcgaagctcgccgccacccccgcccccgccccctcccggcgccgcctcacgctccgcgggaaccccaccgcgcgccgctgcgtcgccgcgatggccgtgtccacccccaggtcggccgccgccgccgcgttcctcgagcgccgcgagtcggagcgcgccctccacttcgtcaagtaccagggccttgggaacgacttcatcatggtggacaatagggattcggccgtgccgaaggtgacgccggaggaggcggcgaagctgtgcgacaggaacttcggcgtcggcgcgacggtngtgatcttcgtcatgccgggggtcaatggcgcggactacaccatgaggatcttcaactcggacggcagtgagccgaggatgtgtggaatggagtccggtgctttgccggattatagctgagcttggaaacctacagggaacacatagctttaaaattcacact

SEQ ID NO: 412638 - DNA, 510 bp, Oryza sativa
  unsure (1)..(510): unsure at all n locations
gcgccgccatccccgagcaccaccaaccccaccccccgagcgagcggagcggagaacgcgaggcgaggcgaagcaaacatggcggcggctgcggtgtacggcgccggcggcgcgatgaagggcgggaagctcggcatggaggaggcgcgggagctgcagctcaaccgcatccgcatcaccctctcctccaagaacgtcaagaacctcgagaaggtttgcgctgatctggtgaagggcgccaaggacaagcagctgcgcgtcaagggccccgtcaggatccccaccaaggtgctccacatcaccacccgcaagtcgccgtgcggtgaaggaacaaacactgnngatcgtttcgagttccgcatccacaagcgggtgatcgatctcatcagctcccagatgttgtgaagcagatcacctccatcaccatcgagctggtgtcgagtccgagtgacgatcgtgatgtgtatgctgccaactagcactacctagacctacctgctggttctctgt

SEQ ID NO: 412639 - DNA, 422 bp, Oryza sativa
tttttggggaatcacaatatattttccatcagccattactgatgattgttttatttgtctgctcggatgaattcttattcatcgatgtaaagcatccgatcagtggttatcagtgcaagcttgaagctagaacgagctattaggagttgaaaggcctctggttgtagcagtccaagttggcgccgtagctgacgcccaacatgtcgcagtagcgcttgtagaacccaatccggtcggcgactctgctgtccgcgccgtggccgcactccacgccgccgttgatgatgttggtcaccacgccgtagcccggcacgcgccccgccgcctggtcgttgccgttgggcgtccactgccctgtcatcaccgcgtggcacgacggcttgggcgactgcggcgtcatccagaaccagaacgccgttttg

SEQ ID NO: 412640 - DNA, 509 bp, Oryza sativa
tgttagtgttacttcagatatatggagtagtagagctagagaggattatcttagcgtcgttgttcattttgttgatgatgattggcaattacaaaagagcgttttagggcttaggttaatagatgtctcacatacaggagaaaacatagctgaaagaattagggaagtaattaatgaatttaatcttgctgataaaatatttgctgtcaccctagataatgcatctgctaattctagggctattgaaatattgcaacctttattttgtgtgtatgctcaatcttttctactccatgagcgttgtgcatgtcatataatgaatttgattgttaagactgtcatgaagagggtaggtgaccacatggatgctgttcgtcaagcaatcgcgtggttaactgcctttaacccgcggattgctgcatggaagagggtttgcaatgcggccggtgtgaaagctcgtaagtttgccaccgatgcatagcattgatggaatgcaacgtatttaatgt

SEQ ID NO: 412641 - DNA, 338 bp, Oryza sativa
agaaaaacacccaacagtatatggtgcaggagcctcaaagggccccaaagggaccactgttaacattactcaaccgagtcaggaggtggcaaagaaaagcccccatcatgcaacactctggagcgaccagctccaatattactgatagcaacaagtatgcttcagaccgttggccagaacactgaataaacaaactggggctgggagaaccatcccagcaatgccttacggaccaacctggggggttccccaaggaataggattatatttttgggaaaggacggggtcaagctgggaaccctgaaattctttaccagagccggcaaaccttaaattga

SEQ ID NO: 412642 - DNA, 490 bp, Oryza sativa
gtttttcccttgctcgtctgcgccgccacctcctccaccttctgttgccctcccaaccatgacggtggccgagatcgggaagcaggaggaggagctccgcgcccagatcgaggagcagaagctcaacgagggagatgagccagtcgttgttgaagatgacgatgacgatgaagatgatgacgacgaggatgacaaagatgacgatgatgcggagggaggtgatgcacgtggaagatctaagcagagtcgtagtgagaaaaaaagcaggaaggccatggtgaagcttggcatgaagtctatcactggcgtgagccgtgttactgtcacgatgagcaagaatatcctttttgtcatcttcaaaccggatgtcttcaagagccctacatccgacacctatgtcatttttggcgaggccaagatcgaggacctgagcttgcagctgcagacccaggctgatgagcaggccaaggcgccggatctgagcagaatg

SEQ ID NO: 412643 - DNA, 537 bp, Oryza sativa
agcgctctcaaagtagcatatattattcaatcttgatgaaagagggacacaagccatcatctatagtgatggtgcctcttacaaacttcaacacacgggtaacaagcatacactcaagagtcaagaggtggctaggttttgtgtgtacaatggaacacgcaggcatgtacacaaccaagtatactccaccccaaactatagtctttgcaatggttttggcagttgctcagaaaccatgaatcttgatgtgttccttcttcacaatgccggcctgaacaagaaaatttgatacgttcttcctctgatcaccctgaagttgaatgacctggccaagctctgggtcctggacaacagtaccattgcagcaaaactctttcttgagatctttgaggatcttgttgtagctgaattccttcttcaatccctggacagtggtcaggctcttacggccattacgctgctggatgcgtccatgaacgtagtcctttgatcctgcagccgcaccagagtctccagcattggcctcagcaaagggat

SEQ ID NO: 412644 - DNA, 511 bp, Oryza sativa
  unsure (1)..(511): unsure at all n locations
tctcaccccagcaacatccaaggtcttcaacgacgaatcctttgctaagatgaagaatggagttcggatcatcaatgtggccaggggtggagtgatcgacgaagatgctcttgtcagagcccttgactctggcaaagttgctcaggcagcccttgatgtcttcactgaggagcccccagccaaggacagcaagctagtcctccatgagaatgttactgttacaccccatcttggagcaagtacagtggaggcccaggagggcgtcgctatcgagatagccgaagctgtcgtcggtgcactgagaggtgagctcgcagcaacagccgtgaatgctcccatggtcccagctgaggtcatgtcagagcttgccccgtatgtttcactggcagagaagctgggcaagctggcggtgcagctcgtcgcaggcgagagcggcggcataagggcgtaaggtggtgtacaccacggcccgtggccggacgacctcgacacgaggctcctncgcgccatg

SEQ ID NO: 412645 - DNA, 498 bp, Oryza sativa
gcatgcaggaacttggtttgtacagatctttttacaaggggaatagatatccaagctgttaatgttgttatcaattttgatttccccaagagcgcagaaacatatctccatagggttggtagatctggcagattcggccaccttggtttggctgtgaatttgatcacctatgaggaccgttttaacttgtatcgcattgaacaagagcttggaaccgagataaaaccaataccacctcagatagaccgagcaatatattgccaatagttatctgacagaacgatcttgtatgccaatctctggaagtaataagataacctgtgtaaatatcagctcatcaggtgtcatttcatgatctcacatggtgtatcttaatcaaagttgtgtaggggcactcagtagcaagtgactttgtaacaagctcatctaaatgctgtggcttagccgtgaagctcttgatcagacaatattgaatgttgctgataaggtctgacccca

SEQ ID NO: 412646 - DNA, 445 bp, Oryza sativa
cccacgcgtccgctcgccttcctttccccaactaaaccctaactcctcgccgccgcctccgcctccgcctcctcgtcggagcagcgagccgctgctccttctcctccaccaccagccatggcgacccagatcagcaagaagaagaagttcgtgagcgatggcgtgttctacgcggagctgaacgagatgctgacgcgggagctggccgaggacggctactccggcgtggaggtgcgcgtgacgccgatgcgcacggagatcatcatccgggccacgaggacgcagaacgtgctcggcgagaaggggcgcaggatcagggagctcacctccgtcgtgcagaagcgcttcaacttccccgagaacggcgtcgagctctacgccgagaaggtcgtcaaccgcggcctctgcgccatcgcccaggccgagtccctccgctacaagcttc

SEQ ID NO: 412647 - DNA, 485 bp, Oryza sativa
gaagcacaatatattttccatcagccattactgatgattgtattatttgtctgctcggatgaattcttattcatcgatgtaaagcatccgatcagtggttatcagtgcaagcttgaagctagaacgagctattaggagttgaaaggcctctggttgtagcagtccaagttggcgccgtagctgacgcccaacatgtcgcagtagcgcttgtagaacccaatccggtcggcgactctgctgtccgcgccgtggccgcactccacgccgccgttgatgatgttggtcaccacgccgtagcccggcacgcgccccgccgcctggtcgttgccgttgggcgtccactgccctgtcatcaccgcgtggcacgacggcttgggcgactgcggcgtcatccagaaccagaacgccgtcttgaagggagacggtggcgtccgacgccaccaggttcgggttgctcaacaagttggagccgatggcctgccccg

SEQ ID NO: 412648 - DNA, 523 bp, Oryza sativa
  unsure (1)..(523): unsure at all n locations
gcaccaaccccgtctccttcctccattcctccgccgctagaaccttctagaagctctcctcctcctcccatggcggcgacgatcgtgtccgtcaaggcgcgccagatcttcgacagcaggggcaaccccaccgtcgaggtcgatgtgtgctgctcagatggaacctttgcaagggctgcagttcccagtggtgcatcaactggtgtctatgaagctctcgaattgagggacggtggatctgattacttggngaaagggtgtttccaaggctgtcgacaatgtgaactcggttattgccccagctctgattggcaaggaccctacgtcacaggctgagcttgataacttcatggttcagcagcttgatggaaccaaaaatgagtgggggtggtgcaagaagaagcttggtgctaatgcaatcctggctgtgtcactggccatttgcaaagctggagctatcatcaagaagattcctctgtaccagcacattgccaaccttgctggaaacaagcaactggttttg

SEQ ID NO: 412649 - DNA, 532 bp, Oryza sativa
gaaccaagtgatccaattattattcactaattaagcaaaaaaggaaataaaaacaagtacaaaattgtttgacaaaaaaaaaatcgagcacgctagcacgaggacaatgtacgtgtcacactctcctagaccttaatgttgaccaggcgctccgacgccaacgacgcggcgtccaccgtcatggcgcggacggtggcgttcgttcccagggacgggtggctcactgtcaggttgtagtcgccgtgtgggaggtcgagctcgacggcgccgtcggcgccggtcgtcgccgccgtcttgtgcgtcttccactcggcgatcagcttgtcgacgagggtcccaacgggcaggttcttgaagctgttgtccgtcaggcacatcacgtagcaacccttggcgtgccacgccgcccacattatcatcccgttcaccgacgggtgcgcgtacccttccctcagcacctgctccaagaacttcacctggttgggtcctttgacgacatcgacctcggtgagccacatgggaagcttgagct

SEQ ID NO: 412650 - DNA, 475 bp, Oryza sativa
cattccgatagatagcaacaagcagttcaaacaccataaccaaagcgaactcaattcatggtaacatcacggacgaagaacacctaacactggatggatggatagagggcttctcgactcgagagagccactggacacgataacgactcgactcgatgataagatgattctgacacggatagctaaggataactggccacgatgggccccaccaatcagttcctccagttcccgccggagtcgccgccgtagccgccgccacggctgccaccgtagccgccgccgccgccgccacggccgccgccgtagccgccgccgccaccgtagccgccctcacggcgcccgtagccgccgccgccaccttctccgtagccgccgcctccacgaccgtcgtcgtagccgccaccgccgccgccgtagcccccgccttcgccgtcggaacggcgggactgggcctcattgacggtgatgttgc

SEQ ID NO: 412651 - DNA, 462 bp, Oryza sativa
cttctcctccccctctttaccttttcctcctcggttcggttccgtggttcgtctagggtttagcgggttgagatggcggcgccggatgtcgagtaccgttgcttcgtcggcggcctcgcctgggccaccgacgaccgctccctcgaggccgccttctccacctacggcgagatcctcgactccaagatcatcaacgacagggagacggggaggtcacgtgggtttggcttcgtcaccttctcctccgagcagtcgatgcgcgacgccatcgagggcatgaacggcaaggagctcgacggccgcaacatcaccgtcaatgaggcccagtcccgccgctccggcggcggaggcgggggctactgcggcggcggtggcggctacggcggcggtcgtggaggcggcggctacagaggaggtggcggcggcagctacgggcgccgtgagggcggctaccgtggcggc

SEQ ID NO: 412652 - DNA, 529 bp, Oryza sativa
  unsure (1)..(529): unsure at all n locations
acatgctcagacagcactcaagaagggtgagtttgtggagtacattccaacaagagagtactaccaccgtcacacccggtgtctgtactgggaggggaagctgatcttgccattcggcgaccaattctggttcaggttcctcttgggctggctgatgccaccaaaggtgtctctgctcaaggccacacagggtgaatctatcaggaattactaccatgacaaccatgtgattcaagacatgctggttcccttgtacaaagttggagatgctcttgagtttgtttcacaaggaaattggaggtttatccactggtggctgtgcccgcaccggctctacaagctccctgtgaaaaccatggtgtacccagagcctggctttgagcaccaccacaggcaaggtgacactagctatgccaagatgttaccgatgttggtgtgtactatgctcctggtgctgtcctgaggggcgaggagttcaatggcgctctagctgtccacaggnctgagcagtggctgattgagaaccaca

SEQ ID NO: 412653 - DNA, 358 bp, Oryza sativa
gatcaaggaaaaggctttggccaccctttcattaaacattatgcacggcacaatgcgtttgcacagttaaatggctatacgccgttggcagtttggcaccatttcattcgaggggatcacacaatggaccaccatttacttctttttatgctgctctaactaatgtattttgggaatccacttgtcaccctgtatgaagctggcgacgctgtatacgtcgacgtggtccctgggcacctggctggtccacccgatcctgctcccgatggcgccgtcgccgacggggccggggctctcgaactttccgtaatcgagcgttttgagcgcgaagttgccgttccacgccattcaccccggc

SEQ ID NO: 412654 - DNA, 551 bp, Oryza sativa
tttttggttttttttttttgaaccaagtgatccaattattattcactaattaagcaaaaaaggaaataaaaacaagtacaaaattgtttgacaaaaaaaaaatcgagcacgctagcacgaggacaatgtacgtgtcacactctcctagaccttaatgttgaccaggcgctccgacgccaacgacgcggcgtccaccgtcatggcgcggacggtggcgttcgttcccagggacgggtggctcactgtcaggttgtagtcgccgtgtgggaggtcgagcttgacggcgccgtcggcgccggtcgtcgccgccgtcttgtgcgtcttccactcggcgatcagcttgtcgacgagggtcccaacgggcaggttcttgaagctgttgtccgtcaggcacatcacgtagcaacccttggcgtgccacgccgcccacattatcatcccgttcaccgacgggtgcgcgtaccctttccttagcacctgttccaagaacttaacctgggtgggtcctttgacaacatcgacctcggtgagccacatgggaagcttgagct

SEQ ID NO: 412655 - DNA, 357 bp, Oryza sativa
ttttcgcgttcggctcgtgggtcggcatcaagagcggcggcgtggtcgccgccctggtcgccggcgggatcaccatgtcgatcctgggcaacgcggccgacgtcccgcaggacctcaagacggcctacctgacgctgacgtcgccgcgcgccgtgttcatcagcgaggcgatcggcacggcgctgggatgcgtcctcaaccccaccgtgtgctggctgttttacaggcggtacaagatgggcagtggcgacatgggcgagatgccctacctcaagctttaccgcggttacgacatgcttagcgtcggtcacggggagcaaggtgctgccggcacagcatgctttttttcaaggtttt

SEQ ID NO: 412656 - DNA, 671 bp, Oryza sativa
  unsure (1)..(671): unsure at all n locations
acactttgaagagatatccggcgcatggacgcgtaccgtaggttggatccttttttgggggcggccttttttttttttttgttttttttttttgaaccaagggatccaattattattcactaattaagcaaaaaaggaaataaaaacaagtacaaaattgtttgacaaaaaaaaaatggagcacgctagcacgaggacaatgtacgtgtcacactttcctagaccttaatgttgaccaggcgctccgacgccaacgacgcggcgtccaccgtcatggcgcggacggtggcgttcgttcccagggacgggtggctcactgtcaggttgtagtcgccgtgtgggaggtcgagctcgacggcgccgtcggcgccggtcgtcgccgccgtcttgtgcgtcttccactcggcgatcagcttgtcgacgagggtcccaacgggcaggttcttgaagctgttgtccgtcaggcacatcacgtagcaacccttggcgtgccacgccgcccacattatcatcccgtttaccgacgggtgcgcgtacccttccctcagcacctgctccaagaactttacctgggtgggtcctttgacgacatcgacctcggtgagccacatgggaagcttgagctgcgcnaacgtgtcgagggcgctccttatgtaagggatttttggggg

SEQ ID NO: 412657 - DNA, 499 bp, Oryza sativa
tcacagatcagttctaccacgtacaacagcagaagtgagagagggagaagatgacatggcaagaggaggagcttagctagccagccatggggaggcgctctccttgcctcgccgtcctcatgctcctgcttgaggcgttgcccctggctagcgccttcattgatgaagctgccgatgctgcccgagggctaggccatggtgcccgctttatgagcacggagggactggtgacatacgagacgctgcctgagccggatccgaatgcaaagccaaagcctgatcctaaacccacgccgaaacctgagccccagccagagccggagccaaaaccagaacctgagcctgagcctaaaccggtaccaatggcagaaccaaatcctgtgcctaagcctgaccctaaaccatacccagagccaaaaccggagccgtagccagagccaaaacctgagccggagcctagacctgagcctaagccagaaccaacaccagaaccaaagcc

SEQ ID NO: 412658 - DNA, 501 bp, Oryza sativa
  unsure (1)..(501): unsure at all n locations
ggcttatcccccctcctccccggcctccctccgccaaggccgccggagcccgtcgccggaggcagctgcagggaaggacgccgtcgccggacacatgcggggttgggcttcccagatagcttgtctcttgctgcactaagctcttccaatttttaaaaatggcagctcccaagcccattgctcggcttatttcccatgtcattcttgatttagatggtaccctcttaaacacagactgtgttgtaagtcaagtgctgaaaccatttctagtcaaaaatgggaaaaagtgggacagcaagaaagctcataaattagttggaaagacaccttatgaggcagcagctgttgttttagaagattatggactcccttactcaacagaagaatttctctcaatgcttactccaatgttcaatgagcaatggtgcaacataaaagctcttcctggagctaatcggntgataaaacatttgaagagtaatggagtaccagctgctttgg

SEQ ID NO: 412659 - DNA, 454 bp, Oryza sativa
gttgtgtcctgaatttttgctagtatatgcatataagtagatactactccactacagtacagaggagaggattgacattgactagctagtccacttaaccgtctccttactactatcagaagaagctaatttaattaagtggagtaaaagcaaaatgaggggtgggctgggctcattggtcgtcgttgtcgtcggtgacgaacttgccggttccggggttgatggcggcgaagaagaagaagaggatgttgaagaggaggagcggctcgatctcgttgatggggacgccggtctcgatgttgagctgcgccagcgcgcccttcccggtgatgatctcgccgatgagggagaaggcgatccccagctgcgcgaggcgacccacgaagagctcgttcgccttggtgaacccgaacagcgggccaccctcgctgagccccagcgccgcgcggaaccc

SEQ ID NO: 412660 - DNA, 522 bp, Oryza sativa
ccaagatcaagagatcgatcatatcgtattttgtagtaatttagcagctagctagtgcagctgcaagctattagcgactgcatgctttgatcgatccatctagctaattgttgaatccatctaagcttaatggctctgcagcagagcatggcgatgccgatgatggtagtgtctgaccttggcaccgctcctcggtcatcgccgatggttcagctgcagaggatgaagaagcatctggtggtggtggcggcgttcaagagcagaaccaaggcttcccccaaggtggacaagtcgaacaagaacaagtcgatcgtggaggacggcatcttcggcacctccggcggcatcgggttcaccaaggagaacgagctgttcgtgggaggggtggccatgctggggttcgcggcgtccctcctcggcgaggcggtcaccggcaagggcatcctggcgcagctcaacctggagacgggcatccccatctacgaggccgagccgctgctcctcttctcatcctctcacgct

SEQ ID NO: 412661 - DNA, 489 bp, Oryza sativa
  unsure (1)..(489): unsure at all n locations
gtcacttccatctcattctcctaattgtcatcactagcttctagctagcttaattaattaattagccatggcggaggagaagcaccaccaccacctgttccaccacaagaaggacgacgagccggccaccggagtagactcctacggcgagggcgtctacacgtcggagacggtgaccaccgaggtggtcgccggcggccaggacgagtacgagaggtacaagaaggaggagaagcagcacaagcacaagcagcacctcggcgaggccggcgccctcgccgccggcgccttcgccctgtatgagaagcacgaggcgaagaaggacccggagaacgcgcacaggcacaagatcancgagngagatcgcggccacggcggcggtcggcgccggcggctacgccttccacgagcaccacgagaagaagaaggaccacaagagcgccgaggagtccaccggcgagaagaagcaccacctcttcggctgatcga

SEQ ID NO: 412662 - DNA, 511 bp, Oryza sativa
ggcccagaagaagagggcggccaccgggctgacgaagccccggctcgtgtctccggcgctgcaggcggtggtgggagccgcggagatcccccgcaccgaggcgctcaagcgcctctgggcctacatcaagcagcacaacctccaggatcctgcggacaagaaggtgatcgtgtgtgatgagaagctgaaggtcctgtttgctggccaagagcgcgtgggattcctggaggtcgccaagcttctgaacccgcattttgtgaagtgactgccctcatcagtggagttgagttagcttagatggtttttagtgatcttgaagggggttcgtagattggttttgttggcctgagttagctcgacttcgtagcctcgtaggtttacctatttctctggagacaatggtagggtgcctctggcagttgtagtaacactagtaccgacgttcttagcaacttttagcacgtatccgtggtaatgtattagcaaatggagatgtggtctggccctgggg

SEQ ID NO: 412663 - DNA, 495 bp, Oryza sativa
tgcgagggccgccctttttttttttttttcagcatctgaattccgaagtggagtgggactggcaagcttagatcccacaggccagaacacatctccatttgctaatacattaacacggatacgtgcttaaagttgctaagaacgtcggtactagtgttactacaactgccagaggcaccctaccattgtctccagagaaataggtaaacctacgaggctacgaagtcgagctaactcaggccaacaaaaccaatctacgaacccccttcaagatcactaaaaaccatctaagctaactcaactccactgatgagggcagtcacttcacaaaatgcgggttcagaagcttggcgacctccaggaatcccacgcgctcttggccagcaaacaggaccttcagcttctcatcacacacgatcaccttcttgtccgcaggatctggagggttgtgctgcttgatgtaggcccagaggcgcttgagcgcctcggtgcggg

SEQ ID NO: 412664 - DNA, 533 bp, Oryza sativa
gagtgaaatttgttgttataagtattagttaggagtgcattgagtttactaaaaagcttgcaagtttacaacgtacacccggcgataggacaagggatacatctgtgttacatccatctgattaattgaactgaccacctagctacatcgttgatcgttttgccatgagctgatcaagcctggaaccacgttaacgagctcgcaattaacagcttacttggcaggtgccctgggcatggtgcaatgtatgggagcttcttcctttggatgtcaacatctgtcacgtggatgaatcctgcaacattgctggaaactattacatcaggttccttagcatatgaaacaggcagcacggggtggaccatatctgtgctgaggttaacagcaacaagtcgagtagggtctgccacaggctctgcaccaatcggtagtgcatacttaggagcttgatgagtgccaatcttgtaaacagattcaattactgaagttaacaacattttgagtgggggtgtagatcattcgcaatgccataa

SEQ ID NO: 412665 - DNA, 527 bp, Oryza sativa
  unsure (1)..(527): unsure at all n locations
ttttctctcccctcacggcggccgtcgcttcgttcgccgattagccggcgccgccgccgccgccgccggtagagaacccaccccctccccgcatggccgccgcgggcggggccgcgcagccgccgcggcagtacaagctggcgccgcagagcgagctgcgggtggaggtgccccccgacgcgcccgtccgcgtccgcctcgtcgccggcacggcggaggtcttcggcaccgagctcccccccgagggctgggtccccgtcccgccccgctccaagatcgccattttcacctggcacggcgcgacggtggagctggacggggtcagcgagagcgagtacacgtccgacgagacaccgatggtggtttatgtgaacacccacgcgatccttgacgcgaggagggcgagggcgagggccgtcgcggctcagggtgccctgccggagtcctcgcagggacccagagtgatcattgcggcgccaagtgattctgganaaagtactttgtgcaaaatgctccttagctgggct

SEQ ID NO: 412666 - DNA, 230 bp, Oryza sativa
agctgggcgctgaagttccgctagcctgtcgatataagtggatactactccactacagtacagaagataggatagagattgactagcttgaacactaaaccgcttccttactactatcagaagaagctgatttacaacacatgggagtaaaagcaaaatgaggggcgtctttgggctcaatggtcgtggatggcgatggctactaacttgatggttcctgggttgaagga

SEQ ID NO: 412667 - DNA, 484 bp, Oryza sativa
gggcatggtagatggagcctactatgaaatacttagttgtttcaggaggcgttgcatcaaaccagtatgtcagagcgcatttgaataacaacgctgagaagaatggcctacagctggtatgccctcccccaaagctttgcactgacaatggtgtcaagagcgcttggactgggattgagcatctcattgcaggcagatttgtggaccctactgctgaggatgagcctgatgatatgcagtatgacctgcgtccaaggtggcctattggtgaggaatattcagaaggaagaagtgcttctcggtcaatgaaaactgctcgagtccatccatcactcacatcgatgatacagggttctgttcattagcagtttagtggaaattgcaggagcatcaggccattgaagctagcgctttcatgtgccatgtggcttatcagtttcaggtttagtgaatactgacggtcccttagttcaagtgaataact

SEQ ID NO: 412668 - DNA, 354 bp, Oryza sativa
gaagaaatggaggcttcacgcacggggttctaggccatgcttttcatggtgctgctgcttgcagccactggtgagatgggcggcccggtgatggtggcggaggctcggacgtgcgagtcgcacagccaccggttcaagggcccgtgcgcccgcaaggcgaactgcgccagcgtatgcaacacggagggcttccccgacggctactgccacggtgtccgccgccgttgcatgtgcaccaagccctgcccctgatcgatgaaccagcagctagcgcagcagcttgtgccgacacctcgtgcatgtgtcatcgtgtcaaacgatcggagcctagctgccctatgaatgaataaaagt

SEQ ID NO: 412669 - DNA, 311 bp, Oryza sativa
ttttgggtttttcttttttttttattttcttttttgttgttaaagttctggaggtgggggcgggagccgcagagaaaccccgcaccgaggagctcaagcggctatgggcctacataaagaagcacaccctgcaggagcctggggacaaaaaggagatcgtgagtgatgagaagctgaaggtcctggttgagggacaagaacgaccagagaaaacggagggcgacaagatgatgaacacggactacgggaaaagaccggccccaaaagaggagacaagttagcctaaaaggctgaacaggagaacggagggg

SEQ ID NO: 412670 - DNA, 527 bp, Oryza sativa; identical to SEQ ID NO: 392504

SEQ ID NO: 412671 - DNA, 185 bp, Oryza sativa
cttgcggtggatacctaggtacccagagacgaggaagggcgtagcaagcgacgaaatgcttcggggagctgaaaataagcatagatccggagattcccaaataggtcaaccttttgaactgcctgctgaatccatgagcaggcaagagacaacctggcgaactgaaacatcttagtagccagagg

SEQ ID NO: 412672 - DNA, 450 bp, Oryza sativa
taggttctctctaacgataacttcaagtttggttacaatgctgcaactggacagtacgaggatttgatggctgctggtatcattgaccccactaaggtggtgagatgttgtcttgagcatgctgcgtcggtggccaagacattcctcacatcggatgtcgtcgtcgtcgagatcaaggagcctgagcctgcgcccgtcaccaacccgatggacaactccggctacgggtacttgatgactaagttacagttacttgttctccgggaaggtcactggccgtcaatttttgggtagtaggcttgaatctgaattttggtgagatttgagtagtttcgagacaatttgatttgttcccatgggaagtgaaataaacagggtcactatagcaaaatttgtggtgtaactggaacgggtgtcaattacgaaggaagatatttgaaagatttcatg

SEQ ID NO: 412673 - DNA, 521 bp, Oryza sativa
  unsure (1)..(521): unsure at all n locations
gatggacgtgaacttctggggatccgtgtacccgacctactatgccctaccacacctcaaggccagcaaagggaaactcgtcgtgtcgtgctccgcggcaggaacagtcgccgcttcaagaatgagcttctacaatgcaaccaaagcggcgcaactgaggttctacgaaacattgcgagccgagctcgggtcggaggtcgggatcacagttctcacccctggctacgtcgaatccgagattaccaagggcaagggcatccagagcggcggcngatgtcgccgtcaacgaggaagccagagatgagcagatcggcgtgttcccggtgggccgcgtggcggagctggccgaggtggccatggacggcatccgggccggcgacgggtacgtcacgtggccgtngctgttccggccgctgcagctggtagcctgcctcgccccggggtgctggactgggcctgccgcgcgctgtacggcaccaggaagggggcacgaccgccgctcgggagaggatcatggaggc

SEQ ID NO: 412674 - DNA, 516 bp, Oryza sativa
gggggaggcggggcagtcgacgaagcgctcgccggcggcgtccacgcagaagtagagctggtacagctggctgttgccggactcgtcgcggttgcactccacgaacggctcggcgccgacgccgcgctggatggcgcccttgatctgggacagcgtgtagtagccgccgtcgggcgacacgccgccgtcgcgcagcgcggcgagcacgggcagccgcgaccggaggcggagcgccgcctcgaagtagccgtgctcgtcgccgagcgccgccgcggcgcaggtgccgtgcttctcccactcgtgcgcccagaaccggatgccgtcgttgctcgggcacgccagcgtcggccactccgagcgcatgctccccagcaggtcgctcaccttggaggggtcgaactcgctgtcagggtcgcagttctgcgggtagctgccgtcggtcgggttgggccagagggccgggatgccgagtcgggcgccggcttgccggagcgcgggtagcagcagctttgcttc

SEQ ID NO: 412675 - DNA, 515 bp, Oryza sativa
gagagagaggaagagattgcagtgagtgagtgagtgagtgaagcagccatggcggcggcggcgagggcaacggcgcgggtcgggcttgcgctgctgctcgcggtggtgggcgtcggcgcgcaggactacgacttcttcttcctggtgctgcagtggcccgggtcgtactgcgacacgaagcagagctgctgctacccgcgctccggcaagccggcggccgacttcggcatccacggcctctggcccaaccgcgacgacggcagctacccgcagaactgcgaccctgacagcgagttcgacccctccaaggtgagcgacctgctggggagcatgcgctcggagtggccgacgctggcgtgcccgagcaacgacggcatccggttctgggcgcacgagtgggagaagcacggcacctgcgccgcggcggcgctcggcgacgagcacggctacttcgaggcggcgctccgctccggtcgcggctgcccgtgctcgccgcgctgcgcgacggcggcgtg

SEQ ID NO: 412676 - DNA, 522 bp, Oryza sativa
aagagccatcacggcgcatggaccccgaccggaaggctggaacccttttagggggccgccctttttttttttttgtgttcaaactctctttttgtaagtgactaattggttttacatttaacagggcacacaggttacaacaactagggttgtaagcccattaagccccaaacatcagatcaccacaagcaaatgtttcgatagacacacgcacacggcaacaggataactccacactggcagatcatgggataggagcagtgatcaatcaggccttggcacacagaacattaagcccccagacgacgacgactcctataggactcgtcaccatcatcgccatcctcattctcgggggactcagggccaacctacaagggggccttcaacaacggggagagaaacctaaagggcctcagagaactcaccctcctccatgccctcacccaaggaccaggggacgaaggcgcgcttggagtacatgagggcgaacctggggccgatgcgggagaacacctccac

SEQ ID NO: 412677 - DNA, 406 bp, Oryza sativa
tttgatgtgagttctgtttttataggatgtttgacttgtatggtccggagcaccttcttcctgttgaattctctgagatttgggtctacaatgcccagagggttgatgttctagaacagctcccaggcccattcgaaaatgtaaatgttatctccttcaagtgtatcatcgtagttcggccgttcagctaatgcctgcaataagaccacgccgaatgcaaagacctcaactttctcagccatatgacctctcatggcatactcaggtgcaagataaccgaatgttccaccagctatcgagctgacatgcgttttcttgtcatcataaaggtcgagttagcccaaaatgtgagatctcaggattgagattggcgtcaagttaagacattgttggccttgatgtccct

SEQ ID NO: 412678 - DNA, 290 bp, Oryza sativa
tttctgtgccatcattcattggggagttgactaatatgcagaacatgacatttcgcatcaattcattatctggacctattccaaaggagagcggtaaccttacgaatcttgtatcactgggtttaggcaagaacaggcttaatggctcccttccttcagaactggggaacctgtacaagcttcaggaattgtacattgacagtgctggcttaagtggtccactaccatcatcattttccaagcttacaagaatgcaaacattgttagactacaaaaggatgtgttccttg

SEQ ID NO: 412679 - DNA, 439 bp, Oryza sativa
cggacgcgtgggggtggctgcgcgcgcgtgcaatcgtcttatccccggtgtgcacgccacaaagccccagcggtgatcgccgcgccctccgcgccaagtacatatacgcgcgcatccgggcgcctcgatccatgcagccgagcgagctaaggaaggaagaagcatacaggcggcagcgacgagccatggccgcacacgcagcgctcgcggcgggccggattccggccaccgcccggctgcacagcaaggcggcgtgcaagcagagggtggactgcgccgacttctccggactgaggccgggatcgtgctccattagtcacgccgcgagggagacgtccttctccgatgtccatggctcggagatcagtgccagtgctaccggagagaacgccgtgagggggccggatgaggcgaagttcaaggttgccataacgggttt

SEQ ID NO: 412680 - DNA, 458 bp, Oryza sativa
gcgaacaaaactttcgaactcttttttttctccttgttttctatttcatttcattccgatagatagcaacaagcagttcaaacaccataaccaaagcgaactcaattcatggtaacatcacggacgaagaacacctaacactggatggatggatagagggcttctcgactcgagagagccactggacacgataacgactcgactcgatgataagatgattctgacacggatagctaaggataactggccacgatgggccccaccaatcagttcctccagttcccgccggagtcgccgccgtagccgccgccacggctgccaccgtagccgccgccgccgccgccacggccgccgccgtagccgccgccgccaccgtagccgccctcacggcgcccgtagccgtcgacgccacctactccgtagccgtcgcctacacgaccgccgccgtagccgccacc

SEQ ID NO: 412681 - DNA, 507 bp, Oryza sativa
gtgggttggcttctcctccccctctttaccttttcctcctcggttcggttccgtggttcgtctagggtttagtgggttgagatggcggcgccggatgtcgagtaccgctgcttcgtcggcggcctcgcctgggccaccgacgaccgctccctcgaggccgccttctccacctacggcgagatcctcgactccaagatcatcaacgacagggagacggggaggtcacgtgggtttggcttcgtcaccttctcctccgagcagtcgatgcgcgacgccatcgagggcatgaacggcaaggagctcgacggccgcaacatcaccgtcaatgaggcccagtcccgccgctccggcggcggaggcgggggctacggcggcggcggtggcggctacggcggcggtcgtggaggcggcggctacggaagaggtggcggcggcggctacaggcgccgtgagggcggctaccgtggcggcggcggctacggcggctgccgtggcggctgcggcggc

SEQ ID NO: 412682 - DNA, 417 bp, Oryza sativa
ccacaaaaaaacaacccttgcaggcgggggaaaacgagggacccccccctctcctaaactgggtctaaattcccaggccccatcaaagaaacccccccccccccccaggcgggccctgcatttttttgggcaaccaccccgatggattggatttggatcccctggggataaaagaaaacctgaaaaagaaatttcgccaaccatgcaaccctaaaggggctggttgccctttcaacaaacttccgggcccccttgaccccccttttggccccggcctgccccttgaaaatgaccagcttgccctctttgacgggggccggaaccaggtggggcttgccccccttgtggccgcccgccgtccttgtaagccccggtacgctgaagaactgtttcccccccacccccggggccgggttt

SEQ ID NO: 412683 - DNA, 521 bp, Oryza sativa
  unsure (1)..(521): unsure at all n locations
cccgtcgccacctcgccccatcaccctctccctccaccacactacaccccgctccactctcaggcaggcaatcagcggcgaggcaccagcccaccggccggcaatggcgtccacctcctgcttcctccaccagtccacggcccgcgtcgccgcgcgcgtcgcctccccgtccccggcgacacggacccacctcctcgtctgccgcgcccagaagcaggacgacgccgacgtctcccgccgcgcggcgctcgcgccgctggccggagcgacggcggcggggggggaaagggtggcgcccgccgncgcggcctacggcgaggcggcgaacgtgttcgggaagcccaagacgaacacggagttcatcgcctacagcggcgaggggttcaagctgctgatcccgtccaagtggaaccccagcaaggagcgcgagttccccggacaggtcctccgctacgaggacaacttcgacgccaacagcaacgtctccgtcataatcaaccccaccaccaagaagaccatca

SEQ ID NO: 412684 - DNA, 488 bp, Oryza sativa
gaacaaacgcgcatattataagtgacgaagcggtctcacataaaacagggcacacaggttacaacaacgagggttgtaagcccattaagccccaaacatcagatcaccacaagcaaatgtctcgaagacacacgcacacggcaacaggataactccacactggcagatcatgggatagcagcagttatcaatcaggccttgacacacagaacatcaagcccccagacgacgacgactcctctagtactcgtcaccatcatcgccatcctcattctcgtcggactcagcgccaacctcctcgtagtccttctccaacgcggcgagatcctcacgggcctcagagaactcaccctcctccatgccctcacccacgtaccagtggacgaaggcgcgcttggagtacatgaggtcgaacttgtggtcgatgcgggagaacacctccacgacgctggtggaggttgaatcatgcacacggccctctgcacctt

SEQ ID NO: 412685 - DNA, 518 bp, Oryza sativa
gcagagaaaggcgtcttcgtactcgcctctctccgcgcctccgcgcttttcctcctcctctcccctctctcccttctccgccgccgtcgcagcatcaacccaatccgccgccatgagggagtgcatctcgatccacatcggccaggccggtatccaggtcgggaacgcgtgctgggagctctactgcctcgagcatggcatccaggctgatggtcagatgcccagtgacaggactgttggggaggtgatgatgctttcaacaccttcttcagtgagactggtgctgggaagcatgttccccgtgctgtatttgttgatcttgagcctactgtgattgatgagggtgaggactggttgctaccgccagctcttccaccctgagcagctcatcaatggcaaggaggatgcagctaacaaccttgcccgtggtcactacaccattggcaaggagattgttgatctgtgccttgaccgcatcaggaagctggctgacaactgcactggtctccaaggtttcc

SEQ ID NO: 412686 - DNA, 397 bp, Oryza sativa
ttcttatggcccaatttttagaggaacatccaaagattgcacgtgtctattatcctggtctgccaagtcacccagaacatcacattgccaagagtcagatgaccggctttggtggtgtcgctagttttgaggttgctggagactttgatgctactaggagatttattgattctgttaagataccctatcatgccccatcatttgggggctgtgagagcattattgatcagcctgccatcatgtcttactgggattcaatggagcagagagaaatctatggaatcaaggacaacttgatcaggttcagcattggagtggaggattttgaggatttgaagaagcctgactggtaggcgcttgacaagatcttagcagctgactgcattctagtatgaga

SEQ ID NO: 412687 - DNA, 537 bp, Oryza sativa
gactgaacacaggcagcaaatccacacaagattaatatcgttgcacaagaggttgatagagcattacatatttagatgaggcacacaaccaaagaagcagcagcagctgaccaaagtttagacccatacatagggcaaccagtcattgcatacaagatgatactagtggattatggcagcttctctttttctcttctgattgagcagagagatgccaccgccattatttcttgaggtgagggaagcacgcggtgaggtcgctcttcggatgcttcgcctcagcatgctctttgcacttggtctcagaggtggtgcagatgaaagtctgcatgcatatcttgcactggatgttcatggccttcttgttggcctcaagctggctccccttggcgcccttgttcttctccatgttcctctccctcgccatcttcgacttctgcccattgccgccgcccatctcgtcgacctcgaccttcctctcccccttcgccgcaacaagagaagagaagagaagaaaagaaaacgagttttttttcc

SEQ ID NO: 412688 - DNA, 471 bp, Oryza sativa
taaaaaaactcgttttcttttcttctcttctcttctcttgttgcggcgaagggggagaggaaggtcgaggtcgacgagatgggcggcggcaatgggcagaagtcgaagatggcgagggagaggaacatggagaagaacaagggcgccaaggggagccagcttgaggccaacaagaaggccatgaacatccagtgcaagatatgcatgcagactttcatctgcaccacctctgagaccaagtgcaaagagcatgctgaggcgaagcatccgaagagcgacctcaccgcgtgcttccctcacctcaagaaataatggcggtggcatctctctgctcaatcagaagagaaaaagagaagctgccataatccactagtatcatcttgtatgcaatgactggttgccctatgtatgggtctaaactttggtcagctgctgctgcttcttggttgtgtgcctcatctaaatatgaat

SEQ ID NO: 412689 - DNA, 517 bp, Oryza sativa
  unsure (1)..(517): unsure at all n locations
tcaggttgtgccacatattacagatgaaattcaagattggattgaacgtgtagcgatgaatccggtcgatggtaaagaaggacctcctgatgtttgtgtcatagaacttggtggcaccataggggatattgaatcaatgccctttactgaagcattaggtcaattttcctaccgtgttggacctggaaacttctgtctggtccatgtcagtcttgttccagttttaaatgtagttggtgaacagaaaactaaacctacccagcatagtgttcgtgggctaagaggccttggattggcacctgacattttagcatgtcgcagtaccgagccactggaagaaaacgtgaaagcaaagctctcacaattttgtcacgttccagtctcaagtattattaatctccatgacgttacaaacatttggcacatncncttgttgctaagggaccaaagggcccatgaagctattctgaaagttctagacctttcaattgtcggtaaagtaccacgagaacccaag

SEQ ID NO: 412690 - DNA, 508 bp, Oryza sativa
ttgagaagctccatacaagtaagcagcagctagttgccgacaaggccagagaaggaagaagaagctctcatcatcatcaccatgtcgtgctgcggtggcaactgcggatgcggctccagctgccagtgcggcaacggctgcggcggatgcaagtactctgaggtggagcccacgaccacgaccaccttccttgccgatgcaaccaacaaggggtctggtgctgcttccggaggatcagagatgggggcggagaacggcagctgcggctgcaacacctgcaagtgcggcaccagctgcggctgctcctgctgcaactgcaactagaagaaacttatctccatccaattcatcacctgatcaacgagctaccagtaccactacatatgccatgtactagctacctagcttgcatgcaagtccttaatttgctgctagctagctagctagctaccttagcgtctcatgtatgtcatgttgccgcctggcccctaaataaaattccttacat

SEQ ID NO: 412691 - DNA, 496 bp, Oryza sativa
ggacaagagcatgtttgacgcctcgcattatcgcatatagcggatgaaaaaacgtcaggccagcctgcgcgacaacgtctagttacagataagagcagaactgcaagtcaaatacactcttttctctccatagtagagtttgagcagcgagcgggcaaacataaattattcaattattaaatgatatgatcactcttgatcatctcaacactataggaacaaaacttcgctaccgcgattttactattttagttgtccacaacttcaatgagggttggttcgtagtcagcaggagcctcgaaaccatggaagttcattacggttgcagcaacattggcgagcccaggggtctgaatgtcagaccggaatttcacaccagggtgaagaccgggacctccaatagcaaccgggaccggctgaagagtatgtgaggtaagaatctggttaccaccgttcttgtcgagaagtggctggccagatttgtttctttttacca

SEQ ID NO: 412692 - DNA, 522 bp, Oryza sativa
gaaaagaaaggctttcgtctcggtgggcaaaagcgcgagggcaaagcgaaggtatagcatctagtaggcgatggcgagctccggtttctcatggacgctgcccgaccaccccaagctccccaaggggaagacggtagccctcgtcgtgcttgacggatggggcgaggccaacgccgacaagtacaactgcatccatgtcgcccagacgcccgtcatggattcgctcaagaatggtgctcccgagaggtggagattagtgaaggctcatggaacagctgttggtcttcctagcgaagatgacatgggcaacagcgaagtgggtcacaatgctcttggtgctggtcgcatttttgctcagggtgctaagcttgtggaccttgctcttgcctctgggaaaatttatgatgagagggggttcaattacatcaaagaatgttttgacaagggtaccctgcaccttattggtttgttgagtgattgagggcgttcactcccgtcttgatcaagtgcagctgcttctga

SEQ ID NO: 412693 - DNA, 449 bp, Oryza sativa
atatcaaacgctctagaaaagattcatgtgatgaaatacatgatgaaccacgtatgttctcaaggtaaaattaattaatgcagtatagttttaactttgtccatcgatctcaacctgtaactgtgacgacacactggctacagtgccctcgaggtactagcagtatagcagtagctgtagtacgtagcagcagcagcagcaggttcactgtcttgattggattggatcggattagtagacgtagttcttgacgaacatgccctccttggcctcggcggcctagccgtcgctggtgtacttgccgagctgcgccagcgagttggccttggcgcggaggagcagcgcgtcctgcgccgccttcacgttctccggctgcccgccccacgtcttgaggcacgtgttctgcagcgccctcgcgtacgagaacgacacgtgccacgggttgggcc

SEQ ID NO: 412694 - DNA, 420 bp, Oryza sativa
ttccaagaagtctgaatggggtgccacccgccaggctgccgcccccaagccggtgactgtctccatggttgtccgcgctggtgcctacgacgatgagcttgtcaagaccgcgaaaaccattgcatcaccaggaaggggtatccttgccatggatgagtcgaacgcgacctgcggtaagaggcttgcgttaattggccttgagaacaccgaggccaaccgccaggcttaccggaccctccttgtcaccgcaccgggcttgggacagtacatctccggtgctatcctcttcgaggagactctgtaccagtcaactgtagatggcaagaagattgtcgacatcctcactgagcagaaaatcgttccaggtatcaaggtcgacaagggtcttgtgccccttgctggctccaacaacgagtcatg

SEQ ID NO: 412695 - DNA, 396 bp, Oryza sativa
tttttgtgtttgttcacatgttgttttttttcacatgattaatatttgttgtacaagaggttgtttgagcattacatatttagatgaggcacacaaccaatgaagcagcagcagctgaccaaaggttagacccatacatagggcaaccaggcattgcatacaagatgatactagtggaaaatggcagccccactaattctcttctgattgagcagagagatgccaccgccattatttcttgaggagagggaagcacgcggagaggtcgctcttcggatgctgggactgagcaagctctctgaacttggtctcagaggtggagcagatgaaaggctgcatgcatatcttgcactggaagcacatggccttcttgttggacacaagctggctcccctt

SEQ ID NO: 412696 - DNA, 462 bp, Oryza sativa
  unsure (1)..(462): unsure at all n locations
tgcttccgggattacgactgtaactggaataacccgatactgcgggagtttgccagtgatgttgcacatgcccgttggtggaaggtacatgacaagatgccaaagaaacttcagcactattgtcttttgagatcaaggcaaaaggctgggttggagtgggatcggaggcaggctgagaaagcaaacttcaccgatggacattggcggaggaacataactgatcctaggctgaaaacttgctttgagaagttctgcttctgggagagcatgttatggcactggggtgaatccaagaactcaacgaaggaaaaccctgtgccggccacacctaccgcgagcctcacaagttcatgagatgtgtagatagccctataccagatacaaacttctaagctccatacatacatagcaacagcttgtaaaggtagctatgcttaaggtttctcgacanaactatacttt

SEQ ID NO: 412697 - DNA, 516 bp, Oryza sativa
caagtattacataggacaggatggaaatggaagtgatcctcaggcttctggagcatacatatttcgccctaatggcacagttcctatcaagactgatggacaggttcctctgacagttctccgtgggtccatattggacgaagtgcatcagcagattaatccatggatatatcagatcaacagagtttacaaaggaaaggactatgtggagactgaatttatagttggaccaataccagtggatgatggaaatggaaaagaactatccactgaaagtcgttacaaacatggcaacaaacaaaacattttacactgattccaggggacgtgacttcatcaaaaggatacgggattaccggtcagagtggaagatcgaagtgcaccagcctatcgctggaaactattatcctgttaatcttggcatttatgtggaagatggaagcagagagttatctatacttgtagacaggtctgttggaggtgccagcataaaggatggacagatagagctaatgc

SEQ ID NO: 412698 - DNA, 436 bp, Oryza sativa
agaaaaaccaaaacataggggggttaatttcttcttctcaaaggagggggacatatttccttcttttaccattacataagcttaagcaataaccgataacaaagcctcctcctcctttagggaaaatattcaaacacaatacccttataaggccttattattaggaaaggtgcgggcatgggcataaatgggaccggggggcctggtaaaaatcacaagggtgcgcagcggggaaacaaaacaccataatgggacagagcaaaaacctcctaaagggagcttttaggcagaaggcttttcccacttggggggctttaccacctcccaggggaagtctggggcgccccttccgaagggaccccaagccgccggcttgagggaacggcccttgccaccttttttgagggcaagggtgatgaacaacatgcccggcctg

SEQ ID NO: 412699 - DNA, 524 bp, Oryza sativa
  unsure (1)..(524): unsure at all n locations
tattcgccatcggtgtcccagagccactgtccgtattcgtcgacacatacggcactggcaggatccctgacaaggagatcctcaagattgtgaaggagaacttcgacttcaggcctggcatgatcatcatcaaccttgacctcaagaaaggcggcaacggacgctacctcaagacggcggcttacggtcacttcggaagggacgacccagacttcacctgggaggtggtgaagcccctcaagtgggagaagccttctgcctaaaagctccctttcggaggcttttgctctgtcccattatggtgttttgtttcctcgctgctcagcattgtgattcttaacctgccccccgctgccatttatgcccatgcacgctactttcctaataataagtacttataagggtattgtgtttgaatattttacctagaggaggaggaggatttgntatctgttattgcttaagcttatgtaatggtgaaagaaggaaagatgctacactactttgagaagaagaaatgaaaa

SEQ ID NO: 412700 - DNA, 420 bp, Oryza sativa
tgttcccagcttatatgtaggcaggccttgccttttgctctgacgcctaaataaaaccgtcgtcgtcgttgtcagtgtgtgcgtgtgtcgatcaatgttggatggatccctagctagcttggatggatcatctatcatcatggtgatctcatcatgtactcctgctccatctcctcatgcgtgccaggcttcttaatataatctacctctgctttcatcccaaaaaaaaaaaaaaaaaaaaaaaaaaaaaaaaaaaaaaaaaaaaaaaaaaaaaaaaaaaaaaaaaaggaagaaaagaataaagagaaacaaaaccagaaaaagcaaaaaaaaaaaaaaaaaagggggcgcccgttttaaaggtaccaagtttacttccccgggcttgcaaaatattagtttttttattgggccccctaa

SEQ ID NO: 412701 - DNA, 417 bp, Oryza sativa
tttttggtttttttttttttttttgacagcttcttaataatttttttttattttaccgagggtaatgtatggtaggaaaaacgccagacaaaacagagccggccagactcaacttaaactcaaccctatgatggtaaactgtttgcgaataacgcctccgcctatgacaatgtttggagataaacgcttccaccaaaaaacgaatgtcggggagggttctcccctacaagaattattattggtttcaaaggtaaaaaggcaaaattcaccagatcccgctagggcaggaccaggaataaacacttggtcggcatcaatttctgccagtttaggcaccgcccgagccggacttttttccaaagaagaggaactgcagctggtcatagcctgggagcacaccagcaccagcaatggcac

SEQ ID NO: 412702 - DNA, 502 bp, Oryza sativa
  unsure (1)..(502): unsure at all n locations
tgtatggcctgtaattccaaacttttaattgcaagactagatcgcaaaaaaaaaaaggaaaaaaaaaagaggagaaaaaaacaaaaacagagctaaagaagcggaagcgggaagaacaaaagagcggaggacaggaaggaaaaagcgctgaccgagaagaagaaaaaaaaaaaaaagccaaaagctgggcttcgcccgcgaggattaaaacgtccaccaactcgaatcgcaggagaaggagcttttgcagctcaagcgtgaggctcggatgaggggcgggtttttacaacaggcctgaggacaaattctgtttgtggtccgcatcccgggtatcaatgccatgcaccccaagaccggaaagatcttgcagcttctgcgggtgaggcaagatcttcaatggtgtcttcctcaaggttaacaaggcaaccattaacatgctgcgcagggttgagccatatgntgcatatgggtacccaaacctgagagtgtcagggattgatct

SEQ ID NO: 412703 - DNA, 418 bp, Oryza sativa
ggttcccttattaggcatttgagcaaattggaataaaccgaacatatgtgtacaaactcacatgcgagaaccacaggtagcaacaggccttacagtttttgaacagaagaaattgatcgcagaacggccggatgaacactttgcccacactagggaagaaccaggctcgaaaggagagacacatgccggaggacggccataacagctcctattggtttagcattattggacccggagaatgagaagcatttcctggggacaagtggaaggcccagaataatcggactcggtctttggcatccacatctgttggaacgggctgagagaagacacgatggatcctccagtgcagagactggccttacttgtaggaggagcgcccaccttgacctttatgccgctaggagccaaggcagtg

SEQ ID NO: 412704 - DNA, 516 bp, Oryza sativa
ctggattctaccccaggtgttagatgggatgatgtcgcaggtcttagtgaggccaaaagacttcttgaagaagcagttgtacttcctctctggatgcctgaatatttccagggtattcgccgaccttggaaaggggttctaatgtttggtccacctggtactggaaagactcttttagcgaaggcagtagctacagaatgtggcacaacatttttcaatgtttcttcagcaactctggcttctaaatggcggggagagagtgagcgcatggtccgctgtttatttgatcttgcaaggttctatgctccaagtacaatcttcattgatgaaattgactccctctgcacatctcgtggagcttctggtgagcatgagtcatcaaggaggttgaagtctgaacttctagttcaaatagacggtgtaaataatagttctaccactgaagatggtcaaccaaaatagttatggttctggcagctaccaactttccatgggatattgatgaagcactgagac

SEQ ID NO: 412705 - DNA, 512 bp, Oryza sativa
gatcccaaatgttctcattgattgatagcgatatcatagaagcagccgacacgaattaagatttaaaaccaaccccaagaaggatcgcagatccaactccaccgaatcgatccaagaactccgcctaatccaaccaaaccatgggcgatctcatctcaccaacacgacacgaactcataaaaagactaacaccaccaccacctcctacttatttagggactcgacgactcaagacgactgatactggcgaaaggcgaaggggaacagcacagatctaggagagctggccgcagtcggcgatgacgaccggcttggcggtgctcccgccgcgggatcccaccttctcgatgggcttgacgacgttcatgccctagacgacgcggccgaacacgacgtgcttcccgtccagccagctgcagggcacggtgcagatgaagaactgtgacccgatagtgttgggcccggcgttcgccatggacaggatgccggtgctgtcgtgcttgacttgaaca

SEQ ID NO: 412706 - DNA, 404 bp, Oryza sativa
tgcaccttccaccgcgtgatcccggagttcatgtgccagggcggcgacttcacccgcggcaacggcacgggaggggagtcgatctacggcgagaagttcgccgacgaggtgttcaagttcaagcacgacagccccggcatcctgtccatggcgaacgccgggcccaacactaacgggtcccagttcttcatctgcaccgtgccctgcagctggctggacgggaagcacgtcgtgttcggccgcgtcgtcgagggattggacgtcgtcaaggccatcgagaaggtgggatcccgcggcgggagcaccgccaagccggtcgtcatcgccgactgcggccagctctcctagatctgtgctgttccccttcgcctttcgccagtatcagtcgtcttgagtcgtcgagt

SEQ ID NO: 412707 - DNA, 495 bp, Oryza sativa
tctcgatctcgtcttctctctctcgcaggactcgatcgcgatggcggcggaggtggcgaaggcggcggtggtgccggagtcggtgctgaagaagcggaagcgggaggagcagtgggcggcggacaggaaggagaaggcgctcaccgagaagaagaaggccgtcgagagccgcaagctcatcttcgcccgcgccaagaagtacgcccaggagtacgacgcgcaggagaaggagcttgtgcagctcaagcgtgaggctcggatgaagggtgggttctacgtcagccctgaggccaaacttctgtttgtggtccgcatccgtggtatcaatgccatgcaccccaagaccaggaagatcttgcagcttctgcggttgaggcagatcttaattggtgtcttctcaaggttaacaaggcaaccattaacatgctgcgcagggttgagccatatgttgcatatgggtacccaaaccttgagagtgtcagggaattgatctac

SEQ ID NO: 412708 - DNA, 405 bp, Oryza sativa
gacagcaactcaataatctttcgatatttcaccgagggtaatgtatggtaggaaaatcgccagacataacagagccggccagactcaactcaaactcaaccctatgatggtaaactgtttgcgattaacgcctccgcctatgacaatgtttggagataaacgcttccaccaaaaaacgaatgtcggggagtgttctcccctacaagaattattattgctttcaatgttaaaaaggcaaaattcaccagatcccgttagtgcaggaccaggaataaacacttgttcgtcatcattttctgccagtttaggcaccgcccgagccggactttttttcaaagaagagggatcggcagttggtcatagcctgagagcacaccagcaccagcaatggcacgtaggatgttg

SEQ ID NO: 412709 - DNA, 498 bp, Oryza sativa
gtttcttccaagtagacttgttacgcctgttggtgttcgagtggtaggagcccttgggcttttccaggttcagatcgacgcctccttcctctggacattgttgctagttggtgatggctgagcaggctaatcaaccgactgtccttcagaagttcggtggccagttccaccttggctccagcttttctgaaggtgtacgggctcgcaacatctgcccatctgtctcatcctatgacaggcgctttaccacaaggagctacatgacccagggccttgtcaatggtggcatcaacgtcccaatgatgtcgtcctctccaatttttgctaatgctccagctgagaaaggtggcaaaaacttcatgattgatttcctcatgggtggagtgtcagccgcagtttcaaagactgctgctgctccgattgagcgtgtgaagctgcttatccagaaccaggatgaaatgatcaaggcttgtaggctctcagagccataccagggta

SEQ ID NO: 412710 - DNA, 440 bp, Oryza sativa
aggggaattcaaacaagttttactgctagcattttcttcattacaggatacagggctacatccgaaacaagcagattcctaacaagacaaacacaatgcaaaaggctcctagccgccgaagccgtaaagggtgcggccctggcgcttgagggcgtaaaccacgtccatggcggtgacggtcttgcggcgggcgtgctcggtgtaggtgacggcgtcgcggatgaccttctcgaggaagatcttgagcaccccgcgggtctcctcgtagatgagccccgagatgcgctttaacccgccccttcttgccagcctccggatcgccggcttcgagatcccctggatgttgtcgcggagcaccttccggtgccgattcgccccgcccttgccgagacccttcccttccttgccgggccccgacatctacgacgatggaattgggg

SEQ ID NO: 412711 - DNA, 439 bp, Oryza sativa
atccccaattccatcgtcgtcgatgtcggggcgcggcaagggagggaagggtctcggcaagggcggggcgaagcggcaccggaaggtgctccgcgacaacatccaggggatcacgaagccggcgatccggaggctggcgaggaggggcggggtgaagcgcatctcggggctcatctacgaggagacccgcggggtgctcaagatcttcctcgagaacgtcatccgcgacgccgtcacctacaccgagcacgcccgccgcaagaccgtcaccgccatggacgtcgtctacgccctcaagcgccagggccgcaccctctacggcttcggcggctaggagccttttgcattgtgtttgtcttgttaggaatctgcttgtttcggatgtagccctgtatcctgtaatgaagaaaatgctagcagtaaaacttgtttgaattca

SEQ ID NO: 412712 - DNA, 481 bp, Oryza sativa
aattaatacactgtattattttgtaatcagccttgttcttatggtcaaaaacaatacatcatctatgtataataataataataatattattaatgccattttatgaacattgcacaagctgctgcagcagcatcaaccaaccaacaaaccaaactataaacttcctctgctccatttctgcctccattttcatggacagcaacatcatatctctgcatttttttttcaccggttgtgtgactgaaaatagagaaaacgtcggcgttggccttagctgcttttgggcgcatcggcggcggcggcggcgacggcgtcggggatgccggcggcgagcctggctctcaagtccttcctgaagatcttgccggaagggttcttggggatggaatcggtgaagaacaccttgttgatcctcttgtagaacaccacctcttttgcaacgaatttcttgatctcatcctcggtgatttttgagccttct

SEQ ID NO: 412713 - DNA, 515 bp, Oryza sativa
  unsure (1)..(515): unsure at all n locations
ggacgggtggctgcacaccggagacatcggcttcgtcgacgacgacgacgagatcttcatcgtggacaggctcaaggagatcatcaagtacaaggggttccaggtgccaccggccgagctggaggcgctgctcatcactcacccggagatcaaggacgccgccgtcgtctcgatgaaggatgatcttgccggtgaagtgccagtcgccttcattgtccggacagaaggctcagaaatcaccgaggatgagatcaagaaattcgttgcaaaagaggtggtgttctacaagaggatcaacaaggtgttcttcaccgattccatccccaagaacccttccggcaagatcttcaggaaggacttgagagccaggctcgccgccggcattcccgacgccgtcgccgccgccgacgncgatgcgcccaaaagcagctaaggccaacgccgacgttttctctattttcagtcacacaaccggtgaaaaaaaaatgcagagatatgatgttgctgtccatgaa

SEQ ID NO: 412714 - DNA, 444 bp, Oryza sativa
ttctgtggctgtgcctgtggctgcattgccagatgaggcggcttctgtggcggttagcgtggttgatgtggagaggccagttgccgcgcctgcgaattggaggcgtgctccgaatggcgcggcggagcaagagcctaggagtggtggtacaaggagtgaggcgaaaccgaggattacagatgttgtgcccaatggagtgcagggggggcatgcggcagctggctggccaaggtggctcacagaggtcgcagcagaggcagtccgtgggtggcaacctcggaaggcagagtctttcgagaagttggacaagatagggcaaggtacatacagttagtgtttacaaagcaccgtgatcttgagagtggaaaaattgtggcacttaagaagtttcggtttgccaacatggaccctgagagcgtgcggttcatggcagggaaattcaca

SEQ ID NO: 412715 - DNA, 408 bp, Oryza sativa
gcatgggattttaacattcagtagactattaggatcagcatgtgatcataaaatggtcggcccagtaacaagggagcaaaagatacataactttagctggaaacttgggatataaggaaatattcaaacaatacattcgcacagcctccagtagcaccatttattcctcctcctcggcctcctccagccatttaacaaaaggttccagtgctttgacgaaagattgcctgccctttgggtttgaacccttgcggaaccaaaggaggatggtatcttcagctaggacatcttggtcatacagcgttctgattatttcaggaaatagcttcatcagcttagcatcctcatagcactgtgtctgaactttgtatatgagttcgagttcaagcctgccacttgtgcagaatg

SEQ ID NO: 412716 - DNA, 511 bp, Oryza sativa
tttcactgctcaaggataatcttgtttccaaagggatagtgctttcgttcattactgagtttttcaaagaatatctgaaggagaacactttagatgatcttattgcacttttgaagaaaggcaaaatggaggacaatttgctggaatttttcccatcggcaaaaagaacctccgaggctttatctgaacatttcactaaagaaggtctgacaagtcttgttgagtacaatgaaaagaagatgtttgaggttaaacttaaggagataaagttaacactgacaacaatgatcaatgaagaggctgaaatatctgaagtcacagaagctgtcaagcaacaggtgaaagatgctaaatttcctgaataaagggttgttcgcatgctatgggatgtgctgatggaggctgttcaatggtctgggaagaaaccagcacaaaattctaattcagcacttcgcaggtgaaagcatgggctggccttttgaatgcattctgcacagtggcaagcttgaac

SEQ ID NO: 412717 - DNA, 411 bp, Oryza sativa
tttatatagtgcacaggaggcatcattctgttcatacatatctctcccttgcttgctttgctcctggatatatagctagcttctttctttcttcctctctccctgtgtggcacgcgcctccaatcgatctcttcggtgagtagacgcatcgagatcggggggaaatgtcggtccagtttacatcggagcatgtttgctatgtcaactgcaactattgcaacactatccttgtggtgaatgtgccaaacaattgttcctacaacattgtgactgttagatgtgggcattgcacaatggtgctctccatggatcttgctccttttcaccaagcacgcactgttcaagatcaccaggtacagaacagaggatttcaaggtaataactttggaagctatgacatagcttccagaa

SEQ ID NO: 412718 - DNA, 415 bp, Oryza sativa
ttattgagaattatgcacaagcagttgtgagaaacaacattgacagtcatctacaacatggatccggaatacttttggagcaaattactgaatatgtcaggtcaaatttggagagtcaagggaaagagagtgaattccttcaacatactacatgtaaagtacctagggctcttggtgacattatggaaagcatcgctggtgcagtatttatagacaccgattctaatgttgacatgggttgggagataatagagccattgctgtctccactgattacacctgataagcttgcattgacaccttaccgtgagttgctggagctatgcaacaacattgcttgcttcttaaattcagaatgcaccagtgaaggagaagaagtcattatagcgatgtcactgcatctacgagatgagct

SEQ ID NO: 412719 - DNA, 414 bp, Oryza sativa
aagaaaagcacgaattccaacgggtccacatcgagcttacaaataaaggacatgcaatgcctggcctgtattttcaatcataaccagcccatggaaaacgctaatacagcgatactaataatgggctgcaaatacaggaaggggttgaaaggtgctaattaactagtaaataagtcacggaagcaatggagcgcacataaactgggtccactgggtactttagctcgacacattttgacatacgcagccctaatcttatgattccacatagcaattgatcctagtacattttatgatccagtaatacagcaggtagctgagtaaatggactcagaaatagacttcaggacagattagtggccctctccttcaggcttcgctggttccttgatctcgtcaccaccatccttcgca

SEQ ID NO: 412720 - DNA, 393 bp, Oryza sativa
tttttacatggcaaagcttgccgagcaggctgagcgttacgaggaaatggtcgaattcatggagaaggtggcaaagaccactgatgttgctgagctcaccgttgaggagcggaacctgctttctgtggcttacaagaacgtgattggtgctcggagggcatcgtggaggatcatctcttctattgagcacaaggaggagagccgtgggaatgaggcatatgttgcatcaattaaggagtaccgtagcaggattgaaactgagctcagcaagatctgcgatggtatccttaagcttctggattcccaccttgtcccatctgccactgtgcagagtcaaggtgttctacctgaaaatgaaaggggactaccacaggtaccttgctgagtttaagt

SEQ ID NO: 412721 - DNA, 496 bp, Oryza sativa
atgtgcgacgcaattgctcgaatcacttatgttttgtacggttcagtgcattgtacagacggcaagtaggttctccaatcttattagtgctttcgacaattttttccacgataagaaatgaaataatggtactataagggtctcgtctgtcaaacggacggagcagactgcgaaacagtgctgctctttgtaagaaccgaactctgctgttggagggatgagtgcacacgctcgacgcgctccagatacagtgaggtctgcatttctatgagacgggatatcgccctacggaatgcaaacatctcttcttggccagacaaaattgccactaggcctgtaggagaaggcgctgcaccaacattaccttctgctaaaacatccctcctaagctttgccccttcagcttcaccttcgaactgaaaactctccaagtcaaaaagaggtccttcatcagttccttgaaaagatcatcaatggatgaggcagctagacatac

SEQ ID NO: 412722 - DNA, 456 bp, Oryza sativa
ttttagcagattgttaagcacaggaactgtgcttgtttcgaccagtaataaagcacctgaagatctgaatcaggatgggatgcagcgggaaattttccttgacttattgtctaagttggacgagaactgcaacaaaattcttgttggaaccgaaacagattatcgccgcctaattccaactgacggcttaactcagattcactacttttggcctctcacttctgacattcggagtatgtatgaggctatgtggcacgatataactagacaaacaggaggaaacattatttctgtcaccattccagtaatgtttgggaggtatcttgagattcctaaaagttgcaatggagtggcaaggtttgacttcgagtatctgtgtggcccgccagttggagctgcagactatataagcatagccaggaactaccatacaatttttatatcggatatttcagc

SEQ ID NO: 412723 - DNA, 399 bp, Oryza sativa
tcttaaccccaagccctccaaccccaagagaggccgcgccgcgagagagagagagagatccaatccaatccggcccccgtctccccccctcctccacgccgcggcgccgctccggttgcttgctcaggggggcgggctgctgatcgaaatgggcgggcgcgtgtccaaggcggtggcctgctgctgctgccgctcgcagcaccatggagtcgtcgtcgagagctcggagaaagacggcggaggaggaccatggggagtcgtatgagctgccggcctttcaggaattctccttcgagcagctgaggctggccacctcaggctttgcggtggagaacatcgtgtctgagcatggtgagaaggcgcccaatgtggtgtacaaggggaagctcgacgccgcag

SEQ ID NO: 412724 - DNA, 470 bp, Oryza sativa
tcgggtcatttgaccctgccaggcaagatcgttttgatgtcaccaagacatggccagaggatatcatccccctgcagccagttggacggatggtcctgaacaaaaacattgataacttctttgcagaaaatgaacagcttgctttctgcccagcgataattgtccctggaatccattactctgatgataagctgctccagacaagaattttctcctatgctgatacccaaaggcaccgtcttggcccaaactatttgatgcttcctgtgaatgcaccaaaatgtgcataccacaacaaccaccacgatggctccatgaatttcatgcacagggatgaagaggttaactacttcccttcaaggtttgatgctgcacgtcatgctgagaaggtccctattcttctcgtgttctacaagctgtcggaaaagtgtgtcattgacaggagaacaattttcaacagcttgtgagag

SEQ ID NO: 412725 - DNA, 456 bp, Oryza sativa
tctagctggtgcagctggaccagccccattatcgaagacattgtcagacctcaaggattcctgctggagatttttacggccacatacaattcgaggaactgccttgggatccatagcattagttgctagagctttgatagagaacccccaactgataaattggtggttggtattcaaagcgttctatgggctcgtggcgttaatctgtggcaatggttacatcgttgggatcaatcagatctatgacattagaatcgataaggtaaacaagccatatttaccaattgctgccggtgatctctcagttcagacagcatggttattggtggtattatttgcagctgcgggattttcaattgttgtgacaaactttggacctttcattacctctctatattgccttggtctatttcttggcaccatatactctgttcctccattcagacttaagagata

SEQ ID NO: 412726 - DNA, 505 bp, Oryza sativa
tcggtgtgatccaaagagcttgccgaagtatgaggcgtctcatgagttccaaactaagaaaaaacgccagcagcagaggcaagcagaggaagccgcaaagcgccagaaattgcagcatcctccaccacattcccgtttgcctccaatccagaacccaggccaaccacaccaaatcaggcctggccagcctatgcataatgcaccacctgtggcagctggcccaagtcatcactatgcaaagccgcgaggacctggaggccctaataggtacccacaaggcgggaaccaaggaggctacaatccgaaccgcggtggacagggaggaggctatggggagtggcccatatccacagcaaggacgaggtcctcccccttatcctggtggtggcatgggcggagccggtggtccgaggggggtggtggcagtggtatggtgttggcggaccaaattataacagggtggaccttatgtgcatctggtccaggtcgaggccccgactataat

SEQ ID NO: 412727 - DNA, 395 bp, Oryza sativa
ttcttcgcgtcctccacctcgtcggcggcgtcccccttcccggccgccgccgctggcgtggcccccttgtggttccggtagatcgcgtagaggatcagctgcatcaagcccagaaagctcccgcatccattggggatcgcgatgaaagggtcgcggccgaccaggccgtaaatgaaccaggaggtgccgcacaggaacacggacagggagagcaggaacggcatgaactccacgctcttcgtcttgatcaccagcctcatgatggaaagggccaagcctacaagcaaatggagaaaatggtggcggcgaggccgcaaaagagcttgcggccctggccgtgcagggccaggagggagacgagcaccaccatggtgaagatggaggtgacgaggccc

SEQ ID NO: 412728 - DNA, 453 bp, Oryza sativa
  unsure (1)..(453): unsure at all n locations
cacatcgcgaggttcttctttggagtttccggcaatgtcatcgctctcttcctgttcctttcgccagttgtcaccttctggaggatcatcaagaagagatcaacggaggacttctccggcgtgccttacaacatgacacttctcaactgcctgctatctgcttggtacgggctgccgttcgtgtcaccgaacaacatcctggtgacgacgatcaacgggaccggggtcggtgatcgaggccatctacgtgggtgatcttcctcatcttcgcgnagaggaaggccaggctgaagatgatgggtctcctgggcctcgtcacctccatcttcacaggggtgggggctcgtctccctcctggccctgcacggccagggccgcaagctcttctgcggcctcgccgccaccatcttctccatctgcatgtacgcctcgcctctctccatcatgaggctg

SEQ ID NO: 412729 - DNA, 428 bp, Oryza sativa
gatcccaaatgttctcattgattgatagcgatatcatagaagcagcgacacgaattaagatttaaaaccaaccccaagaaggatcgcagatccaactccaccgaatcgatccaagaactccgcctaatccaaccaaaccatgggcgatctcatctcaccaacacgacacgaactcataaaaagactaacaccaccaccacctcctccttatttagggactcgacgactcaagacgactgatactggcgaaaggcgaaggggaacagcacagatctaggagagctggccgcagtcggcgatgacgaccggcttggcggtgctcccgccgcgggatcccaccttctcgatggccttgacgacgtccatgccctcgacgacgcggccgaacacgacgtgctttccgtccagccagctgcagggcacggtgc

SEQ ID NO: 412730 - DNA, 514 bp, Oryza sativa
tgtgaaacagcaaaaaaaatcaaacaaaaagaaaaaatattccccatctgtgaaattcgcaaaaccctagcgcggcggcgatgtcgaacacgagggtgttcttcgacatgaccgtcggcggagctccggcggggcggatcgtgatggagctgtacgcgaaggacgtgccgcggacggcggagaacttccgcgcgctctgcaccggcgagaagggcgtgggcaagagcggcaagccgctgcactacaaggggagcaccttccaccgcgtgatcccggagttcatgtgccagggcggcgacttcacccgcggcaacggcacgggaggggaggtcgatctacggcgagaagttcgccgacgaggtgttcaagttcaagcacgacagccccggcatcctgtccatggcgaacgccgggcccaacactaacgggtcccagttcttcatctgcaccgtgccctgcagctggctggacgggaagcacgtcgtgttccgccgcgtcgtcgagggcatggacg

SEQ ID NO: 412731 - DNA, 259 bp, Oryza sativa
aatctaacatacgcaaacttgattttttatcaattgtttgtcgttgactttggaaagagtaatctaggtacaagcggatcattgacggaggagacaagacattggctggaccacaacaacccaccaggggcgccaacaaggagcgctattccgttataggacgagggaaaaaggaaaacatcacgatgtgaagggaaactggataattttaggagacgatgatgatgatggatagggctccttagggacggccggcggc

SEQ ID NO: 412732 - DNA, 500 bp, Oryza sativa
  unsure (1)..(500): unsure at all n locations
tttaatgagaattttgcacaagcagttgtaagaaacaacattcacagtcatctacaacatggatccggaatacttttggagcaaattactgaatatgtcaggtcaaatttggagtgtcaagggaaagagagtgaattccttcaacatactacatgtaaagtacctaaggttcttggtgacattatggaaagcatcgctggtgcagtatttatagacaccgattttaatgttgacatggtttgggagattttcgagccattgctttctccactgattacacctgataagcttgcattgccaccttaccgtgagttgctggagctatgcagtcacattggttgcttcttaaattcaaaatgcaccagtaaaggagaagaagtaattatagagatgtcactgcaactacgagatgagctgctggtagcacaagggcatgacagaaacaaaaagagggcanaggcaaaagcagcatctcgtattttgcagatcttaagcaacag

SEQ ID NO: 412733 - DNA, 505 bp, Oryza sativa
tctgaactcttgaagccagaagtattcgaatttattgagaagcacaacttgcatgatgccattcatgacaaggttgtcaatcttatgatattggatagtaaaagaactgtaaacctattgatccagcatcgtgatacgatccccccgaatgaagttgtaggacagttgttgcatgctagtaaaagttgtgacaaaagacatttgttgcatctgtatttacatgctctgtttgagacagacatgaatgctggaaaagactatcatgacatgcaggtggagctttatgcagagtatgagccaaggatgctaatacccttcctccgtaccagtcagcattacaggcttgacaaggcatatgaaatctttgcacaaaaagagcttgtacgggagcaagtttttgtgcttggtcgtatgggaaatgcaaaggaagctctctctacaattataaacaaaatggaagatattcaggaggcccgtgaatttgtgatggagcaacacgatgatg

SEQ ID NO: 412734 - DNA, 377 bp, Oryza sativa
tgtcgccgccgccgccgccgcgcgacgtcctagcttcccggaccgcctccgcgtggttggatccggcgagaggggagaactgttgtgttccttggaagcgggagctggatgaaagctgggaggaagaacctacggcgggcgtgcagcgagggcgccgtcacgctgggggagggcgagagcatcatgcaggtcctcgcgctgcgcggctccaacgtcatcgaggtgatggacgccaagggagtgaagtctctggccttgttcccggccaagttccagaagagcttttggatcaagaatgggaatttgggggttgttggatgctagtggcccgggatcaggcgctcgaatcagggagcaagatagcctgtgttgtgtcc

SEQ ID NO: 412735 - DNA, 395 bp, Oryza sativa
tctatctccagccgcgctttctctctctctctagctcccagcctcgacttcacccaaaccctagccctattgcgcgcgggagacccgccggcgaggcgcgcgcacggagcgagccggggggcgggagggccagccgccgccgccgccgcctgcagcagcgaggatgccgtcggggtcggcgacgcagttccggtacacgcagacgccgtccaaggtgctccacctccggaacatgccgtgggagtgcaccgaggaggagctcgtcgagctctgcaagcccttcggcaggggtcgtcaacaccatgtgcaacgtcggcgccaaccgcaaccaggccttcgtcgagttcgcagatcaaaaccaggcaatttcaatgggttcatattatgcttcttct

SEQ ID NO: 412736 - DNA, 484 bp, Oryza sativa
agaaacaatttaatctaacatacgcaaactgatattatcacaatgttagccgatgacaatggaaagagtaatctaggtacaagcggatcattgacggtggagacaagacattggctgcaccacaacacccaccagtggcgccaacaaggagcgctatccgttataggacgagagaaaaagtaaaacatcacgatgtgaagtgaaactgaataattctagtagacgatgatgatgatggataggcttcttaggacgcccgccgcccttagcgtcttgctgctcccatcttgtccactggaaggctcactcgtcatcgtcttcatcctcttcgctgccctcgtcgtcatcctcatcattgacctcggacttggacttgtcagattcctcctcgtcgtcctcctcttcctccttggcgggtgccttcttggcagtgctctcgcccttgttgtaggcagcaatggccctgttgtacttcgccttgagc

SEQ ID NO: 412737 - DNA, 502 bp, Oryza sativa
tcgctcttctctggtggtgtgggtgtgtccctgtctcccctctccttcctgctctacttacccctgctctgttccgccctctcacaagagagagagcgccagactctccccaggattcagccatgaagggggccaaatccaagggcgccggcaagcccgacgccaagttggctgtgaagagtaagggcgcggagaagcccgccgccaagggcaggaaggggaaggccggcaaggaccccaacaagcccaagagggctccctccgctttcttcggttttatggaggagttccgtaaggagttcaaggagaagaaccccaagaataaatctgtcgctgctgtaggaaaagcaacccgtgataggtgggaatccctgaccgaagcggacaagggctccctatgtagccaaggccaacaagctcaaggccgagtacaacaggccattgctgcctacaacaagggcgagagcactgtcaagaaggcacccgcccaggaggaagagga

SEQ ID NO: 412738 - DNA, 514 bp, Oryza sativa
tctaagcaagaagagacgagacgagggagagaaggagaagagggggccggccgcgggcgtcgccgggatcctccccccctctctctcctctgctctcctctcgatctccatacttccttccatacattcctccccgcacccttcgcattgctctcgtcgtctcgattcggtcgaggatctccaggaaaagaggaggaagcgatatgggttgcttttcatgctgcggagcggatgatgtcggcaagaagaagaagcgcgacgatccttacgtcccgatccctgatccaggtggtaactatggacgtagcaagcccgggcccccagccccttcgcgttctccccccaccagcagaaatctgccaattgcagtaccggcaattccccttgatgaaataaagggaataaccaagaacttcagcagtgatgctctcatcggagaaggctcgtacgccagagttttctttggtgtgctgagagatggcaggaagatctgcgtgaagaagctcgactccag

SEQ ID NO: 412739 - DNA, 465 bp, Oryza sativa
ttcaccgccgccgccgccgccaccaccgttgccgttgccgcctccaccacccgccctcgaccacagccatgccgccgaagctcgacccgacccaggtggtggatgtgttcgtccgcgtgaccggcggtgaggtcggcgcggcgtcgtcgctcgcccccaagatcgggccgctcggtctctccccgaagaagatcggagaggacatcgccaaggagaccgccaaggactggaagggcctccgcgtcaccgtgaagctcaccgtccagaaccggcaggccaaggtctccgtcgtgccctccgccgcggcgctcgtcatcaaggcgctcaaggagcccgagagggaccgcaagaaggtgaagaacatcaagcacagcggcaacatcagcctcgacgacgtcatcgagatcgcgagggtcatgaggcccaggtccatggtcaaggagatggccggcaccgtaaggagat

SEQ ID NO: 412740 - DNA, 505 bp, Oryza sativa
gacgaaaatcggattcggtgtaaagttaagggacctcagatgaacttattcctcataactaactatgaattccaagttctatgattcatgatccaaatgggcttcaaatttacaatgaaacaaccaagcatcaaaatacactgtaatgcctgcaaaaactgacagccgaatgacaccagggataaatttatacacaactactccatgagacggaagaagcttttagctgccaggcaagattaagcgccttctttctttgcaacccatgggcttctagaggaagccataatcataatcaatttcagcagcaattggaggcgatgtatggaccctcttggagtacagataagtcattttcaggtaaggacaacaagctatcagctcaaagcttgctgttttagcgtgatgttgagtatgccgataggggttttggctgtaatgctcatcagtatcaacttcttgatctctgacatatcttgccattgatacttgcccaatacaacag

SEQ ID NO: 412741 - DNA, 516 bp, Oryza sativa
atcggagccccctcccctcttcgatggaaccaccaggttgtacgttgcgtaccactgcccttacgcgcagcgcgcgtggattgccaggaactacaagggtttgcaggataagatcaagattgtcgcgattgatcttgcagacaggcctgcttggtacaaggagaaggtttacccagagaacaaggtaccttcacttgagcacaacaatcaggtgaaaggagaaagcttggatttggtcaagtacattgacaccaatttcgaagggccagcattactccctgatgattctgagaagcagcagttcgctgaggagcttcttgcgtacactgatgcgttcaacaaagcatcgtactcatccatagtcgccaagggagatgtgtgcgatgaggctgttgctgctcttgacaaaatagaagctgctctgtcaaagttcaacgatggcccattcttccttggccagttcagcttggtggacattgcgtatgttccatttattgaaaggttttagatattttt

SEQ ID NO: 412742 - DNA, 449 bp, Oryza sativa
acatggaacaggcaggtatcagatattcacattggaccgtctcctctcgaaagcatatgtacatggcgcacgcatgcaggtgcccgggtgtctgcacaaatatttttcacgcccacataccgtacttcaccggcgtgccggtcggcttgatccatggctcggcgtgcaagaagttctgcagggtgaacttggtggcctccttcttgctgatcaccttcttgtaccccggccagctgacgcggccggcggtggcggcgccggcgcccttgttcccgtactccgcgtaccagagcgtcttgagcccgaagtcgccgctccacgggaggtagccggccttgtcgacgaaggcggggatgtcggagttcatgatgagcgtgcgcgagtactcgcgccacgggcgtgcgaggtagctgcggacggcggggcgggaggcgtcgccgagcgccgac

SEQ ID NO: 412743 - DNA, 423 bp, Oryza sativa
tgcagccatggcgtcgtcggtggcagcggcggcgagcacgttcctggggacgaggctggcggacccggcgccgcagagcgggaggatcgtggcgaggttcgggttcggcggcgggaagaaggcggcggcgaagaaggcggcgaggccgtcggcgccgacgacggacaggccgctgtggttccccggcgcggtggcgccggactacctggacgggtcgctcgtcggcgactacggcttcgacccgttcggcctcgggaagccggcggagtacctgcagttcgagctggactcgctggaccagaacctggccaagaacaacgccggcgagatcatcggcacccggttcgagaccgtcgaggtgaagtccaccccgttccagccctacacgaggtgttcgggcttcagcgcttcgcgagtgcgagc

SEQ ID NO: 412744 - DNA, 389 bp, Oryza sativa
aaagaaaactcaatattataaatctagctgcattaacaacattgatttcgcaaggcaaacaatatagcatggcaaaaaaagtctcacatggtaccactttaagcatgacaaaagtttacttcttgagcaagagcagaacaagaacagatcaagcttccattctctgcactgcaccaggaaccatctaggtagaaaaactactttagcagcctcacataacaaccaccccaatgccaaacctgcttaagctgaggggatctcgacctcgccgtcggaaatctcctgctgcaggtccttggggtccttgccgtccacggggcagcccacgctgacccaggtgccgaggatcttcttgacggtgccggccatttccttggccatggacctgg

SEQ ID NO: 412745 - DNA, 425 bp, Oryza sativa
tcgcccagctcgcgctcccctcgccgccgcagccgccgccgcctcgcctcctcggagatcttcgctgcccttccgtcaacatggggaagacacgtggtatgggagctgggcgcaagctcaagacccaccgcaggaaccagagatgggcagacaaggcctacaagaagagccacttgggtaatgagtggaagaaaccctttgctgggtcatctcatgccaagggcatcgttctggagaagattggtattgaggccaagcagcccaactctgccatccgtaagtgtgctcgtgtgcagcttgtgaagaatgggaagaagattgctgcctttgtgcccaatgacggttgcctgaacttcattgaggaaaatgacgaggtgttgattgctggatttggtcgtaagggccatgctgtgggaagaattcct

SEQ ID NO: 412746 - DNA, 413 bp, Oryza sativa
gcaattcttgagctcaatcagcaacaacatctatctccttcttgcttagttaagtccttcgccctcccaagaagaagaagatgtcttgctgcggcggcaactgcggctgcggcagcggctgccagtgcggcggcggctgcggcggatgcaagatgttccctgatgtggaggccacagccaccaccaagaccttcgtcctcgctgctccatccaacaaggcgagctctggaggaatggagatggcggtggagagcggcgagaacggcggctgcggctgcaacacctgcaagtgtggcaccagctgcagcggctgctcctgctgctcctgcaactgaatctatccgtcgtcgtcgcccggctgcatgaggatttatcgtatggatgctgctactgtcgatcagagctttgatcga

SEQ ID NO: 412747 - DNA, 513 bp, Oryza sativa
  unsure (1)..(513): unsure at all n locations
attagaattgcatgaatacatataccatatgtctgatagcacaatatagttgaataatcttacaccatacatacaagctacggatcgatcaaacatatctctaaaccatggaattgtgtttccatgatctaagtcgcaagatgattttcagacgaaatgaagggcttaggcggcacctgtagtttctgcaacctccccgttaacatgtttactacctttgtcatcgagggccggtttgttgggttccactgaatgcaccataacgctacaatggctagctgtctaaccgtttctttctccccttgtgttgtctccatgttaagcaccagttcctgcccattgattactctctcatatatccactcaggaaagtagaactcattttggttctcaacggttgggtctgtgttcctcctcccactcaccatttctaacaccagcatgccgaaactgtagacatccnacttgtatgatattgctccaaaactccgagaatataggttggtgcaatat

SEQ ID NO: 412748 - DNA, 519 bp, Oryza sativa
tcggtacaacaaagagatacatttgaaagttgaaatgtttctcaagacatatggcacatccaagcccatgaggtacactttctccgatgttaagaaaataacaagacggttcaagaataaattaggccatggtggatttggaagtgtctacaaaggtgagctaccaaatggagttcctgtggcagtcaagatgctagagaactccttaggagagggagaagagttcatcaatgaagttgcgaccattgggagaattcaccatgcaaacatcgtccgtctcctaggattttgctctgaaggaacacgacgggctttaatatatgaattcatgcccaatgaatcgttggagaaatatatattctcaaatggttctaatatttcaagagaattcctagtaccaaagaaaatgctagatattgctttaggcatcgcccgaggaatggagtacttgcaccaagggtgcaatcagcgcattctccattttgacatcaagcctcacaacatatttgtggactacag

SEQ ID NO: 412749 - DNA, 475 bp, Oryza sativa
tctaacatttggtgaaagctctgctgatccatgggtagatgagttccagaaccaattatcagcttccaaacagaattctggtgcatctcgaggggtttatgttttttcagacatgaacccatacgttggtcaccctaattcaatgcaggaaggccaggaactgttccgcaaaggcctactaagtgaagctgttcttgctttagaggctgaagttttgaagaatcctgataatgctgaaggttggagactacttggagtaacacatgctgaaaatgatgatgaccaacaggcaatcgcagcaatgatgcgtgcacaagaagctgatccaacaaacctggaagttcttcttgcacttggtgtcagtcacacgaatgagttggagcagggagaagcattaagatatcttcataggtggcttcagaatcaccccaaatatggcggtatcgcccctccacagccaactgattcaccttat

SEQ ID NO: 412750 - DNA, 473 bp, Oryza sativa
  unsure (1)..(473): unsure at all n locations
tatgctcagttcatgggatcaaggaacttctcaccggatgaccgcccacctgtccgtttcatggatacagatgagcttgcgtatgttgcgacccgcgcccgtgaagtccatgacttttggcatgtgctgttcggccttcctacgaacctgattggagagactgcccttaaggtcattgagtttgaacagatgttccttccaatgtgcatgctttcagtcgttgggggctctgcgaggttcaatgagaaacaaaggacactgttttttcagcattatttcccatgggcttcaaaagcaggtcttaagtgcacagatcttatgtctgtgtactatgagaagcattttcatgaagatttggatgaagtgaggaggaactgnnngaattataccatgccctgatcccaaaaggagcagtgtttagacttttagatcggtacattttgcatgaaagatgtctgaacttggttttcact

SEQ ID NO: 412751 - DNA, 489 bp, Oryza sativa
tgagcatctgtgctaagggtgcacaaatccaaatttgcacagtttatcatgttttatgcctgctcactggatcctgaaatctgtggccttgaattcgctctcttcctctctgatatctttattaaaaaggaagaggattcaatttctagaatgtctgcagtttcatatgttggaagctatttgtctcgggcaaggttcatttctgctgatacggtggttggtatactcaaaaggttagtggactggtgtgttgactattgtgacctccagaacaacataaggataacaaccaagcctataaatcatcaaatattttacgcaagctgtcaggcagtcatgtacatcctgtgctttcgcttaagatctattatggactacccaaatcttaaggcacagctttttaacatgccatttggatatatcttgacacacccactggaacctttaaaggtttgcttgccatcgatagttgatgagttcctgaggcag

SEQ ID NO: 412752 - DNA, 260 bp, Oryza sativa
catagacgtaatgagcatatagaaacatttgaacatgaagcagtaatcatatagctagattagaactgcatgacttcatccgttgcaattggtcagatgacctaaaatagcaagtttcaatatagtttaataaaaaattaaggccacacaatctaatgcaaaaggggcctattgacaaatcatcacgacgagcgggacttggctaatttcagccaaacagttttagctccaccaaaactgggagtggagttgggtggtcc

SEQ ID NO: 412753 - DNA, 456 bp, Oryza sativa
ggcaccaaatccccccaccatggatcaccgcctcctcctcctcggcctcctcctcctctccccggcggtggccgccgcctcagtccccggcgaggaggagccgctgatccggcaggtggtcggcggcggcgacgacaacgagctggagctgaacgcggagcgccacttcgccagcttcgtccagaggttcgggaagtcctaccgtgacgccgacgagcacgcgtaccggctctccgtgttcaaggccaacctccgccgcgcgcgccgccaccagctgctcgacccctccgcggagcacggcgtcaccaagttctccgacctcaccccggccgagttccgccgggcctacctcggcctccgcacgtcgcgccgcgccttctgcgggggctcggcgggtccgcccacgaggcgcccgttctcccaccgacgggctccccgacgacttcgactggagag

SEQ ID NO: 412754 - DNA, 438 bp, Oryza sativa
tcggggatgagtaccgcacggactacgatcctggaagaggtggctatggtaagatggttcagaaagagctagaagcacaacgtgagttagttgactatggaggtgcttttcaacctaatgcaccacctcaatatgacagaggtgacaggaagagagggtatggagattcttaccggaacgacagagattaccaacggaaacgttaccggaacgatgagcgatcgtcgcaaagagcacctgactctgagttcaagagagatgcgattgattccgagaagaatcctaggtttcgtgagaaaggtgattctgatgaaagaagacgatgattatgataagagacgccggcgctgaactgaaagaaacaattgctgataaatgcaaatgggcagttgcagtgactacactagtaaagcccgtcgagcttatgttttttaccct

SEQ ID NO: 412755 - DNA, 480 bp, Oryza sativa
tttgcaatgcgattcccaattgcgcacgcgctggattcctgcaggtgaagttgctgttggttggcaatggctagtactcgacgatgaggctgccgaatggcgcgcggtgtggaatgcccttgcggcgcttgggcggcagggtgggcggcggcggcggggtggacggcgtgaagctcctcttggcaggggaggtggagttgtcggagtcggaggtggaggccatggcgtgggcgtggcgtagtctcttcctcctggcggcggtggcggtggcggtggcggcggcggtggcggcgtggggggagcagccgacgaccttgcagccgagggagcagaagcggaagttgtcgaggaggctgcggctgcagacctcgcagatgttggcgacggcgcccttgccggccttgtgctgggggcgctcgctgaggaacactcacgcggcgctgttgatgacgtacgtctgcacccccgcgatgtccatga

SEQ ID NO: 412756 - DNA, 452 bp, Oryza sativa
  unsure (1)..(452): unsure at all n locations
tcgattgaaacttgcagggaggaggagggcctgagccggaggaggaggaggcggtggcgcacggagagcagtggccgcggtggctgagcccgctgctctcggccagcttcttctcgcagtgcaaggtgcacgccgactcgcaccggagcggcgagtgcaacatgttctgcctcgactgcgccgccgacgccgacgccgccgccgccgcgctctgctccctctgcctcgcccacaaccaccgcgaccaccacaccatccagatccggcggtcgtcgtaccacgacgtgatcagggtgtcggacatccagaggttcatggacatcggcggngtgcagacgtacgtcatcaacagcgccgggtggtgttcctcaacgagcgcccccagcacaaggccggcaagggcgccgtcgccaacatctgcgaggtctgcagcccgagccttcttgacaact

SEQ ID NO: 412757 - DNA, 506 bp, Oryza sativa
tcggcatccgactccgacgccgccgcgcgccaccacccggccgatcgccgacgccgcagccgctggaagcagcagggacgacggagaatcggagatggacatcgaggcgttcatccacggcggaagcgggggcggcgacgccgacgccgaccacccgctcggcatcttctccgccgccgacctctccggcttcggcttcgcggactcgagcaccatcacagggggcattcccaatcacatatggccccagtcccagaacctgaacgcacggcatcctgcggtctccacgacaattgagtcgcagtcatcaatctgtgcagcagcaagtcccacatcagctaccaatctgaacatgaaggagagccaaactctgggaggcacaagtggttcggattctgaaagtgaatcgctgttggatatagggggtggtccatgcgaacaaagcacgaacccgttggacgtgaagagagtgaggaggatggtgttcaatcgggagtctgctcgcg

SEQ ID NO: 412758 - DNA, 501 bp, Oryza sativa
aaccaacccaaccgccgccgcatcgccctcgttagaacgatggccgcgtcggcgctgcaccagaccaccagcttcctcggcaccgcccctcgccgggatgagctcgtccgccgcgtcggcgactccggtggccgcatcaccatgcgccgcaccgtcaagagcgcgccccagagcatctggtatggacctgaccgtcccaagtacctgggcccgttctcggagcagacgccatcgtacctgaccggagagttcccgggagactacgggtgggacacggcggggctatcggccgacccggagacgttcgcgaggaacagggagctggagggtgatccactcgcggtgggcgatgctgggggcgctgggctgcgtcttccggagatcctgtccaaaacggggtgaagttcggggaggcgtggtggttcaaggccggcgcgcagatcttctccgagggggggctcgactacctggggaacccccaccttgtgcacgcgcagagca

SEQ ID NO: 412759 - DNA, 400 bp, Oryza sativa
taagcgaattgagagtgctggtggggttgttatgtgggctggaacttggagggtaggtggtgtacttgcaatgtctcgggcatttggcaaccgcttgttgaagcaatttgttgttgcagatcctgagattcaggaacaagaaatagatgatgaattggagtttctgattttagctagtgatgggctgtgggatgtggttccgaatgaggatgctgtttcactcgtgaagattgatgaggaacctgaggcagcagctcggaagctgacagagactgcattttcccgagggaagtggtgacaatatcacatgcattgtcgtgaaatttcaacatgacaagatggacggtgattcctcaccaacaagcgataaaagctgattcatttgttgtttgtatacatg

SEQ ID NO: 412760 - DNA, 424 bp, Oryza sativa
ttggggacctgggaggccgcgcaagaatgctgctgctgctgcctctcccgttgctccgccgcctgcatctccactgaagcggggtgttggacgcccaaggaagaacgccactcctctagtcaagcctggacctgggaggccgtctggattcaaacgtggaccaggccgccctcgcaagaatgccactcctcctgtgctgtcagtgccacccactgctgctgctgtgttgggagtgaagcgtggccgtgggcgccctagaaaggataaaccattgcaatcttggtctgtgctctctggcggtgctgcaatgactaagagagggcctgggaggccaagaaagaagaggccactggaactggagtggtttgtggcagcacaggtagacactgcaatgaaggtgaggctggagcccgtcaaatggagt

SEQ ID NO: 412761 - DNA, 516 bp, Oryza sativa
tcttcgacaagcattgcaaagacatgaaaagatatttgatcggcgtaggcgtctcctgattgcaatggatgttgcgtttggtatggagtatttgcatgagaagaacattgtacactttgacctaaagagtgataatctgcttgtcaatctaagagatcctcagcaccctatatgcaaggttggtgatttgggcttgtcgaaagttaaatgccagacgctaatatctggtggggtgcgaggaacacttccttggatggccccggagctgttgaatggaagcagcagccttgtttctgaaaaggtcgatgttttctccttcggaattgtaatgtgggagctgctcactggtgaagagccttatgccgaattgcattatggcgccatcataggcgggattgtaaacaacaccctgcgccctccggtgcccgagtcatgcgaccctcggtggaggtcactgatggagcaatgctggtcgtcggaaccgtcagaaagaccgagcttcacgaggttgcaaga

SEQ ID NO: 412762 - DNA, 464 bp, Oryza sativa
ggcgtacgtgctaagctgcagcacaacccaaagccatatatctccgataatggcgaactcaccgacgctgacaatgctggtgttcctagctattgggctatctctcgtcctctccgcagccggcgtgtctgtggagagcgtggtcaccgaggcgttcttcaacgggatcaagaaccaggccccgaacggctgcgccggtaagagcttctacacacggcaatcgttcctgaacgccgcccgctcctactcgggcttcgccaatgaccgcaccaacgacgactccaagcgcgagatcgctgccttcttcgcgcatgtcacacacgagactggacatatgtgctacatcaatgagataaatggggcaaacatggactattgtgacaagagcaacaaacagtggccgtgccagccggcaagaagtactacggacgcggaccgctgcagatctcatggaacttcaacta

SEQ ID NO: 412763 - DNA, 468 bp, Oryza sativa
ctttttccggggggttttttgattcctcggagctctcttccattgttcaggttcagaacctgcacagaaatacccactaccggttcagatctcaccttttctccaatactgggacatccatccacgcggtccacacgaatacgtacatctatacggtacacgtacgtacatctactgcaccgggtacacacacgcacacttttctgcagagacgcgcattgtcgtcaacctagctagcttagctgaaggcgaagcgtcgccatggcagcacggcggcggcggcgctcacttgccggggacgaagttggtggcgtaggcccaggcgatcttggggaaatacagattatcatagcaggaacaaaactggaagcggaaaatatatgttttgacccgtaaagccttaaatgtagaataaactcatctagaaaccggggccgttttggccggatttcaagcaaaactagaatt

SEQ ID NO: 412764 - DNA, 417 bp, Oryza sativa
cccagctcgcgctcccctcgccgccgcagccgccgccgcctcgcctcctcggagatcttcgctgcccttccgtcaacatggggaagacacgtggtatgggagctgggcgcaagctcaagacccaccgcaggaaccagagatgggcagacaaggcctacaagaagagccacttgggtaatgagtggaagaaaccctttgctgggtcatctcatgccaagggcatcgttctggagaagattggtattgaggccaagcagcccaactctgccatccgtaagtgtgctcgtgtgcagcttgtgaagaatgggaagaagattgctgcctttgtgcccaatgacggttgcctgaacttcattgaggaaaatgacgaggtgttgattgctggatttggtcgtaagggccatgctgtgggagata

SEQ ID NO: 412765 - DNA, 353 bp, Oryza sativa
cattccgatagatagcaacaagcagttcaaacaccataaccaaagcgaactcaattcatggtaacatcacggacgaagaacacctaacactggatggatggatagagggcttctcgactcgagagagccactggacacgataacgactcgactcgatgataagatgattctgacccggataggtaagggataactggccacgatgggccccaccaatcagttcctccagttcccgccggagtcgccgccgtagccgccgccacggctgccaccgtagccgccgccgccgccgccacggccgccgccgtagccgccgccgccaccgtagccgccctcacggcgcccgtagccgc

SEQ ID NO: 412766 - DNA, 395 bp, Oryza sativa
tctctttgaggtgggttggcttctcctccccctctttaccttttcctcctcggttcggttccgtggttcgtctagggtttagtgggttgagatggcggcgccggatgtcgagtaccgttgcttcgtcggcggcctcgcctgggccaccgacgaccgctccctcgaggccgccttctccacctacggcgagatcctcgactccaagatcatcaacgacagggagacggggaggtcacgtgggtttggcttcgtcaccttctcctccgagcagttgatgcgcgacgccattgagggcatgaacggcaaggagctctgacggccgcaacatcaccgtcaatgaggcccagtcccgccgctccggcggcggaggcgggggctaccgcggcggctgtggc

SEQ ID NO: 412767 - DNA, 303 bp, Oryza sativa
ttttgggttcgaactctttttttcctccttgtttcctatttcatttcattccgatagatggccacaagcagttcaaacaccataaccaaagtgaactcaattcatggtaacatcacgggcgaagaacacctaacactggatggatggagagagggattctcgactcgagagagccactggaacatatcacgctaagacattgatgataagatgattctgacacggatagctaaggataataacctaatgttttgacccagtgatttggttctcaagggcccgccgctacaaatgcaaaggggg

SEQ ID NO: 412768 - DNA, 473 bp, Oryza sativa
cgtagtactatttcgcttcgcctctcctctctacctccgtcgccgtccggttcctttctcttcctccaagtaaactcggtctccgccgcctcctccgccgccgcgccgccgattcgcagccatgccgaccgtaagcgtgaaatggcagaaggagaccttcccaggcatagagatagacaccagccagccgcctgttgtctttaagacccagctatacactctgactggtgtaccacctgaaaggcaaaaaattatggtgaagggtggaatattgaaggatgatgcagaatggtctactttgggagtgaaagatggtcaaaaattgatgatgataggtacagctgatgagattgtgaaagctccagagaaaggaccagtatttgggagggatctaccagaagagagcaagtgggtgcactgggacacagtgctgggctttataacttggggaatacatgttacatgaattccac

SEQ ID NO: 412769 - DNA, 483 bp, Oryza sativa
ttttcccctgagaaaagacagcgtgtcccatctgcatacaacagattcatcaaggaggagatacagaggattaaaaccagcaatcctgagattagccacagggaggcattcagtgctgctgcaaagaactgggctcatcttccccggctccattttggcctcagcgtcgccgacggcggcggcggcggcggcagcaactaatcgcggcggcgcggcctgccggccggccaccgatcgccggcgtgcacgccggcgcgcggcggcggccggtcgagaatgcgcgcgcaggagggacgacgacgatatattattatcgcgtgtgcccctctctcttcgccgcgtaattaattaatcagttaattaattacgtacgacctactgtgttatgctatcgatccgtgtaaataattacctacgtatcttgaataattagtctcgtattatacgtactattatacgtacgtgctgggttatgacgtagac

SEQ ID NO: 412770 - DNA, 484 bp, Oryza sativa
aggattcacatccatctcgtaccctttgtataaatatatatagccggagcttccatatatttcattcacatatgcctcacccaacaacatatagtcgtagcagataccactcttacatcaagtcagagagagatcaggtgaaacaaaaacaaaagcagagcacggccggtaaaatcaaaagacgatgaacaaactgggaacacacgaaacaaggtgggagacatcatcgaatcagagatgaacaattaaacaaggctatatatgacgatgacggcttagttgccaccagactcctcgcagcccgggggcttgtaggcgatgaagctgatgagctgcacctgcctgacgttgtcgaagccgatgatacggacgaatgcatcagggtacgccttcttggcctcctcgagctccttgagcacctgggtggcgtcagtgcacccgaacatgggcagcttccacatggccagtacctgccatcgagtat

SEQ ID NO: 412771 - DNA, 448 bp, Oryza sativa
agcttggtgagctgcagagatggccccctccgtgatggcgtcgtcggccaccaccgtcgctcccttccaggggctcaagtccaccgccggcatgcccgtcgcccgccgctccggcaactccagcttcggcaacgtcagcaatggcggcaggatcaggtgcatgcaggtgtggccgattgagggcatcaagaagttcgagaccctctcctacctgccaccgctcaccgtggaggacctcctgaagcagatcgagtacctgctccgttccaagtgggtgccctgcctcgagttcagcaaggtcggattcgtctaccgtgagaaccacagatcccccggatactacgatggcaggtctgggaccatgtggaagctgcccatgttcgggtgcactgacgccacccaggtgctcaaggagctcgaggaggccaagaaggcgtaccctgatgca

SEQ ID NO: 412772 - DNA, 408 bp, Oryza sativa
ataattaattcacaacaccatatttcattgatcaggttcagaacctgcacagaaatacacactaccggtacagatctcaccttctctccaatactcgtacatccatccacgcggtccacacgaatacgtacatctatacggtacacgtacgtacatctactgcaccgggtacacacacgcacactctcctgcagagacgcgcatcgtcgtcaacctagctagcttagctgaaggcgatgcgtcgccatggcagcacggcggcggcggcgctcacttgccggggacgaagttggtggcgtaggcccaggcgttgttgttgacggggtcggcgaggtggtcggcgaggttctcgagggggcccttgccggtgacgatggcctggacgaagaagccgaacatggagaacat

SEQ ID NO: 412773 - DNA, 483 bp, Oryza sativa
tcgacaccccagcagcagcagcagcagcagctgagcttgaagcagcagagcgaggtagacatggccgccgccaccatggccctctcgtccccggcgctggccggcaaggccgccgcgaaggtgttcggcgaggggcgcatcaccatgcgcaagtcggcggcgaagcccaagcccgccgcgtcggggagcccgtggtacggcgccgaccgcgtgctctacctcggcccgctctccggcgagccgccgagctacctgaccggcgagttccccggcgactacgggtgggacaccgcggggctctccgccgacccggagacgttcgccaagaaccgggagctggagggtgatccactccaggtgggcgatgctcggcgcgctgggctgcgtgttcccggagctcctcgcccgcaacggcgtcaagttcggcgaggcggtgtggttcaaggcggggtcgcagatcttcagcgagggcgggctcgacta

SEQ ID NO: 412774 - DNA, 410 bp, Oryza sativa
ggacgaacacatataccttcgttgcaatcacaaattcgcaatcaaaagatccaagttcatcacatggccaactgcgcgagagatgacacaacacggctgaaccgctaaaaaaccgctacgaaaatgttttaggatcatctgggcattcttctctgtttaaggttggtaacagagcatgcagtgctaccttcgtctcgggctcgtggcacgaaccgccaaaaatcgacggcgatatcaacctcgttttgtttgtgaaacttgtatgtccgtggtaggttgtagcgaagctggaacagagggaaatacagattatcatagcaggaacaaaactggaaacagaaaacatatgttttgacccgtaaagccttaaatgtagaataaactcatctagaaaccaatcaactttttgg

SEQ ID NO: 412775 - DNA, 484 bp, Oryza sativa
  unsure (1)..(484): unsure at all n locations
gcgatattgagctacctatgattttttaaaccatttttgcacctgttttctttatattatttgaaataccgggatataacacttgactagcaattctagttttgcttgaaatccggcaaaaagttgattggtttctagatgagtttattctacatttaaggctttacgggtcaaaacatatgttttctgtttccagttttgttcctgctatgataatctgtatttccctctgttccagcttcgctacaacctaccacggacatacaagtttcacaaacaaaacgaggttgatatcgccgtcgatttttggcggttcgtgccacgagcccgagacgaaggtagcactgcatgctctgttaccaaccttaaacagagaagaatgcacagatgatcctaaaacattttcgaggcggttttttagcggttcagccgtgttgtgtcatctctcgcgcagntggccatgtgatgaacttggatcttttga

SEQ ID NO: 412776 - DNA, 454 bp, Oryza sativa
accgaatcaaaccatacgagcataccatgcaagcaaaacaccatatcatttcaacgcatttcaccatattctcataatatgccagcaaattatatgacacatggggggagagaggaggcagagctccatagaataatacaatttttgtaaacaaattcaactcggccaaccgcctcccaaaaaaaccactccaagacctataattgtttttgtttttcagcagcccagcttcttcaaggaaactgaaatggagccaaaggatggtaacccaaaaaaaaagaaagaaagtacaaatgcctgctgctccgatacaccaggaaataaaaccgatgcacgcgaggacttgtacaacggcgtgctgtaccggaccggactggaccgaagttttgataaaaggtgaactcttacaaaacagaccaagaatgaatgcaagacaatgcaagtgaagaaatgc

SEQ ID NO: 412777 - DNA, 419 bp, Oryza sativa
  unsure (1)..(419): unsure at all n locations
gcaatatgccgatcaaatgatggaactgtttttgagagtttttgcctgtcgaaacgccactgtgcatgaggaggctatgcttgctattggtgcattggcatatgcggcaggtccaaacttttcgaagtacatgcctcagttttatcagtatttggagatgggactacagaactttgaggagtatcaggtctgtgccattaccgtgggtgttgggtggaattttgtggcagggcactgggaggacaanaattctgccttactggtgatggaatcatgaacccaactcctgaaaggacttgtcgaggcaatcagttgcatagaatctgtaaagccacctatattctcatgctttggcgatattgcactggcaattggggaagaactntgaagaagtaatttgatatatgccatgcccatgc

SEQ ID NO: 412778 - DNA, 454 bp, Oryza sativa
  unsure (1)..(454): unsure at all n locations
ctcacgcgtccggtatctgacagcaatacatgaaatcctagaaaagacgggctacaaggaggatgagggaacagcaaatgagctctcatttcagacgtggaccaattaaatgcaatgatacattgaactcaaagaagaagggtgacaatgcttttcgacaaaaggacttctcttgtgcaattgactgttattctcagttcattgaagttggtacgatggtttctccgaccatttatgcgctgagttgcctgtcatatctgatgaatgacaaggcagaacaagctctcagtgatgcgatgcaagcgctagtaatatctccaacatggacaactgcattttatcttcaggctgctgctctgctccttttaggcatggagaatgaagcttaagaagcaatcgagatggttgtgcccatgagacangtagcagcagtggacattggatatgactgaac

SEQ ID NO: 412779 - DNA, 483 bp, Oryza sativa
cccaaactacaggggcaaatccatctaattaaacatcaagactcgtttcaacaacaacctgccacaattcacaaacagcaggctgctgcacaagacggtgtacacggttcattttatttgggggttcgtttccaccatcagattgatataatacacgcgaacaagcagaaacattcggcaacaatttctccaggaaaaatgggggcttttttggcattattcccgagcgagcgttatttggaagagggagtttttttcagacaggcacagcctcaatggcaggagcgagtgaccaacgttgacgtcggcgtcctagtagccaccctggatgtaggcgttgagccggttcagctcttcccggtgctcgctgaccacggcgcggacaatgtctccaatggagaccatcccaaccatgcccgtgccgtcgatcaccgggatgtgcctgatgcgcttctttgtcatcagctgcattgcttgcaggac

SEQ ID NO: 412780 - DNA, 513 bp, Oryza sativa
  unsure (1)..(513): unsure at all n locations
ccttcctcctcatcctccccaaccactgcatccgggtcggcgtcctcctcctcctcctcctcctcgcagaatgcaacgggcaattcaagctatcgggtcacatggcagtctcctcaagtctgctgttctgcgacacatcagtgctccaaaaccatctattttacctgctgtatattcacgctccatgtcagtttcatctgctcaaatagaggagagtggatttgagactgccactgtggcagatattttgaagtctaaggggaagagtgctgatggatcttggctctggtgcactactgatgactctgtctatgatgctgncaaatctatgacgcaacacaatgttggagcttgggggggttgttaaacctggacaggataaatcaattgctggtattgttactgagagagattacctcaagaaaatcatagtgcagggacgatcttccaagtcaactaaagttggagaacatatgactgaagagaaccagctgatcacggtgaagcctgata

SEQ ID NO: 412781 - DNA, 519 bp, Oryza sativa
  unsure (1)..(519): unsure at all n locations
gatggtttctacagaccctaaaggaagacctgggcattgacaatacctacccatggacaataatgactgataagcaaaagggtcttataccagctgtccaacagattttccctgattcagaacacagattctgtgttagacatctgtactccaattttcaggtacatttcaaaggtgaatgggccagaagtgaagcctccaatatatgagaaaaaggttggcagaccacctaagtctaggaggaaagcaccacatgaggtacagggaaaaaatgggcctaaaatgtccaagcatggtgtggagatgcactgctctttctgcaaagagcctagacataacaagaaagggtgcccactgaaaaaggctagactcagacccaaactgaagacaagtaggatcctagctgccagttctacaaagagtggcatgaatctaagcaagaaccagcagaggtgctgacccaatctcagtctgcatatgaccaattactatcacaagttcctaatcctatggntacac

SEQ ID NO: 412782 - DNA, 503 bp, Oryza sativa
gtcgtgtgaagcggtgaactttagccgactcctgactagcgactaccctcccactctctcagctcgcttcccttcctcgcctcgccggccaagaaccaccgcaagattcgccatggccagatcgccggagccgccgcgctactacgccgccgcgggctaccaccgcccctcgcccttctcctccgtggcggcgtcctgcgtcgtggcggcgctgttcatcctgctcgccgcgggcggcgccgcggctgcgctgttcctgctctaccggccgcaggcgccggccatcgccgtgacggccgtgcagctcccctccttcgcctcccgcaacggcaccgtcgccttcacgttccagcagctcgcctccgtccgcaaccccaaccgctccccgctcgcgcactacgacagctcgctccgcgtcgcctacgccggcggcgaggtcggctcgatgtacatccccgccggccagatcgacggggggcgcacgcagtacatggccaccagct

SEQ ID NO: 412783 - DNA, 201 bp, Oryza sativa
gttctcgtccggcggcggcgcgccgggctcgaagaccaagacggcctgagccgccgggccgccggaaaagatccagccgtggacgatccagagcacctgcactgtatactgcacgacgatcaccgtgtcgttgcccttgaactaccactgcaagctcctgacgtgcaccagtacgacgccgtccagcggaccctgatcaac

SEQ ID NO: 412784 - DNA, 380 bp, Oryza sativa
tcgctcctctcctgccccccacggcggcggcgggatggcggattcgacggcgaggacggtgaaggacgtgaaccctcatgagttcgtcaaggcctactccgcccacctcaagcgctccggcaagatggagctccctgagtgggttgacatcgtgaagactgcgaggttcaaggagctccctccttatgatccggactggtactacacgagggctgcctcgattgcaaggaagatctacctgaggcagggtattggtgtagagtggcttccagaagatctatggtggccgccagaggaacggttcacgccccccgcacttctgcaagagcagcggcgctatctcacgcaacattctttagcagctgtagaagatgggcata

SEQ ID NO: 412785 - DNA, 433 bp, Oryza sativa
gcgggaccggaggagcctaccgcgcgtctcgccgtctcagctccgcaaggcttgcagccctgccggagatgcagacgacgaccgtgcccatggcggcagcggcggcggtggcgccgtccaccaccacctcctcctccgcctccttcaaggttgcggcctatgcttggtcgtcatgccggagcagctcctctccggcgacaagattggtcgccgcccccaatcaccagcgaccaccgctagttgttggagccattgccggcctggatccggttaccgcggtgcagctgccattaaccgctgggaacgtcgagtctgttctagatcaagtgcgcccttacctgacggcagatggagggaatgttgcccttcatgaaattgccgggaatgtggtgaggctgaagcttcaaggagcttgtggatcgtgcccaagctc

SEQ ID NO: 412786 - DNA, 433 bp, Oryza sativa
agaaagtaacattccatgggtttcattatcatatctttatcaaacccctcaaagggcaaccaagtttatttcaaattggaaatgcgaacgtaggtacatctaagaattttacaatcccgcataaacgaatgccgtgggattgtggagaattattgttgaagtctcggtgttttaaaagatgtaacaggacacaaactgaatttttctagatgcttgagagctaaacagaagaaccagagtggagagagcttcttgcgatctctaaggcatcctcgacagaggttgcacttttgagcttagctttgtctacaacgggctgagacttagcgagttgaggaagaagcgaaaattcctctgagctaccactcttaaggaaaacacccttcagtcgactatcagagtcaatccagaagggagcaatctttgggtcaaa

SEQ ID NO: 412787 - DNA, 487 bp, Oryza sativa
cgcaggggtgcatctcgtgggcgctgcggcagcgtgggcttggtggtggtggtgcgcgggctgtcccggtgcttccccgccggagattctgcgtctccgcggcggcgggtgcggggttcgacaacgagaatcgcgagtatgtgatcgtgggtggaggcaacgcggccggttacgcggcgaggacgttcgtcgagcacggcatggctgatggccgcctttgcatcgtctccaaggaggcgtatccgccatatgagcgaccagcactgacaaagggctatcttttccctccagacaagaagcctgctcgtctacctggctttcatacctgtgttggatcaggtgggcagaggcagactgctgaatggtacaaggagaacggcatagaggtattgtatgaggatccagttgtagcgtttgatggcaaaacacataccttaaaaacttcatcagggaaaattcttgagtatgggtcacttattatttctac

SEQ ID NO: 412788 - DNA, 443 bp, Oryza sativa
gaaagttgaccaaatatacttttttccatatatcttatataaatgacatatattccaaacaatgctcacatacagctccgcagcaatattttggaaggacacatgtatgccttatgttgccatcggcctattacaacaaaataaccaaaaataataattatttgctcactcaaacatgacacgatctcttttaagagaggattatttagatgttcatatttcgcatgggacccaacaagagtacacatgtctggtacttagagttggattccactcttgtactcagagccagctgtaaagctttcagggatgacatcgtcgacgacacggtagccgccattcttgacaaggaagcggacagagaaggggcccttgagcggcgactcacttttgagcgtccaggtgttagacgacgactccttgagcgccacccagtccttggc

SEQ ID NO: 412789 - DNA, 518 bp, Oryza sativa
tcggaccaatccctcttccagtcaagaaaaaaggaagattacaccaacaaacaaactagctagccaatggcctctttgtcctctttccggctcgccgtggcggtggcggcactgttggttgttggctcctgtgccactgagctcaccttcaaggtcgctgagggctctagcgccaaaagtctagagcttgtcactaatgttgccatctctgaggtggaggtcaaggagaagggcggcaaggactgggtggcgctcaaggagtcgtcgtctaacacctggacgctcaaaagtgagtcgccgctcaagggccccttctctgtccgcttccttgtcaagaatggcggctaccgtgtcgtcgacgatgtcatccctgaaagctttacagctggctctgagtacaagagtggaatccaactctaagtaacagacatgtgtactcttgttgggtcacatgcgaaatatgaacatctaaataatcctctcttaaaagagatcgtgtcatggttgagtgagcaaat

SEQ ID NO: 412790 - DNA, 395 bp, Oryza sativa; identical to SEQ ID NO: 392519

SEQ ID NO: 412791 - DNA, 374 bp, Oryza sativa
gtggagggtgacacccctgtactttgagctgccgcgggagaagccggtgctctgtcgtcggcgaacgtgcacgaactcctgcttggacaagctcttcatctgcctcatgtgctactcgtagtcgctcaggctgaagttgatgaaagcctctactaccctgaactggaccgccggcctgtcgtacgcccttgcagctgcgtgagcagtggctaattcacctaggtagacttgcttgccgcattcccagacgtggcagtcccagcgggcggtgcggcagtaggaggggaccccctcgtattgccagcttggagagcgcggcccgcggcggctattcttggtcgtctgaggctgcggctgttgcggcggcggcggtg

SEQ ID NO: 412792 - DNA, 521 bp, Oryza sativa
gtgccaagatgattacaattattctgtaatgggatcatcgagccctggctgccgaatgcacacgacaattacaaaacgctcagctaaatatatctggaaggtttccgtgagcagcctcaaagatcctccggaccgttgatgtccttgttctcaagcacggctccatctgggatctccaacttccctgacttggcggtgatggtcaccttacccttgagtgtaactccagagccgaaccagacatcaccagagaccttcaaggtgtcaagctcgacaatgctggggattgacttaaaccgggccaggaaattggcaaccttcttgaactcaggtccaagctcaatcgaagggtttgatgggtttgttctggctgggttgcggatgacaaagccatcgaccaaggggtacaaatcagactgtacaagcaacatatcagatgtagccttgactggcagaaatctcgagcgggaacattaatgccaattgctttttcaaagaccgaatggctgctccagctgcag

SEQ ID NO: 412793 - DNA, 482 bp, Oryza sativa
gtaagatccagaccccgaccgacgaggtggtggttccctacgacacgctctcggctgctcccgaagatctcaacgagacgaagaagctgctcgacaaactcgtcgtgctcaagctcaatggaggcctcgggacgaccatgggctgcactggtcccaagtctgtcattgaagtccgcaatggctttacgtttctagaccttattgtgattcaaattgagtccctgaacaagaagtatggatgcaatgtccctttgcttctaatgaactcattcaacactcatgatgacacacagaagattgttgagaagtactccaactccaacattgaaattcacactttcaaccagagccaatatcctcgcattgttactgaagacttcttgccacttccaagcaaggggaagactggcaaggatggctggtatcccccaagccatggtgaggtgttcccctccttggataacagtggaaaacttgatacc

SEQ ID NO: 412794 - DNA, 428 bp, Oryza sativa
acacagcaatggaacgtttgaccgtcctttattattattattatacctctgagcaaacaagcgtgcgaatagttggtgctcggcgataataatgaacaaataggtagtgttttacatagcggatgaatactttaaacaatcaatttggcacaaacaggtgaaattccttgcagctgcaggttcgaacctgcagctaattacatggaagcagctataccgcagctgaaattacatgcacagattatgccgtcacctgaccaaaaagaagcttccggatctccggtaatttcttgcggaagacaacttccagcctggcatcaagtgtgttctcacacacaatctttccatctcgagaagccagcacaacacctccagagcaaaacctctcatgggaatcatgagagcttggagaaggcggtaggtacaca

SEQ ID NO: 412795 - DNA, 478 bp, Oryza sativa
tcggtggactcctctctcctccccttccctcccctcccccgcgcgcggtggtggttcgccggagcgcagcagcagcagcagcaaaaggccgcgagggccgccgtcgggatccccgccgccgccaagatgaacgacgccgatgtcgccaagcagatccagcagatggtgcggttcatccgccaggaggccgaggagaaggccagcgagatctccgtctccgccgaggaggagttcaatattgagaagcttcaacttgttgaagctgagaaaaagaagatcaggcaagaatatgaacggaaagagaagcaagtcgaagttagaaagaaaattgagtactctatgcagctgaatgcttctcgcatcaaagtgcttaagctcaagatgatttgggtaattccatgaaagaggatgctacaaagcaactcctgcgtgtcagccacacccaccatgaatacaagaaccttttgaaagaactcgt

SEQ ID NO: 412796 - DNA, 366 bp, Oryza sativa
tcggttttgcgaagcaacaagcataatggcttccctgttgttgatcgtgggcagaatggcgagtcacttgtcataggtctgatacttcgtagtcacttacttgtacttctgcaatctaaagtagatttccagaatagtcctttcccttgtggacctggtatactcaacaggcacaatacaagtgactttgttaaaccagcatcgagtaaaggaaagtcaattgatgatattcatttgacagaagatgagctagggctgtatttggatctcgccccatttctaaatccttctccttatatagtgccagaggacatgtccttagcaaaggtgtacaatctcttccgccaactaggattgcgacatata

SEQ ID NO: 412797 - DNA, 469 bp, Oryza sativa
agcgttcctgaatacatatcaaacacacaagatttgaaatatccagctgaatgacaaaaatgcccaaacgaagggcacagcgttcacagaaggaatgaaatgaggagcccagcccatacatatgccaatccaatgtaaagccatagcagggtcattgtaccatctcaaggtccttgaagtattcatgctcaagagcctgtctagctgtgatccttttgtttggctcgtaccgaagcattttagagagaaggtccaaaccagcagggtcaagagtagggacaatagttgcaagatcctgtgcttgccacttggggaaagcagacttgtagtcaggtaatgagctaactcctggccaactttgttcatttggagttcctagtaccctgaatatcttaaataattcatcaatctcagaatcaccagggaacagtggtttctggctcaccatttctgcaagatacaccaactg

SEQ ID NO: 412798 - DNA, 446 bp, Oryza sativa
tttagcgagcaaccagccccccgcccccaatggcggcagtagcagctttgcccaccgctgccgcttttgcccacctctcctccgattaatcccctcccctcctcttcctcccacttctccgcctcctcttcctcccctcgccgaccctacctactcgcgccgccgccgtcgcattgggcggcaaacggagggggggttaaccctgatggagcagtacgagacggaggagaagattggggagggcacgtacggtggtggtgtacagggcgcgggacacggtcaccaacgagacgatcgcgctcaagaagatccggcttgagcaggaggatgagggcggcccctccaccggaatccgcgagatctcgctcctcatggagatgcatcacgcgtacatcgacaggttacaccatgttatccacagcgggaagcgcatataccttgccttt

SEQ ID NO: 412799 - DNA, 514 bp, Oryza sativa
tcggacgacgagacccagcgagcgatcccgagggaagaaagagatcgagagggaagggaagggagaggatcggagagctttccgccggccatggggttctgggtgaccacgctcatcttcctcctcgccggcttcgtcgcctccctcttctcgctgctctgctgcaaccgcgggccgtcgaccaacctattccatttgaccttggttattacagcaacggtttgctgttggatgatgtgggcaatcgtctatcttgcgcagctgaagccactgatcaaccctatcctaagcggcgagtgagctgtgttacaatttgaagtctgctcatgctgtatcactatttagttgaggatttctattcattttggcacgactgaaataaagaattgttgtgagattttggaacacttcctctagacactagaggatgcccactgtgattagtgtatgccattatattatatacacaataatcggatcaatgaccttgtccattaaacttccaaagttaccc

SEQ ID NO: 412800 - DNA, 364 bp, Oryza sativa
tcgccatgttctccatgttcggcttcttcgtccaggccatcgtcaccggcaagggccccctcgagaacctcgccgaccacctcgccgaccccgtcaacaacaacgcctgggcgtacgccaccaacttcgtccccggcaagtgaagtgggggaccgtagcttagcagtggttaattgtggttggatggatttgtggccagcgagttcgttgtctttgggttggggaagatgggtatagtgccacgagaggatgaccgagttgttgttgggtccactaagaagatgtagaatatgacgatgttctggcaaaatggacaaagccgccctcgtgggatgctccgggaatttcggcaccgcacctgcag

SEQ ID NO: 412801 - DNA, 293 bp, Oryza sativa
gcaaaaacatcatcttcttcttcatcttcttagtgtacacaacaccaactcgatcatcatctcgtcgcactaaacccatcttccccaacccaaagacaacgaactcgctggccacaaatccatccaaccacaattaaccactgctaagctacggtcccccacttcacttgccggggacgaagttggtggcgtacgcccaggcgttgttgttgacggggtcggcgaggtggtcggcgaggttctcgagggggcccttgccggtgacgatggcctggacgaagaagccgaacatg

SEQ ID NO: 412802 - DNA, 280 bp, Oryza sativa
ccacgcacccagggccggctctttttagcagaaggcaaaggaaatttcccgcaaatacttattcatatgttttgacaacatttctcccgacgcatgctcattgtggcagacgcagctgaccacctagagcttttagttcaccattattatttagacccaggcttccgtcccaggaccagaacacatgcttacaagcgaaaatactaatagcctggctggctgctttacagaataaccaaacgacaaccttaaaaaaataaaaaggccccggatggaaaac

SEQ ID NO: 412803 - DNA, 428 bp, Oryza sativa
  unsure (1)..(428): unsure at all n locations
ttaggacggttcacatgagctgcagtctgagtgtgggcatcatgggcacatattggctttgtacactcagactcgtggcgatttcattgtagttggagacttgatgaaatcaatatccttgctcgtgtacaagcacgaggaaagtgcgattgaagagcttgctagggattacaatgcaaactggatgagtgcagttgagatgcttgatgacgagatctatattggagcagagaataactacaacattttcactgtgcggaagaaacagtgatgcagcgacagatgaagagaggggcaggtggaggttgttgnnagagtaccatcttggagaggtttgtgaatagactccggcatggttcggtggtaatgcggctttccgactcagagatgngccagatccgaacggttatctttggcaccataacggg

SEQ ID NO: 412804 - DNA, 447 bp, Oryza sativa
aaaacatcactctagaatttaatttttgttctcagacacaaacctgcatgaaaaacatacaaaggctacgatataattgcagtgcagctgcttatttatactacagttcaggcccatttgggtggtccattcaaagcccaaatccagccccacttcagtctccccgagatcagtgcttcgcacacggcttgcgccgatctcaaacgaggcggcggcagagggtgatgccgtcggagaccgggagctgcacggcctccacgcgcgggtcgccggcgatcttggcgttgaaggccacgatggagcggcggatgtcctggtcgaactcctccagcacggagtcgtcctccagcgccacggacccgccccagagcgtgttgtcgtaggccagcacgccgccggcgcgcaccagccgcagcagccgctcgtggtactcgccgtagttcccct

SEQ ID NO: 412805 - DNA, 470 bp, Oryza sativa
cttctccctgtgtactgcactgcacactctaggcggctgaagcgaacgacaccggcgtcaagagtatcaagcacggccatggcggcggcgaacggcgatgccagccatggcgccaacggcggcattcagattcagtccaaggagatgaagacggccatccacagcaacgatagccccaagaccctcctcaagagtgaatccctccacgagtacatgctgaacacgatggtgtacccgcgggagaacgagttcatgcgcgagctccgcctcatcaccagcgagcacacctatgggttcatgtcgtcgccgccggaggaagggcagctgctgtcgctgctgctgaacctgacaggcgccaagaacaccatcgaggtgggccgtgttcaccggctgctccgtgctcgccaccgcgctcgccattccggacgacggcaaggtcgtcgccatcgacgtcagccgggagtacttcg

SEQ ID NO: 412806 - DNA, 394 bp, Oryza sativa
gactcaaacagcatatattaccactgccatcccggcacaacagcatacataggcacactgcagcctacacaagtttctgttgggcaaaggcaatagtacaattacacatcaaacacaccctcacagagagagagagagagagagagagaaaaatccttaaaacacctgcttaatcaacaggttacaattagttaagggttggggcagagaacatatatagcacatttatgcctttccagcatagcactgcgtatatctagcagcagtagagggagatgatcacactgccagttaatcagcagcagcaaagcacaccggatagatagattcagggatggataaatagatagatagatagattggatggattgggggaaaaaggaccgtagggggg

SEQ ID NO: 412807 - DNA, 504 bp, Oryza sativa
  unsure (1)..(504): unsure at all n locations
gtcaccgcttccacctcccctaggaggctagcacacagcacacagtagcactagctcgtcgtcgctggcgcccgtggcaggcggcggcggcggcggttcctcctcgtccgctgctgttgctgctggcgcgtcttctagctcctcctcctcctcggtggccgcggcggcgaggaggggcgcgggccgtgccggcggtggcgccccgtcgggcggcggcggcgggccgaggtgccaggtggagaggtgcggcgtcgacctcagcgaggcttgggcggtacaaccggaggcacaaggtgtgccagacgcactccaagngagcccgtcgtcttcgttcgctggcctccgccagcgcttctgccagcaatgcagccggttccatgagctgacggagttcgacgacgcgaagaggagctgccggcggcggctggccggcacaacgagcggcgccggagagcgcggtggacacggtgcacggcgaggactgccggcacgccgaccagacgc

SEQ ID NO: 412808 - DNA, 433 bp, Oryza sativa
  unsure (1)..(433): unsure at all n locations
ttcgccggcgcggtgccgaaggaggcgcgcgcgacgcacgactgcctgtaccgcgccgtcgacatctacctgaaggcgcacccggcgctggaggagatggagagggagaaggtgtgcagcgtgatggacccgctgaagctgtcgtaccagggtcgcctccacgcgtcacagaacaatcggctcccgctgcaggccgtgctgagcgcgctctactacgaccggctcaagctccgcagcggagaacgagggcggcggcgggtgggacgcgtatgggaatggcgtgatgagggtcgtcggcggcggggtcggcgaggaagcaggcgaaggaggaaggcgtcgctggcgagggagaacgaggcgctgcggtcggagctggcgcggatgcgggcgtacgtgtcggngatgcagcagcagagcaaggggtcgtcgtcgt

SEQ ID NO: 412809 - DNA, 439 bp, Oryza sativa
tctgttcctcctccagaagagctcctgaatctggaagagatacgggaaagaagacttactgatcctcgcttcccaatgcaatataggaactcagctgccaagaaaaagttcgtaccttggcccatagaaatgaggttttgtgaagattcagcatctcaacataaaccaagcttaaattattggtttagagccagaggaaaactttctgatgatccagcactgcataggtgtgttgtagcatatgcttcggatctactatattctggtgtcagcctaaatcctcatagggagaagggtctgaagacatactcactcagtcttgatcactcgatttggttccacaagcctgtgaaagctgatgattggctttatatgtgatcgacagcccatctgccacggtggcggggttttgttacagggcgaatgttcaaccgacaag

SEQ ID NO: 412810 - DNA, 453 bp, Oryza sativa
agcagaaggcaaaggaaatttcccgcaaatacttattcatatgttttgacaacatttctcccgacgcatgctcattgtggcagacgcagctgaccacctagagcttttagttcaccattattatttagaccaagcatacgtcccaagatcagaacacatgcttacaagcgaaaatactaatagcctggctggctgtttcacagaataaccaaacgacaacctcaacagataaaaatgccacggaatgaaaacaaagcaacgaattgtcaaccagaagtcccatcttactcatcaaacactccatgattctcctccaacgcatcctctccccaggggagaagattgcccagtttaccttccttaacaggagcagggttcaccatattctcagcctcgaagcagtgcagaacagatttgggcgacccaacagcaacaggtacgtcttcagtagcg

SEQ ID NO: 412811 - DNA, 443 bp, Oryza sativa
tcgcttgcataagaactcccccccctcctcgctccccgccgccgccgccgttttcttggagaggagaaatccgtaggctcagaggatttttggtagtcttgtttcgtgatattcgtgaagagggggggagctaaggggggattcgtaagatcagaattggatcacgcgggggcgcgctcgggatcgggggttccaaacacagcttcttcgttgaatttaagtggatgtactaatggagtcaaagggtggcaaaaagaagtctagcagtagtcgttccttgatgtatgaagctccccttggctacagcattgaggacgttcgacctgccggaggcgtgaagaagttccagtctgctgcttactccaactgcgcgaagaagccatcctgatagccctttcggcttctcctcctagtagtttaggatttcttgcattccattttgc

SEQ ID NO: 412812 - DNA, 439 bp, Oryza sativa
  unsure (1)..(439): unsure at all n locations
tggaaaaccgaccaatctccatacaacttagaggtctgacatgcatgaaaggctcaccagctagggccagggtagtatatgctcctgtgctggaagttggtgaagagggacgcctacaacgtgcttgcaaagttataactgatgcctttgtcaagtcgggcctagtacttgaaagggatgcgaggcaagaattgaagttgcacgtgaccataatgaatgtgaggcacaggaagagcaagagatggaaccaaagaaacgactcattcgatgctcggaatattttcagaaaatatggggaacatgactggggcgaatacctcattcccgagatccatctttcgcagcgattcaagttcgatgaagagggtactactactgctgctcttcaatccccttgcctgcggcggagatgcnaacgagtgagtttcataataacaca

SEQ ID NO: 412813 - DNA, 471 bp, Oryza sativa
  unsure (1)..(471): unsure at all n locations
gagcctaaagactgctgcataccacattattaccacttacaggagaaatattttgacaaaaagtacaaaccagattaactttggcaccacaaacacactttattacccaattattaagataaaagaatgtccaaacagctaaagcagaaaatcaaataaactagagtacacaaacgtcctggagaactggagatggatcacaaggcttcttatgcaagctcgagaacgagagcagatgctccgcctccgccattgcaaacaccagcaactccgattttgccacctttctccctaagaacaccaagcagggtgaccaaaattcgagcaccactgcatccaagaggatgtcctaaagacacagctcctccatgtacattaattttttctgaaggaattccaagaagcttttgatttgcaagtgcaacagctgaaaaggcttcnattaatttatagtaatcaacacgagaagac

SEQ ID NO: 412814 - DNA, 413 bp, Oryza sativa
tcggttgatccagcccttgtgcaagaggtcttctttggtaatgtgttgagtgctaatttggggcaagctcctgcaagacaagctgctttaggtgcagggataccaaacacagttgtttgcagcgcagttaacaaagtttgcgcatctggcatgaaagcgacaatgtttgcagcacagtcaattctattgggcatcaatgatattgttgtagccggtggcatggaaagcatgtctaatgctccaaaatacattgctgaagctagaaaaggatctcgttttggacatgacactcttgttgatggcatgcttaaagatggcctttgggatgtatacgggtgattttgccatgggaaattgtgctgagctttgtgctgacaatcatgctctgacagggaagaccaggatgcctatgc

SEQ ID NO: 412815 - DNA, 440 bp, Oryza sativa
aggttcaaatccaacttattcataaagcatactgctgtcccacaggaaactgtttcataaaactaacatatcatacggactcgatggtccattaaaccagacacaagtagacatcagcaccacaaatacttgacgaacagaggctcgggatgaccaggcacatcggcagctccaccaaactggctgattactgaccaccacggaggcggagcaccaggtggagggtggactccttctggatgttgtagtcggcgagggtgcgtccatcctccagctgcttgccagcgaagatcagacgctgctggtctgggggaatcccctccttgtcctggatcttggccttcacattatcaatggtgtcggagctctcaacctccaaagtgatggtcttcccagtcaaggtcttcacgaagatctgcataccaccacggagacgaagc

SEQ ID NO: 412816 - DNA, 468 bp, Oryza sativa
tcggcttcgtctccgtggtggtatgcagatcttcgtgaagaccttgactgggaagaccatcactttggaggttgagagctccgacaccattgataatgtgaaggccaagatccaggacaaggaggggattcccccagaccagcagcgtctgatcttcgctggcaagcagctggaggatggacgcaccctcgccgactacaacatccagaaggagtccaccctccacctggtgctccgcctccgtggtggtcagtaatcagccagtttggtggagctgccgatgtgcctggtcatcccgagcctctgttcgtcaagtatttgtggtgctgatgtctacttgtgtctggtttaatggaccatcgagtccgtatgatatgttagttttatgaaacagtttcctgtgggacagcagtatgctttatgaataagttggatttgaacctaaaaaaaaaaaaaaaaagggcgggc

SEQ ID NO: 412817 - DNA, 122 bp, Oryza sativa
gggaattgatggttcatggggcaaaatatcgaaatggcagacaaaacaaaccatggagcagaacagaaccctattccacagtatgcaagagctcaattctggagctactacagagatgggta

SEQ ID NO: 412818 - DNA, 384 bp, Oryza sativa
tcgagccctagctctcccctatccctcggcggacgcaccaccaccaaccatggccggcgcgcaggagtctctggtgttggccggcgtgatgcacggccacaacgacgtggtgacggccatcgcgacccccatcgacaactcgccgttcatcgtctcctcctcccgcgacaagtcgctgctggtgtgggacctcaccaaccccgtccagaacgtcggcgagggcgccggcgcctccgagtacggcgtgcccttccgccgcctcaccggccactcccacttcgtccaggacgtcgtcctcagctccgacggccagttcgcgctctctggctcctgggacggcgagctccgcctctgggaccttttcaccgggggcaccacccggcg

SEQ ID NO: 412819 - DNA, 157 bp, Oryza sativa
tgcgccgccggcgccggcgccggtgagggtggcgatgaggagcggtggggcggcggcgtgcggcggcgagaggggtgaggtgcagggcgagcctgatcgagcccgacggggggaggctggtggagctggtggcgccggaggagggaggttccccttt

SEQ ID NO: 412820 - DNA, 342 bp, Oryza sativa
tgaaatctccccccgtctggccgactcctccggtccttgtgcctccccaagacgagttgcggctgaacagaagagggggagtaggcggcgatctccatctggcgactcgcgagcagagcaggggaggggatcctgatctggaagaagctctcctcttaatttcagcgccttaaccttaatacaagtaccagtttgagtttgtttgttcccaagttggatccggccctgggtaatttctttcttgctgaaggtggagagactgagctgagctatggacaacttgtggcatctcagggatgagttccgtgggcagtcgaaggttgcggaggacccgcagtggtc

SEQ ID NO: 412821 - DNA, 114 bp, Oryza sativa
tttgggggttttaaactacttcggtgcatacctttcatcacattatatcaatatcacacgttattaaagcatgaaagcacccacatgattggcacagattaccaggtatacatg

SEQ ID NO: 412822 - DNA, 222 bp, Oryza sativa
tgattaaaaagaaaatcacggcgcgcgagcttgcatagacagcaatggcgagagttgctgccgccgcggcggtgctcgagctggcggcggcggcggcggcggcggcggccatggccgcacgagccgcccaccgatgaccgcgcggtccgcccgagcgcagagctgacgaacagctccaaccggacggggtaacaaggagacctactgcttgctcggctacta

SEQ ID NO: 412823 - DNA, 284 bp, Oryza sativa
ggaagcattagacatttgcctttatttgattaaagaccttttttcatgttgggatactacatcattacatgccagtttctattggtagtactaactgatcgaacgatcatgcaataggataacaatttcgatggatcgatcgatcactctagctagctagcttggcgatagctgcgctggttgtagtcagtccgaggttggctgacctgtagcctgcgccgagctatgtctcagttatgcgcttgtgagtatacctaatgccggttcgacgtttggaagttttt

SEQ ID NO: 412824 - DNA, 378 bp, Oryza sativa
tcatcatcgacgccgccaactccttcccggcgttcggtacctccggcggcagcgccgagctcatccggcgggagctcgccgccttcttcggccagacctcccacgagaccaccggtggaacgaggggtagttctgaccagttccagtggggttactgcttcaaagaggagataaacaaggcgacttctccaccctactatggacgtggcccaattcaattgacagggcaatcgaactaccaagcagccgggaacgcgctggggctggacctggtgggcaacccagacctggtgtccaccgacgccgtggtctccttcaagacggccatctggttctggatgacggcgcaggggaacaagccggcgggccacgacgtca

SEQ ID NO: 412825 - DNA, 551 bp, Oryza sativa
tgctgtgacgtggtgcagtgaaagattctgtgaatgaggacaagttgagagataaacctgcgtatgagcacctgaatgaaccgatgaatgagcttgcggaagcatagttaccggcagatattattgatacccgtctaaaccaagctgtgactatcctagaggatcttgtcaaaccaattgatgagtcaatggactactacaagaagcaacaactgagggaattggccattctaaatggcaccgtgagagaggaaagcctaagtcctcacctgagccctagtgtatcccccttcaacttcaccgggatgaagcgcgcgaaaacagggcggtgatctcggttccgaaagcattattattctccaaatctggccatggtatctatgcctgatcacatgctgctgcgctttgctggagatgattggcgatgcatatgctgggatcatcagtgctgctgggctatgcctgccatgatctgccttgctttatattccttgggggtgaatgatcctctttgagggtctgatgtctagcgggattaatatttatccttt

SEQ ID NO: 412826 - DNA, 404 bp, Oryza sativa
cgatgtcaaaatctggatacaactaaataatggaataaataacaaaacgatttattgactacaaagggtatctgatacaaacatttggctatacgatggacgtcgaacaaaatatacatacatatgagctcgccagtttggccaaaatcaccatatctaagatcttgactaagaatgtgtcattaagcttcacaatgccgttggaaccatctatacctatgggctttacagagtatccacggaaattgccgaacattatcttgaacttgtagttcatctttggacgaataacctcgagctcggttggaagaaccgccaagaactcagcataacctgaggacccatgggcgacgcgacaagatccatccggaagaacttccctcaccacaccaggaccattatcg

SEQ ID NO: 412827 - DNA, 411 bp, Oryza sativa
gaaaccaaacattgtaaagctctggtttcttgcatagcttcccaacatggtccggtgaacagaaaatattggaaactagacttcagaaaaccacagcactgtcgcatggtgctaacatgagtttcctcgtcaaaatcattacacttgaaaaaggaaactacagggcgagctcaacggcggggggcgaatataatttaggacatccgctgggcgggctccttagcgagaagcttttccctggccttggttttcacctgagacttggaaccaatgactccgcctccccactttttcctgacctcgcagacttgtcgatgaagttcgccttgatggccttcaagaccttgctgaacttaagcttgtcctcgttttgacagtgttaacgacagaacgagcagtctcttgtgaaca

SEQ ID NO: 412828 - DNA, 434 bp, Oryza sativa
tcttttcttcctcctcctcctccgccgcccgcctcgccgcctcccgagagctccaccctcgcctccggcgaaatggcaccgaagcgaggcggcagggcgccggtgccggcgaagaagaagacggagaaggtgaccaacccgctgttcgagaagaggccgaagcagttcggcatcggcggcgcgctgccacccaagaaggatctgcacaggttcgtgaagtggcccaaggtggtgcgcatccagcgccagcgccgcatcctcaagcagcgcctcaaggctgccccggcgctcaaccagttcacccgcaccctcgacaagaacctcgcaaccaacctgtttaagatgctgctcaagtaccgccctgaggacaaggctgtcaagaaggagaggcttttgaagagggcccaggctgaggctgaagggaaaaccggtga

SEQ ID NO: 412829 - DNA, 441 bp, Oryza sativa
ggtaatatatcatatttatttatgaaatgaaggaaacaattacagcagcaagcacataattaagaaatatgttattattggttaattgtgcttgtcctccgttatgatcatcttgtcgatgttgctgagcacctaggcatccctgtgggccatgttggtggcgtcatcggcggtgagcggcggtggtggaatggtgcagggctggtagtcggccacgtactgctccctggactgcatcatgaagtcgcgggcgcggccttggcgggggcacgccatggactccgggcacagctccacggtgcggtccggcacggtgggcttgtagcggagcaacgaggcgttgcgcgtgagcacgtgcagcatgtagtcgtagacgttgtccatggccatgttgttcgtggtgaatgcgctgccggtcaggcccatgcgctgcgcctgtgc

SEQ ID NO: 412830 - DNA, 422 bp, Oryza sativa
tgaagaacttgaacacgccaagcaaagaggtgcaaaaatatatgctgaatttctaggtggaagcttcacgtgtgatgcataccacatgactgagccacatcctgaaggaagagggattattctttgtatagaaaaggcactggctgattcaggagtagcaagggaagaaatcaactatgtcaatgctcacgcaacgtctacacagtcaggtgatttgaaggagtatgaagctattgtccgctgctttggccagaaccctcagctaagggtgaactcaacaaaatcaatgactggacatctaataggtgcagctggcggaatagaagctgttgctgctattcaagctttaagaactggctgggtccatccgaatctgaatttggagaacccagagaaaatagtggatgtgggcgtgctggtcg

SEQ ID NO: 412831 - DNA, 246 bp, Oryza sativa
actgattggcaccgggcctgtgggtcgtgttgagactggtgtcctcaagcctgggatggtggtgaccttcggtcccagcggctctgaccactgaggtcaagtcggttgagatgcaccacgaggctctccaggaggatctagctggtgacaacatcgggtctaacgagaaaaacagtgcggtgaaggatctgaaacactgtgtacgtgggccttcaactgcaaggatgaccctgcctaggaggcatg

SEQ ID NO: 412832 - DNA, 440 bp, Oryza sativa
gcacaataattctctgatctatagcctgtataaatacacgggaacattgcttgtacaatttcgcaatttgaacagatgaaaaaaaaaaaagaactctcgaatcagtaactgccttcgaatggcaattgatcattgggcctgggggtctgcacccatagcaccaaaccttgctccagcgccaagcccagtattgggtggccttgccacaacaacattgtcatcagcaaatagcgccttgatgaacgaaggagtcttcaggggacgcctcccagtcatccgcgggtatacattttccaggaagtagtacacatgcccagcaatcatacccagcaaatcaacccatgttctgcttcccacaagaatagagaacctcagtaggacccaaggtaaataagcagtagtaaaggtgaacaaacccaagtagctcatttgatgaaggg

SEQ ID NO: 412833 - DNA, 465 bp, Oryza sativa
tggttgcgagtgtgcgacccatctacatctgcatccatcctcttcccccttccgatgccaacatcttatcggggattcgattcgggtcaattagggtttactcgagacttgagagaggagagctcgcccgctagggtttcgcgggagatggcgcaggcggtggaggagtggtaccggaagatgcccatcatcacgcgctcctacctcaccgtcgacgatggcacgaccggcgggtgcgccctcgagatcatttagccctaccacctgtatctgaaccccaagctggtggcgcgagactacgagatctggcgccttgtcaccaacttactgtacttgcgtatgatggatttgggactttctgtgccacatgtttttttttgcacgatactgctagtgttttgaggagatcttattcagaggaagaactgcttgcctttttctccagctttttggttggcgctcctg

SEQ ID NO: 412834 - DNA, 406 bp, Oryza sativa
tttggacactccgcgactgggacgcagggaagctgacatcaagaacaggttcgttctgccaccatacttgacactgaagaatttcgaaggcctggacctcgcagagatggacaagagcaacgattccgggctggcctcctacgtcgccgggcagatcgatcgcacgctcagctggaaggatgtgaagtggctgcagagcatcacgtcgctgccgatcctcgtcaagggcgtcatcaccgcggaggatgcgaggctggccgtgcactccggcgcggcggggatcatcgtgtcgaaccacggcgcgcggcagctggactacgtcccggcgaccatcagcgccctggaggaggtggtcacggcggcggcggtgcgcatcccggtgtacctcgacggcggcgtccgccgc

SEQ ID NO: 412835 - DNA, 444 bp, Oryza sativa
tgttgctgacaggggtgtgatgattggtgatggcaaatcacgcttttccatcaacgggaagcccatttaccatttggtcgggacttcgaccttcagcgagtacactgttatgcatgttggttgcgttgcgaagatcaacccggcagctccacttgataaagtttgcgttcttagctgaggaatttgtactggtctcggtgctacaatcaatgtggcaaagccaccaaagggatcgacggtggcgatattggctctaggagctgtacgccttgctggcgataaggtgcacggattgcacgagcgtcaaggatcattggcattgacctgaacgccaacagatttggagaagctaggaaatttggtcgcactgaatttgcgaacccaaaggaccatgacatgccaggtcagcaggtacttgctgagatgaccaatgaccgagttgac

SEQ ID NO: 412836 - DNA, 400 bp, Oryza sativa
tgtacatttggagaaagctaagatgatcgatgggtagttgagctccagatccgattatgaaattgcagaccgaatactggggcataaagtgggcgccatgtgaatcaagacatgatcctgtgcttggggcagcctactccaaaggaagaaggccagctactgtgccggaaaggacttctaggtgaaacgatagttgcttaagaggttgacatatagatgaatcatgataaggcatatggttgaagagttcttggagctacacatgctgaacaggaggactaacaacatgcaataagagtaatgatatgtgctctagaagctgacccaacaaacctgaaagattttccagcactaggtgtgagtgacactaatgagacggagctaggagaatcatatgcat

SEQ ID NO: 412837 - DNA, 382 bp, Oryza sativa
gcacagttcagaacataaagatttatgaactttagcagttatgtttgaagcttgctggtaccattcaggtaacattgacaaaaattgcaagtgctcccatgaagaaaatgctttagcagcagaggaagaaaacagaaaattctaggcatgggaaaccccagtggcagaatgtacatcatactcattatttgaaatgcttccgcttaaatgctcaaaacattttaatgaaagtaagaaacagtggtcccttagttgacatcatcaaggaccagcttgcgtgacttcaggacggaccaccttatgcgacagtagaatgcggattggagaagtgcaagtgacagtgggaagatccatttcactcccatcagctttctttctttca

SEQ ID NO: 412838 - DNA, 376 bp, Oryza sativa
tcggttgagtgctctttactgaggcggatgctgaagaagttcagtcacgcattgttgatgctgaaaatttgcgtgaagagcaccgctatccaaatcttatgaagattttctcagcttttgggagtgtgaaatcaattcgtacttgctatccacaaggtgggattgatggtgctggaacttctactggcaaagcatcaaagattgagatgttgtttgctaataaggtgcatgcttttgtggagtatgaaactgttgaagatgctgaaaaggcagattctgaattcagtagtgcgagaagctggagagatgggattagagtccgctcactgcttggttgcctgaaacaagccatgggtcaaggaagaagaggtggaga

SEQ ID NO: 412839 - DNA, 542 bp, Oryza sativa
gagattaacgagcttgaagaatactattttcatagacggaggaccggagcacaatcacgtaagctggaggaaagagacatagtgacagtaaataaagaaggttatcatgcaggacttgaggatttccagtctgtgctaacaacattcacacgatatagtcgcttgcgcgtaattgcggagctaagacatggagatctgtttcactttgcaaatatcggatcaaggatcgaatgtgaccgtgatgatgagctatttgctactgctggagacttaaagcgcatcaaagactacgagtattgtacagatgttaatgaaccatcagatgtgcattgtgcagttgttgaaatggatactagatctaaactcaggtgccttagctggaacaagtcctcaaaaaatgttatagcaagcagcgactatgagggtatagtaactgaatgggatgtacaaacccgtcagagtgtgaaggtgtatgaagaacatgaaaagagagcatggagtgttgattttttcgaacagaacccttgatgctagtatttggg

SEQ ID NO: 412840 - DNA, 410 bp, Oryza sativa
taagccatggcgtcctccatactctccgactggtcctactgcgccacctgccgccttctccccctacggcgcgccctgctcgcgccgccgtgccgcttccgcccggacaccgtcgccgcgccgccgtggaggcccctcgccatcgccggcccccagctcccgcttctcccccgcgcgcgcggcacggcttcggactaagccgacgccgtcggcgacgcctgctataccgactcagatgcttgtgccaagatcattgatgggaagttggtggcaaagcagataagagaggaaatcgctgttgagatcgccaagatgaaggatgcaattggggatgtgcctgggctggcagtcatcctagttggggcaaggaaggattctcaaacgtatgtgcgcaacaagaagaaggcatg

SEQ ID NO: 412841 - DNA, 539 bp, Oryza sativa
tttgaagaattcagatatttatgggccctggaagcggaaatgtcttgctgaatttgggattattacacaatgtgtggcccctactagggtcaatgatcagtatattacaaatgtactgttaaagataaatgcaaagcttggtggcttgaactccctgcttcaaattgaaacatccccttccattcctcttgtatccaaggtcccgacaataatattgggaatggatgtttcccatggatcacctggacagtctgatataccttcaattgctgcggtcgttagttctcgtgaatggcctcttgtatcaaaatacagggcttcagtccgttctcagtcacctaagttagaaatgattgatggactatttaagccacaaggagctcaggaagatgatggcctcattcgggagttattagttgacttctataccaggactgggaaacgtaagcctgaacaagtcattatttttagggatggggtcagtgagagcccagttacccaggtgctgacattgagctgatcaaatattgaggcatgca

SEQ ID NO: 412842 - DNA, 462 bp, Oryza sativa
tgttcggagagagagagagagagagaggagagcggcggcgatggcgtcgtcgccgtcgtcggcgtcgagcaggttctcgccggcgctgcaggcgtcggatctcaacgacttcatcgccccctcgcaggactgcatcatctccctcaacaagggcccctccgcccgccgccttccgatcaaacaaaaggaaattgcagtgagcacaaatcctccagaggaagcagtcaagatttcactgaaggactgtttggcttgcagtggttgcataacatcagcagaaacagttatgcttgagaagcaaagcttgggtgacttcattactcgcatcaactctgacaaagctgtcatagtatcggtctctccacagtcaagagcatcgcttgctgcattctttgggctttctcaatcacaggttttcagaaaactcactgcgctgatcaagtcgatgggccgtaaggcagt

SEQ ID NO: 412843 - DNA, 503 bp, Oryza sativa
tggatacacctactgttgcaacaccattccgggaacctgggtatccggtgggtggtgaaactccaatgcacccatctcgaacaccgcttcatccttaccagacaccaatgcgggaccctggagcaaccccaatacacgatggcatgcggactcctatgcgtcgtggctgggctcctatgagtcctccgagggataactgggaagaaggaaatcctgctacttggggaagcaggccagcttaccagccaggaactccaccagctcggccatatgaagcacccacacctggatcagggtgggcaaatacgccaggagttagctataatgacgctccaactcccagggagagcaactacggaaatgctccaagcccatatgtgccttccactcctgtaggctaaccaatgacaccgaattctgcctcggaccttactggtacacctgggcggtcaacccgatgacatccaggcaatgttggaatggacataatgtcgcctataata

SEQ ID NO: 412844 - DNA, 551 bp, Oryza sativa
tgctcgatcttataagaacttggattcctttcgtagggcattactcaataataaagcaaaagatattgcatactacactgatgaactgcggtggatcaagtcaaaatcagaaattgggttgatgcgagaatcagcatctattgtttctcagtctcttttacaaacgatgttgctatctaggacccatagggaggaaagccaactggcagctaagatcgagtatgagtgcaaaatgaggggtgcccaaagaatggcgttccatcctgtagttggtggtggagcaaatggcagtgtaatacactactcaagaaatgacggaagggtcaaagcaggtgaactactgctcatggatgttggctgtgagtatcatggctaccttagcgacctgacttgaacatggccaccctgtggcaggttttcacctgcttaggaagaactatacagcctgatattggagacaaataaggaatgcataaagctttgtaaaccaggccgcagcattaacgagatacataatcattcggtcaagatgttgataaagggtttccaag

SEQ ID NO: 412845 - DNA, 138 bp, Oryza sativa
atagagttctaaagcttatacctggaacacaatatactaagtatttattggatctatattttgactactagtatttataaaactttaggagctcaaggaaacgttcagagtagaaaatcaatgtctgaacaaattcct

SEQ ID NO: 412846 - DNA, 355 bp, Oryza sativa
tgttgtacaaacccagccaccttcgaatagaagtggtttgattaatgcccgagggggctctgcaccagaccaccatatagctagacacaggggataatcctactgaggcagtcggacgtgttggggaatacgttgtccgcatgaccttgcgcccactcggaaagagggcggccaaaagcatctggtatgaacatgaccgacacaagaacctgggcccgttgtaagaatatacgcccttgtacctgaccggagagctgctgcaagactaccgatgggacaccgtagggctatgggacaaggatgccacgattgttaggaacagggagctgaacgtgatccactactttttgatgag

SEQ ID NO: 412847 - DNA, 284 bp, Oryza sativa
tctgtagaggaagcgccgaaagatgaggcagagatctaagtaggcgaaggagatgggcgatcatggtgatggcgtgtcgcagtgatccatgtcttcggctgccaagctcgttgatatgtcaagctgcttggcgtggtgccaccattcgactgttgaatggcttatttacctgtgctgttatcatcttatatccctagttttaccaagagttttgcaccaagacatgtcggttcagttatgtgaacttgttatggagcccgatttgctgctaatgtttacctacc

SEQ ID NO: 412848 - DNA, 286 bp, Oryza sativa
tcttttgccttcttcagcttcctagtgacaaagccctgctgagtgaccctgccttccgcccactcgtcgagaaatatgctgcagatgagaaggctttctttgaagactacaaggaggcccacctcaagctctccgaactggggttcgctgatgcttaagaggtttctagtctactactgctagtacattgcccgtggtactcttgttttgcatctaggctagggccagggtgaaccagcagactaccactgtgagtcgcctttggaataaaaattggtcggcctat

SEQ ID NO: 412849 - DNA, 555 bp, Oryza sativa
ttgttgtgctcctccaagctactagcagtctcccgcctccgtttacccggtccggctccggcatggacgacgccacgtcgtcgtcgtcgcgggcgccgcggcccaagacggaggagctggacgcggcgctccacgccatggggttcgagatcgagcgggtctcccccgcggaggtcaccggccgcctcctcgtcacccccacctgctgccagccgttcaaggtgctgcacggcggcgtgtcggcgctgatagcggaggggttggcgagcatgggggcgcacatggcgtcgggctacagccgcgtcgccggcgtgcagctcagcatcaaccacttccgcagcgccgccctcggcgacaccgtcctcgtccgcgccgccccgctccacgtcggccgctccacccaggtgtgggcggtgaagctgtggaaattggatccatccacgaaggagaagggggctcagatctctgaatccagggtgactcttctctgcaatttgcccgtgccggagagcgtgaaaaatgcaggggaggccgctcaagaaatactttaaactg

SEQ ID NO: 412850 - DNA, 535 bp, Oryza sativa
ttgttagccaacatgttctcggagaggcagccgatcggtacggcggcgcagggctccgactacaaggactacaaggagccgccgccggtgccgatgttcgagccaggggagctcaagtcgcgggccttctaccgcgcaaggatcgccgagttcatggccaccttcctcttcctttacatcaccgtcctcaccgtcatgggggtcaacaactacacctgcaagtgcgccaccgtcggcatccagggcatcgtctggtccttcggcggcatgatcttcgacctcgtctactgcaccgacggtatcttcggcggccacatcaacccggacgacaccttcgggctcttcctcgacaggaagctgtccctcaccagggccctttgctacatggagatgcaatgcctcggcgccatctgtggcgccggcgtcgtcaagggcttccaaaagggcctgtacgagaccaccggcggcggcggcaacgttaagaagcccggctacaccaagggtgacggcctcggcgccgagatcgttggcacct

SEQ ID NO: 412851 - DNA, 530 bp, Oryza sativa
  unsure (1)..(530): unsure at all n locations
tcntgtgaagcgtgatgaattgactctagagggcattaaacaattctttgttgctgttgagaaagaagaatggaagtttgacacgctttgtgatctttatgatacactgacaatcacccaagctgtcattttctgcaacacaaagagaaaggttgattggcttacggaaagaatgcgcagcaataacttcacagtatcagctatgcatggcgacatgcctcaaaaggaaagggatgccattatgggtgaattcaggtctggtgcaacccgtgttctaatcacgacagatgtgtgggctcgaggcctcgatgttcagcaggtctctcttgtcataaattatgatctcccaaataatcgtgaactttacatccatcgcattggtcgctctggacgttttggtcgcaagggtgtggtcatcaattttgtcaaaaaggaagacatccgtatcctgagagatattgagcagtactacagcacgcagattgatgaaatgccaatgaatgttgctgatctaattgagcgctggagtg

SEQ ID NO: 412852 - DNA, 405 bp, Oryza sativa
acttcaaaattcttaacttcatcatcaagaccaaacaaagcaaacgcatagactcaaaaacattcatttctcatcagaaagcaaatatgcagctggcaagtaatacccaacaaactattcagaatatctgccattgacacaggctaggatgttcacgatccacaactagatagctgtttacttgttgtctaaataaacgggcagcaaaataagtgataatctctactcggcagcagcgacctcctgcccggccatggcctcatcttctgcaggcctatcaagcttcgaaccgatgtcctccttggcatagtcaccatgcacctccatgagctttcccaggtaaaatttcggggcctttagaatcttcactttgcggacaaacacattctgaagggggaaaatact

SEQ ID NO: 412853 - DNA, 354 bp, Oryza sativa
tcgtctctctcgcgccgccgccgccgccgagcgcctggagcagcgtcagccatggccgtaggtaagaacaagcgcatctccaaggggaagaagggatccaagaagaagaccgtcgatccctttgctaagaaggactggtatgatatcaaggccccgtcggtgttcaatgtgcggaacatcggcaagaccctcgtgtccaggacacagggtacaaagattgcttctgagggcctaaagcatagagtgtttgaggtctccttagctgatctccagaacgatgaggatcaggcgtacaggaagatcagacttcgtgctgaggatgggcagggaagaacgtgctcaccactttttggg

SEQ ID NO: 412854 - DNA, 304 bp, Oryza sativa
gtatatgcattatatattgtctccatatatcaattgctatcttacattgcaataaccaaagttacggatcgcatcaatcaccatatttagcactgacaaaacaaagctaaaaataatttagttttacataatcaatcagtcctgacatttgggttaactaaaaaaactattgatacaacacctaacaggcccgtaggatggtagttaatatgtaaacctccacaattgcagcttgagaccgatcttggcaatgaatacgcgtagaccgattggagctcggtcttcagggagtttcaacaccctt

SEQ ID NO: 412855 - DNA, 542 bp, Oryza sativa
tctctcgacagaagcaaacaaagtgtctgaggagctattgacgtgcctactgaatatcttctcacagatgaggtcctccagtgaccaagatgaggaccgatcatcgtctccgtcggtttcaggctcctgcgagagctccgacggcgccgcctgcgccggcgacccctacggcgtcctggaattgggtagcagggacattggtccatacaagcaattcagagcagttgatgccacttcattcgatcagaatgtttttgacaacagcaactcccttcttgacaggagattgaaggccttgctccagaagctctcttcagttgacctagtgggcctttcccatcagcagaagttagcattctggatcaacacctacaattcctgcatgatgaatgcatttcttgagcatggagcacctaccaccccacaaacgctggtggcaatgatgcccaaggcgacaatcaacgtgggtgggcgcgtgctgagcgccatgacgatcgagcacttcatcctaaggctgccctacaatgcaaagcatgtgaacc

SEQ ID NO: 412856 - DNA, 506 bp, Oryza sativa
tcgtgataagcgactcacagaaaatgttgaataccttgttgagctcaaatgattgttttccagtgaaggggcttctgaacatgacaaatttgggacatcttgttcaacttctgaaaggaacgaacttctatccaactgcctctgtgtgtaatacactccaaaggatgaacatttcggtattgatcctctggaagccacggccggatataaacctgaaattgtatgcaacagtggtggtccagtggaatcagtcctaaatgacgagaccgggtttctctgagagccctctgcccctgaattttcaaaagccatgctgaagctcgcgaacgatcacgatctagctgtcaatatggtgtaaacatgcaaggcgccatgttgtgcagaagttctcaaccaagacattcggtgaccttttgaacagctatgtgcttaatgcgtaccatcagaggattgagcgatcccccaattcggtggatgtaattgcctcggatccactggaatagaac

SEQ ID NO: 412857 - DNA, 219 bp, Oryza sativa
tttttagttagttggttgagtggaagcagatcaggaagatgctggagaagctgtgggacgacgtggtggccggtcctcgaccggagaccggcctcgagaagctccgcaaggccgctacaacccgcccccttgtcatcaacaaagatggcgacggcgaggcgagcggagtggcgtacaagcggacgcagtcgatgccgacgaccccgacgacgccggtga

SEQ ID NO: 412858 - DNA, 458 bp, Oryza sativa
ttgtcaaacgtagcagcgtcattcacacacattatcaaaagtgcagagcctgcattcagtgttttggtatcaaggttccttcttggggagacgtttccggttcctgtatatctttctcttcttccaatcattggtggatgtgctcttgctgctgtcacagagctgaactttaacatggttggattcatgggtgccatgatatcaaaccttgcatttgttttccgcaacatcttctcaaagaggggcatgaaggggaagtctgtcagtggcatgaattactatgcctgcctgtcgataatgtcccttgtcatactcacaccattcgctatcgctatggagggccctcaaatgtgggctgctggttggtaaaaggcttttgcggaagttggtcccaatgttgtctggtgggttgctgcaccaagcgctttctaccacttatacaaccaggttgtctttac

SEQ ID NO: 412859 - DNA, 344 bp, Oryza sativa
ttctggaactgcgtcacccaggtggccaaggcgaagctctccatggacccaaccggtgacctctccagcgcgcgcgttagcgagatgaacctcctcaccgccatcgaccgtgaggccgtgttcagctacgccgacgacccgtgcagtgccagctacccggtcatgcagaagctccgcgccgtgcttgttgagcacgcccttacccagcggcgacgccgagcccgaggcctgcgggttctgccagatcaccaagttcgagggggagctccgctctgcgctgacccgggagatcgagggcgcccgcgtcgccgttggcaccgtcccgcccccgttgccaaccggtt

SEQ ID NO: 412860 - DNA, 400 bp, Oryza sativa
ggcaaacagtatcaattccaggatctagtaatttaagtccacagttaaagctagtatcacaattcgcatcgacaacacaccattaatcaacacaaggaaaaaaaagagtaactagagcatcaaatcacctaaaataaacatcttacgacccagatcgacagttgcaatacagtactaggtaataataacacaagggagcacatcctcaatcatcatctacgatggatgacgagagcgagaggaatggcaggcaggtaggtggcttaggcagcaacctcgtcttcctcctcgtcgccgtagtcctcttcctcgtcgtcggctgtcgcgtcctggtactgctggtactcggccaccaggtcgttcatgttgctctcggccttggtgaactccatctcgtcca

SEQ ID NO: 412861 - DNA, 548 bp, Oryza sativa
ttgtctaaacctggccggaatccaacccctgcgacgccgtcatgagggagatcctgcacatccagggggggcaatgcgggaaccagatcggggccaagttctgggaggtgatctgcgacgagcacgggatcgaccacaccggcaagtactcgggcgactccgacctccagctcgagcggatcaacgtctactacaacgaggccagcggcggcaggttcgttccgcgcgccgtgctcatggacctcgagccgggcaccatggactcggtgcgctccggtcccttcggccagattttccgccccgacaacttcgtcttcggccagtccggcgccggcaacaactgggccaaggggcactacaccgagggcgccgagctcatcgactccgtcctcgacgtcgtccgcaaggaggccgagaactgcgactgcctccaaggatttcaagtctgccactctttaagaggaggaactggttctggtatgggtaccctgctcatcttaaagatcatggtggagtacccggacaggatgatgttggcattctcagtt

SEQ ID NO: 412862 - DNA, 545 bp, Oryza sativa
tgttgcaaaaatacaagaagcttttggcatgaggagatgcagcaaatcgctgctgcaacttggtacacttccatgttgcactatggcatggttaagttttgcacaaacagcacaggctagtgaaggaacaaatataaacatggtttatgaggttggggagctatttgagcttggaattcagttgacttatcttctcatactacttggtcttcttggagctggtacattttttgtcattcgtcaagttcttgtccgtagagagcttgatctttctgccaaagagttgcaggaacaagtgagaagtggtgatgcaagtgctactgagtattttgagcttggagcagtcatgctacagagaaaattataccctgctgctatcaaatatctacagcaagcaatccaaaaatgggatagagatgagcaagatcttgcacagatgcaattttttagaagggagttaagatttggggtgcaccctttacacggaaactttgtggctttagtgcatgtttttgcccagaatgatcttgctaccaagtgcatgg

SEQ ID NO: 412863 - DNA, 226 bp, Oryza sativa
tcgttataatcactaatagcagaagcagagaatgacaagcatattgtggtggttcatggaggcatgggaatagatcgatcaatccaattatttcagtccagatttccggacagatttttcgatttgggtatcgccgagcaacatgctgttacgttttctgctggtttggcatgcggaggctttaagcctttctgcataattccatccaacctttttccaacgagca

SEQ ID NO: 412864 - DNA, 446 bp, Oryza sativa; identical to SEQ ID NO: 393072

SEQ ID NO: 412865 - DNA, 358 bp, Oryza sativa
ggaagggtcacccattatgcattcaggagtaccgattgattgttgggtcctgaatttttgctagtatatgcatataaggagatactactccactacaggacaaaggagaggattgacattgactagctaggccacttaaccggctccttactactatcagaagaagctaatttaattaaggggggtaaaagcaaaatgaggggtgggctgggctcattggtcgtcgttgtcctcggggacgaacttgccggttccggggttgatggcggcgaataataagaagaggatgttgaaaaggaggagcggctcgatctcgttgatggggaccccggtctcgagttgagctgggcagcgcgcc

SEQ ID NO: 412866 - DNA, 484 bp, Oryza sativa
tgttagccaagatcaagagatcgatcatatcgtattttgtagtaatttagcagctagctagtgcagctgcaagctattagcgactgcatgctttgatcgatccatctagctaattgttgaatccatctaagcttaatggctctgcagcagagcatggcgatgccgatgatggtagtgtctgaccttggcaccgctcctcggtcatcgccgatggttcagctgcagaggatgaagaagcatctggtggtggtggcggcgttcaagagcagaaccaaggcttcccccaaggtggacaagtcgaacaagaacaagtcgatcgtggaggacggcatcttcggcacctccggcggcattcgggttcaccaaggagaacgagctgttcgtggggagggtggccatgctggggttcgcggcgtccctcctcggcgaggcggtcaccggcaagggcatcctggcgcagctcaacctggagacgggcatcccc

SEQ ID NO: 412867 - DNA, 433 bp, Oryza sativa
aacaaagaagcaagacatgattcatgcgaaacatacagttcaacacaacagctagcaaacaagcacgactaactcattacatttatataataccatgatgatacacgaaggatgcatagaaccggacggaatttctcctgtcctcaaagagatgaataaggcggtaggtgccccttctcccgtaggcatatcagtgtgttgtacaaactttcttttatgggggtgaatgtgaggcccaagtctctcagcctttgattagagaacttgaaaggttggaccatctgcttgctgtcttcacacttgttacaggtgattggatactgtggaaagagttctctgatcatctgaataagctcggaccggtgaagcacactagcaatgcagagataacgcccatgcgccttggggtcttcatacaccagtgcatgtgcac

SEQ ID NO: 412868 - DNA, 452 bp, Oryza sativa
ctctagctagctgtcgatgatggctaacgctgaagggggcaaaatggtatgtgtgacaggagcaggaggcttcattgggtcgtgggtggagaaggagctcctgatccgtggttatgccgtgagaggaactgcaagagatccatctagttaaaagaactcccatttgcaaaaacttgaaggagccaaagagaggctcagtctgaactatgcagatgtgatggactttgatagtctttctgttgcatttaatggatgtgatggtgtattccatgttgcctcacctgtatccgttgatccgcgacttgtgcccgttgctgttgaaggaactaagaccgtgatcaacgctgcagcagacatgggcgtacgacgcgtggtgttcaacataaaccttcggtgctgcacacatggacccaaataggagccatgatacaagtcgtggatgagagcttgct

SEQ ID NO: 412869 - DNA, 351 bp, Oryza sativa
ttttcctccggctcttcttcagtatcgaatgctctcttctcctcgtgcccaccaccaccaccgtagcaatggcgggcaacgggccgatcaacaaggaggacccgctcaactggggcgcggcggcggccgagatggccggcagccacctcgacgaggtgaagcgcatggtggcgcagttccgcgagccgctggtcaagatccagggcgccaccctccgcgtcggccaggtggccgccgtcgcccaggccaaggacgccgccggcgtcgccgtcgagctcgacgaggaggcccgcccccgcgtcaaggccagcagcgagtggatccttaactgcatcgcccacgggggcgaca

SEQ ID NO: 412870 - DNA, 422 bp, Oryza sativa
ctaagttccattccacaggtaaattcatggttcagattttaggacttcagatgagaaactactagatacacatccatcagatggatggatgaaatcaacagtcgagacaacttactagcaaaatatccagttctagaacacagaaacagagtacttcactaacaatctactactacatgtgagtagtattagcaccattcacgacaccaaataagagttcagcagcaaaagcaggaagtagtcacagatgaaacaccagagcccctcccagagatgagaaagcctaagccctctcaccacggatcctcctagccagctgaatgtccttgggcatgatggtcacacgcttggcatggatggcgcacaggttggtgttctcgaagagacccaccaggtacgcctcggcagcttcctgaagggca

SEQ ID NO: 412871 - DNA, 465 bp, Oryza sativa
tgttgtcttcgtgaaatccgcaagtaccagaagagcactgagctgctcataaggaagcttccattccagaggcttgttagggagattgcccaggattttaagactgatcttcgtttccagagccatgcggtgcttgcccttcaggaagctgccgaggcgtacctggtgggtctcttcgaggacaccaacctgtgcgccatccatgccaagcgtgtgaccatcatgcccaaggacattcagctggctaggaggatccgtggtgagagggcttaggctttctcatctctgggaggggctctggtgtttcatctgtgactacttcctgcttttgctgctgaactcttatttggggtcgtgaatggtgctaatactactcacatgtagtagtagattgctagtgaaggactctgtttctgtgttccagaactggatattatgctagtaagttgtttcgactggtgattt

SEQ ID NO: 412872 - DNA, 210 bp, Oryza sativa
ttatgcgcagagagacatatctgtcggacagggaattccatactgtattcggtataacgaaggaagagtactaccagcagccagggaggaaacaagaactacagaaaaggaagcatgatcttttctgaagcatgaaccactttcgcactacaaaggctgcatgtttactagtacagctagattggcgacatggcacgtgagaggccatgt

SEQ ID NO: 412873 - DNA, 478 bp, Oryza sativa
tcttccccctcaaaaccctaacgagcggcgagccgcctctctcgagcgcttgcctccctcttcctcctcccctcccctcgccggcccccccccttgccccaacctccgcgcgcgccatcgcggcgccgccccgaggaggacgacccccctagccttccagaaccttctagaacgcccggatcgccctatcgactaccaccgacgcatcgggccctgccgccgccgccgtggggtatccatggagaagctccgcgtccaccgatgcggcgggggcgcggtctcctggaccccgtcacccatcgtcgcgctcgtcggctgcccctgcaaggcccaggtcgccgccgaacgcgccgacggctccctcgagcattggctcggctcccccggctgcgtggggcggcaccaccagctcaccattcagggggatgccgagtcgaggggcacctcgctggtgtaggcgcggagcggtgccaatggg

SEQ ID NO: 412874 - DNA, 394 bp, Oryza sativa
acattaaaacaaatcacatagtactttcattatttcaaacgaacataatgatacataaacacatgaaagaaattaagggagatgttgcaaacatatccgcaagaaacacgacacaatgtgcgtttgcactactggacatgaacacagcttgcctcttaatcacttcttaattaatccttctgcagttcttcctgatctccccgtttgatcccgtcaacggtgtgatgtcccccatcttgatcatgcccgtcacaaaatccgcaaagaatgtgctctggctacttatgtaagactgaacaagagcatcagtggctccgccattgaagagctcctgatcagaatgcaggagccccttcttgacgacgagggtcttgaagtagttgttctcgaacac

SEQ ID NO: 412875 - DNA, 495 bp, Oryza sativa
ccaccatcatattttgctggctcatgtgacatacatggtacagtaactgcattttgtttctacttaaaaaagttttcatcagtccatcaaaattcaccagcttctgagggcattaaataaacatccacataaaggtttaaacaaatcaggggagctgcatttcgtatacagagatgagctccatcagtttgcattatttctgtgaaagaaatcaggaaactagtgcaggatcgtcattgacagtgtcctaagccgaagctgccagtagctccctttcggctcgctcacggattctcctttccagttctggcctgaagtgcctgataagtccctgcacaggccatgcagcagcatccccaagggcacaaatagtatgcccttcaatctgcttagtgacctcctgaagcatatcaatctcctcaagcttcgcgttacctactttgagcctcttcatgaacattcacagccaccctgttccttccttgcagtgtgcac

SEQ ID NO: 412876 - DNA, 257 bp, Oryza sativa
  unsure (1)..(257): unsure at all n locations
tgttgttccacccagccaaccagacangcttcgggtttttttatgcttgggcccgcctttccccccggctgcctatcgtatgagcagatatggaccgctgtatgctcgaaagacccccggcctcgcgcggccgactggcggatcccgggccccgacaattcacggacggtcacgcctcgtgacgctcccaggcttaaagagatgcttgcgcgcttgctacccgttccaagggcagaggtgttaccacaagtacgacg

SEQ ID NO: 412877 - DNA, 545 bp, Oryza sativa
agctgcggagtcctctagtagtgggcgccctctttttttttttttggaaggttcacccatcatgcattcaggagtaccgattgattgttgtgtcctgaatttttgctagtatatgcatataagtagatactactccactacagtacagaggagaggattgacattgactagctagtccacttaaccgtctccttactactatcagaagaagctaatttaattaagtggagtaaaagcaaaatgaggggtgggctgggctcattggtcgtcgttgtcgtaggtgacgaacttgccggttccggggttgatggcggcgaagaagaagaagaggatgttgaagaggaggagcggctcgatcttgttgatggggacgccggtctcgatgttgagctgcgccagcgcgcccttcccggtgatgatctcgccgatgagggaaaaggcgatccccagctgcgcgaggcgacccacgaagagctcgttcgccttggtgaacccgaacaggggccacccttcgttagccccagcgccgcccggaacccctttcc

SEQ ID NO: 412878 - DNA, 413 bp, Oryza sativa
ataattaatacattaatattttaatttaaattttcaaatgttaaatttaagtacattaaaattggatatgaggaccaaaaaaaaaaaaaaactttttctatttaaaaaaaaacaaaagcctgacacgatttggtccaaaacaaaaaaatggtggaaaaaaaagaaaatcatctgtcccaaagtacctatccacaaactgaccaatcccagggatgacaaggaaatcatcattcataccaaactcgattactgatgtcacgaacttcactctgggaaatctctagctgaccacatgcacttcttggggagctgatataagaatcacaaaaaggataagggaatcctgaacaccctatttcaagagtagaaacctaggttgaacagctgaatatcctggtcccagtttgggatcc

SEQ ID NO: 412879 - DNA, 515 bp, Oryza sativa
  unsure (1)..(515): unsure at all n locations
aaaaacataaaggaatttgctccgtttatgtcattaggcaagatcggcctgtaatgttcaaccgatacacagtttctggtaatgaatacatcaatatgggcatttgaatttccaaatgtaaaatttaagtttctcaaaaatggagatgatgcccacgtcgtcgccaggactttgtctatttaaatgctcacaaaagcctgacacgatttttctcatcacaaaagaatggtgttgatgactgataatcatctgtcccaaagtacctatccccaaactcacccatcccagggatgacgcggaaatcatcattcagaccaaactcgatttctgatgtcacgatcttcactcttggaaatctcttgctgaccacatgcactccttggggagctgatataagattcagaaaaataatatttgtttcctgtacaccctttttcaagagtagagatatagcttgaacagctgaatttnctgtcccagtatgggatccaacaacagcacatgcctgttgcata

SEQ ID NO: 412880 - DNA, 526 bp, Oryza sativa
gaaacaaggtgaaaggtcgcgtgatttgctattaagtgcaaaatttcaatcagtttcaggcggccacaagtgcttatcatgttacaaggtcctttgaaactcccagcctgaatgactgagacaggttatcaacaggaaatctacgagtatttgattcgaattcgagcatatcaaattcgcacaatgagaaaccaggtgatccattctccagtctaattgctaaattgacataccatgcagcgccggattcgctcagatctcactgatgtactctaaaagagattcgacctcttgcctcagggcagcaactttctgctgctgggcagcaatcctgttctccacatcttgccctcgcaacttcttttcaaagctgtcaaccacagtggaatgccttgtcatgagcttatcctgcaactctctttccttggcaaccaattcctctacctttggccatatctggtaagactgagaggatgacttgcaggatgtaacaatggctcaactcttttgctattccttaactggc

SEQ ID NO: 412881 - DNA, 371 bp, Oryza sativa
cattccgatagatagcaacaagcagttcaaacaccataaccaaagcgaactcaattcatggtaacatcacggacgaagaacacctaacactggatggatggatagagggcttctcgactcgagagagccactggacacgataacgactcgactcgatgataagatgattctgacacggatagctaaggataactggccacgatgggccccaccaatcagttcctccagttcccgccggagtcgccgccgtagccgccgccacggctgccaccgtagccgccgccgccgccgccacggtcgccgtcgtagccgccgccgccaccgtagccgccctcacggcgcccgtagccgccgccgccacctccttcgta

SEQ ID NO: 412882 - DNA, 497 bp, Oryza sativa
aatctaacatacgcaaactgatattatcacaatgttagccgatgacaatggaaagagtaatctaggtacaagcggatcattgacggtggagacaagacattggctgcaccacaacacccaccagtggcgccaacaaggagcgctatccgttataggacgagagaaaaagtaaaacatcacgatgtgaagtgaaactgaataattctagtagacgatgatgatgatggataggctccttaggacgcccgccgcccttagcgtcttgctgctcccatcttgtccactggaaggctcactcgtcatcgtcttcatcctcttcgctgccctcgtcgtcatcctcatcattgacctcggacttggacttgtcagattcctcctcgtcgtcctcctcttcctccttggcgggtgccttcttggcagtgctctcgcccttgttgtaggcagcaatggccttgttgtactcggccttgagcttgttggccttggctacataggga

SEQ ID NO: 412883 - DNA, 497 bp, Oryza sativa
atgttaagatgatataataagatgtcataggcttgggaagccctacaaaataccaccctgggagctgcacagctctccttatgcacgtagtacatatataaccgatgttatatacatggcagcttttagaacatatatgtacttcaaccaagtgatagtgggcctatgctacgagttacatgaccgtcagtgtgcattgcttgccgccatagaactctaatagaacaacatcgtccaaagctgaacttacagtctggcatgccaggaatcaggagactggagggaccacctcgacaccgagaatcaccgatgccgttccaaagttcagatgtgcttcatcagagtggacgaaatgttggtttctggaactctcataaactgggttctccatcagaagatcccaggtcacctggttgaccgaatagttatgcgaggttagcgacgagcatacaccatatcagcttggccccctacttgctgcttgctgaggctggggc

SEQ ID NO: 412884 - DNA, 344 bp, Oryza sativa
aaagcagaggtcgatgatattaagaagcctggctcgcatgaggagatggagcaggagtacatgatgagatcaccatgatgatagatgatccatccaagctagctagggatccatccaacattgatcgacacacgcacacactgacaacgacgacgacagttttatttaggcgtcagagcaaaaggcaaggcctgcctacatataagctgggtactaatgcaagcaaattaaggcctcgatcaaagctctgatcgacagtagcagcatccatacgataaatcgtaatgcagccgggcgacgacaacgatagattcagttgcaggagcaggaggagcagccgatgc

SEQ ID NO: 412885 - DNA, 211 bp, Oryza sativa
cattccgatagatagcaacaagcagttcaaacaccataaccaaagcgaactcaattcatggtaacatcacggacgaagaacacctaacactggatggatggatagagggcttctcgactcgagagagccactggacacgataacgactcgactcgatgataagatgattctggccacggatagctaaggataactggccacgatgggcccc

SEQ ID NO: 412886 - DNA, 421 bp, Oryza sativa
aaccaaaacataggaggtttcatttcttcttctcaaagtagtgtagcatctttccttctttcaccattacataagcttaagcaataacagataacaaatcctcctcctcctctaggtaaaatattcaaacacaatacccttataagtacttattattaagaaagtagcgtgcatgggcataaatggcagcggggggcaggttaagaatcacaatgctgagcagcgaggaaacaaaacaccataatgggacagagcaaaagcctccgaaagggagcttttaggcagaaggcttctcccacttgaggggcttcaccacctcccaggtgaagtctgggtcgtcccttccgaagtgaccgtaagccgccgtcttgaggtagcgtccgttgccgcctttcttgaggtcaaggttgatgatgatcat

SEQ ID NO: 412887 - DNA, 526 bp, Oryza sativa
gtcaataacaataacaatgtggcttcttaactacacataagaatgttgcctgtcaagcatcaaacatgtacagcaccaaacatatctgtcttgggagtaatatgttatatacagcaacaccagactttacacaccaggcacgacctttcttgcaccaacaaacacactacgcacttgggagggtgaaagaagcaaagcaaccactgatgaacactttcacgtttgctcgttgtgaatcgaaaatttctttaggccccaaagcacccgatgagtttcttgggagcatggccggtggcacggtacttggctgccatctcctcggcctttaggacttcctcgccgcgctttgcctcgaccattgctctcttctcctcagcttccttgtggacgatcgcgactttgttcttcatcttctctgcatattcagccttcttcttttccagttgctcctcaatcttcttcagttgagcttctatgtttgctttctttgggttctcccaggaaagaatagcagatagcttcttcg

SEQ ID NO: 412888 - DNA, 445 bp, Oryza sativa
accatataacggacgattgctgattactattactggttgcaatgtaacacttcggatacaatagtacattacagagctagctaaatgcgaagccacaataccgtcagcgcaagacgatcataaataaagcttacacaacatatccaacatgcaaaccattcggactgaccagagatgagggttcttgaagctgccgcggtgtgccatgcatcacaaatgccgaacaactagattgtagcagccaacatgaaaggaaaaggcatggataatgcagcaaagatggatgatgaagaccgcagattgtgacgcttcgttcaccaaccatatgaaacccctaaattttgtcaagtttctccgccttcaccaccggattagccttggcaatagcatccctagcagcggtccgatagtcaaactggcagacatgcttatcggaatagcggtg

SEQ ID NO: 412889 - DNA, 248 bp, Oryza sativa
gaaccaaactccaataggagggggaaagcttaattggcacaaagaaaaaaagggatacacaactggggactgaaaatacaaggctgtgttcagataaaaacagtggtacaacaaacttgaaaaggaacgtaaactccacaataattactaacaaagcaggcagcggaaaacagccgcgcccatcaaaaacaggttggtctggattggcattttgacagggataaaagctgatgcaggttacaacctgc

SEQ ID NO: 412890 - DNA, 407 bp, Oryza sativa
atgaacataatatattgtaatgattttattttgctacaatgccgtgttttttattcaccacgaatgagattaaatccgtttgctcaggagcagcaaatccagcctaacccaaaaaactttgcatgaaccaccacaaaagaaacaaaaaggactggaagtgccaccttccttaagctacaaatcgatcttttaatacattaaactagagctcccaagtaagtttcaggttttctcaagaatatagccagtggaataacagcggtatggctaccgcaaagtgcctaatctgcacgagattggccggcacgggatgagaggatgatgcccacatgagaccatacagggcaagcgccttctgcgaaaatgaggatgaggatcatgcccacttaaagctctggttgctgggc

SEQ ID NO: 412891 - DNA, 517 bp, Oryza sativa
aagctgaagacattgtattataggatcaaaacatttctattaccacaactttttaaggatggaattgagtagcaatactttcaccccaaaatacagtttagcgacaatatcttagaaaagccgcttgctttgccgccatggctggcaagctgagcagagcagctaacacaaagaacacgagatcactataaaccaaacggcaacgaacgaagaaaatacagggtcttttttgtctgaagatacacgaagcggttcgttttcttttatttttagtctcctctcctcctcgatgatgggtgtatggcaatggcaatggcgatgggatcttggcttagttgatgggaaggggctcgccgttccactccttgaggcagtcgagcatggggtcgatgagcttgccctggctgatgccgaggaacaccttgttgcactcctcgccgggggacttgagcttctcgccggtgaggaatacgcagccgagctcctcgcggacgaagcggtagagcgggaacgaccg

SEQ ID NO: 412892 - DNA, 452 bp, Oryza sativa
aacgactcgcacgagacggtgcgaacttctattgatagagcaggaaaaaattacaagattacaaccctggagggttataaccaggaaaaaggaaaaaaaataccaccacccacacggtgacatcgccaacacactagcccaggagaaggctaacaccggaccggccgccgttaagcgtgaccgaccgccactagaccaacaaagggacacagacgagatcgcctgaggggtgagacagcacaacaacgcccttaggaggggggataaccatcgttgtcggtccgaccaaggtcgaactgggtttttacccgccactcaccacctgggaattcacggctgacgcaccgatgctccaccaccacacaagctttgccgacatgtgggacccctacaccggcgtcccccgccggacagtctttccgcgccgaagaccgtgccacacccaccagcag

SEQ ID NO: 412893 - DNA, 472 bp, Oryza sativa
aatatcagcgaactgctatcacaaagacgatattattgatgtccaaggagtttcacacgggcacaggatagctatcacacgatactagacggcaacaagtaatggtcttgccaaacaaacatccacctttattatctaatagaatggatgcagtataaagaggtcaacgaaggctagtcccagtgtcccacgaagaactatgcggtgattgtcgtctttgcagaactggcaattgctccagcctcggtcagcagaggcaccagcttcccttcattgttcaatgccaaagtatcatcacagccaccaatatgcttcccattgatgaagacatttggaacagtcctttgtccagtccattcagcaagtgccgactgcagctcagatccatcactctccccatccaactcaatggccttgaaagttgctccaagctgctcgaacaacttcttcacacggacgcaaaaaggacagt

SEQ ID NO: 412894 - DNA, 499 bp, Oryza sativa
aatgaacacctgaattcttaatttacatctcgctccagatgacctcagcaggtcgattcttattgtgacacactgatagacacaaacacttgacactaaggagtacaaatataaccgcagaaactacaaaccaacagcacacatatcggaggtacacattgcaaacaacgtccacacgcatagtctacaatatcacattcagagaccagctgcacctgcagctccatcgacgaccatcggacactgctcagagggtaacacctgggacgtgaacccactccagctgcagcacgatcaggccactgtcaaccttgctcagcttcagagtgatgtcttgaacgaccttgccatttttccatgaaacgtggctctcggcgccaagatagttcacaccaactgggtagatcgtcttgatcctggccccgtcagagacatgctttagatccagcttagcagcattcgagatgtcagtcacgttgaactcagctacgcccatgct

SEQ ID NO: 412895 - DNA, 502 bp, Oryza sativa
atcagagccagtttttcagtagatatcatttcaaagttctgtgttgtgagcaaattcttagacaggtcagtccttcatattggatgcctgagctcaagaacagctctcgtaacaggcagaaacctgagggtcaccttccttacgtgtgaaaactgcgatctatcaaacacctatatacaatatgatttacttacatgataaactttcaaacaacatcctactttcagttgtgggggcacagtgtcagcaacgcgctggccgcttgtacgttgggggtaaagatgggcagttctcattcattttggcatacggttctattgtgttgtactccggtagctccatcctgtactcccccaggatctggcagaaggggagcttgtcagattctgtgttgcaccagcttggaagtctggcctggttatcttcgaaaatcttgagcatgtacgcgtcgcgtatagtgaactcggtcacctgaatcgactctgcaaaaggcgtgaatatt

SEQ ID NO: 412896 - DNA, 440 bp, Oryza sativa
agaaatgcacactcccttcgcaggccttatcctgttcaggttcaaagggactttctcagcccaattcacaacaatccaggccaagaggccttcagatcgttgagaatacaggcacccctggggcaactttcattactaacaacccacagtgatgcaaagagtagaaaatatgacacggaaggatcacatatagagtttaattttattacaagccacgacagaattaacaaattgagctaagcaacaccagttttattcaaggcacttatactggttaccacctcctaacataggatggtgaggagtgctgctgataaacgctccacccggagtagatggacaccaagacgatctgcacggagattgtattctgagttccgagaaggcgagaacatgttattgtgatataaaagttagtgcctttgcagtaatgcacatac

SEQ ID NO: 412897 - DNA, 469 bp, Oryza sativa
aagatatcaaacataaattatttaccttctcgatccaggatccaagaggtagaaggatatacagtgcatgctatatggtacatgccttcatgctgaagctgactagaagtgttaatacaatgacaatttattcacacagataccgtcacaatttggtggtagatatatacatgaatgatactgttcagtccaggctggggccgccgctcatggactcagtgcttgggcttcggcttttttactatcatcacggggcaatgcgcatgatgagaacagtagtcactcacgcttccaagaacagctcgtttaattgctccatagccatggcttccgacaaccaacatttccgcctgatgcctctcaacagactcacaaagaacattcctggcatccccttccagcacttcaaacagagcatcactcacctgggcgcagagctccctggccttctcgatgacgcgcatggagc

SEQ ID NO: 412898 - DNA, 464 bp, Oryza sativa
aaagtcaattctatgctatgctgattatcgatccgtacaaacaaatagcaaatacaatgtcctaaaacctttataaaatctataaattaatcatgggcttgatcttgagacatgtaaattctatatttgttctagctcgtctgtttgcaaatttccatatatttgggagttcagtggtcatctgtacaattattgtgttctcaatcattggccgttgtttctactaactcactgatccttttttccgccaatattgcctgtgcctcccactttgttctcatgataatgaaaaatagtatggccatctggagtaatgttcctgtcaacatgcccatccatatccccaatgcaccaagctttagcttgaagccaaagagaaccccaaatgggatccctaccaagtagtagcaaccgatgttcacaaatgccaccagaatttgcaacctgccctactgcccacctga

SEQ ID NO: 412899 - DNA, 384 bp, Oryza sativa
aaatactggacaagagcatgtttgacgcctcgcattatcgcatatagcggatgaaaaaacgtcaggccagcctgcgcgacaacgtctagttacagataagagcagaactgcaagtcaaatacactcttttctctccatagtagagtttgagcagcgagcgggcaaacataaattattcaattattaaatgatatgatcactcttgatcatctcaacactataggaacaaaacttcgctaccgcgattttactattttagttgtccacaacttcaatgagggttggttcgtagtcagcaggagcctcgaaaccatggaagttcattacggttgcagcaacattggcgagcccaggggtctgaatgtcagaccggaatttcacacc

SEQ ID NO: 412900 - DNA, 390 bp, Oryza sativa
gacctgcagcagaaacgcagtattggcaagaaaacgagaacagttgatacatacacgtttattcggggagagatgtaaaaaggctatcaaacaggaggccataaagaaagttcatgggtagcctcaaaagcattctagaatggctcttgaaaagtttatgtgatgacggtgggagcagatcggccagtgtactcttgcatctttgacagcttcagtgcaacatcaaccagaggagcaagggcatcctgcgaatccctgccggtcttggaagaatccttctcatactgctcgatgtagacacggatagtagcaccaacagagccagttccagagaggcggaacaccagccgggaaccatctccgaagaggtaccggacaccctgatgcttg

SEQ ID NO: 412901 - DNA, 445 bp, Oryza sativa
ggagaaaaatatatgatgttcaagtagatggtcatcgtgcttattcaactatcaacatgtgcacaggtatcttacaatataaataattgtacaccaaaaagaatgccttcatcgagcaccggaggtcaaacaggaagctacaaaaagcagcagcagtgtcgatgcagaaggaaaatatgatgattctgaaacgtaattcacatctacaacctcacgcgaagcaaaataaattgccccaactcgcttcgaatatctggtgatattttattgtttacacgaatgtgatcctcaatttacagcacttcacctagcttcatcttctaggttgcggaatccggctgtgaggtcatcatacaatttctggaattttgcgactaggacatcttcaccctctgcagggtcctcaaacttttgagatactaggcgataaaatagatcacccata

SEQ ID NO: 412902 - DNA, 529 bp, Oryza sativa
atagagtaaatccaacatttcaaaaaagatgaaaaggggaagaatgcccaaacttacaccatggtgctaaggagtcatccatatacataagatttctactgttcatacatattaggcgttggaaggatcacacaacttaaaaagatcaaagtcgcatatagagatgtagataactgatcatgactttcataactactaagatgtactactacaaaagtgatagcttaataaacttctcagcaagacttgtcaatccaaatatgtgaaaccttactcaagatctccttcataatcaacgggcagctttctaccagatgcttaaatccatcgctttctatgactggcccaagcatgtttggagatgccacaaacccaatgcaagcctgtctcagctgcgagcagtgatgttgttctgctaaaacaagagtggttgccactgtttccacatcaatggtttcgctgagccgcctctcacaaatcagcctcagcctgtccactccgtaccgatccgcagcaactagcaagtgct

SEQ ID NO: 412903 - DNA, 528 bp, Oryza sativa
gcacacacatatatattattatttatatacactactaagtagaaaagaatgccacagacacggtaataaaaatggcagtagatacataagaaataatttaattacactagctagcagtggcacatctgaaaaaacaacgtgaaataaaagggaaaaaaagcaagcagaaagctagctcatcactttattccagaaacggtacagtgtagtgactcgctcgctcctccctctggcgaaataatgtcgtcaatgcctcaatcgtgcagcagcaagtgctcggtctccggtgatcgccgtcactggtcggtcgctggcggtatgtgcggcggcttgtgcttcttcggaggtgcttcaggttttggctcaggcttaggcttaggtttcggttcaggctttggctctgggtatggtttaggctccggttttggttcgggcttaggctctggtttaggttcaggcttcggctctggttttggctccggttgtggcttgggctctggctttggttctgggtgtggtttgggttct

SEQ ID NO: 412904 - DNA, 525 bp, Oryza sativa
gggacttgaatatgtcatccttccataatcccttatcttttggaaatataggcatacgagtatgtgatatgtttctgacatagggtcatttctgctctggattcgccattgttacgaatagcggaatcatcaacgaaatcacaacgccaacgttgagccctattccaaatgtatcggcaactattccaaatgttgtggaaaggagcagcttttgcagtacagcacattaataaatacgaaaataatgtccaggtaaaaaaaccagccgaggaaaactgcccagtccgtactgagtccaaaccttgctcttgggaaaaaaagcaaattatggcaccagcctttgtggatcgcgagggaaaagtgatgtcttcctgatgttgtttagggcgcagaacagcattaccaccctctccaggccgacaccaaaaccaccatgaggaggtgcaccatagctgaacgattcgatatatgatgaaatagtactcgcatcaattccacactctgttgcacgtttcgtcaatagct

SEQ ID NO: 412905 - DNA, 453 bp, Oryza sativa
gaaaatggggaattacatattgcgcacctgcaaatttcaccgaaaaaaggggggcaaattacagttgaaaattgattccctagcgggagattccaatgttgggagcttgacaaaacatggcatggctgattactgatactgatagtagatcgatccaccgatcaagagggaaaagaaaagaaaaacaacctttaaaagagatcccgaccttggttttccaacccaaaatcctccaccaaaaaaattgaaagcaaaattagcttccaacaagaaagagtaacaataaacatcatccttatttctcctttaaacgatcaaatttaacttaattttaaggcacttttttattaaacctttcctcctaaccaggtaggtagtctgctttttttaccttagttgttgatctgcgagattttttttgctgttttccctttgttttttccctggtgagtg

SEQ ID NO: 412906 - DNA, 431 bp, Oryza sativa
aatagtaatagactctttgatggagtattacaacatgcagcagtggcattaatacgccagtacattaattaagttacacatatgcaggctccattttggtttcttttaatttatcgtattacagaatttctgtagccttgcagatgatcacttggatatcatgtactagtaattaacaataggatgcatacaaaagatggcccaacgacaacagaagatgcgtgcatctgacattgcctggccttatttgttggtagtactccaattaattaacaagagatgatgcattcttgtgccttagtttcttcacatgcttggattcacgttgagcctatttgcaatcttcacccccaacgacttatcacactgaatgaagtaaatgagttaattacatagttagtgcaaattaataactttttttgccggaatta

SEQ ID NO: 412907 - DNA, 382 bp, Oryza sativa
actgaaaggcatcgttcatatatatgaattcataaacccaggcgcttttacttattcaaagatggataacataaacttatcctcgtttgcgcgtgcaaacttattcttagggacgtatatgacggttacatccacacatgcatagatcatacaaatcccaagatcatcaaagatcgatcgatcagccgtgcgcgcgcgcgcgcgttcgattatgggcagaaaacgacctggtagttggggccggccgggcaagtgtaggtgctggaggcgtcaaccttggggtagctgaaggcgtccgggcacagacgtttgaagaactccaagtagttggtcgggccgaatttgttggccgacgatccggtgcaagaaaacctgtcctgcc

SEQ ID NO: 412908 - DNA, 458 bp, Oryza sativa
cagaaaacacatctataagtccgtaaataatttgctcgtaagtacaaatggccaacaatatcaccccttcgtcgacttgggcatcgtgtaactgctggatggatgcaggtgagactgaaaaaaaaactgtacctaagcacctcccttgccttcccccaccatgtttcccggttcatttatcgctaagggtggatggttaattttgtgaaggtggtagcaaacaccagatttcttaactggtgcttttcgtggcatttagtctgatgattctgagccatagtcaagcatttctttgatgtttaacttgattgaaggccccattgatgagcataagtatgccgttttccagtatatcccctttgcaccagatggtttgttcctttcgacagagcgaacaacagccatgaagtttgcaataaggttttttttaggaaaatcaaccttcccaagggaatgtg

SEQ ID NO: 412909 - DNA, 477 bp, Oryza sativa
ctgaaatgtagcaagagttcattagcctgaaagtgggtggaaagtacagatttatatagtattcctgaatgaaaaatggctgttggaaaatggaaacccaaaatgaaattcataattgatacctattttgactatctggctggactattgaccctcgcctgtatccactcaaattttagaaagagagtaatggtagagctatctgtaaaacaatctaacaaaaatgatcgcatgtaaaatctgcttgaaattaacaatacaagcaagggtgcagagcacttcttccacaccccatgtgttgcctactctgtatctcttacccgagcagaagtgctattgttgaatctttaggactggaaaggcaataacatcccttatactcgccgagttggtcaaaagcattactagtcggtcgattccaaggcccattccggaagcaggtggcattccgtactctagggaagtcaggaagtcttc

SEQ ID NO: 412910 - DNA, 412 bp, Oryza sativa
agatgaatgaatatgttcatttttcatgttttgggacagaaatgatgagattctgccttttacggatacatacatgctattttgcacgccatgagaccgatctataattaatgcagcctctccacaggctacatgacgaacattgcattactcgctataataatcagtcaggtggaactgctagagtagagcgcaaaatatgggcaccagggatgcccttgaagtctcccaaagggatggctaaccacatgtagtgacaaatgccggcattcctggtgagcaaaacacggggacgatccctttgggtctaaatttcagagcagttggcaaggggcctggggacgaggacaacctcacaaatgttcatcttatggctgaacttgcaatcaagattggatgctccggtgtcatc

SEQ ID NO: 412911 - DNA, 345 bp, Oryza sativa
gcaaaccccaacttttttcaagttttgaattctgggggggtaatatcaaattcatcacagaattgcacaatttgggcaagcattgggacacttagcgaaggaaaaagagagtactttacaagggggggtgggccattaacgaacccggggtgaacttgggggagaaaacccaagcgttgttggcaacagggttctggaagggggccgaccaggttttccaaggggcccttgccgggaacaatggcctggacaaaaaaaccgaacatggaaaacatggggaggcggccaatcttgatcccctggaccttgagcccggcgaaagggacggggttttccggaaggccc

SEQ ID NO: 412912 - DNA, 454 bp, Oryza sativa
atctcaagctggtattggtattatcacatcaaaggtaattaaacgctgaaagtagggaaacacacggcagtatttacacatggaagatgtttacacacaaacacacttctttgggttgtcgctagcccttgataggagccagcaggctagctgacacgtaccggtctctggtagtactaacagagacagcaagctactaggaacagagtaacaagataagatagcaacatactagataattaattacgtattagataaccacaaggaccagcaaacatggcgtgacagagagatcgaccagcctccgatcaatgggattattcagttcagcgatggctgctcctggtctcgtcgctgtacagccagtcgtagacggtgggggagttgggctgggggcggtcgaagaggttggcgcccaggctcttggcggccaggttgcttcccggtggaacac

SEQ ID NO: 412913 - DNA, 428 bp, Oryza sativa
aactaaaaaggaacaaaattattgcctgtggctgttgcatgattcagaaggacaacaagcttattgagtatgctctgcttctcatacacaagaaaaattcacagaccaagttttgctgctcttcaaatctaagggcagtccaaattatactccaatttccaaccaagcatgcaacaactggggaaatttggagcaaaaacaaggaactaaaatcttttctgccgatgaatagcttccgaaaggtgtagatttcacttcttcaacaaggttgcactgcattgggccattatctttgaggctcttgtgattgcatcagtcatattgaagttttccacaacagttttgaatggagtagagcttaattgttgctttaccggaggctttacttcagaggaaatagtgcacggcttcctttcatctacatgcac

SEQ ID NO: 412914 - DNA, 374 bp, Oryza sativa
gaaataaatggatgaattcatcacagaagagagtttagaaacaacgggtctgaactttcatcgatccatatagtaggttacataagctcaaattctcagatttaacgctgattttgttaagctctttttcctcgtaacctacttcgaatgcgaagtcaagtcctgttcgtagtcccctgggaccaaagcaaataagttactcgtgcgggggagctcgagcagagttttggcaagcaccagctccaacactaacacctacaggtcaatgactcgtgatagcttctggatgcggttcaccaggaagtccccttgcttgatggttgcctggtagaaagcatttttggcatcaggccggttcgtttccaggacgcaag

SEQ ID NO: 412915 - DNA, 386 bp, Oryza sativa
aaccaaaacataggagggttcatttcttcttctcaaagtaggggaacatctttccttttttcacccttacataagcttaagcaataacagataacaaatcctcctcctcctttaggtaaaatttttaaacccaatacccttataaggacttattattaggaaaggagcgtgcatgggcataaatggcaacggggggcaggttaagaatcacaatgctgagcagcgggggaacaaaaccccctaatgggacagagcaaaagcctccgaaagggagcttttaggcagaagggttctcccacttgggggggtttaccaccttccaggtgaagtctgggtcgtcccttcccaagtgaccgttagccgccgttttgaggtagcgtcgttgc

SEQ ID NO: 412916 - DNA, 389 bp, Oryza sativa
acttctatgccttcagcaattggacacaaatatggtggacacacttttacccttacacaacccgtttgttccctgcacactctacagtagaagtacataaccagatgcgctatggtagtgggacttgtgttggtcccccttgccctaccccttatcttacctgagggctttggtttggagggaattgaagagaattggaagggattgagcgagaataattccacaccataatagatatagaataaatcctgtccaatccctcttttatggggattaaccgaataaggcctaaggcagaggcggcgagtgccctgtattgctgtgtattccatttcgagcggctctacgctaccaggtccataatcgatcacggtggactataatatggt

SEQ ID NO: 412917 - DNA, 372 bp, Oryza sativa
aacgcaaaagccacggcttttggaagcccagcaagaactttatataaaggtgatcactaataacaatgatgataaaaccacatgtggaaaggaggacgatgatccacaggatgggacaagtaccgtaggtacggccattattggaggattacacaagagcacccaaacgcacttacccaaaagacgaagaaaaaggagctaatttaaatggcagatgagcaatgtagtagtagtggtagcatgcaaccaaattgaaatggaatgagaattttttttggcgtgattttcttttttttctctttccttttttttttacttctcccagcacaaatgcaatttaccagatcgtccgatcaatggagcatccggagc

SEQ ID NO: 412918 - DNA, 498 bp, Oryza sativa
ttttgttttttttttttttttttttttttttttttttttttttttttttttttttttttttttttttttttgggagaaaaggggaaaagggaaagggaaaactttttacaatttccaagccaagctgggccatggccaaaaccccagggggaccggaaaaagggtgggcatgggccttggaaaacccaaagggacatgttttttatgccccgggaaagcaccggggtttattcataaaattcccccctccaggggggcccggaccctgttttaggggcaaaaaatgggacccccggaggggtctgttttaagccgatgattcaaaacccggaccaagatctatggccctttaggggggggggtcccccaggggcttgaaaacccggagccgcttgaagttttccaacgccctttcccacaccttggccttgccccgattattgggccccccgggttccttcaccttgcggggggggggggggaagaaaaagggaaaaa

SEQ ID NO: 412919 - DNA, 514 bp, Oryza sativa
aaactacatgacttacatggcaaaatcggcatctccatcaagtatggaaatgctagtgtttgtttgctgtctttgtatcgtccactggttttcttcatatattaatgataaacagatgggggcttggtgtcactgtgcccgtatatccagttgtttcagagcagacctcatgtcatcagtgccataaccctcaattccaatgatgtttgggctatcaagtgcaacaacatcttgtaaaggataccgcctaacagaatggattctatttgcagatgtgttgaattcacccttaaggatgaccgtcttatgaagacctccaaacaattcttcgtaatctgaatcaccagtttcaccaacaagaaccaccacattttgcaactctatgccccagcgaacagataagtaccttagagccttagaccgtgatgcgtggattggaattacagatagtctggtagcaccatggttatacagagcgtgacaacgagtgactgaatttttaataacttttgca

SEQ ID NO: 412920 - DNA, 481 bp, Oryza sativa
gacaggcgaaggtatgccatctcaagctcttgaattgatttatgttttacaaagctgaccgtctcagattatgctcccggaggccggaattacatttataacatacacaataagggtagcaggtatataaagcattgcagttggtagagtgaggacagaaataaatatctccacttgacgtcgaataagcgtagagcaatcaagtgttgaggttctggaacagctcaggcagatgggcgttcgtgagcttggtccggcgtgtgatctcacgctgtttcttcttaggcttagccttgggctgcaccccattgatctgtgctgcagcccgccgtttagctgtgttggtcatgggcttgatgccattcttatggagctccttctcgatatccaccatgttccggggtaactacatcttccggaagagctgcttcaggttaatgtcgaccttgatctttggctttggtcgttaggatacacatgt

SEQ ID NO: 412921 - DNA, 455 bp, Oryza sativa
gagtaaaagacactgaaaggtctcattttattcagagcattttgttcagcagcactcctaccaaccaacgctattcaaatcagagatgaatagctggtgggtctcacaatcagatcaagccattctcatacagttcagccaactccaacatcttaaaactatagctgcctttgcaccaaaatcttaacatttatacagtaacaggcacaacaacgaaatggcaggtaaatttctcctcaatttgccatcgaaggcatcagtttttcagtaccctctgtgatttagcacactaaaaaaaagcatgtctggctttgatttattttgttttggtctacacgatgatgctatcatggggacaaaaaaaaagaaggcctggggaaaattcatcaggcttgtatagaactccccatctgttcaatggtgaatggcaatttaattgcggtacgctgccatga

SEQ ID NO: 412922 - DNA, 288 bp, Oryza sativa
cattccgatagatagcaccaagcagttcaaacaccataaccaaagcgaactcaattcatggtaacatcacggacgaagaacacctaacactggtatggatggatagagggctttttcactcgagagcagccactggacacaatttacgactggtactcgatgatcagatgatttctgacacggattagctatggataactggctcacgatggggccccaccaatcagtttcctttcagtttcccggcggagtcgccctccgttgcccctcgttctcggcttgccaccg

SEQ ID NO: 412923 - DNA, 395 bp, Oryza sativa
caaatccagggaaaagttcaccaattcttcaagaacatatacacacatctcactcacatatactacaaactagtcactaattgaaatttctacaaacttatccaagaaaaagaaaaaactaccactcgtacggaagcgacgactagagttgttacagttgggaaaagagatgacaccaatggttagaggcaaccactccctgcgtgatcacgcgcgcggtcaaattacttcgggtaggccgcctcctcgtcgtcgccgtcggcgacctcctgcgagataacctcgagcgacatgcccttggactccggaacgagcagcgtcatgatcgtcccgaggaagtttgtgccggcgagcacgaagagcgcgttcttgatgccgatccccctggggtaccc

SEQ ID NO: 412924 - DNA, 502 bp, Oryza sativa
aaactgcgtagaaaccaaacattgtaaagctctgatatcttgcatagtttcccaacatggtccggtgaacagaaaatatatgaaactagacttcagaaaaccacagcactgtcgcatggtgctaactgagttcctcgtcaaaatcattacactgaaaaatgaaactacagggcgagctcaacggtggggggcgaatataatttaggtcatccgctgggcggcctccttagcgagaagcttttccctggccttggtcttcgcctgcgacttggagcccatgacgccgcctccccacttcttcctgacctcgtcgaacttgtcgttgaagttcgccttgatggcctccaagatcttgctgaactcaagcttgtcctcgttcttgacagtggtcaagcacagaacagatgcagtcttcttgtgaacaatcgatccaaggcgagctttgcccttaacgatgcagtaagggaccttcattttcctacacgggctgaagccacacaac

SEQ ID NO: 412925 - DNA, 455 bp, Oryza sativa
gcctgaattattgttgttattatttatcaatgctatgaacctaaatcatcaatagttactacaatatggaaacctctggtcacccaatacaactaaatatgcacatcagctgggtagtctgcagggtgcttcttgattgtatccctcagcaatcgctcttgctctcttaggttggaaggaacttcatcataaacatcagtgaaaagttcagcgagtggctggttttggcattctttctgctacctgaatggctttcagaagctcttgcttcacattattcctgagttcagattcctcttcatcacaccaccagccatttccctgaacccattttctgtacctggaaatcggatctcgcgctgttcgccagtgctcgatctcatgactggcctgtacttggttgaatcatcagatgtcgagtgatggccgacccggaagtcagtgcctaactaaaa

SEQ ID NO: 412926 - DNA, 435 bp, Oryza sativa
agaataaccaaaacataggaggtttcatttcttcttctcaaagtagtgtagcatctttccttctttcaccattacataagcttaagcaataacagataacaaatcctcctcctcctttaggtaaaatattcaaacacaatacccttataagtacttattattaggaaagtagcgtgcatgggcataaatggcagcggggggcaggttaagaatcacaatgctgagcagcgaggaaacaaaacaccataatgggacagagcaaaagccttcgaaagggagcttttaggcagaaggcttctcccacttgaggggctttaccaccttccaggtgaagtctgggtcgtcccttccgaagtgaccgtaagccgccgtcttgaggtagcgtccgttgccgtctttcttgaggtcaaggttgatgatgatcatgccaggcct

SEQ ID NO: 412927 - DNA, 434 bp, Oryza sativa
cactcacaatagcacaagcacaaagtagaggttgttactgcataagaacaatcaccaagatgacaatgtctaaagcagatatgcttcaggttctgttcaggctgcactaggcaaaatagttctgttttattgagaccaagtactcacgtactggttcgggagtacggcataggtaggtagtttgtagccacagccatcgccatcttagtcacggcgcaaccttcagcatatatgcctcccactacaatcttaggactcgagatccttgacgatgaagttctggcgactgatggggttcatgacaaccggtggcccatcagtgcgaggccaggcttgaaacttcttgccagttgcttgccaccattccttgtcggacacggtatgtggtgtggtgcctccaaatatcttcttctcagcgataaaatgatcacaaa

SEQ ID NO: 412928 - DNA, 380 bp, Oryza sativa
aatcctcaaaaagggttacttatgcagtgaaaagggttttatgctctttcatacagtgtgacagtgtgtgtacatataatttggaaaaacaaagtgaagatggatttacagcagcgtttctcagatacagcggacttatagctacaagctgatcacacaagggaactttgctgctgatgatgatatggatcatgttgttatagcttacgcccacgacgggttgtcgccggtcctgaaggcggttctccacccacggcacgaagagaaccttgccgtcgtcgacgttagagtgcaccaatgccagcgacaggggagcaggttcacggacgaccctgccctggttgatggactgagagccgaggcaggggcagatgaacttg

SEQ ID NO: 412929 - DNA, 424 bp, Oryza sativa
gataggtcaaattcacaggcattagggaatgatgattaatttaactgttcactgacgtattcatcgtggttcaagactaattaattaaaagctgcagtaccttcacagaactatactccttacttcttagcataaagctgatcgagggagcgtataaaaatttaactttacatacagagaccaaattatatgcaataggattaatttgccgctgttccgttctgccaaactgcaggcagaaccatcgctgctgagaattgctttccttccttcgttcgttgcgcttcagatcctggacgggatgagcggcgtcgaattctacaggtacgccgccggcgacgtcacgccggagccgagcttaaccgggtagccgatgtccttgagcaccatctccacttcacttagggcacccatcaattgcagc

SEQ ID NO: 412930 - DNA, 440 bp, Oryza sativa
ggacaacatgcaattcataaaacgtataggattacacgtagtacacacagatcgtgtacatactgaagaaaattaagatagaacatgcacacagggagcgtgcaacataaagtatacagctgatacagagagagaatggagcgctgcatgtctgccgcaggtgttattttaattactttgttcatatatgctgtagcaaatacgtgcttaattactagctgatcaactccgatcgagctagcgtgttaagctcgatcgatcgatccaagcaggattaattgatctagctgaccttgttgcagtcggtggagaggctgatggggaagccgacgttgacgccgcacttgccggggacgccggcgacggtgccgaggttgagcgacttgatgctgccggcgaggcttttgaggcagtggcaggccgtctgcggtcggcggtgg

SEQ ID NO: 412931 - DNA, 423 bp, Oryza sativa
tctttgggggtttttttcttttttcggtatccaaatccaatttatcttatttttcaataaggcccttccccgacatctcagaatggatcccaatggcttgtcactacctatcctgtcacaagactttgtgtcattaggcctctctcaagttctctcatacaagcattgacattgcaaagttacaccgagaggtctgaaacaaaagtgcagactgctgatggagacaagccgaattagcttacgcttcatcaagggcaagaacacctgggagggtcttgccttccagcaactccaagctagcaccaccgccggtggagatgtggctcatcttgtcggccaggccagccttctcgaccgcagcaacggagtcaccaccaccgatgatggtcgtggcgccctttgtggtagtaagatcagccaact

SEQ ID NO: 412932 - DNA, 514 bp, Oryza sativa
gtgataaccgcatatcaaaatatcgatccatgagagtatgtatgtcagttcgaaccacttcactcgcggcagcgaggaagtcgaaaagcttattcacgactcatctagcaaaacttgacgataagcctatctcaagttcttcatacaagcattgacattgcaaagttacaccgagaggtctgaaacaaaagtgcagactgctgatggagacaagccgaattagcttacgcttcatcaagggcaagaacacctgggagggtcttgccttccagcaactccaagctagcaccaccgccggtggagatgtggctcatcttgtcggccagcccagccttctcgaccgcagcaacggagtcaccaccaccgatgatggtcgtggcgccctttgtggtagcaagatcagccaacttcttggcaattgcatcagtgcctgctgcaaacttctcaaactcaaagactcccataggtccgttccaaatgatagtgtttgcggtgtccaatgcttcgctggaag

SEQ ID NO: 412933 - DNA, 384 bp, Oryza sativa
acttaaaacaagcccacgcgtccgagaagaccaaggccggcaagcccttcgtcgatgtcctcaaggagggcggagtcctccctggcatcaagggtgacaagggtaccgctgaggttgccggtaccaacaaagagaccaccacccagggccacgatgatcttggcaagcgttgcgccaagtacttcgaggccggtggccgctttgccaagcggctgtgccgtcctcaagattggccccaacgggccatcgcagcctttccattgaacctgaatgctcagggcctttggttgttttgccatttatttgccaggagaacggtctggtgccgattgtcgagcctgagatccttgtcgatggcttttaagacattgagcgctgtgcctt

SEQ ID NO: 412934 - DNA, 331 bp, Oryza sativa
ccaatcttggaaataattgcaaagaggactgttcaaactgattcgatttaaaggaaacgcctttcgatttttagagctaggacccgccacagtcctactcttagcaattaacataactacgaattttgccaactctttttttaccataaaaagaactgaggcggaataaacactttgcacaatcttcgaacccattcctttggaaaacccgtgcatttctcttcaccggatcatttttactatcgggttaatcgtaccctggtatcttgacattacattcctgcccaatatattgtttggcttgcaaccctaaacttaaccacttgcaatg

SEQ ID NO: 412935 - DNA, 508 bp, Oryza sativa
tttgattaaccaaaactataggaggttttattttttttttttaatgtagtgtagtatttttttttttttcaccatttcatatgctaaagcaataacagataacaaatcctcctactcctctaggcaaaataaaaaaacacaatacccttataagtacttattattaggaaagaagcgtgcatgggcataaatggcaacggggggcaggttaagaatcacaatgctgagcagcgaggaaacaaaacaccataatgggacagagcaaaagcctccgaaagggagcttttaggcagaaggcttctcccacttgaggggcttcaccacctcccaggtgaagtctgggtcgacccttccgaagtgaccgtaagccgccgtcttgaggaagcgtccgttgccgcctttcttgaggtcaaggctgatgatgatcatgccaggcctgaagtcgaagttcttcttcacaatcttgaggatctccttgtcagggatcctgccagcgccgtatgtgtcg

SEQ ID NO: 412936 - DNA, 450 bp, Oryza sativa
gaccaaggtacaaatcacattccaaagggcgtgaacaatgtaatgagcaacaatacatgcaacatgttagctctatttatgaaatggagccctttcaacagtgaaatttacatcatgataatttatacggggactagtgatataatcatagacgcgggggagaataccaggatcgtgtcatagaaaaaagggcttggcatacacatcgaatggctcgtttgcagttagctgtggatcctgcttcaagccgccactactaacgctgccttctgtaagaagtattgtgattagcgatgttacagtaccacctccgctgcccattgaatcacctgtactgcgtattgccgaacgcatggaggtcaggatattgccataggtggtgccctgcccacgctcaattgcttggataaagcaaaatgtcatagcgccagctgaagcgatttttgacaa

SEQ ID NO: 412937 - DNA, 566 bp, Oryza sativa
gctgctgctgctgctgtcgctggcagcggcggacatgtcgatcgtgtcgtacggggagaggagcgaggaggaggcgcggcggctgtacgcggagtggaaggccgagcacggcaagagctacaacgccgtcggcgaggaggagcggcggtacgcggcgttcagggacaacctccggtacatcgacgagcacaacgccgccgccgacgccggggtccactccttccgcctcggcctcaaccgcttcgccgacctcaccaacgaggagtaccgggacacctacctcggcctcaggaacaagccgcggagggagaggaaggtcagcgacaggtacctcgccgccgacaacgaggcgctgccggagtccgttgactggaggaccaagggggccgtggctgagatcaaggactagggaggttgcggaagttgctgggctttctcagcaatagcagctgtagaaggcatcaaccagattgttactggcgacctgatatctttgtctgagcaggagctagttgactgtgacactttatataacgagggatgcaatggaggtctgatggactatg

SEQ ID NO: 412938 - DNA, 396 bp, Oryza sativa
atatcatatattcgattatatatatatatataatagcagacaggttacatccattagaactcagaatcaccggaattgaacatcaaaagtacaacacaagcagcagcagcatcagccagcagcaaacgacatgattacccacgcttttggatgaagaacaagaagtacgagaagaagaagacgatggtcgaacaccttgatcgagctcaacaatggcgatcgatcaccaatcacctacttggtgaactcgatggcccaggcgttggcgtagatgtaggtggccttgaagccggtgaatccggcggcgcgggcgagctccctgaactccctttcgtacctctccttgccgccggggttgtgggcgagcatgatcatgtcgaccgggaacaccccctg

SEQ ID NO: 412939 - DNA, 564 bp, Oryza sativa
  unsure (1)..(564): unsure at all n locations
aaaggcaagaatattattcataaatgacgcatgatttttatcaaaacgcttgcaaatgatatcagataagtagagtcaacaagacaaaactgtatctgccaaagcacacctccccaactccacccaattacgccattatttctgggcaaaagcaaacggcttcccattcctccccttcaccagtctcaaaccataaaccccacaacaaatcctcctaagtgacggcatataagatgatgaaaacaaagcaggatactccagagtcgtcatggcgaacttcaagttgacacttctcatgccacagccgctagtcgtgctgggcagcctagtaccggtagtgcgcgggcttgtagggaccctcaactggaacgctgatgtagtcagcctgcgacttggagagcttggtcagcctggcaccaagcttgcccaagtggagggcggccaccttctcgtcgaggtgcttgggaagaacgtacaccttcttctcgtacttgccagtgctcttttccttccacagctcaagctgagcaatgaccttgttagtgaatgagcangacatgacaa

SEQ ID NO: 412940 - DNA, 411 bp, Oryza sativa
aagaaaatacagattctggattaattaactagcatatttaaatttaaaacgtaactgtttgagcaaataccacgaaatgttcaggcgctaagatacggcaataccgatacatccagcatcgcaaaaatggcgaagagcacagagtcagataaagctatagagaactagggcttcaggagatgggggccgaatgacaaccaatggcgcttagtcgacctcctacatcttgctatcgccggcgtggtcctccagcggcggtatgttggtgtcagacttagcagactcgtccttgtcgatgctcaggccgagcttgagcatccggtggatcctggtgccgaaggagttggggtccttaaggctgaagcctgaggtcaggagggcagtctcgaagagcatcatcaccaggtcctt

SEQ ID NO: 412941 - DNA, 428 bp, Oryza sativa
gagacatcaaataccaatcatatcaataacataaattaccagtagcaaacagagcgtgtactccaacatgctttgagaattcaacaatctatccagtggaaacaagatgttggcgattgctggcgggacatgcagttcaatgaatgtgttagttgctctggaacataaaccctggaaggtttcttcatcaccaaagaataatagttttgacagttttactttggcacgattcacggcaattgatcttactgtagaactaaacagtatcggtcggcttctggagtcttcattttaaggacaggaaagtccaaacttcaaagtatagtacagcattggtttgttttctttgcctgcttgaagaacatctgtgaagcaacactcaggtctgaacttttctcaaccaagctatccaatctttcccctttttg

SEQ ID NO: 412942 - DNA, 448 bp, Oryza sativa
tttttgtttttttttttttttttggggggacataaatttccaatctttttaatttcataaattgccagtagcaaacaaagcgtgtacttcaacatgctttgagaattcaacaatctatccaggggaaacaaaatgttggcgattgctggcgggacatgcagttcaatgaatgggttagttgctttggaacataaaccctggaaggtttcttcatcaccaaagaataatggttttgacagttttactttggcacgattcacggcaattgatcttactgtagaactaaacagtattggtcggattctggagttttaattttaaggacaggaaagtccaaactttaaagtatagtacagcatcggtttgttttctttgcctgcttgaagaaaatgtgtgaagcagcactgaggtgtgaactctttttaaccaagctatccaatctttcccc

SEQ ID NO: 412943 - DNA, 540 bp, Oryza sativa
gccgcttcggcggcggcgagcgcgggcgccgggaagatgacggcgtcggcgccggggttgtagaaggaggcgatggacatgcggttgccgtcggggcgcgtgaggacgcggtgcatgacgctcttgtacctgccgttggtgatcacctccagctggtcgccgatgttggcgacgatggcgtggcgcatgggcggcacgtgcacccactccccgtccttgagcagctggaggccgctcacctggtcgtactggaacagcaggatgatgccaccggcgttggtgtgggcgcggaggccgtcgacgagatcggggcgcgggcacggcgggtagctgctcaccttggtgccgaacgttgggccgttcgacccggcgaaggccttcttcaggtaacccttctccaggcccagattctcgcacagcaggtccagcaccctctccgagagcttctcgatctccgacgcaaattgctttatcacctgcctgtagtggtcgtcgacgtcggtgaggtcggagaggttggagatggtgtggtggtggacg

SEQ ID NO: 412944 - DNA, 445 bp, Oryza sativa
cgcttctgttgtggttgagcgcgggcgcacgggaagatgacggcgttggaaccgggggtgtagaaggaggccatggacatgccggtgccgtcggggcgcgtgaggacgcggtgcatgacgctcttgtacctgccgttggtgatcaccttcagctgggcgccgatgttggcgacgatggcctggcgcatgggcggcacgtacacccactccccgttcttgagcagttggaggccgctaacctgggcgtactggaacagcaggatgatgccaccggcgtaggtgtgggcgcggaggccgttgacgagattggtgcgcgggcacggagggtagctgctcaccttggtgccgaacgttgggccgttcgacccggagaaggccttattaaggtaacctttctccacgcccagattctcgtacagaaggtccagcaccttctacgagagct

SEQ ID NO: 412945 - DNA, 571 bp, Oryza sativa
gaacaaaagagtctcatgctcccattgcattacgaattatttgcttattcaccagattacataactgtctagccagacccaaaaaaactgtgcataaataagattcagaccgccgacagcaccaccatagcgaaaaagattggcaccacaagggcaaacatcccttggatacagatgtttttttgttcatgacccaacagaagaacagaaactaagacagaataaacccctagagctcagcttgtagtttcaggaatatgaaacaagaacccactaagggtttgcgtgttgaaacatgcctaatccgcacgagattggccagcgcgggatgacaggatgatgccgacgatgagcccatagagagcaagcgcttcggcaaaaatgaggatgaggatcatacccacgaacagctttggttgctgggcgttcgccctgactccggcgtcaccaacgatgccaatggccattccggcagcgagaccggcgagaccacaagcgaaggtagatgagaggtgcgcgtagcccgccaagaggacgcagggcttggccttgggttgatccccgtgctgat

SEQ ID NO: 412946 - DNA, 294 bp, Oryza sativa
ctccctgcttcctatttcatttaatcccgatggaaagcaacaagcagttcaaaccccataaccaaagcgaactcaattcagggtaacataacggacgaaaaacccctaacactggatggatggaaagagggcttttcgactggagagagccactggacaccataacgacccggctcgaggataaaaacattttgccccggatggttaaggataactggccagaagggcccccaccaaacagttccttccagtccccgccggagtccccgccgtaaccgccgccacggttgccac

SEQ ID NO: 412947 - DNA, 416 bp, Oryza sativa
gtaggtgttattttttagtctgcaagactaataccaacaatttttccacacactaaaccagtaaatcaatggaaagaatcaattcataagctttgtgaaagaaacatttgattccatcatggctaccaagttagaaacaaacagaacaagggtttagccctgggatcatcaagggatcacgaggtgtactcaaatggctggggtggcaggggatgctcgtcgacggccatggcggaggtgcctgagccttgctggccagcggtggcggctgcggcgttcgacgcctgagttgccggggcgtcggtgaggactagttcctccgtctcggagggcttgaggtcccggaggaggacaaattcggagggcgccagcttcacaggctcgtacctgacggccttcaggaaattttaatgaac

SEQ ID NO: 412948 - DNA, 557 bp, Oryza sativa
agtatggaaggaataaaatttccttagatttgcaataaatatcagcagtagctcaattcaggcaatcaagacaacatgtaaggagccgaacacatcggcaacctgaataacaagtggcaacctgaataataacaagttaagtttatgcagtataagaactgaaccttggatctaataacaacaacaacatggccatgggacacgaaaaggtttcacctttgcggccacagctcacaccgcggagggctcctcgacatctctgccccttccgccgacgccagcggcgctgtggtgcggcaggtcaacgccagtggcgccctcgggtatcagggacgcggggcggttctcaattacctcgtcgatgagcccccaatcgcgcgcctcctcggggtccatgaagaggtcgcgctccatgcactgctcgatcttgtcgatctcctggccggtgtgcttctggtagatcttgttgaggcggtcgcgcaacttgagaatctccttggcctggatggcgatgtcggtggcctgccctgcgcgcccccgatggctggtgaatatga

SEQ ID NO: 412949 - DNA, 559 bp, Oryza sativa
aaggactagcaaaactgacatttgtttgctaattaacaagtcaagagatagtgacacgtcaatgaagtagacaaaatagaactaagattaacattcataagattccaatcctactcgcctgctcggtaaggcaatagccgcaaaaggtaagcaaacactactagttcattacatcgctaaggctaatttattatctcatcgtcatgtcatatatattttggcagaaggacaaccagcacatgtattagatgggcacaaaatgaagctaacagaagaacctaatcgagcaattcagacattgcgttcttcctgttgaatggatcggtagcagcaagcaaagacgccacagccctattggggaaaatgtcatcagccttcatcctctccttgaatccataaggtggggtctttgcattcagatatgcctcaagaagcagctgatactgtctaatcctcccagtataacccatctgccgcaccttgctgaacaatttctctgcattatggacgtctcctttcttggataactatcaagcagcatcaagtatgggtgtacata

SEQ ID NO: 412950 - DNA, 573 bp, Oryza sativa
gaaacgcactaacatgtatacatgtataacacgaccaaaacaaagccttatttgttagggaacaaagtaacagctggtggcgaacaagtaacaaaatccgatcagacgagcacacggtactacactttggagacgaaacgcaatggctctcgcgaaagcaaaaaactccctacatccatgaccaggcatatgcatatgtgtgcttagatggccgcgaagtactccttgctttccttggggtcaggcttcatcgacttgtcaccgggcttccatccggccgggcacacctcgtccgggttgtcctggacgtactgcaacgcctgaagggccctcatggtctcatctacactgcgtccaatggcaaggttgttaatggtagagtgctgaatcactccctccttgtcaatgatgaaatgtcctctcagagcaattccctggtcagggatcaagacaccaaaggacttcgaaattgatttagtaacatctgaaatcaatgggtatttcagatcaccaagcccaccagatttcctgtctgtttgcacccatgcaagatgggagaacacactgtcaatt

SEQ ID NO: 412951 - DNA, 456 bp, Oryza sativa
aagcgaacaattctcacctgcagagaatgttatacggttttgcagccaattttatacaactgtcactcattcactttccaagaatacaccaagagcttcatagatatagcatacaaaagattaagaaaaatggcagagtctgcattagctcagtcctcatccacaaagattgtttcttgcttgaagagtcccccaaacacgggcctcacatccggcttggattccggctgctttggtgttggtcttgtcttctgcgccgcgggcttcacaacagctttctgtggtgccagcttttttgcttttgcctggccctttacggtggcgatctgcgcttttggttccacctcgtttgagtcctgagtggccactcctgcaagttgtgtgcttgagcttttcccatgagaagtccgggccgaaccttttggtttttgtcagaaggttttccagagaagcttg

SEQ ID NO: 412952 - DNA, 246 bp, Oryza sativa
ggaaggtaaatgttcgtgaaaataggcacatatatgtatcgtgcaatgtcctattcgcttgtgcaaatgcaaataacatcagggggggaactgatcatcagctcacgagaacaaaggaagaaacaaaagttaataatgaaaaccatcaacagcccggacgagaattgcattactagagacacacattgccgccttcctataatctctccatgtatccaaatataaacccggtcatgcacaaaacat

SEQ ID NO: 412953 - DNA, 566 bp, Oryza sativa
gcacataacattacgcgattttaacacgatccaaactttaaatactggacaagagcatgtttgacgcctcgcattatcgcatatagcggatgaaaaaacgtcaggccagcctgcgcgacaacgtctagttacagataagagcagaactgcaagtcaaatacactcttttctctccatagtagagtttgagcagcgagcgggcaaacataaattattcaattattaaatgatatgatcactcttgatcatctcaacactataggaacaaaacttcgctaccgcgattttactattttagttgtccacaacttcaatgagggttggttcgtagtcagcaggagcctcgaaaccatggaagttcattacggttgcagcaacattggcgagcccaggggtctgaatgtcagaccggaatttcacaccagggtgaagaccgggacctccaatagcaaccgggaccggctgaagagtatgtgaggtaagaatctggataccaccgttcttgtcgagaagtggatggccagatttgttttttttcaccatatcctcagcatttccatgatcag

SEQ ID NO: 412954 - DNA, 359 bp, Oryza sativa
ggtataataacgaatctgactgggaaatacagtacatacatatttatggctgttgttggatccgcaaaaaggaaaaaagaaaaggaagaatgcacagatcagatcgtagagagaaaggaagaaagaagcagcaggaatggaggtgatccgaggagcaggtgataataatgaatgaatatgatggattcagaggtaaatgcaggacttgtcgagggagatgggcttgttgagcttggcggggttcatgaggaccttgcactcgatggcgcgtgtgaacttgggttttaccagcgcccccagcacgtacgcccctcgagtgcaccgtcgtccttaagatcatcggcaccggaaccatgctg

SEQ ID NO: 412955 - DNA, 457 bp, Oryza sativa
cacttcaaagtataattcgacttagaacaagaagacgacttaagtaaagtttcgacctttttatgctagttcactccaaatcgcccacaactaagaggcgatataagcacgctgttatagtctaacagaaatttactccaaccagattcggggtagaagcatagcaaaacagagcagctaataacagttctacaacgagaagcagtagcagtagcttcagtgaaacatcatttcagctcattacatcggcagttcgccgctgtccgcgatgacaactttgctcttcggtgacccactctgctggccctcagcttcaatcttgtaaaccacatccattccagacagcaccttaccgaacacgacgtgcttcccgtccaaccagctggtggttacagtggtgatgaaaaactgggacccgtttgtgtctctcccagcattggccatggacaggaggcct

SEQ ID NO: 412956 - DNA, 450 bp, Oryza sativa
aacaaaagccatactctttgtattaaagatccaacagggtcagagaacacgcaagctcagaactacacatcaccaaaattggagcaagtttgggggtacatatccgctcatacagtggaggatttatttcttgattctacgagctttttaactagagttcgaccgggaagtcaattacggatagaaatgagcatcctgtcttcacaaaacccatgcacacaacagtgggcatgaaccgcatgatattcaccatcaagtttagtagggctccacgggtgcgcggaacttggcaccagcgtagacagcagtcgaaccaagctcctcctcaatcctaagaagctggttgtatttggcaaggcgctctgatcggcagggtgctccagtcttgatctgacccgtggccaaaccaacagccaaattagcaatgaaggtatcctcagtcttaccact

SEQ ID NO: 412957 - DNA, 558 bp, Oryza sativa
  unsure (1)..(558): unsure at all n locations
acccttcacaaacacgtacgagagatcaataagcagagagcgtatcaattacaacgtgataattcgatatcgagtcggcatatcaagagcgcttcgtgatcggcctcctccccgccgccggcacgagcggcggcggcgaatcacctccctgccacgcccacaccatgtcgccaagcgacggcttaagctcctgcttgtagaagtcccggaaatccggtgagtcgccgccggtcttcctcacctccaccacgtgcacctccggcgccaccttgaagatctccgcctcgatggccagcgcgcccttccgcccgtcctggctcccctccagctcgaccctccctttctccttcagcttgaagctgaacctccccgcctccgcgatctcctccagcttggagacgatcgccgtcgtggtctccctggtggagaaccgcgcctccgacctgcgctcctccgngtcgaacattttggacaggtccagccctctcgaccgccagatgatgtcgaaggcgttcatgctcgagggcctcacgtcgatcacccgcgacgacatgatca

SEQ ID NO: 412958 - DNA, 295 bp, Oryza sativa
  unsure (1)..(295): unsure at all n locations
agaattcgagaacttgtttaggtaaggtgctactgtaacagtagtaaaagtaaataccaaaatccgtatgttgagaatgcanaaatttatacagccattttgactcccctattattggacaantnnataatgatgatttcttgccaccgaaaaggagattacaaccgtacgcattgcctttctttgctgctacatttagtcgttttgcaccaaccttgtgcataactcagagaccaaccgtggggatgtatttgaccaagtacataacccttaggacaggctgatatgatatcca

SEQ ID NO: 412959 - DNA, 395 bp, Oryza sativa
gatattacatcacctttgtgaagcaagaacagatctagggtataaaccccattgcatatccaagcgaaagagccatccttaagaaaggagagttcactgaactacgaaagcaaccttcctgaattgacctaacatcataacagaaaatggagcatgtcgacagggatctgcggcgaacccgggacgactgataccctgggcctaaagagatgggcattccgcttgacaaaccgttaattccacatgggctgactccagggaaacggaacaagaccgaggtttgatgctgagccgtacatttaggtgtgcgcgtcaccggactcagcaaaggattcctacagggctaatcacgtggggcgagctcaatccgaatgacgaacccaacatggtttttt

SEQ ID NO: 412960 - DNA, 385 bp, Oryza sativa
aacagaaaatccacggatcccaaatgttctcattgattgatagcgatatcatagaagcagcgacccgaattaagatttaaaaccaaccccaagagggatcgcagatccaactccaccgaatcgatccaagaactccgcctaatccaaccaaaccatgggcgattttattttaccaacacgacacgaactcataaaaagactaacaccaccaccacctcctccttatttagggactcgacgactcaagacgactgatactggcgaaaggcgaaggggaacagcacagatctaggagagctggccgcagtcggcgatgacaaccggtttggcggtgctcccgccgtgggatcccaccttctcgatggccttgacgacgtccatgccc

SEQ ID NO: 412961 - DNA, 317 bp, Oryza sativa
  unsure (1)..(317): unsure at all n locations
agaattccagaacttgtttaggtaaggcgctactgaaacagtggtaaaagtaaataccaaaatccgtatgtttagaatttataaatttatacagcgattttgactcccctattattggacaacttaattatgctgacttgttgntagcgaagaggagattataaccgtacgcattgcctttctttgctgctacattcagtcgttttgnaccaaccttgtgcataagtcagagaccaaccgtcggcatgtattgcaccaagtacataacccctagcacaggctgatatgatatccatgctttttttagtccgtgagtt

SEQ ID NO: 412962 - DNA, 274 bp, Oryza sativa
ggggatgaaagcagaggttgattatattaagaagcctggcacgcatgaggagatggagcaggagtacatgatgagatcaccatgaggatagatgatccatccaagctagctagggatccattcaacattgatcgacacacgcacacactgacaacgacgacgacggttttatttaggcgtcagagcaaaaggcaaggcctgcctacatataagctgggtactaatgcaagcaaattaaggcctcgatcaaagctctgatcgacagtagcagcat

SEQ ID NO: 412963 - DNA, 433 bp, Oryza sativa
gaaaggcgaaatttaatcaatacaattattattgattttttcttcaaggagcactaagcttagtactcccctttactactaccactacacttgatgatgggggaccggtccagtcattattgggcgaagtccaaagaaggaaaacgtttaagcgggtgctaattagcagcctaaggatagcccaaaaccttttttccactataacgaagaggcttttctttgtctcttgctcaaaataaataatctctcaaggaagaaagaccacgccgagaacgaagacgaagaaggacaccgggctattatatgtgggtgtcggagacggggattgcggcggcggctagaactggccacccttgaaggtctggccgaactgccagccggggtgggcgacgttgttgctggtgacggtgcggccgtcgctggcggtgacctg

SEQ ID NO: 412964 - DNA, 548 bp, Oryza sativa
caaataagtatcttattgtaactggagaacattaattacatcccttctgtaaagctcagggaagcataccttattagtatttttaccatcactaagcactaaaatatagatgtaactagctagatacattgcctcattgcatgctttcttcagagattattgacacactgatgagatgaaagcaggctatcctctatatgttggatcatggaagtgcaggcagaaccttcccagtgcaggttccgaatccgacattgtagccttcacccttgcaacaagctgtcaagatgacctcatccccatcttctaggaacttgcgggtcgagtttccaactgatatctccttctgcccattccatgttagctccagcaaacatcccaaagattctgtctcaggtccgcttagtgtgccagttgcaaacatatcccctggtctcagattgcatccattaacagtgtggtgtgctagttgctgtgttaaagtccaatacagatgcttgaagttactctttgcaaccattgatggttcactttgctccttgggctta

SEQ ID NO: 412965 - DNA, 413 bp, Oryza sativa
agcaatgtaaatactcgcattccacaacagccgaagggcaattaattaggctcagaacaagtttaaaccgaacagaaaatagagagttttaaacgacacagtgcacacagcgggcatatgataataacggtcaatgcaacgagtgccatggccgtgcacaaaacttaacgaattagtaaaagctagatatcttaaatgcagacacgcaaaccaccacttgaacgaggatcatttcttcttggcggcagccttggtcaccttggcaccggttgggtccttcttctccacgttcttgatgacgccaacagccaccgtttgcctcatgttacgcaccgcaaaacgaccaagaagagggttcttagagaaggtcttcacaaccatgggcttggtgggaatatttttaccataccagc

SEQ ID NO: 412966 - DNA, 388 bp, Oryza sativa
gaaaacacatgccctgtattaagcgggaccacaggtggggtatatacccccttagattttcaagcataagatcccaccttctaacaggagaggtaactgaactaccaaagcaacctttctgaaataacctaacatcagaacagaaaaaggagcaagtagacagggatctggggcgaaaccgggacgactgctaccctgggcctgaaaagatgtgcagaccgattgacaaaccgttaatccccatcggctggctccacggaaacggcacaagaccgaggcatgatgctgatccgtaaattttggtgagtgcgtaaccggactgagaacaggattcgaaaggggctaatgaagtggcacgagctaacccgcatgacaaacccaacaaggt

SEQ ID NO: 412967 - DNA, 512 bp, Oryza sativa
agcactgtaagtactcgcattccacaacaaccgaagggcaacaataggactcagaacatccaagtttttaaccgaatagaaataaacgagttttaaacgactaacatagtgcacattgcgagcagatattaacggtccatgcaacgagtaccatggccgtgggcaaaacttaacgaacgctaagatatctcaaatgcagccagcataaccaccacttcaacgatgctcatttcttcttggcggcagccttggtcaccttggcaccggttgggtccttcttctccacgttcttgatgacgccaacagccaccgtttgcctcatgtcacgcacggcaaaacgaccaagaggagggtactcagagaaggtctccacaaccatgggcttggtgggaatcatcttaaccataccagcatcaccgttcttgaggaacttgggctccttctccagctccttgccggatcgtctgtcgatcttggtcaccagctcagcaaacttgaccgcaatgtgtgag

SEQ ID NO: 412968 - DNA, 141 bp, Oryza sativa
tttttgtagcaatgtaaatactcgcattccacaacagccgaagggcaatattgatgctgggaacacgtataaactgaacagacaatctagagttttaaacgacataatgtccaccacgtccgtaaattaaacacacatgat

SEQ ID NO: 412969 - DNA, 551 bp, Oryza sativa
gttcaagaactctccttgacacttgggcaacatgatccctaacaacatacatgcatttaacccactggtgattcccactcagattacacacaatacaaatccactcgcagactgccttaaaaaccaccaaattgattcaaaagtaacgcggggtatgagggatcttcccaccgagactgactaaacctacccacagacaattggttccactggacccatatttttcaaaaacagatggttatgacggtatcgtcctcgcaaccgaagggaacttgcagttatggatatcctcacttcccgctggcaagctgggtgcggatgagcttggcggccgaaaccatgttggaaagggcgggcttgacctcgttgtacttgcgggtcttgagaccgcatacagggttcacccagagaatgttagtgtcgagcaccgtgagcatcttgttgacgcggtccgaaatctcctgtgtggacgggatccttggggagtggatgtcataaacaccagggccaatgccagcaccatacttcacaccctttcggaagacggagag

SEQ ID NO: 412970 - DNA, 371 bp, Oryza sativa
actaacaagaagatctgagcatagcatattcggggaaaaattttacggtcgggtacaacatgagactttaaagatctaatgaaccgaatgaatctacctttaggccatatcggtgttcaatagcagaagctacaaactaacatcttggaagcacatcatcaacctctaaatcaacataaccaaaagaaaaatctaaaaataggcgccttggctttgattatgcaactgtaacgtcgaatctgcctgccgttcaggacaacagccggaagatttaatatggcattgaagtcttcttcaggggagccataggggacaaaaccaaaacccctggacctgccgttctgcgtgtcgtagatgaccttggcatctag

SEQ ID NO: 412971 - DNA, 307 bp, Oryza sativa
ggaaggaaaaaccatgtatagcttgaaaaacctttaaccaaagatacctacggcctccgacgtcccagttttactgagaaaacctaattttatggactttccctattacaagatacccttttcataactggggcaaacatccgacaggttacaagcccacctggtcttccgattccatttttgttccgtatggtttgccaacaaacgcatcaatggcctagtcacatccacatccaaacaagtcaatgtaaaggattagaaaagctttccagtggagacccaaccggcatgcacggttatctttgga

SEQ ID NO: 412972 - DNA, 379 bp, Oryza sativa
acatggtagtataaatttcttattaatttttgtcacataaaaaataccgctgtttccattagaatttctgaatgccatacatgtgtgattggttgggctaaccatatcacaatttaatcaatgtcgccagttagcccttccaaaagtaactgaaaagattgtttgtacaattgcacatctcaaaattgctttcttttcctgtaaatggacgcttaatgacaaatcgatcgtgtataacttccatcaaaagacgaatctatgaaatttcaaaatgggaaagtccctgttaaccggatatgctcaagggtgcgctttagaccatactgaagaacagcttggttgccagctctaaaaccatcgccataggccattgaggtat

SEQ ID NO: 412973 - DNA, 493 bp, Oryza sativa
ccactatttaagagctatgcacgcggcatgcgacgcccacgcaagcgtcgggagtcctcttattgtgggggcgccctctttttttttttttggtctaacaagaggatctgtgcattgcatctttggggaaaaattttcccctcgtgtacaattttagactttaagtctctcatcaaccgcatcaattttccttttcgccatattggtgtacaatagtagaagctacaaactaacatcttggaagcacatcatcaacctctaaatcaacataaccaaaaaaaaaatctcaaaattggcgccttggctttgattctgcaactgtaactcggatctgcctgccgtccagggtaacgccgtcaagatttgatatggcattgttgacttcttcagcggagccataggtgacaaaaccaaaacccctcgacctgccgttttccctgtcgtagaagaccttggcatcgagcaccggttccctgcttactgaacaggttct

SEQ ID NO: 412974 - DNA, 216 bp, Oryza sativa
aagactcgaaaagaaaaaaatcctgaagtctgtaccaaagttcagtattacacctcacagaaaatggcccgtgtctgcagctgtgtttcttcttcgacagtcatgcgttcctctgtcgaaggggaacaacgtacgggcagccaatccgagcacagtatatatagtatagcagttctgcccggggacagtcaatgtgtgtgcttcgttacattatag

SEQ ID NO: 412975 - DNA, 403 bp, Oryza sativa
acatggttgtttaaatttcttattaatttttgacacataaaaaataccgctgtttccattaaaattcctgaatgccctacatgtgtgattggctgggctaaccatatcacaatttaatcaatgtcatcagttagcccttccaaaagtaactgaaaagattgcttgtccaactgcacacatcaaaattgctttgttttcctgtaaatggacgcttaatgacaaatagatcgtgtataacttccatgaaaggacgaatctatgaaatctcaaagggggaaagcccctgttaaccggatatgctcaagggtgcgctttagaccatactgtagaacatttcggttgccagctcttaaaccatcggcataggccattgagggatctgtctcaatttggtgcttgaaaa

SEQ ID NO: 412976 - DNA, 485 bp, Oryza sativa
gatcccaaatgttctcattgattgatagcgatatcatagaagcagtgacacgaattaagatttaaaaccaaccccaagaaggatcgcatatccaactccaccgaatcgatccaagaactccgcctaatccaaccaaaccatgggcgatctcatctcaccaacacgacacgaactcataaaaagactaacaccaccaccacctcctccttatttagggactcgacgactcaagacgactgatactggcgaaaggcgaaggggaacagcacagatctaggagagctggccgcagtcggcgatgacgaccggcttggcggtgctcccgccgtgggatcccaccttctcgatggccttgacgacgtccatgccctcgacgacgcggccgaacacgacgtgctttccgtccagccagctgcagggcacggtgcagatgaagaactgggacccgttagtgttgggcccgggttcgccatggacaggatgcc

SEQ ID NO: 412977 - DNA, 393 bp, Oryza sativa
gacatgaacttgtacaacttcgatcaaaagatgcccctatacgcatggatccacaccaaacagtagggagggggtcatctgatctctgctgacagcgagaccctgatttattctgcagggccataaacacaggacacgctaacagcaacacgacctgcatgcatggccgaactctaacagtcgccaaatgcaagcccaggtgacggatcgatcgatgcttttgttgccggtctctcgattaaccaggggaggatcttccagcgctggttgtcggccttacaccactcccagagcacgacggtggtgccgtcgtggacgccgccgtggtccttggcgccctggaaggccacaaacttgaggaacatgttgttcaccatgcggacgcagttgaag

SEQ ID NO: 412978 - DNA, 470 bp, Oryza sativa
aacatgctaattttataattaatttacaacaccatatttcattgatcaggttcagaacctgtacagaaatacacactaccggtgcagatctcaccttttctccaatactcgaacatccatccacgcggtccacacgaatacgtacatctatacggtacacgtacgtacatctactgcaccgagtacacacacgcacactatcctgcagagacgcgcatcgacgccaacctagctagcttagctgaaggcgatgcgtcaccatggcagcacggcggcggcggcgctcacttgccggggacgaagctggtggcgtaggcccaggcgttggtgttgacggggccggataggtggaccgggaggttctcgagggggcccttgccggcgacgatggcctggaccaagaaaccgaacatggtgaacatggcgaggcggccgtttttgttctcctttaacttgagctccccgaaggc

SEQ ID NO: 412979 - DNA, 447 bp, Oryza sativa
aaaggcaagaatattattcataaatgacgcatgatttttatcaaaacgcttgcaaatgatatcagataagtagagtcaacaagacaaaactgtttctgccaaagcacacctccccaactccacccaattacgccattatttctgggcaaaagcaaacggtttcccattcctccccttcaccagtcttaaaccataaaccccacaacaaatcctcctaagtgacggcatataagatgatgaaaacaaagcaggatactccagagtcgtcatggcgaacttcaagttgacacttctcatgccacagccgctagtcgtgctgggcagcctagtaccggtagtgcgcgggcttgtagggaccctcaactggaacgctgatgtagtcagcctgcgacttggagagcttggtcagcctggcaccaagcttgcccaagtggagggcggccacct

SEQ ID NO: 412980 - DNA, 375 bp, Oryza sativa
aaggaaaagttatgggcgccggataatatcattactacagttcattggagatatgctacagtaactttttcctcccttgtaaaaagaaacccaaaccttatctacaaagcaacacacacaccggacacaaagggcttgaacgaacggagcagacgagacaaacatggacaactactactaggcaagcgacaacacctaggttattcggggatacagagggcgggggtaaccgtgggagaaacgggggggatgatcagactctgggcttgctagccttcttggaaatggccaagcggatggatttggggggctgcataggcttcccggggggggtcttggtgggccttttggcgcggactttggcggtggggggga

SEQ ID NO: 412981 - DNA, 303 bp, Oryza sativa
ctgtactctgaacaaattgagaccaagacggcgatctatctagcgttcctgaatacatatcaaacacacaaaatttgaaacatacaactgaatgacaaaaatgcccaaactaaggacacagctttaacagaaggaatgaaacgaggagccccagcgccatacattttgccaatccaatgtaaagccatagcaggggtcattgtcccatctaaaggttcttgcaggattacatgctcaatagcctgtctagctgtgatccttttgatcgggttgtaccgaggcattttaaagagaaggctcaaa

SEQ ID NO: 412982 - DNA, 455 bp, Oryza sativa
gtgcaaggtaatttcgttctgattgcctttggcagttgctacacatcttatatgtttaatttatctttgcaaaaaggttacacctgcagagctgcagctacaaattgtacaatatatacaagcccaaaatgatgaaggtaaagggcagcttggctggctataccgttcgctatattgaattgtcattggaagcatttgatgtggatgcgtcctcggagttccttgcttcagatttctcgttggagtaagttgacagtattgtaacccagattaactccacgcagtcaacccacagaagtctttgttcaacaggaactaggccatatgtaaccaagtgtgcaaaaggccacaactttcagccggcagtaagcatgggccaaaacgtggatttgagctcactggaaataggggccggtgattccaaacgaaagaaccccaagaccacgaagtagata

SEQ ID NO: 412983 - DNA, 467 bp, Oryza sativa
aaagcaaggaataatccatatatagcaggaatatgagagaattcaatgttccaaaataccggtctgaacatgaacatgctaaccatcgtttgaactttccacccatccaacttgatagtacaacagagtcaacaaacaagaggggatgtactagactactagtaccataaattcgagcaggcatattgtcgttgaacaattctggtaggggaagatcgaccagggatgctcatttgcggattacaatctttaaatttgacaagcagatgctttaaatttgaaccggttagatatagcgtttcaggtactcatccatgcgggtgtactgaacctctgggtagagctgagttgcctcggcaccattgtcaccaatctcgaagtttgccaggcagccctcgtaaaagatgtggtaataatgtcctattcctacttgactagcaaaatccaaatctttcatagaagccaaa

SEQ ID NO: 412984 - DNA, 430 bp, Oryza sativa
caaacaacaaccttctctatctaagggccgggaagaaagtcacagctgcctatttacatggtgtcctttattcattattgcagtgaaaaaccgcacatgataaaaccctaggtttggttattcactgaagccaacacggggtactatagaaccctcagtttggtaaggaaggctgcacagaagtccaggaaaaggagctgaggccccgtaactctctgcatatccagcagatacttctcgtctctgctcttgtaaagctggatttcaaacttgatcacagcaggtaacctcccgtttacatcgccattatccattataattgagtcatcaacaaagctgtggttgacatctaacatatcagtggcctgaggatacccaacgctccatctgcacttcatgttgaactgtccattcttcttccagcagacat

SEQ ID NO: 412985 - DNA, 307 bp, Oryza sativa
aagggaaaggtgcgagcgccagaacattctattactacagattactgggaaaatggtacagtagctttttcctcccttggaaaaagaaacccaaaccttatttacaaaggaacacacacaccggacacaaaggggtcgatcgatcgaagcaaacgagacgaccatggcgaactactaccagggaagggacaacacctaggctatacagggatacagcgggggggggcgaccaccggacagtccaaggctatgaacaagcgctggccttgatggccttcttggacatggccgaccggacggtcttggg

SEQ ID NO: 412986 - DNA, 398 bp, Oryza sativa
tttttgttttttttttttaaacatcatcttttttttattttaagggccgggaagaaagtcacagctgcctatttacatggtgtcctttattcattattgcagtgaaaaaccgcacatgataaaaccctaggtttggttattcactgaagccaacacggggtactatagaaccctcagtttggtaaggaaggctgcacagaagtccaggaaaaggagctgaggccccgtaactctctgcatatccagcagatacttctcgtctctgctcttgtaaagctggatttcaaacttgatcacagcagggaaccttccggttacattgccattatccattataattgagtcatcaacaaagctgtggttgacatctaacatattagtggcctgaggatacccaa

SEQ ID NO: 412987 - DNA, 460 bp, Oryza sativa
attcattattttttttttatttaaggttcgtgaagaaagtcacagctgcctatttacatggagacctttattcattattgctaggaaaaaccgcacatgataaaaccctaggtttggttattcactgaagccaacacggggtactatagaaccctgagcttggtaaggaaggctgcacagaagtccaggaaaaggagctgaggccccgtaactctgtgcatatccagcagatactgctcgtatctgctcttgtaaagctggatttgaaacttgatcacaggaggcaacctcccgtttacataggcattatccattataattgagtcatcaacaaagctgtggttgacatctaacatatcagcgggctgaggataccccaacgctccatctgaaactttatgttgtactgtccattttttttccaatagacaattaagaattcaagggcctataggacccc

SEQ ID NO: 412988 - DNA, 303 bp, Oryza sativa
agggacagttctactggtatctatctccagaaaggagtaacagcgcaatctgactcgaagaaggctcagcacataaactctgggtggtacattcaaaactcaagacagataaaatttcagcatctaatagctactaatgcgaacgggagcaagcaatcctgctggtacaaacagaatgggctggctttgatgcctaaacccccctgggcaggcaaacccgggggaagcgactggttgagcctggtggccttgtcggcgtcgaaaacccaaagggtgtagaggtacttggagcagcgcaccttg

SEQ ID NO: 412989 - DNA, 454 bp, Oryza sativa
accgcaccgtgttcagtagctacaataaacagctcacaatttacaagtagttctactacagtagttgccgacttggtttctcctctcaattatattagaaaaacaacaaaaagtgtgtgatcggttagtcaaggaagcacagagttcaatatgcagccgccacaaatgtccaccaacctccagcatctggtacaagtaaattgcccgtcttcaagttcaacaccctggggcctctttcgattgcccatgggctctgagcgcttcaaggatgctttcaacccacccgtcaagtcccggggtggtaggataatatatgctcttcaggccaaatttcttagctgctgaggcagtcgttttgcctatgcaggcaatggcgttgccccagttgtcaacttgtgaagcaagatttagccaagctcggatagcaaaaggagaagctactgcaacaactgga

SEQ ID NO: 412990 - DNA, 438 bp, Oryza sativa
attgagtcggaactattccgtcctctaagaattaattaacttggtacataattaagcagcatcaacccgaaaatgggatgagagcagacttgagacggtaaaccgatcgacacggtaaaaattaagaagtcgcaattacgaagtggaccataataataggatacgatccccgctgcgcagctgacttgctttagcagacgccgttggacttcttcttggccagcacggccctcttccagagggagatcacctcgcgctgcttctccatctccctctcgctcgccgacgcggcggtggcgtcgccgacgttggcgactactcggcctgggagcgcgtccagctcgtgcagcaccttctcgacgtggagcacgatgcgctcggctagcgtgcggttgaagtactggtggatgacgacccggagcacggtgacttgctgtg

SEQ ID NO: 412991 - DNA, 355 bp, Oryza sativa
cacaacaccatattttattgcacaggttaagaacctgcacagaaatacacactaccggaacaaatctaaccttgtttcaaatgcttgcacatccatgcacggggtccacacaaatacgtacatttatacggtacacgtccgtccatttactgaaccgggtacacacacgcacactttcctgaagagacgcgcatggtcagaaacctagttggcttagctgaaggcgatgcgtctccatggcatcacggtggcggcggccctcacttgccggggacgaatttggtggcataggcccaggccttgttgttgacggggccggtgaggtggcccgcgaggttttagagggggcccttgc

SEQ ID NO: 412992 - DNA, 468 bp, Oryza sativa
  unsure (1)..(468): unsure at all n locations
aagtaaatatatcatatattcgattatatatatatatataatagcagacaggttacatccattagaactcagaatcaccggaattgaacatcaaaagtacaacacaagcagcagcagcatcagccagcagcaaacgacatgattacccacgcttttggatgaagaacaagaagtacgagaagaagaagacgatggtcgaacaccttgatcgagctcaacaatggcgatcgatcaccaatcacctacttggtgaactcgatggcccaggcgttggcgtagatgtaggtggccttgaagccggtgaatccggcggcgcgggcgagctccctgaactccctctcgtacctctccttgccgccggggttgtgggcgagcatgatcatgtcgacgtggaacaccccctgctccctcgccgtcgcgtcggagctctccggnagnacgcactccaccaccaccacctttccgtgc

SEQ ID NO: 412993 - DNA, 382 bp, Oryza sativa
gaccccaaaagtcctcattgattgatagcaatatcatagaagcagggacaggaattaagatttaagaccatccccaagaaggatcgcagatccaactacaccgaattgatccaagaactccgcctaatccacccaaaccatcgggcgatggttattttaccaccacgacacgaacttataaaaagactaacaccaccaccacctcctacttatttagggactagccgactcaggacgactgatactggctaaaggcgatggggaacagcacagatctaggagagccggtcgcaatcggccttgacgaccgagttggcggagctccccgcgtgggatcccaccttctcgacggacttgaggaactgcatgcactcgacgacgc

SEQ ID NO: 412994 - DNA, 263 bp, Oryza sativa
acaaaaacaaagcaacgggttcccaagggtccacacttacaggacgttcaacgtacaactgatccaagcaaatgaaacaggtttgatgatgcactgatgcgaaaaactaaacggttggaacggagtcggaaacaaggcgatcatggacaagcgggggggggggcaatgagcttaatagtcggggggggggagctgctccggggggggggagaaaaaaaggacctcctagtagaccccggcgaggccaccgccaatgagggggc

SEQ ID NO: 412995 - DNA, 361 bp, Oryza sativa
agatgggaaacgaataaaatcattattgcaaaaacatcatcttcttcttcatcttcttagtgtacacaacaccaactcgatcattatctcgacgaactaaacccatattccccaacccaaatacaacgaactcgctggccacaaatccatccaaccacaattaaccactgctaagctacggtcccccacttcacttgccggggacgaagctggtggcgtacgcccaggcgttgttgttgacggggtcggcgaggtggtcggcgaggttctcgagggggcccttgccggtgacgatggcctggacgaagaagccgaacatggagaacatggcgaggcggccgttcttgatctccttcacctg

SEQ ID NO: 412996 - DNA, 352 bp, Oryza sativa
  unsure (1)..(352): unsure at all n locations
ctgtgttgggcgccctcctttttttttttttttttttattggtacatcggtgttttatcgaacaatggcctgtccgcttgtcgaaatgcaaataacatcatcgggggatatgatcatcagttgacgagaacagaggaagaaacaaaaggtnagaaantgaagcctgaacaccccgcaccggcttgcatttctagataaacaaattggaggcttggtttaatttttggatgtattgttctatcaaccgggacacgcacaaaacattattacagtggcatatgggggtgtgagaactagaagctttggatgttgaggaacttgggcacctcggcccccaggtctgtgtcccacg

SEQ ID NO: 412997 - DNA, 518 bp, Oryza sativa
tccttcggctggttggctcctgtgttgcggccgtcctttttttttttttttagagtgaattctaatcattcatataataataataatagaacaaggaggttaaaatccaagctatacacacatagcatccaaaaatacacgacacttcaacccacaacccactgaccgagtcaccaaccagcattcaacagacacgacagcgtaaacactcaggcgccgtaaccagccagagcacaaactagaaagaaccaaacacctttccaatttccccccctttttgccccaagcaagcaatactgtaagtgcagttgaatgagtcaatttatgcctacttgcatttgaatccatggcacacggacaggattatgataaggatgagcgcaattattatgccaagaacaatcagcttgatcttcatgttttgcagccacatctttctccttacctgtgttcctgcctgcctgaaatcttgggcctgtgaacgagattcttggtcttgttaacgagcagtttaattt

SEQ ID NO: 412998 - DNA, 364 bp, Oryza sativa
  unsure (1)..(364): unsure at all n locations
agatgggaaacgaataaaatcattattgcaaaaacatcatcttcttcttcatcttcttagtgtacacaacaccaactcgatcatcatctcgtcgcactaaacccatcttccccaacccaaagacaacgaactcgctggccacaaatccatccaaccacaattaaccactgctaagctacggtcccccacttcacttgccggggacgaagttggtggcgtacgcccaggcgttgttgttgacggggtcggcgaggtggtcggcgaggttctcgagggggcccttgtccgngangatgggctggacgaaaaagccgaacatggagaacatggcgaggcggncgatttgagtctcttaccttgagct

SEQ ID NO: 412999 - DNA, 424 bp, Oryza sativa
gtttggttgaggaggatcgaggcagccgtcgcggcggggctcacgctttgctggcagcggaagcatacggattataaaagagggggcgcgagatccagatctggcgccgctgcgccccccctacctgctcttcctgaccctcgacttcgcgctcctacggatcggccacctccacgacctgtcccgtctgcacgacctcctcttcatctacctcatgcggctgacggtacgctgacacaaaaggtcctgaagttgtttctggcaacggattgcgaggaaatcgccttgcttgttcagttgctcaacattaagcagccgcttgtaccggtccttcccacgaggtgctctgacaagttctagaagtgacactgattaggtcagtcttggttacctcagaaaagatgtctttggaaattcacgacag

SEQ ID NO: 413000 - DNA, 293 bp, Oryza sativa
cactccttatcctagagcaagaagctcatctcgggggggtctcacatggaaagcgtgggcaccaccacatccagcctgctgaagacctacttagctggcgcgcgcctccccgtcgtcgactcgaaccccaccgaattcgtcgagccgcgcaccggcagagccatctgcaactccatctcttaggatgacctcactcccccctacgacctcaacagccatcaggttcagccccatcaacgagttcatcgtgtcccgcgagaggacccggcggttcatgaccgacatgatcacct

SEQ ID NO: 413001 - DNA, 474 bp, Oryza sativa
  unsure (1)..(474): unsure at all n locations
gcttaatctggcttgccctggatggttcaattgggccggtgtgtgctganaagtgtggtgaatgcaagatatcaattgaagacatggcaactagttcattacgatgcgttgcttttgcatattgtccttgtgaaattgaaagaatcccaaaggaagacatagctgattggaagttacctgaggatgacctgactctgctttgtattgtgggtataaaggtatgtggtggttatttcggactatctgtgtgtttgagggaattcgatgtattaatttggcacaaataatcagaatcccttgagatgcttatctgttgaagagcatcatgcatattgccctgttcttttctatctccctcttgcttatgaagaaatgatttttgctttttaaacaagatataggataactttgatgaattgattcgcagagtacatggataggctttgacaaaaacatctgatatatattacaatg

SEQ ID NO: 413002 - DNA, 390 bp, Oryza sativa
gtttgcataccagtatgagggggctaccggtgaagatggtaggagcccaagcgggtgggacactttcactcatgcagggaagatgccggacaagagcaccgccgacatgggctgccggtggctaccacatatacaaggaggacgttaagttaatgagtgatactagcctggaggcataccggctctccatttattggtctacgcttattccaagaggaagaggacccgtcaatcctaagggactcgagtactacaatagcctgatagatgagctagtcgaacgggggatcgagatacatgtgactgtctaccacctggattgccctcaaattcttgaagatgagtaccatggctggctcaaccaagggtcattgacgatttcacggtgta

SEQ ID NO: 413003 - DNA, 461 bp, Oryza sativa
cttttgcagcaatcattgagtttgtcaaggcgggggatctctatcagtgggagggactcaatatgccagcagttgcacagctggaaaaagacgaaaagtatcagctggtttatgagctcttgaagatattccttactcagaggcttgattcctatttagagtttcagtcagctaattctgccttgctgaaaggttatggactggttcatgaggattgcataacacagatgagactgatgtccctgcttgacctcagcagccgatgtgctggggagatcccttaccatgcaatcatagatgcacttaagatcaatgatgatgaagtggagtattggattgtgaaagctatttcatgcatgatattggattgcaaagttgaccagcttaaccaggttatcattgtcagtcagcatactgagaggatatttgggatgccacagtggcagagtttacgtgcaaag

SEQ ID NO: 413004 - DNA, 440 bp, Oryza sativa
gtttcattacccgcaccgactaattaagggcgggcattttaagccatttcgagggacgtcatggcccggagtgccttcttcttccactgcgtcaccgccgtcacggcgtgcatcgtctctacagccgcggcgctcagaggcacggccacattctacggtgggagcgacgcctcccgcacaatgggcggcgcgtgcgggtactgcaacctgtacttgacggggtacgggacgaacacggtggcgctgagctccgcgctggtcaacgacagcgcggggtgcggcgagtgctaccagatcacgtgcgaccagtccaactcgaagaggtgcaaggcgggcacgttagtgaccatcaccgcgaccaacctcttgccaccggactactccaagccgagcaacgactgcggatggtgcaacccgacacgccagcactaggacatggc

SEQ ID NO: 413005 - DNA, 441 bp, Oryza sativa
tttgcttttatagttttggtgagccgtttctggcacggttgccaatttcctacgggggaaaaagagctctataccaaattgctgagttcttgaagtatgaagatgaaaattctcagtatatctgcattggtgctgcacagaaggcattatccatgttgtgctgttggattgaaaatcccaattcagatgcattcaagcgtcatttggctagagtagctgattttctatgggttggcgaagatggcatgaaagttcgggtctgtgcgggtcaattatgggatgttgctttcgcagtccaagcgatattagcgtgtagcatcgcagaagaatttggaagtacccttaagaaagcacatggtttcataaaaacttcccagattatggacaatccttctggtgacttcagcagaaagtaccgtcacatatctaaaggaggatggg

SEQ ID NO: 413006 - DNA, 371 bp, Oryza sativa
  unsure (1)..(371): unsure at all n locations
tcgttagcagagcaagcaaccaatcancagggggggttgcaatgcaaccggggggggctaccacctgctcctgctctcccgccagcaggcggcggcctcgctccaatgcggcctctccttccggaggcagcccggcaggctcgccggtgggtcgtcggccccgagcgtgcggtgcatggcggccgtcgacacggcctcggtgcccgccgcgacggaggctagcaagaagagcagctacgagatcaccacgctgacgacgtggctgctgaagcaggagcaagcctggaccatcgacggcgagatgaccatcgtgctggccagcatctccacggcgtgcaagcagatcgcctcgctggtgcaacgcgcgccca

SEQ ID NO: 413007 - DNA, 406 bp, Oryza sativa
ttgtttgccacgccgtccgctcaggccgaggggcagctttcatggggagaagggggggagaacatgtcaagcgacggagggccggtgcttggcggcgtccagccggtggggaacgagaacgaccttcacctaatcgacctcgcccgcttcgccgtcaccgatcacagcaagaaggccaatgatctgctggagttcgagaagcttgtgagtgtgaagcaacaagttgtcactggcactttgtactatttcacaattgaggtgaaggaaggggatgccaagaagctctatgaagctaatgtctgggagaaaccatggatggacttcaaggagctccaggagttcaagcctgtcgattccagcgcaaatgcctaaggcccatctcggatcctatgggtatcaagttatc

SEQ ID NO: 413008 - DNA, 452 bp, Oryza sativa
  unsure (1)..(452): unsure at all n locations
gatttgtttatggtcttaaagagtgcaacatggggtaggttgtcatctaccggtgccggcaaggggaggagtaagcagtcaagcaacaaagtgactcatggattccacttggtggaagggaaatctgggcatgacatggaggactaccatgtggcagagtacaagtatgacaagagccatgagcttggtctctttgccatttttgatggtcacttgggagacagtgttccaagttacttgaaagctaaccttttctgcaacatactgaaagagcctatcttctggactaaccctcaggaagcaattaagaatgcataccgctctacaaacaaatatattttggagaatgccaaacaacttggacctggtggttcaacagcagttactgctattgtcgttgatggaaaggatatgtgggtagcaaatgtaggtgattcaagagcntgtgtgtg

SEQ ID NO: 413009 - DNA, 162 bp, Oryza sativa
ttttgttttaagagtggaaggtaccgaataagggggcaggtgttttgtgtgatggagaccagtgtaacatgtcatgaattcgtcgaatgttctgaagatgctgtgggttttgtggtcctgggatgtccacttcggtaaagatcgataagattcatcgtgggc

SEQ ID NO: 413010 - DNA, 399 bp, Oryza sativa
  unsure (1)..(399): unsure at all n locations
cattgggttcatggcgttcgacatacctccaccgcgcggtcctctttggattctgggagatgtcttcatgggtgcttatcatacggttttcgacttcggcaaagacaggatcgggttcgctaaatctgcatgaagagtgtatgtagatcactcttcagatcacggagattagcctgtatatttcataagctgaaaccaaacatgtatggttttatgatatatagtagctagtacacggacaaacctctttggttgcttctttctgaagaaaaaagaagaacagacatggatgtatgatctacctgatgtgtataaattgaatgatgcagtctgagaaactccnaaaaaaaaaaaaaagaggccgacttcaaaaaaaaaacaaaacggttcctttggtcc

SEQ ID NO: 413011 - DNA, 452 bp, Oryza sativa
  unsure (1)..(452): unsure at all n locations
tcgcttcgaggagaaagaaaccacctgatcgagccggtatctttgcagccgcaggagaggaggacgagtcgttcgttgtgcagcaggaggcggcggcgaagatgtcgtggcagacgtacgtcgacgatcacctgatgtgcgagatcgagggccaccacctcacctccgccgccatcgtcggccacgacggcaccgtctgggcacagagcgccgccttcccgcagttcaaaccggaggagatgaccaacatcatgaaggacttcgacgagccggggttcctcgccccgaccggactgtttcttggaccaaccaagtacatggtcatccaaggtgaacctggcgctgtcattcgtggcaagaagggatcaggaggcatcacggtgaagaagaccgggcaggcgctggtggtcggcatctacgatgagccgatgaccccanggcagtgcaacatg

SEQ ID NO: 413012 - DNA, 419 bp, Oryza sativa
gtttgttgttgatgtcctgtctcaaagggggtcatcggattgattgttggagccatactcccgtactggttctctgccatgaccatgaatagtgttggaagtgccgccctcaagatggttgaggaggttcggaggcaattcaactccattcctgggctaatggagggaactggcaagcctgactatgccacctgcgtcaagatctccactgatgcttccatcaaggcgatgattctccctggtgctttggtgatgctcacccccatgatcatcggaactctctttggtgtggagaccctgtctggtgttctggctggtgctcttgtttccggagttcagatcgccatctcggcctccaacactggtggcgcatgggataacgcaaagaagtacattgaggcttgtgccagtgagcatgc

SEQ ID NO: 413013 - DNA, 479 bp, Oryza sativa
tggttctcttcttcttctactttgtacgcgcggctcactctccgagcttgacggcggcggcggcggcggaggtcgtcgagtggtggtcggggagatgggtcaagatgaggtggaggtaggtgcggagaagaaggatcaagaactaccggaggtggaggtggtcgaggaggaggaggaggagggatccaagaaggcggcggcgggctgcgactactgcggcgacgcggcggcggtggtgtattgcagggccgacgcggcgaggctctgcctgccatgcgaccgccacgtgcacggcgccaacggggtgtgctcccgccacgcgcgcgcgccgctctgcgccgcgtgcgccgccgcggtggccgtcttccgccggggcgcgggcggcttcctctgctccaactgcgacttctccaggcaccgtcacggcggggagcgcgacccggcggcgccgttccacgaccggtccacggtgcacccgt

SEQ ID NO: 413014 - DNA, 385 bp, Oryza sativa
agtgatacttaacggcggtcatagggttgcgtttgccaggccagatgggggctttgcattccacaatgtgccagctggtactcatttaattgaggtctcctcattgggctacttattttcaccagttcgggtagacatcagtgccaggaatcctgggcacattcaagcagcattgactgaaaacagaagagttctaaatgagcttgtgttggaacctctcagagaagagcaatactacgagaaaagggagcctttctccattatgtcacttttgaagagccctatgggtatgatgcttggttttatggtcataatggtcttcgttatgcccaaaatgatggagcacatagatcccgaggagataaagcaagctcaagaacaaatg

SEQ ID NO: 413015 - DNA, 512 bp, Oryza sativa; identical to SEQ ID NO: 390512

SEQ ID NO: 413016 - DNA, 530 bp, Oryza sativa
  unsure (1)..(530): unsure at all n locations
tgtcgtttaccactcctcaccaagtcaaagtttgttggggtgctactcgacagctagcgggggcggcagccatgtctgggagaggcaagggctgcaaggggctcgggaagggcggcgcgaagaggcacaggaaggtgctgcgcgacaacatacaggggatcacgaagccggcgatccggaggctggcgaggaggggcggcgtgaaccgcatctccgggctgatctacgaggagacccgcggcgtgctcaagatcttcctcgagaacgtcatccgcgacgccgtcacctacacggagcacgcccgccgcaagaccgtcaccgccatggacgtcgtctacgcgctcaagcgccagggccgcaccctctacggattctgcggctaggcgaggcgatgcgaggccacacgattggatagggattcgattagagccatgttcttcagatcgtcgtagtagcctagcctttactcctgcagctgatgcttcatctcgtctcctgtaccttcattaatganggatgtatgaactact

SEQ ID NO: 413017 - DNA, 503 bp, Oryza sativa
ggtggttcgagcgtggccgctaggggacgcggaggggcggcggtggcggcgattgttcgcgggatgagcagcttcggcggcaccagctccgtcgcctccggtggtgggaagaggctcgagtacgggcggacgcatgtcgtgaggcccaagggcgcctacaaggccagtggcagtttttggtgggttcccatcaactgcatggtttgatgttgctgatctttcagaagacgctcctgatgatgttgaggggttggatgcctcagctgcacatgttgcaaacttattatcaactgagccagctgacatcaaacttggtgttggtggctttagcatgggcgcagctaccgccctttactctgcaacctgctatgctcatggaaaatacggaaatggcaatccatatcctgtgaacttaagtgtgtctgttggtctcagtggctggcttccttgtgccaggtctttgaagacaaaattgaagctcacggaggctgcacaaaggcttc

SEQ ID NO: 413018 - DNA, 501 bp, Oryza sativa
tttaactctaacaatctatgggtgaacttgaaggctggcattctcttagttgtggcgggggcactaaagatggagatcattccaaaccctaaggaagtggatggagttaaagttcttcagttggaaacagcagctggtgcagcaatcaggttctttgatcacgcaattggtatcaatgttccaaggtcccggttcctaccagtgaaggcaacatcagatttgcagctagtacagtctgatctatataccttggttgatggctttgttacacgcaacccggccagaacaaacccatcgaatccctcaattgaactgggtccagagttcaagaaggtcgggtgtttccttggtcgcttcaagtcaatccccaacattgttgagcttgacaccttgaaggtttccggtgatgtttggtttggctctagcatcacatcgaagggcaaggtgaccatcacagcccaacctggtgtcaaactggaaatcccaatggagcagtgatcg

SEQ ID NO: 413019 - DNA, 527 bp, Oryza sativa
ctctgccaaggccattggatgtacagttggaaacattggtacacaagatttggtggagggaaggcctcatttaattcttggattgatatctcaaatcataaagattcaacttttggctgatctgaatctcaagaagacaccccagctggtggaattgtttgatgacagcaaggatatagatgaagtgttgagcttgtcaccagaaaagatgctacttcggtggatgaaccatcatctgaaaaaagctggctacaagaaaaccgtcagcaatttctctacagatgtgaaggatggtgaagcatatgcttaccttctaaaagctcttgctccagagcattcccctgaaaccacattagagacaaaggatcctagtgagagggctaaattggtacttgaacaagcagagaagttggattgcaaaagatacttgactcctaaggatatcactgaaggttctgccaatttgaatcttgcatttgtggcacaaatattccagcatcggaatggtctaactagtgacaccagac

SEQ ID NO: 413020 - DNA, 445 bp, Oryza sativa
tggagcactcattggtgtgcaaaatattactgtcggctcctctaaacatgtctagggctgtggagcctcttgttgtatggcgcgtgattggggaagttcttgatacctttaacccatgcatgaagatgatagtgacctataactccaacaagcttgtatttaatggtcatgagctctacccatcagcagttgtgtctaaaccaagagttgaggtccaagggggtgacctgcgatctttcttcacattggttatgacagacccagatgtgccaggaccaagtgatccttatctaagggagcaccttcattggattgttactgatatacctgggacaacggatgcttcttttggacgcgaggtcataagctatgagagtccaaagccgaacattggcatccataggttcattattgtgctcttcaagcagatagcgcaggcaactgt

SEQ ID NO: 413021 - DNA, 465 bp, Oryza sativa
ctctaatcgcatcgacttcgattcgcttggttgggttctctctgttgattggggggtgagatttgaattctagcaatggctcctctcggtgacggagcggcggcggcggcggcggcggagcccaacctggtggtgtcgttcggggagatgctgatcgacttcgtccccgacgtcgccggcgtctcgctggccgagtccggcggcttcgtcaaggctcccggcggcgcccccgccaacgtcgcctgcgccatctccaagctcggtggctcctccgccttcgtcggcaagtttggtgatgatgagttcgggcacatgctggtggacatcctgaagaagaacggggtgaacgcggaggggtgcctgttcgacgagcacgcgcgcacggcgctggcgttcgtgaccttgaaaagcaacggcgagcgcgagttcatgttctaccggaacccgagcgccgacatgctcctg

SEQ ID NO: 413022 - DNA, 493 bp, Oryza sativa
cttccactcttctcccttctcctcgctcttcccgggccgccgtcgacgcagcggagcagcaacagcaggcgagcgacatgggagggtttgtcaagacccagaagacccatgcctacttcaagcgtttccaagtcaagttcaagagacggaggcagggcaagactgactacagggccaggattaggctcaccaaccaagataagaacaagtacaacacaccgaagtaccgctttgttgtgagatttacaaacaaagatatcacagctcaaattgtctatgctaccattgcgggtgatatcgtgatggctgctgcctactcccatgagctgcctcgttatggtcttgaagttggtctcaccaactatgcggcagcttactgcactggcttgcttctggctcgccgtgtgctcacgctccgtggtttggaccaggagtacgagggcaatgttgaggccactggggaggactactatgttgaaccagctgatgaaag

SEQ ID NO: 413023 - DNA, 536 bp, Oryza sativa
gttatttcttccagttagctgctacgattctctggggggagcttttgcagaagctggcgcctcagacatggaaagattttattgtccctttccaaactgttcagttctactagaccttagtcagcacttctctagggcaagtacatcaagtcagtcagacctcaattgtgttgagtgcccagaatgccatagagatatctgtatcaactgtggagtgccatggcatgtcatgatgggctgtgatgagtaccagagcttgcctgttgatgaaagagatgcaggagacctgtctttgcatcggctagcacaaaacaataggtggaggcgttgtcagagatgccgacgaatgattgaactcacacaaggctgcttccatatgaattgctggtgcggacacgagttctgctactcctgtggcgccgagtacacaaatggtatacagacatgccaatgtgtgttctgggacgaagagagcatcgaggccttcttcgcagcgcattccacccaagcatctgagatatgggcatgggacacat

SEQ ID NO: 413024 - DNA, 531 bp, Oryza sativa
ggtaattactgttgctaaattagctgaagaaggcagggttgctataaggaacataggaggagatgccatcaaagcttacgataagcttgagaaggaaaaaaaactttctgaagataacgtgaaggatttgtccgctgatctacaaaaagttactgacgagtacatgaaaaagatcgaagctatccaaaagcagaaggaacaggaactcatgaaaatttagacaccaggttttaatcttgaaactggtgagttcatcttcctgcgaagtagatgaagccgaagaaaacaatgtcctcagctaacacggtgaattatgcggtcacagatttcttgagccttttccatcgttctgatggccggcattttgccggatgcatctttttgggctggagtgcaatttcagacaatgttgccgtgtccttcattttcatttttgtaattattgtgtgtactccgtgtaaaagtaggtcttgaccttatccttgttctaccgctacattgtcaatattcctcacgtgaattaaaatgcta

SEQ ID NO: 413025 - DNA, 516 bp, Oryza sativa
gtctccccctccggcgacgtagctcgagctcgcaaccatggcgaggggattgaagaagcatctcaagaggctcaatgcgcccaagcactggatgctcgacaagctcggcggagcttttgcccccaagccatcgtctggacctcacaagtccagggaatgcctgcccctgatcctcatcatcaggaacaggttgaagtatgcgctgacataccgtgaggttatctctatcctgatgcagcggcatgtcttggttgatgggaaggtcaggactgacaagacctaccctgctggtttcatggatgtgatttccattccaaagactggtgagaactacaggcttctctatgacaccaagggtcgcttccgccttcagtccgtcaaggatgaggatgccaagttcaagctttgcaaagttcggtctgtccagtttggacagaagggcattccctatctgaacacctatgatggacgcaccatccgctacccggaccctttgattaggctaacgacacaatc

SEQ ID NO: 413026 - DNA, 508 bp, Oryza sativa
ttggtccggcaagctgcagccaagacaaatggggtggctggtgatgggacaacgacttctgttgtccttgctcaagggatgatcacagagggtgttaaggttgtggctgctggtgctaatccagtacagattacccgtggtatagagaaaacggccaaagcacttgtgagtgaactccaaaaaatgtccaaggaggttgaagacagcgaacttgctgatgttgctgcggtaagtgctggaaataactacgaaattggcaacatgatagctgaagctatgaacaaggttggacgacagggggtggtcacacttgaagaaggaaagagtgctgaaaataatctctatgttgttgagggaatgcaatttgatcgcggctatatttctccctactttgtaactgacagtgaaaaaatgtcagtggagtatgagaattgcaagttgctccttgtggacaagaaaatcaacaatgccagagatcttataacaattctggaggatgctattaggg

SEQ ID NO: 413027 - DNA, 507 bp, Oryza sativa
atttcatcaagaaccacctagcgagagcgagagggatcgtgagagatagagcgcggcggcgatggcgtaccagaggggggagacgtcgtctgtggtggaggcgttcacgctgtcgccgctgccgtacccggtgatcctgatcctgctcatggtgatgctgctgctgggggtgtcgtggttcttcacgtacgaggacttcatggaggaggcggcggagcagctcagctgggcgctgctgctcgtccccgtcgcgctcgtcctcctcatccgctggatctcctccgtcgacaccttcgacggctacttcagcttctacccaaccgagcgccgctggaaccgctacgacccgggccccgccgaggggagctccccatggggcgtcgccatggtcgtcctgctcctcctcgtcctcgcctccttccactccaccttccaggacatgtggaagccctgatcagtgattctactgctactcgtcgtctttgatatccgcacgcctatatgcgt

SEQ ID NO: 413028 - DNA, 523 bp, Oryza sativa
gttttttgtttgcatattacggccactttccttggatattaccaagcaagattcagaaatcgaggcagctcagtggatgcctgtggaggaatttgctgctcaaccatttgtccagaaacatgagctagtgaagtacattcttgaagtgggtttggcgaaggttgacaaggactatgcaggattttcgccaatcctcataaaatccgcattcacggacaaaaaatcgttcttttacatgaacaggagggacctggacaaggcctcagaatccagtagtacacagaaaaagactgaaaaacctttgttcatggaaaaactgtagctttcatactggatctttttttccatcactggtagcttctacacctgattttgaccgaatgttgccgctccaccagtcctgtaattcagaaaaaggagcagcagttcagaaatacagctgaatttgttgtacctatgaatttgtattgaatatttataggcttaccaaataatgaaaacatttgttggacacttggacttc

SEQ ID NO: 413029 - DNA, 523 bp, Oryza sativa
tataaattctcaaggtaatttacctattttgagccaagctgtatgcacaattcctctgggtacctgggttccaaaaattggtgatcctaatggccgtccattggctatgttgcggcctaacacatctcttagcgctgccctgaatttgctggttcaagctggtgtgagctcaataccaattgtggatgacaatgactcactgcttgacacatattccagaagtgacatcacagctcttgcaaaagacaaggtgtacacacacattcgcctagatgagatgaccattcatcaggctctgcagcttggacaggatgcaaattcgccctttggattctttaacgggcaaagatgtcagatgtgtctacggtctgacactgtgttgaaagtgatggagcgattagctaatcctggggtgcgccgtgttttcattgtggaagctggtagcaaacgtgtggagggcataatatcactgagtgatattttcaagttcttgctgagctaagtgaaaatgcccgagccatct

SEQ ID NO: 413030 - DNA, 451 bp, Oryza sativa
cggcggtgctcgccgagaggttccgcgacgcgcgccccggtgccgtcaccgtcgccctcggccccggcggcgccaactccctcgcctactcctcccacggccagagccccctcctccccaggttgttcgcggcgacggacgagatattctgcctgttccaaggcacgatcgagaacatcgcggtgctgaagcagcagtacgggttgcacaacaagggctccaccgagatcaacatcatcatcgaggcttacaggacattgagagacaggggaccttaccctgcggatcaagtcgtcagagacatcaacggcaagttcgcgttcgtgctctacgattgctccaacaactccgtcttcatggccaccgatgctgatggtagcgttccattttattggggagttgatcctgacagccgtcttgtggtttctgatgatgacgaaattgtgaataa

SEQ ID NO: 413031 - DNA, 521 bp, Oryza sativa
  unsure (1)..(521): unsure at all n locations
gctactggacatactctactactactagccagtgagctagctaactaactacgtggctatggcccccaccgtgatggcctcctcggccacctccgtggctccattccaagggctcaagtccaccgccggcctccccgtcagccgccgctccaccaactcgggcttcggcaacgtcagcaatggcggaaggatcaagtgcatgcaggtgtggccaattgagggcatcaagaagttcgagaccctatcgtacctgccaccactcaccgtggaggatcttttgaagcagatcgagtacctgcttcgatccaagtgggtgccttgtctcgagttcagcaaggttgggttcgtctaccgtgagaaccacaggtctcccggatactacgatggcaggtattggaccatgtggaagctgcccatgttcggctgcaccgatgccacccaggtgctcaaggagctcgaggaggccaagaaggcctaccccgatgcctttgtccgtatcatcngcttcgacaacgtcaggc

SEQ ID NO: 413032 - DNA, 541 bp, Oryza sativa
ctttgtccccacattgcctctcattgtaaaatagtaggaactgataatccacaggaactaaacaacaattaaatccaattatggacggattggtaggcctcttgaaaatacgggtggtgcgtgggattaaccttgcctaccgcgacacaagaggcagtgatccatatgtcgtccttcgcctcggcaagcaaaaagtgaagactagtgtaaagaagaaatctgtgaatcctatttggcatgaagagctaactttgtcgatcatgaaccctattgcaccgattaagcttggggtgtttgacaaagacactttcagtagagacgacccaatgggagatgcagaaatagacctggagcccttatggaagttctgaacatggacccggagaacattcggaatggttccatcataaaaacaattcgaccatccaaccagaactgccttgctgatgagagtcacctattctggaggaatggtaaatttgtccaggacattattctccgacttagaaacgtcgagagtggtgagctgcaagtgcaactg

SEQ ID NO: 413033 - DNA, 528 bp, Oryza sativa
tcgagaaaaggcctgtgtcaaggagagggtaggagcaccttgctctcctttgccttcagagaaaccggaagcaatggcgtctgctactctcctcaagtcatctttccttcccaagaagtctgaatggggtgccacccgccaggctgccgcccccaagccggtgactgtctccatggttgtccgcgctggtgcctacgacgatgagcttgtcaagaccgcgaaaaccattgcatcaccaggaaggggtatccttgccatggatgagtcgaacgcgacctgcggtaagaggcttgcgtcaattggccttgagaacaccgaggccaaccgccaggcttaccggaccctccttgtcaccgcaccgggcttgggacagtacatctccggtgctatcctcttcgaggagactctgtaccagtcaactgtagatggcaagaagattgtcgacatcctcactgagcagaaaatcgttccaggtatcaaggtcgacaagggtcttgtgccccttgctggctccaacaacgagtcatg

SEQ ID NO: 413034 - DNA, 503 bp, Oryza sativa
tcgattatattgtttctttcttatgtgcagcagtcggtgttactaatgggggagatgaaccagccgccgccgccgccggtggccgtgccgccgccgatggtgatgcagccaatcatgcatccgtccgtcggcaccggcgccgtcttcccgccgcacgagcagttccaccatctcgcctactgcgtacactccaacccttcctgggttcaggtggccgcacttgcattcctccactatcttgtgatgctgggttctactgtcatgcttgcatcaactattgatcctgcaatgggtggtaccccaggggataaggctcgtgttattcaatccttcctatttatgagtggcatcaatactctgcttcaaacacttgttggaacgcggctccctacagctatgaatgcttcctttgcatttgtcgtgccagtactgtcaatagccaaagactttgaacaaaataactatgcgagcagtcaccagagatttactcacacaatgagagc

SEQ ID NO: 413035 - DNA, 515 bp, Oryza sativa
gccactaatttcttctctctttctctctctctccgcgccctcgcatcgcacgtgaggcagtcgagggatagcggcgcaatggcggcggcggtggtggcgaacggcgcgagcggcgactcctccaaggccgcgttcgcggagatatacagcaggctcaaggaggagatgctcgaggacccggccttcgagttcaccgacgagtcgctccagtggatcgaccgcatgctggattacaatgtgctcggaggaaagtgcaaccgcgggatctctgtcattgatagtttcaagatgttgaagggcactgatgttctgaataaggaggagacatttcttgcctgcacccttggttggtgcattgaatggcttcaagcttattttcttgtgcttgatgatattatggacaactctcaaacacgacgtggccagccttgctggtttagggtgcctcaggttgggctcattgctgtaaatgatggtattatccttcgcaaccatatttcacgaattcttcaacg

SEQ ID NO: 413036 - DNA, 337 bp, Oryza sativa
atcgcgtggggctcccttcgctttcttgcggggtatggtggagttccggagggagtccacagtgaagaacccttatagtcagtctgtcgctgctgtaggaaaagcagccggtgattgggagaaatccttgactcccgcgcacaaggctccctagtccatatggccaacatgctctggccgctacaacagggccattgctgactacagcaaggtcgagatccctgttggcatggagcgctaactttgggaataatgagccctcttggaccaatttaacttggggtggttgacagacactctttaagatgacaccacccgctgggagaagcatgaatac

SEQ ID NO: 413037 - DNA, 490 bp, Oryza sativa
tcggtctaaagcatgtgcttctgcaagcattactgggttgaagaatcttaacaggggaacagtcgatgttttagcttctagggttttcacctattactcttatgtccacgaactcaccagcagccttgctgaaattcgtggaactcttctggcattgcacagaatggcaactttacatcgtgatgagcttggtcaggaaactctactcaacctgcttcttcgcaactacctgcactacaacttgtatgaccaagcagaaaagcttaggtccaaggcaccgcgttttgaagcacattctaatcagcagttctgcaggtatctgttctacttgggaaaaattaggacaattcagttggagtacactgatgcaaaggaaagcctactgcaagctgctcgaaaggcacccactacagctcgtgggttccgagttcagtgcaacacgtgggctatcatagtgagattacttttaggagaaataccagagagaact

SEQ ID NO: 413038 - DNA, 506 bp, Oryza sativa
  unsure (1)..(506): unsure at all n locations
aaggatggcacccaggcttgcccccagtgcaagaccaagtacaagcgccacaaggggagcccggcgatccgtggggaggaaggcgaggatactgatgctgatgatgtcagtgactacaactaccctgcatctggcagtgccgaccagaagcagaagattgctgataggatgcgcagttggcgcatgaatgctgggggtggtggagacgtcggccgtcccaagtatgacagtggcgagatcgggctcaccaagtatgacagtggcgagatccctcggggatacatcccttcagtcactaatagccagatctcgggagaaatccctggagcttcccctgatcatcatatgatgtctcctaccggaaacattggcaagcgtgctccattcccctatgtgaaccattcaccaaatccatcaagggagttctctggcagcattggaaatgttgcctggaaagaaagagtngatgggctgaaactgaagcaggacaagggagcaattcccat

SEQ ID NO: 413039 - DNA, 535 bp, Oryza sativa
  unsure (1)..(535): unsure at all n locations
gttgagagctcggacaccatcgacaacgtcaaggccaagatccaggacaaggagggcatccccccagaccagcagcgtctcatcttcgccggcaagcagctcgaggatggccgcacccttgccgactacaacatccagaaggagtctaccctccacctggtgcttcgtctccgtggtggtatgcagatcttcgtgaagaccttgactgggaagaccatcactttggaggttgagagctccgacaccattgataatgtgaaggccaagatccaggacaaggaggggattcccccagaccagcagcgtctgatcttcgctggcaagcagctggaggatggacgcacccttgccgactacaacatccagaaggagtccaccctccacctggtgctccgnctccgtggtggtcagtaatcagccagtttggtggagctgccgatgtgcctggtcatcccgagcctctgttcgtcaagtatttgtggggctgatgtctacttgtngtctggttaatggaccatcgagtccgtatgatatg

SEQ ID NO: 413040 - DNA, 525 bp, Oryza sativa
  unsure (1)..(525): unsure at all n locations
ggttattgcctgcataggggagctgttggaagagagggatgcagggaaaacttttgacgtgtgttttaagcagatgaaggcttttgcagacagtattacaaactgggcggatgtagtaattgcatatgagcctgtttgggctattggaaccgggaaagttgctactcctgagcaagctcaggaagttcatgctgctgttcgtgattggttgaaaaccaacgtgtcacctgaggttgcttgcggcattcgaattatatatggaggttctgtaaatgcagccaattgtgccgagctagcaaagaacgacgatattgacggcttccttgttggtggtgcctctttgaagggtccggattttgccactattatcaactcggtgacttccaagaaagttgcagcctgatgtaacccttctgtagaaataaatgacccagaggcagcgagacggctaccacaccatattgcttgatagagatacttcgtgttcaatcaccgngcttgttttggcacacgaggggataatgc

SEQ ID NO: 413041 - DNA, 478 bp, Oryza sativa
cttgcattctctcctctcaaatactcctccaccttggggtcatcaccaccactaacggcgacgccactgcctgaaccaagaacactgccctgctccacacgacatggcttctcaagaagagaagacgagcgtcaagtcggaggaggcctcgtcggcggcggaggagcagccacctcaagctgcagctacgccgacgcgcaggggtgtgccgccggccaaccccttcgacttctcaaccatgatgaacttgctcaatgatccgagcataaaggagatggcggagcagatcgccaaggacccggcgttcacggagatggcggagcacctgcagaagacggagcagtcgccgacggcgcggggggcggcacaggaagctgcggcagcggcagcgccggtgctggacctcaccaagtacgtgtcgacgatgcagcagctgatgcagaacccgcagttcgtggcgatggcggagcggctgggc

SEQ ID NO: 413042 - DNA, 421 bp, Oryza sativa
atccctttctcttcccgccgccgtccgtcgcgcgcgggctcttgtcaacatggggaggagacctgcaaggtgctatcgccagatcaagaacatgccgtaccccaagtcaaggtactgccgtggtgtccctgaccccaagatcaggatctacgatgtcgggatgaagaagaagggtgtggatgagttctcccactgtgtgcatctcgtctcttgggagaaggagaatgtctccagtgaggctcttgaggctgcgcgtatcgcgtgcaacaagtacatgaccaagtctgcaggaaaggatgccttccacctcagggttcgggttcacccgttccatgtgctccgtatcaacaagatgctttcgtgtgtccgggcaaataggctccagactggaatgaggggtgcttttgggaagccacaggga

SEQ ID NO: 413043 - DNA, 359 bp, Oryza sativa
tcggctttcttgatcaatggctttatggtggtggaggggaagacaccccactcccttggcaagtcctgatgatcatgcttcttggaactcctaaaggcccggcctatatctatgatgggctctctccgaaggctgcgcatggctacatgctgactaccagttgccttcttgaccaccaatgaaaggttccagcgtggaatcttggtgctgtgaagccatcgggctaagaaagcagtgatgttactacccgtgatacttgcaacctgaggttacatggcacctgagtaccccagcacggtgatgttaaatgagaggaggatggccaatagacgtggaggtctgattagggctactatagc

SEQ ID NO: 413044 - DNA, 440 bp, Oryza sativa
tcgctctcttgtcgccgatccgatccgtctccgcctccgtctcgcggcccggcctgcctgcctcgccgccggtggtcccgatccgaggttgctcttgctgggcatcaaacatgggtctggtgaaggatggcgccgccgatttggaggaggggaccctggagatcggcatggagtacaggactgtttctggtgtggcaggacctctggttatcttggataaagtaaagggcccaaagtaccaggaaattgtaaacatccgattgggagatggcaccactcgccgtggccaagttctggaagttgacggtgaaaaggctgttgtgcaggtctttgaaggcacttcaggaatagacaacaaatataccactgtgcagttcacaggagaggtcctgaaaactcctgtctcacttgatatgcttgggcgcattttaatggatctg

SEQ ID NO: 413045 - DNA, 498 bp, Oryza sativa
  unsure (1)..(498): unsure at all n locations
ctttgctgatgtggcagcgattctcgtacaggtgttagtgagacatccagctgtaggccctgaagcgtttcgaagacgctataggcttgacatggacagcgattgtggtaaaatgtttgtgacaaagctctctgttcacttgttcaatggagatgccagccaagcagccttccgcatcttgtctgactaccggaaaggcaaatttggctgcgtggccctggagagacccccaacatgagcaatggagatctcagatattcttagatgttaatagctgctctttgttcatagtaccacacacaacaattacagtgccctttgtagcaaccgtcacagcacgaactttcagatgtaggaggatgcaaaatgaattggcaatatggccccctctgtctagaggaaatgtagtgtggtagtaggtagttatttgaatgtaaatgaactgagctgatttgtaccaagatctttgtaggtngctacaaatatcatgtgtggatc

SEQ ID NO: 413046 - DNA, 531 bp, Oryza sativa
  unsure (1)..(531): unsure at all n locations
tcgattatgcatgggatacaaatgtccttgtcgaggcaatattggtgacaggacggaaacagtgcgcttcttccactgctataaaaggggagttgaccgtgtttttgttgatcatcctatgtttcttgagaaggtatggggcaagactggaccaaaattatacggtcctaccactggagatgactaccgggacaaccagttgcggttctgccttttatgcctcgctgctttggaggctccaagggttctcaatctcaacaattctgaatatttctcgggaccatatggtgaaaatgttgtcttcgttgcaaatgactggcacactggagtcctgccatgctatctcaagagcatctatcaggcaaaaggaatgtatgtgaatgctaaggttgctttctgcattcacaatattgcctaccanggtagatttgccagagaagactctgaacttcttaatctaccgacagtttccctggctcatttgattttattgatgggcatttaaacctgtagtangtagaaagattaact

SEQ ID NO: 413047 - DNA, 441 bp, Oryza sativa
tgattcaggaagagatggcacggcatgctcccggggatggtgtcaacgtggaagggggatcactggatgagcttgagacactcacaaacatccacgagcgggggttaagacagatacatgcaattcggcaaaggaaaggtagcagtcatcgcttgagtgccccttcgctcccgcacgtcccaggtttatactcctcgcctccttcaatggcagttggtctgccggcctcgctgatccccacatcgtgcgtagcacctaatggtgcaggcatccatggaaatggccacatgaatggttccatgggtagctgggtcaatccaacctaattcagaggatgcagcaccgcaacaccggtgtccattttgggcatcaattcgacgtatcacattttgcctggccgtatttaccagctggtgagcaatccaacgtgatacccttttt

SEQ ID NO: 413048 - DNA, 375 bp, Oryza sativa
tcttgttatggagcagctgccccctctgttgggtcggttgttgatgaaaagggggaggctgcaaacatggataatacaccaccaatggtagaagtgaagcctaaatacaggcacgacttctacaacagtgctacagaagttgtattgacaatttttgcaaacggtgttcctgctgcgaacgatggtggtgattttggataacaaatgttaagtgtgtcgattcgagtccctggaaaggagccgcaccattttcagcctcgtctgttttctaagatcatccctgagaaaagcagataccaagtgctatccacgaaggttgaaataagactggctaaagctgaacaaattacatggacctatatggattgtcaaaaa

SEQ ID NO: 413049 - DNA, 439 bp, Oryza sativa
tcgattatttctgtgaagaaaaacccaaatggtcaaatgtactctactcttggtgttttgacaaggggaactatcattgaggtgaacgttagtgaacttggtctggtaacccctgctggaaaagttgtttggggtaaatatgcacaagttacaaacaacccagagaatgatggctgtatcaatgctgtcttactcgtgtaaggacgcaatgctatacacttcattcttctcgttgcgactctcaccccagatgtacccgttcagtgggtctttttgaccgatcattcagagtagcgtgttttaaactgtgggcacaaggctcatctgttatatgcctttaacatatctggaatacattttacattgtatgtcgtggtgcagaaaagatctttactagttacattttacaacctgttatgagagctacaagtctggtctc

SEQ ID NO: 413050 - DNA, 511 bp, Oryza sativa
ggttatgttcagtgacacaagcaggcgggatcatgccgccatggccgtgcgggaggtcctcgccggcgacaggaaggtgggcaccgtgtccaggtcggcgaggaggaggaggcttgagctccggaggctcgctcggacagagtcggcagtggcggaggatgaccccgccaagagggtgcggtcggcgtgcgacagtttctacgactcgtcggagtcagctcacgtagctcccgagcccaccgcggaggtggcgagatggccggcgtgcgtgtcgcacggggcggtgtcggtgatcgggcgccggagggagatggaagacgccatcttcgtcgcggcgccgttcttggccgcctctaaggaagcggcggtggaggggagcggcgtctcggaagaggaaggcaaggaggaggatgaggggttcttcgcggtgtacgacgggcacggcgggtcctgcgtggcggaggcgtgccgggagccgatgcacgtggtgctcgccgaagaagtgcgggtg

SEQ ID NO: 413051 - DNA, 533 bp, Oryza sativa
  unsure (1)..(533): unsure at all n locations
cgtaatgcgtggattatatctaagcattgaatgcatgaacaccttgaatgaaggtcttgtgttgcatcatgcatcggttgggtgtccaaaaccacaatggtcaaaatatctgagtttccttaagagcagacggttttcagagcttacaaaaccaaagcattggaacggtcaaacgattgaaaatagaaatattgtgcaacatgttgcatccttgaaagaagatcacaagctaccaaaaatacatacccttttctctactgaatgtacgccatattttgactggcaaactgttggactcatgcacagccttcgtgtaagcagacaacctggtaatattacacgcttattgagttgtagcgatgaggacttgaagaactataagggccacgaccttgctcccacacattatgttccatccatgaacagacatccattgacaggggactggtaccctgcaatcaataaaccagcagcagttctccattggattagccatgtagagaccgatgcttgaantcattgtatcttggatg

SEQ ID NO: 413052 - DNA, 502 bp, Oryza sativa
atttgttcagcgtcgcctctcctcctcctccctaaccgctactcttacagaaccttggggaagctcccgctcccccccccttccgctccaatggcgaaggaaccgatgcgcgtgctcgtcaccggcgccgcaggacaaattggatatgctcttgtccccatgattgctaggggtgtgatgttgggtgctgaccagcctgttattctacacatgcttgacattccaccagctactgaatctcttaatggccttaacatggagctggttgatgctgcatttcctcttttgaagggaattgacgcaacaactgatgttgtggaggcctgcactggtgtgaatgttgcggttatggttggtgggctccccaggaaggagggaatggaaaggaaggatgttatgtcaaaaaatgtctccatctacaaatcccaagcttctgcttatgaggctcatgcaacccctaactgcaaggttctggtagttgccaatccaacaaaacaccaac

SEQ ID NO: 413053 - DNA, 369 bp, Oryza sativa
ccttagtttcgcgacctcgacgccgaccagtacggccggctcgcctgggtccgcaggacgcacaccatctacaactactgcgacgaccgcgaacgctaccccgccatgtcgcccgagtgccacacgcgaccgcgacgcctgagatctcatcgagatctgtgatcgatgcttgctggccgtccgatggatggatggatggatggggatgagtacgtgtacggctacgattaatcatgatttgagtgcgtgcagttaattaattaatgggtaacgatatgggggctatttgggcttgaatcgattggctgtatgcatgtgtggatagacgactggctaagggtgctgaattgggcgcgtgatatatggatt

SEQ ID NO: 413054 - DNA, 527 bp, Oryza sativa
actttattagcaccaaccccgtctccttcctccattcctccgccgctagaaccttctagaagctctcctcctcctcccatggcggcgacgatcgtgtccgtcaaggcgcgccagatcttcgacagcaggggcaaccccaccgtcgaggtcgatgtgtgctgctcagatggaacctttgcaagggctgcagttcccagtggtgcatcaactggtgtctatgaagctctcgaattgagggacggtggatctgattacttgggaaagggtgtttccaaggctgccgacaatgtgaactcggttattgccccagctctgattggcaaggaccctacgtcacatgctgagcttgataacttcatggttcagcagcttgatggaaccaaaaatgagtgggggtggtgcaagcagaagcttggtgctaatgcaatcctggctgtgtcactggccattttgcaagctggagctatcatcaagaagattcctctgtaccagcacattgccaaccttgctggaaacaagcaactggt

SEQ ID NO: 413055 - DNA, 522 bp, Oryza sativa
gcggcggcgagaccaaatcccccacttctctctcaatctctctctctgctagggtttatccctccgcgccgccgcccccggaagacgagagagcgccatggccggcggtcccgcggcggtgtcgttcctgaccaacatcgccaaggcggcggcggggctcggcgccgcggcctccctcctgtcggcgtcgctctacaccgtcgacggcggcgagcgcgccgtcatcttcgaccggttccgcggggtgctcccggagaccgtcggcgaggggacccacttcctcgtgccgtggctccagaagcccttcgtcttcgacatccgcacgcgcccccacaacttctcctccaactccggcaccaaggacctgcagatggtcaacctcaccctccgccttctctcccgccccgacgtcgtgcacctccccaccatcttcacctccctcggcctcgagtacgacgacaaggtgctcccctccatcggcaacgaggtgctcaaggccgtcgtcgcgcagttcaacgccga

SEQ ID NO: 413056 - DNA, 480 bp, Oryza sativa
ctcattcccaactcatcgatccatcagtagctagctagctagctagctgcattgtccggcgagagagatagctgctgcagggggcggccatggggaggggcaagatcgagatcaagcggatcgagaacgcgaccaacaggcaggtgacctactcgaagcgccgcacggggatcatgaagaaggccagggagctcaccgtgctctgcgacgcccaggtcgccatcatcatgttctcctccaccggcaagtaccacgagttctgcagcccttccaccgacatcaaggggatctttgaccgctaccagcaagccatcggcaccagcctttggatcgagcagtatgagaatatgcagcgcacgctgagccatctcaaggacatcaaccgcaacctgcgcaccgagatcaggcaaaggatgggagaagatctggacgggctggaattcgacgagctgcgcggtcttgagcaaaatgtcgatgccg

SEQ ID NO: 413057 - DNA, 407 bp, Oryza sativa
atggagaagaaggagaggagcagccatggcgtggtctgtggcagcggcggcgagcacgttcctggggacgaggctggcggacccggcgccgcagagcgggaggatcgtggcgaggttcgggttcggcggcgggaagaaggcggcggcgaataaggcggcgaggccgtcggcgccgacgacggacaggccgctgtggttccccggcgcggtggcgccggactacctggacgggtcgctcgtcggcgactaccgcttcgacccgttcggcctcgggaagccggcggagtacctgcagttcgagctggactcgctggaccagaacctggccaagaacaacgccggcgagatcatcggcacccggttcgagaccggcgaggtgaagtccaccccgttccagccctacaccg

SEQ ID NO: 413058 - DNA, 393 bp, Oryza sativa
atctgggtcagagtcatcatctgattctgattaggtcatatcagagcaggaactgaaggatctggaagtctccatgcctccagatgcagctctgcaatcacctgcaaccctgccgcgccggacctttctttcaaggagggtgggggagaaggggaaagagcctgaagaggcttggaaacagacatgtgggatatgcctctcggaagaacagagagccacgatacagggtgtgcttaattgctgcgcacattacttctgcttcgcttgcatcatggagtggtcaaaggtggagtccaggtgcccattgtgcaaacgccgattcacaacaattaccaagtcatcaatggcagatctagggcttggatcaaggaaagctgtcattagggtagaaaa

SEQ ID NO: 413059 - DNA, 435 bp, Oryza sativa
aggttgagcatgtcaaagctggggaaaccttcttgcagaaggggatagtgcttttatagtcaagctctactattcttttcaagatgaagaatacttgtatctcatcatggagtaccttcctggtggtgacatgatgactttgcttatgcgcaaggacacactgacagaagatgaggccagataatacattgcagaaaccgtattagcaatagaatctattcacaagcacagctacattcaccgggatatcaaaccagacaatctattgttagatcgcagaggtcacttgaagctttctgactttggattgtgtaaacctttggatagcagtaattttccaaatttgtatgagccagattatacatctactaagggcaccaagcctttacctgatagtagcagtcggctaagctcttctgctctaaagcgcacaca

SEQ ID NO: 413060 - DNA, 461 bp, Oryza sativa
gtttgtttgttgagtggaagcagatcaggaaggggcgggataatctgtgggacgacgtggtggccggtcctcgaccggagaccggcctcgagaagctccgcaaggccgctacaacccgcccccttgtcatcaacaaagatggcgacggcgaggcgagcggagtggcgtacaagcggacgcagtcgatgccgacgaccccgacgacgccggtgacgccgtcgtcttcgtccccgacgacggcgacgacgacgacgccgcggggcagcaacgtgtggaggagcgtgttccacccggggagcaacctcgccaccaagagcctcggcgccaacctcttcgaccgcccccagcccaacttccccaccgtatacgactggctgtacagcgacgagaccaggagcagccatcgctgaactgaataatcccattgatcggaggctggtcgatctctctgtcacgccatg

SEQ ID NO: 413061 - DNA, 499 bp, Oryza sativa
  unsure (1)..(499): unsure at all n locations
ggttcatgcttaaaagatgagagctcagttctactgcgctattctttggtccatgggaactgtgactttcaggaatatgttctggttcgaacagacctggatactttgctgatgcctatcttggaaatgctctacaatgcatcaagaaagacctccaatcagatatacatgctattgatagttcttcttatactcagtcaagattcaaccttcaatgctagtgtacacaaattggtgcttccgagcgtcccttggtaccatgagcgccttatgcatcaaacttctttgggatctttgatggttgttatactaatccgaaccatcaaatacaacctctccaaactgcgagatgtctaccttcatacaaactgccttgcaattctagcaaatatggcccctcatgtgcataggctgagtgcatatgcatctcaaaggctggttagcctttttgacatgctctctcgcaagtataccanattagccgagttaaaaaatgaca

SEQ ID NO: 413062 - DNA, 236 bp, Oryza sativa
  unsure (1)..(236): unsure at all n locations
ctttattgttacatggtggagccactgatggtgggggctgggtgaaaatgtttgaaggcgccccatagtcttcgtccaatcagggatgctttcaaggggacgaatattgctggtggcggctactataaggccgatcggaataaagcantctccactggatatactgatttggctgcctatgggcgctatgtgtcggctaatcctgatttgcctccgaggtttgaaatagatgcttc

SEQ ID NO: 413063 - DNA, 475 bp, Oryza sativa
  unsure (1)..(475): unsure at all n locations
tgttaattttgaagaagatgaacaaccaaagaagaaaggtcgacttggaagcccagcaaatcaatggatatcagtctataatgctaggagacccatgaaacaaagataccattacaatgtagcagatgccagacttcatcaacacatagagaagggaaatgatgatggattgttcattagctcaggggcatcttcaaccaatctttgggcccttattatggacgcgggaactgggttcacatgccaagtttatgaactctcaccaatatttcttcataaggattggattatggagcaatgggagaataattactacatcagtgccatagcgggtgcaacaaatggaagttccttggtggtcatgtcaaaaggaactccttacactcaacagtcttacaaagttagtgaatcgtttcccttcaaatggatcaacangaaatggaaagaaggatttcatgttacattaatgaccact

SEQ ID NO: 413064 - DNA, 483 bp, Oryza sativa
atccgtgagatcctatttggtcatccaaatgtcgagagatgcgcattcctgagaaacatcaatggagctacaacatattcattttcttctgctttgccagtagctgcccgaggaggatatggtccaatttttgaggacggaccaggctttgattcagcatttaaacttttccatggacgggatggaatagttccgctttcaggaaagtcatatttacctgatgagaacaacagtgagagcattgatgccaatcctgaacctgctctgctgtttaacccattggctgctagagctgccacaataagtctatctgcatttgggccatttggttttaacttctttaatggcaaggggaaaaggcagaacaagaagcccaacaatctaaatcagtcaaacaagaagcccagcaatccgaaccagaattccatgaaacagaaggaggtaactcatcatcgcacgaggcaatgagcaacgaatggatgg

SEQ ID NO: 413065 - DNA, 475 bp, Oryza sativa
gtttcagcagcgcctcatcttcgccggcaggggggtgtttgatggccgcacctgggctgactacaacatccagaaggagtccacccttcacctggttctcaggctcaggggtgggatgcatatcttcgtgaagaccctgactggcaagaccattacccttgaggttgagtcgtccgacactattgacaacgtgaaggcgaagatccaggacaaggagggcatccccccggaccagcagcgtctgatctttgctggtaagcagcttgaggatggccgcacccttgcggattacaacatccagaaggagtccacactccacctggtgctccgcctgcgtggtggccagtaagtcctcagccatggagctgctgctgttctagggttcacaagtctggctatttggcttccccaatggagctatggttgtctggtctggtccttggtcgtgtcccgtttcattaggtactatttacct

SEQ ID NO: 413066 - DNA, 425 bp, Oryza sativa
gccttggccatcttcgtggcgctgaggtcggggggggtggagctgctgggcctgaccaccatcttcggcaacgtctacaccaccctcgccacccgcaacgccctccacctgctggaggctgttgggaggactgacatccccgtggcagagggatcccatgtaacaatcaagaaagccaccaagctacggattgcgagctttgttcatggctcggatggtctaggaaatcagaactttcctccgccaactgggaagcccttagatcaatcggccgccgcgtttcttgtcgagcaggcaaatctgtaccctggacaagttactgtggttgcccttggtccacttaccaacctagctttggctatagaacttgatccttctttcccgaagaagattgggcagattgtgatccttgggggtgcgtattc

SEQ ID NO: 413067 - DNA, 448 bp, Oryza sativa
ttgctttcgcgtgggccgccgccgccgccttgtacggggacatggaggacgcggcgccgccgtcgtccggccccgggggaggcggcgccatggcggcgtacgacccgagctacgtgccggactcggtgaagacgttcgtgtcgcacctctaccgccacatccgcgaccgcaacgtgtacgagacgcaccagatgtacgagggcgggttcacccgcctgtgcgaccgccacttacgcgacacgccgtggccgccggcggaggccgtggcggcgcactgggacggcgaccacgtatttctcctcctataccgggagctctggttccgtcacgcccacgcccgcgtccagggcctcaccccggcgcagcgcgccgagtcgtgggacaactactgctccctcttcagcgtagtcctccagggcgttcttcaacatgcagcttcccaaccagt

SEQ ID NO: 413068 - DNA, 380 bp, Oryza sativa
gtcaagaaacgagggatccattacaccaacagacgggctatcttgccaatggccggggggtcctctttccggcttgccgtggcggtggcagcactgttggttgttggctcatgtgccactgagctcaccttcaaggtcgctgagggctctagcgccagtagtctagagcttgtcaccaacgtcgccatctctgaggtggagatcaaggagaagggtggcaaggactgggtggcgctcaaggagtcatcatctaacacctggacaatcaaaagtgaggcgccgctcaagggccccttctctgtccgcttccttgtcaagaatggtggctaccgcgtcgtcgatgatgtcatccccgaaagcttcactgctggctctgaata

SEQ ID NO: 413069 - DNA, 490 bp, Oryza sativa
catggatacaatcatgaagatccttaatcgggctattgaggtcaaggcaatgataaagtcaggagacaggagcttccaacctttcaaagggaaatcaatggcaatgatatttgccaagccgtcaatgagaacccgtgtttcatttgagacaggattctttttgcttggtggccatgctatctacctgggtcctgatgatatccagatgggcaagcgtgaagagacccgtgatgttgctcgtgtgctttctggatataatgacatcattatggccagggtttttgctcaccaagacattttggacttggcaaagtatgcagctgtacctgtcataaatggccttacggactacaaccatccatgccagataatggctgatgcacttactatgctcgaacacattggtcgtattgaaaacactaaggttgtctatgttggagacgggaacaatattgtccactcatggcttcgattggctgctttatttcct

SEQ ID NO: 413070 - DNA, 486 bp, Oryza sativa
gatcgctccccccctaattcccgccttgccccctcctgggcatgtcgccgccggtggccggcgccgcctcctccggcgacgggccgccggggcgcccgccgcgcgagctctacaccatccctgcctcctcgggttggctccagtgggatgagatccacgagacggagcggcgggcgctgccggagttcttcggcggcgccggggggagcgggttcgggacggcgtcgcggaacccgcggatctacagggagtaccgcgactacatcatcagcaggtaccgcgaggacacctaccgccgcctcaccttcaccgaggtccgcaaggcgctcgtcggcgacgtcacgctcctccggaagctattcgccttcctcgactccttgggcctcatcaacttcttccgctccccctcccgccccgaggcgcagcagcagcagcggcagacggaggcggaggcccgtctggaggcgcccggggggctgcaggtga

SEQ ID NO: 413071 - DNA, 451 bp, Oryza sativa
tggttccccaacggcgtcggagcctacgcagacctcatggcggagctcatcccgggcatgacggacggcacggtgcgcacggcgctggacacgggatgcggcgtagccagctggggaggcgacctgctggggcgcgggcggggcatcctgacgctgtcgctggcgcccagggacaaccacgaggcgcaggtgcagttcgcgctggagcggggcatcccggccatcctggggatcatctccacgcagcgcctgcccttcccgtccgcggcattcgacatggcgcactgctccaggtgcctcatcccgtggacagagttcggcggcctctacctgctggaggtgcaccgcgtgctccgccccgggggcttctgggcgctctccggcccgcccgtcaactacgagaaccgctggcacggctggaacaccaccgtcgtcgcgcagaaggccgacc

SEQ ID NO: 413072 - DNA, 490 bp, Oryza sativa
ctttcgaaggtggaaggatgtgtcttttccaaaacctctttacccacttgttcatcctgctgtattggttgaaacttatgagcaaggtgagagtgttgcacactatgtcgatgacctcgatggacatgatcgaattaaaagcgcccttgcacatattggcactcatgctctcctgaaaatgcttctggttgataactttgttcatgcggatatgcaccctggaaatattttggtccgtgttatacaaccaaggaattcaaataacacccttttgaagtctaggccacatgtagtattccttgatgtaggaatgactgctgaactttcaagtaatgatcgtgtgaatttactggaatttttcaaggctgttgcacgccgagatggtcgtacagctgcagaacgtacactgaggttatcaaaacagcaaaactgcccaaatccaaaagccttcattgaggaagttgaacggtccgtttccttttggggaacc

SEQ ID NO: 413073 - DNA, 487 bp, Oryza sativa
  unsure (1)..(487): unsure at all n locations
ccgtcatccgctacggcgagatggcgcaggcgacgtacgacgccttcaaccacgagaagctctcgccgcacgcgggcctctcgaggttcgccgcgtgccgcttcttcgagcgggcgcagctgccgggccactccgcggcgtaccgcgtcgccaggttcgtgtacgcgacgtcgtgcgtcgccgtgccggagccgctcatcctccggtccgcgtcgcgcgcgcgcaggtgcagggagagcaactggatcgggtacgtcgcggtggccaccgacgaagggaaggccgcgctcgggcgccgcgacatcgtcgtcgcgtggcgcggcacggtgcagtcgctggagtggatcaaggacatggacttcgtcatggtgccacccaagggcctcctccgggacaaagcttccgacgccatggtgcatcgagggtggctgtccatgtacacctccagggactctgagtccagccacaacanggacagtgctcgaga

SEQ ID NO: 413074 - DNA, 477 bp, Oryza sativa
gaattgcagtcaactgcaacctcacgtgtaaaggggcaaaaaaccgagataaaccatgctcttatggaggaaatacatgagataaaccaacagctcatagatacagagctccatgtttgcgaggatgatgctgagtcttttggtgctacatcagaagggacagaagggacagtcatcaaatgcacatttactgctgtggctgttagccccagcttgaagtccatgtttgcatcagcacagatgagtccaattttgccattgagggtgcttgtccccgctagctaccctaagtgctccccggttctcctagacaagttcccagatgaacaaagaaactcggatgacctgtcgaccaaagcgaggtccgaagttcagcatattgcttccgggtttagctgagcccatgtcactaagagaaattgcgaggacgtgggacgcgtgtgcccgcaaagtaattgctgagtatgctcaacagac

SEQ ID NO: 413075 - DNA, 439 bp, Oryza sativa
ttggttggatggcggggcgggcactgtcaccagcagggatctcaaccctgctgtggatgatggggggtcattcaaaacacgtgtggtggcacgtgacaacgcagctcacattatcaagtcagaggttctggatgtgccggccggaagtaaggtgggcaagctcaagtcgcacgtgacagagactaatatcgaggccgccggtgccggctcttgcttggccaagataaacgtggagtatgagctcgaggacggcggctcactgtcgccggagaaggagaagctcatactcgacggctacttcggcatgctcaagatgatcgaggactacctcgtcgctcaccctaccgagtatgcttaaaaattgtcataaaccaaaataatatacatccatttccgtattggtgcttcctgataattaaataatgtgagccacgacaaa

SEQ ID NO: 413076 - DNA, 484 bp, Oryza sativa
gccaggcttgattataacattatatgtgagcggagcgctgaacactgctttgtcatctgaacatcagaaggagatacggcggtatctctacaatcatcagaatgaagatggaggatggggtttgcacattgagggccacagcaccatgtttggctcagcgttgacatatgtttctttgagattgcttggggaggggccagatagcggcgatggatctatggagaaaggacgaaaatggattttagaccatgggggagcaacttatattacatcatggggcaagttttggctttcggtgcttggtgtatttgactgggctggcaacaacccagtgccaccagaaatatggttgttgccatatttcctgccgattcatccagggcgaatgtggtgtcattgccggatggtttatttgcctatgtgttacatttatggaaagaggtttgtgggcccagctacaccaattatattggaattaagaaag

SEQ ID NO: 413077 - DNA, 430 bp, Oryza sativa
gtgatgggtacgggtttgatccctgctgatggggagatttggcgtgttaggaggcgcgccattgtaccagcaatgcaccagaagtacgttaccgcaatgataagtctcttcggatatgcttcagatcggctctgccagaagttggacaaggcagcaacggatggggaggatgtggagatggaatctttgttctctcgactaacactggatgtcattgggaaggcagtcttcaattatgatttcgactcattgtcttacgataatggaatagttgaggcagtgtatgtgacactgcgagaagcagaaatgcggagcacttctcctataccaacttgggaaatacccatatggaaagatattttcccgcggcagaagaaggtcaatgaagctcttgcgctgataaataagactcttgatgaactaattgaca

SEQ ID NO: 413078 - DNA, 403 bp, Oryza sativa
cgcgccttcttcctcctcagctttgccgagacctggttgcctcaagccgtgttgcgtgctgcatgctctgaattgaagaactctcttgagcctgaccaggtatatcagaagtggagaagaagattggaagcatgagggaaatgggagagaagaggaggcgtggacaccttaaccctgctggttttgcaggagggttgcatgatcatgaggagaagaagaacgaggagcataagctagacatgagtggcatgtccatggatgccctcccacacctcaccatgtctcttggtcaagtcaccatcttggatctctctaacaacaatcttgagagcatcccggagtcaataatcgctcggctgctgaacgtggtggtgctggacgtgcggtccaaccagctgaaatc

SEQ ID NO: 413079 - DNA, 461 bp, Oryza sativa
ggctactgtcgacaaccgggttcccgagcatcggtccaggttcgaggctcgatcatggggcggtcagcctcccctgtggacggataatcatattcggtggctccatcgctgggctgcactcgccctcacagctgttcctcctcgacccagcggaggagaagccgacatggaggatcttgaacgtccctggccagccacccaagttcgcctggggtcatagcacatgcgtggttggcggcaccagggttcttgtcctgggtggccacactggggaggagtggattctcaatgagctccatgagctgtgcctcgcgagcaggcccgacgaagatgagtgattcccaactccattgcttgttcttatttatttagatcctatgattattactgatatctgttgttgtcacaaccctatgtaatagtagtaaaacggaaacaaaaggaggattactggtaggttt

SEQ ID NO: 413080 - DNA, 479 bp, Oryza sativa
gccagtaagctagctaactaactacgtgggtatggcccccaccgtgatggcctcctcggccacctccgtggctccattccaagggctcaagtccaccgccggcctccccgtcagccgtcgctccaccaactcgggcttcggcaacgtcagcaatggcggaaggatcaagtgcatgcaggtgtggccaattgagggcatcaagaagttcgagaccctatcgtacctgccaccactcaccggggaggatcttttgaagcaaatcgagtacctgcttcgatccaagtgggtgccttgtctcgagttcagcaaggttggggttcgtctaccgtgagaaccacaagttctcccgatactacgatggcaggtattggaccatgtggaagctgcccatgttcggctgcaccgatgccacccaggtgctcaaggagctcgaggaggccaagaaggcctaccccgatgcctttgtccgtatcatcggc

SEQ ID NO: 413081 - DNA, 425 bp, Oryza sativa
tcgaataaaaggaaaaaaaaacaaaacacaccgagccaaataaaagcgacaatgggatcgctcaccaccaacatcgtcttcgccgtcgccgtggtggcagcgctggtcggcggcgggtcgtgcggcccgcccaaggtgccacccggcccgaacatcacgaccaactacaacgccccgtggctccccgccagggccacctggtacggccagccctacggctccggctccaccgacaatggtggcgcgtgcgggatcaagaacgtcaacctgcctccctacaacggcatgatctcctgcggcaacgtcccaatcttcaaggacggcaggggatgcggctcatgctacgaggtgaagtgtgagcagctcgccggcgtgctcgaagcagctcgtgacggtgttcatcacggacatgaactacgagccca

SEQ ID NO: 413082 - DNA, 451 bp, Oryza sativa
  unsure (1)..(451): unsure at all n locations
cttgtatctttcacaggccgataaggactggcagccctggattgctcgagatgatgagcatggtcagaagatgtggagagtcaaccagcgaatagttaagctgatagcagagcttatgaggaaccacgatagcccagaagcattggtgatccttgctagtgcttcaaatcttcttcttcgagcaactgatggaatgcttgttgatggtgaagcttgtactttaccacaattagagctattggaagtcaccgccagagcagtccatctcatcgtcgaatggggagattcangtgtatccgtcgctgatggcctctccaatctgctgaagtgccgtctatcaaccaccatccgctgtctttcgcaccccagcgcgcatgtccgtgcactcagcatggtncgtgcttcgcgacatgttgaacagcggacatataaactccagtaagctcatcca

SEQ ID NO: 413083 - DNA, 485 bp, Oryza sativa
ttgtggcgccgtcgctgaagaagaaggggttcatcctgccgaggcccaagatggccaatgctgatcttggcaggatcatcaactctgatgaggtgcagtctgtggtgaagccgctcaacaaggaggtcaagcgcagggagaagaggaagaacccgctcaagaatgtcgccgctgtgctcaagctcaacccctacttcggcactgcacgcaagatggccacccttgctgaggctgcccgcatcaaggccaggaaggagaagcttgactccaagaggaccaagcttagcccggaggaggctgctaaggttaaggctgcaggaaaggcatggtacaagaccatgatctcagacagtgactatgctgagttcgacaacttctcgaagtggctcggagtgacgcagtgagcgttgtcttgttttaagttttgagtagcagcgttaccggatcttatctcaaggatttatcaatctgtttttacctgaaca

SEQ ID NO: 413084 - DNA, 470 bp, Oryza sativa
  unsure (1)..(470): unsure at all n locations
gtctcccgcgcgagccctcgtcgacgccgccggggtattgctgaaggaagaagagcaccaacctatttatcatgtcaggaggatcttcaccaaggtcaagacgaagcagctttaattctttatcaagagatctcgaactcccttcagagcaaggttgtctctctgttattgtcctcggggcttctggagacctagccaagaagaaaactttcccggcactcttccatctttttgcacagggatttatacaatcaggtgaagtgcatatatttgggtatgcgagatcaaacctttctgatgatgggttaagggaacgcattcgtggatacctcaaaggagcctcagaagaacatctctcagactttttgcaacatataaaatatgtcaagtggttcctatgacagncgagaaggatttgagaaattgaacaaggaaatttcagagtatgagaagtcaaacaaatcagaaag

SEQ ID NO: 413085 - DNA, 475 bp, Oryza sativa
ctcaagtcactgagagatgctttggttgggcttcctggagtgaatggtctgtccactgaacaaagaaagaggctaacaatcgcagtggagcttgttgcaaacccttcgattatattcatggacgagccaacctcagggcttgatgcacgagcagctgcaattgtgatgaggacagtgaggaacactgttaatactggcagaactgtggtgtgcacaattcatcagcctagcattgacatatttgaagcatttgatgagcttttcctgatgaagcgaggtggtgaagagatctatgctggtccactaggccatcattcttcggagctgatcaagtattttgagagtatcccaggggtcagcaaaatcaaagatggctataacccagcaacatggatgttggaggtgacaacaattggtcaagagcaagcacttggtgttgattttagtgatatatacaagaagtctgaactttacc

SEQ ID NO: 413086 - DNA, 481 bp, Oryza sativa
  unsure (1)..(481): unsure at all n locations
gctgcctgttatacccctgatggacagggtgcactcgttggctcccacaagggcaagtgccatgtctacgatatttctgataatatgcttaagcacaagaaacagattgatctacatattaagaaaaggaaatctagccagaagaaaatcacaagaattcagtttgttccagggagttcttcaaaggtcatcatcacatctgcagattcacgaattcgagttattgacagctttgaactagtttgcaaatttaaaggctttcgtaacaccaacagccaaatttctgcttgttcagctgtgaaagggagatatcttatctctgcaagtgaggattcccatgtatatatgtgtagatgtaatgatgattccgaaccaaacacaaagaagggcattgtttctatcacanatacccatgaacacttccactgcgagggtgtgacagttgctgtattattgccttgtgccagcagcacaatgacat

SEQ ID NO: 413087 - DNA, 454 bp, Oryza sativa
cggacgcgtgggagccaagccgcactcctggagtccaccactccgccgcgcaccactccccacctcccgacgagatggccaccctccgcctcacctccgtcaccctccgccccgccgcctccccctcgtccgccgccgggccgcggtccgccaacttcgcccgcgccgcggcgcgcgggttcccctcgctccgcctcgcgccgccgcgccgccgcggggacctcgccaggcgcagggccgccgccgacgccgtggcggaggggtacgcgacggcgctgtccgaggtggccttggagaacggcacgctcgaggcgaccgtgtcggacctggagaagctggagaagatctccgcggaggaggccatcgccgagtgctttgacaacccgacggggccgcgcgacgagacggcccagctcatcgacgagatcgccaagtcgtcggagctccaagcgca

SEQ ID NO: 413088 - DNA, 491 bp, Oryza sativa
  unsure (1)..(491): unsure at all n locations
tcgcttatttcccggcaacagcacggagatacaaattgaacacctgtatgcacatggggaacaacacgccgagcttcatggccccggctcgcccgggtgacctgctgcagatcatcagtaagccggcgcagccgccggcgatgtcgccgatgcccctcctgacgggctcggacgtggcggagccgccgctgccgcctgcaagaacagctcaggcgccgtcgctcgcgagcaggatgcaggctcatgccgcgatcgtcgtcacattggcgatgcttctcgcttgccatcccctggtatgaccggacaacgcagcaggttcacaagccaaaatactaatccagtctgtttgttctgttctttctttttttttctttttttttctcatgtagcgattcgtttcatcctcatgtatttttttttttgcattgatgatcgtccccgatttgcctattactgtcctcagnggtctcagtatatatgtgtggtatgaa

SEQ ID NO: 413089 - DNA, 483 bp, Oryza sativa
cgtctttctcggcggcggcggaggcggaggcgggggctgcggaaatggctcaccggctgctgcgagacgcgcaggcggacgggtgggagcggtccgacttccccatcatctgcgagtcctgcctcggcgacaacccctacgtccgcatgttgagagcagaatatgataaagagtgcaaaatatgtgcacgtccgtttactgtcttccgttggcgacctggccgggatgcaagatacaagaagacagagatctgccagacatgttgcaaactgaaaaatgtctgccaggtctgcctgctagatcttgaatatggtctaccggtccaggttagggatacagcactcgctattaattcaaatgatgcaatcccaaggagtgatgtgaaccgtgagtactttgcggaagagcatgatcgcaaggccagggctggaattgattatgattcttcccatgggaaggcacaacccaatgacaccattctga

SEQ ID NO: 413090 - DNA, 493 bp, Oryza sativa
cgacaacagcgggactgttgttggaatcaaatgcaaagatggaatcgtcctgggtgtggagaagctagtaacttcgaagatgatgctggagggatctaataggaggatccattcagtgcactggcactctggcttggctgttgctggtttagctgcagatggcaggcaaattgtttcaagagcaaaatcggaagcggccagttatgagaaggtctatggtgaacccatttctgtaaaagaattggctgatcgtgtggctagctacgttcatctttgtacactctactggtggctcaggccttttggttgtggagttattcttggaggttatgatagggatgggccacagctctacatgatcgaaccctcaggagtctcatacaaatactttggtgctgctctgggtaaaggaagacaggctgcaaaaactgaaatagagaagttgaagctttccgagcttacctgccgggaaggcattgtggaggttgcaaag

SEQ ID NO: 413091 - DNA, 477 bp, Oryza sativa
catactttggtggattttgtgaaccaagcagagatctgaacaaagttagcaccatgcgcgctaactgttgcattggactgcaaagcaaggtacatgatctaagagttatgatggaagattggaggagttatttgtccttacctccaagcttgaaaagattgagtgcattggcatggagggtgccgcaaaattgcagcctttcttggtcacaccaataaaacgtccttatggacagcaaaaagaaatgaaaatggtgaagcccgccgaaagcgctctgccttccccccgaaagaaccttcagctaaacatctaaacagtgtgacgagattctgattgaaaggtcgcggtaagttttgccaaacacttcggagatccttgacaatatagagcggagttgccggaccgctctggaaaaatacactacaaggatggagcggccttagcactgctcctcagctccgctggctgtaccgaacg

SEQ ID NO: 413092 - DNA, 477 bp, Oryza sativa
aaaaaaactcgttttcttttcttctcttctcttctctggttgcggcgaagggggagaggaaggtcgaggtcgacgagatgggcggcggcaatgggcagaagtcgaagatggcgagggagaggaacatggagaagaacaagggcgccaaggggagccagcttgaggccaacaagaaggccatgaacatccagtgcaagatatgcatgcagactttcatctgcaccacctctgagaccaagtgcaaagagcatgctgaggcgaagcatccgaagagcgacctcaccgcgtgcttccctcacctcaagaaataatggcggtggcatctctctgctcaatcagaagagaaaaagagaagctgccataatccactagtatcatcttgtatgcaatgactggttgccctatgtatgggtctaaactttggtcagctgctgctgctttttggttgtgtgcctcatctaatatgtaatgctctat

SEQ ID NO: 413093 - DNA, 491 bp, Oryza sativa
atgggtttgacctactaagatgtgcttatagtcataaaactaacctgcctttgattgccattaagggtttcatcggggttttagccgataagttatttagacgttgcatcggcttacaaggattacatacaagttggttttagccgattacaacaaaggtttcattgattatttaatcttgtgaatttaaccttcgtatcaagcaattattctatcatatcattattgactgattggtttctattggattatattattgttctattacattatcatcagctgattatctttatatcattatttactcaagtgtcatgattatctttatattattatttactcaagtgtcagaatctacattggacatatagctgattgctcaaaaccttatcgacatttgctggtatcgagtaacaccctaaaaattcgacgacaaaatctaaactctaataatacgtatcttcaaaaactttttaaataaagttgcatca

SEQ ID NO: 413094 - DNA, 364 bp, Oryza sativa
atggagccctgttgcagtgtcaaggacaggataggatacagtatgatttctgatgcggaagagaaaggcttgataactcctggaaagagtgttttggtggaaccaacaagtggaaatacaggcattggtcttgccttcattgctgcttccagaggatataaattaatattgaccatgcctgcatcaatgagcatggagagaagagttctactcaaagcttttggcgctgaacttgtccttactgatgccgcataagggatgaagggggctgtagataaggctacagagattttaaataagacacctgatgcctatatgctgcagcagtttgacaaccctgccaacccaaaggtacattatgaga

SEQ ID NO: 413095 - DNA, 456 bp, Oryza sativa
tcgagaccaagccctattccaggcaagaaaaagggaagattacaccaacaaacaaactagctagccaatggcctctttgtcctctttccggctcgccgtggcggtggcggcactgttggttgctggctcctgtgccactgagctcaccttcaaggtcgctgagggctctagcgccaaaagtctacagcttgtcactaatgttgccatctctgaggtggaggtcaaggagaagggcggcaaggactgggtggcgctcaaggagtcctcgtctaacacctggacgctcaaaagtgagtcgccgctcaagggccccttctctgcccgcttgcttgacaagaatggcggctaccgtgtcgtcgacgatgtcatccctgaaagctttacagctggctctgagtacaagagtggaatccaactctaagtaacagacatgtgtactctagttgggtcacatgc

SEQ ID NO: 413096 - DNA, 442 bp, Oryza sativa
atcccccctcaccgccttcaagagatccgccgcttctttgaagactacaagaagaatgagaacaaagaagttgctgtcaatgagtttctcccagcagaagatgccatcaacgcaatcaagtactcaatggacctctacggcgcctacatcattgagagcttgaggaagtgatctccagctgatcaactgcagaggctacatgattcactgaacagtttctcatcaatagtacgacatatgttaacatacatggtctaaaaccagtacttcggggatatataccttctactattcatgttaagacaagaagcagcaccttttctttccatgtatgccatgtcagatactcgggtcccaagcacctgacccctttgctgaactctctgctgcccaaaccgacagtttgctgaacggttacctaatagaaatcaaccatttacat

SEQ ID NO: 413097 - DNA, 495 bp, Oryza sativa
atgcgaatggtacgggccgttgatgcccaagctctgcgaccccttcaacccggacatgagcccccggaaatgcgcccccggcgaggtcaacttcgacaccgcggcggcggagtggaagaagttcgagtgccataccaccgggccgcccgggtccgaggtgtgcgcgacggaggggagggtgacgccggcggcgtacgggcagatgacggcggcggcgagcatcagccaggggctgtaccagtacggcccgttcttgatggagctccaggactgcagcttcgtccgggagacgttcacggcgatcagcgacaacaactgcccgggcctcgagctctacagccggcacgtctacctcggcctgctcctcatctccggcgccgtcatgatgtccatcgtcttctggatggtgcacacgcggcagcggcggcggcgctcgctcgggctcggcaggtagatgtgaagagtgatactgtacatcgcaatatggcatgcctg

SEQ ID NO: 413098 - DNA, 467 bp, Oryza sativa
ggctagacggccctcgtcaccggcggcacccggggcatcgggtactcaccccagcgcccttctctggttctcccctatcgctacccagtgaggagtgagacctccaccgcagagcctttgctgctcttccacgatcaacgcggggaattcatgcgcaggcatgcggtggtggacgagctggcggcgctgggggcggccgtgcacacctgctccaggaaggaggccgagctgggcgagcgcctcagggagtgggagggcaagggcttccgcgtcaccggctcagtctgcgacgtctccgtgcgggagcagcgggaacgcatgctccgcgaggtcgccggcctctacggtggcaagctcgacatcctcgtgaacaacgtgggaacaaacttttcaaaacaaaccactgaatactctgcagatgattactcgttcataatggccaccaatcttgaatctgcgtatcatct

SEQ ID NO: 413099 - DNA, 490 bp, Oryza sativa
aactaagctcacattcactgatctcctgaaggctgcaaaaaattttgacaaggagaacatcatcggttgtggaggatatgggctagtctacaaagctgagttatctgatggatcgatggttgccataaagaagctcaatagagacatgtgtctgatggagagggaattcagtgcagaagttgacgcactctctacagcacagcatgacaatcttgtgccactgtggggttactgcatccagggaaactcaatgttgctcatatattcctacatggagaatggcagcctggatgattggcttcataacaggaatgatgatgccagctcgtttcttaactggccaatgcgactcaaaattgcacaaggagcaagccagggtatatcttacatccatgatgtctgcaagccctaaatagtccaccgtgacataaagtgcaacaatattttacttgacaaagaattcaaagctcacattgcagattttgggcta

SEQ ID NO: 413100 - DNA, 443 bp, Oryza sativa
atgagttctggatctgcctgttgctcaccttcctcggctacatccccggcatcatctacgccatctacgccatcaccaagtaattcatcattagttactacatcatcaaccaaatcctcaagggatgggctccaaaccgcttcatctatcttctcgattgccgtgtgcttgttggaatttggaaatgatatatgcatccaaaattcagtcctgagtgctccaattcttgtcatctagtcattttcaatgtccccccagtctcttcctctaatgtttgatgatatgtagaatctcttgctgttaatctgttgctttcgtgtgaataagctcccctcttatgtatatctatctatgacttgttttactagtaaacttgattattgagagcttgagacttgcttccctgtctgtctgtatatcttgttccaacactggaactgaat

SEQ ID NO: 413101 - DNA, 443 bp, Oryza sativa
gatgctatcacttggatcattcaaaactggtgctattctcttggctggcctctttttctatgatattttctgggttttcttcactcctgttatggtcagtgttgcaaaatcatttgatgcaccgataaagcttctatttccaacaggagatgctgcacgcccattctctatgcttgggcttggtgacattgtgatacctggtatatttgttgcgctagcactgcggtttgatgtctcaagaggaattaagaaccgctacttcaatagtgcatttttgggttatacggtgggtttgaccgtgacgataattgtgatgaactggtttcaagccgcacagcctgccctcttgtacattgttcctggtgtgattggttttgttgctgttcactgtttatggaatggagaagtcaagccactcctggagtacaacgagtcaaaagctg

SEQ ID NO: 413102 - DNA, 487 bp, Oryza sativa
ccctaagggaaattgttgctcctcccagagctccgccgccaggccccgccccatctggatccgccgccatggccaccgcagtcgccgcctcccccgctcagtcccgcaagactgagacctacaccgacaccaagcgccgggatgacgtccgcggccttaacatagccgccgcgcgcgccgtcgccgacgccgtgcgcacctccctcggcccccgtggcatggacaagatgatctcctccggcgagcaggaggtcatcatcaccaacgacggcgccaccatcctctcccgcatgtccctcctccagcccgccgcccgcatgctcgccgagctctcccgctcccaggacgccgccgccggcgacggtaccactaccgtcgttgtcctcgccggatctctgctccgccgtgctcaatccctactctctgctggtgcccaccctaccgcggcagctgacgctctccaccggctcgccacgcgcgccgttga

SEQ ID NO: 413103 - DNA, 484 bp, Oryza sativa
gggagagagagcatctagctagggagagaaaggaagagacgagaggagagagatggccactgcttatgctcccatggcgagccagctgatgaagagcagcttggtgtgctccaagccgagggggctgtctggtgcttcgctgacaaggaggccccgcttcacagtcaaggccatccagtctgagaagccaacgtaccaggtggtgcagcccatcaatggcgaccccttcatcggcagcctggagacgccggtgacctccagcccgctggtcgcctggtacctctccaacctcccggcgtaccgcaccgccgtcagcccgctgctccgcggcatcgaggtcggcctcgcccacggctacctcctcgtcgggcccttcgcgctcaccggcccgctccgcacacgccggtgcacggccaggccggcgccctcggcgccgccggcctcgtcgccatcctcagcgtctgcctcaccatgtacggcgtcg

SEQ ID NO: 413104 - DNA, 491 bp, Oryza sativa
gcttccttggttacagccagcaagatggtaaaaatatgcttgtgtatgaattcatgcataacgggacgttaaaagagcacctccgtggaggccctgatgatgtaaaaataaatagctgggtcaagcgtcttgagatagcagaagatgctgcaaaaggaatagagtatctccacacaggatgctccccaactatcatccacagagacctcaagagcagtaacattctccttgacaagaacatgagagcaaaagttgcagactttggcttgtcaaaacctgttgtcgacgggtctcatgtatcaagtatagttagaggaacagttggatatctggacccagagtactatatctcgcagcagctaacagagaagagtgatatgtacagttttggtgtcattttacttgagctaatctcaggccatgagccaatctcaaatgacaactttgggctccactgccgtaacattgttgaatgggctagatcgcacatg

SEQ ID NO: 413105 - DNA, 492 bp, Oryza sativa
ctgccttccaccctgaaattgaggagcttgtctacagtgaagtcgagaacgatgaacacaagtttgtattgaaggacaagaacaagccaatcatcttctccatggctcgtcttgaccgagtgaagaacatgacaggtctggttgagatgtatggtaagaatgcacatctcagggatttggcaaaccttgtgattgtttgtggtgaccacggcaatcagtccaaggacagggaggagcaggctgagttcaagaagatgtacggtctcattgaccagtacaagttgaaggggcatatccgctggatctcagctcagatgaaccgtgttcgtaacggggagttgtaccgatacatttgtgacaccaagggagtctttgtccagcctgcattctatgaagcgtttggtctgactgtcatcgaagccatgacatgtggtttgccaacaatcgcaacatgccatggtggccctgctgagattattgttgatggggtgt

SEQ ID NO: 413106 - DNA, 469 bp, Oryza sativa
aaaaaatctcatcttccaatcccaacctggtctggtggaattcctgaatccgggtcgatcgagagctcacgatgtcggccatggagaccgacatcaacgcgccgacgacccccggccccgaccccgccggcgccggcgagggatcctgctctgccgccggcccctactcccgcaagcccaacaagcgcttcgagatcaagaagtggaacgccgtcgcgctctgggcatgggatatcgacgtagacaactgcgccatctgccgcaaccacatcatggatctatgcatcgagtgccacgcgaaccaggccagcgccaccagtgaggagtgcactgtcgcttggggtgtctgcaatcatgcttttcacttacattgcatcagcaggtggctcaagactcgccaagtgtgcccgttagataacagtgaatgggaatttcaaaaatatgggcactagacaccacctgctgtctg

SEQ ID NO: 413107 - DNA, 437 bp, Oryza sativa
ttcttattggagagtcgtgatattcacatacattttcctgctggcgcggtgccaaaggatggtccttctgctggagtgacattgggaacatcatgagtgtcactatttaaccaccgaaaagacagagctgacactgctatgacgggagagatgactcttaggggccttgggttgccaggtggcggtgttaaggataaggaacttgcagcacatatatatggcatcaagagagtaatattgccagaaagaaacatgaaggacttggctgaagttccagcacccattctctctggctcggagattatgcttgtgaagcgcatcgaggaagtacttgaccatgcttctgaaggacgatgcccattgagaccacacttcaagctatagcatcaaccaatctgaagatggagtttgatctggtatactttcctgctggttat

SEQ ID NO: 413108 - DNA, 479 bp, Oryza sativa
tggaaatccacaacttagagaaacactctgaaatgttgcttaatcagaagaagaatttagagactcaagtaagcgagcttaaagatatggaggcagtggcacatgatcagcatggaagaataaaggacttgagtgatgaacttagcaaaaaagaccaagagattgaaggtttgatgcaagcacttgatgaagaagaaagggagcttgaggtcttggagaacaaaagcaatgacttagagaaaatgcttcaagaaaaagaattcgctttaaagagtcttgaagtttctaggaccaaagccttgacaaaacttgcaacaactgttgacaagtttgatgagttgcatagcttgtctgaaagccttcttgctgaagtggaaaacctacagtcacaactgcaagagagagattcagagatctcttttctgcggcaagatatcacgagaagtaccaatgaactgctaacaactgaagagagcaac

SEQ ID NO: 413109 - DNA, 479 bp, Oryza sativa
gccccgtggtcaagccgtgccgcgtcgtcgtctccctcgcctttcccctccgctccgcttcgccgatcaagcttgcattgagacaaagaaatcagctttcatctgtttgagaccaatcaaactcaactagcaaatttcatgtctgatctcgacgtccagcttccatcagcttttgatccgtttgcggaagccaatgctgaggactccagcgttggtgctggatcaaaggactatgtacacgtgcgcattcagcagcgcaacggaagaaagagtctgactactgttcagggcttgaagaaagagtacagttacaacaaaatcctcaaggatctgaaaaaggaattctgttgtaatggtactgtagtccaagatccagagttaggccaggtcattcaacttcaaggtgatcagcgtaaaaatgttgcgacgttcctagttcaggctggaattgtaaagaaagagagcatcaaaatacacgg

SEQ ID NO: 413110 - DNA, 422 bp, Oryza sativa
gcctatctcagtcggtcagtagttttcacagcttgttacttttgagcagcgattgcaacttccacagggtggcattcagtcgtccaccaactctgcttctcgcggcggcaacggaggaggtcgcggccatggtcagccaaaccagggtcaaaatctgaaccgtggtcgcggcggccaaggccgcggccctggtggcttcaccaacaaccaaggacgagatcaccccaagtgtcagctgtgtgacaaattgggccatacggtggtcaagtgctacaagaggttcgatgcttccttcactggcaaagagcagagtgctgctgctgatacctcctcctacggcgttggtaccaattggtatattgacaccggggcgacggaccacatcaccagcgatcttgacaagctgacggtgctggagaagt

SEQ ID NO: 413111 - DNA, 417 bp, Oryza sativa
attgaaattcacactttcaaccagagccaatatcctcgcattgctactgaagacttcttgccacttccaagcaaggggaagactggcaaggatggctggtatcccccaggccatggtgatgtgttcccctccttgaataacagtggaaaacttgataccttgttggcacagggcaaggagtatgtctttgtcgcgaactcggacaacttgggtgctattgttgacatcaagatcttaaaccacctgatccataaccagaacgagtactgtatggaggttactcctaaaacattggctgatgttaaaggtggtaccctcatctcttacgaaaggagagttcaactgttggagattgctcaagtccctgatgagcatgtgaatgaattcaagtcaattgagaagttcaagatcttaata

SEQ ID NO: 413112 - DNA, 427 bp, Oryza sativa
aagaaggtgagagcttggtgagctgcacagatggccgggtccgtgatggcgtcgtcgggcaccaccgtcgctcccttccaggggctcaagtccaccgccggcatgcccgtcgcccgccgctccggcaactccagcttcggcaacgtcagcaatggcggcaggatcaggtgcatgcaggtgtggccgattgagggcatcaagaagttcgagaccctcttctacctgccaccgctcaccgtggaggacctcctgaagcagatcgagtacctgctccgttccaagtgggtgccctgcctcgagttcaacaaggtcggattcgtctaccgtgagaaccacagatcccccggatactacgatggcaggtactggaccatgtggaagctgcccatgttcgggtgcactgacgccacccaggtgctcaaggagc

SEQ ID NO: 413113 - DNA, 362 bp, Oryza sativa
aaccaaagcttattaagctagctcaagctctaatacacatttagctagaatggcgccgatcaagttcacagccgacgtcggcgttctcctggtcctgctcgtctaggaggcggagggcggcccagaggccgacgtgaccacctgcgtggcgctcgtgctggagctcagcccgtgcctgctcatcttcacggacagggcggtgacggaagctccagaagggtgctgcaccgcgctgaccgaccatcaggatgggctgggccggtgtgcctgcaccacactagaggaccacacgctggagcgcggcatagacgccgacaggcaccgtcgaccgggcgttggctctggttcgggacgtatgccgg

SEQ ID NO: 413114 - DNA, 470 bp, Oryza sativa
gcaggagcccttccttttcgcggccaccatccacgacgacatcgcgtacgggcgcgagggggcgacggaggcggaggtggtggaggcggcgacggcggccaacgcgcacaagttcatatcggcgctgccggaggggtacgggacgttggtcggggagcgcggggtgcagctgtcgggcgggcagcgccagcggatcgccatcgcgcgggcgctggtgaagcaggcgcccatcctgctgctggacgaggccaccagcgcgctggacgccgagtcggagcggagcgtgcaggaggcgctcgcctcctcctctggctccggccgcaccacttaggtggtggcccaccgtctggccaccgtgcgcaacgcccacaccatcgccgtcatcgacgacggcaaggtggcggagcagggctcgcactcccacctgctcaaccaccaccccgatggctgctacgcgcgcatgctgcagc

SEQ ID NO: 413115 - DNA, 424 bp, Oryza sativa
gccgccgccgaacacaccccccccaccccccctgcccacacgcctccgcctcctcgcaccgaaccgcctcggcgcgagcgcgagggagagagctcctcttctcctccacggcggctgcgcggcgtcgtcccgctccaccgggccgtcgtctggatctgatctaggagcggtcgcttcttcctcttccggaagccctttttatcagtcatgtacggacgcatgccaaagaagagtaacaataccaagtattatgaggtgcttggtgtatctaagacagcaacccaggatgagctgaagaaagcgtaccgtaaagctgccattaaaaaccaccctgataggggggggaccctgagaagttaaagaattggctcaagcttacgaggtcttaatgatcctgaaaagagggaaatctatgaccaatatg

SEQ ID NO: 413116 - DNA, 473 bp, Oryza sativa
gctccggcggtcaataattaaaaaaaaaagaaaaaaatggctttcagaaaccatgacgctgccatggtcctcttcttcttcctcctcatggtgactacctacgccaacgcgcacggacacagcaagaagcccgaggagatcactcagggcgtttacggggcggcggcggcggtggcggccggccccggcggcacgttcgacatcaccaacctcggcgccgtcggcaacggcagggcggacagcaccggcgcggtgatggcggcgtggaggtcggcgtgcgccggcgccgggaagcagacgatcctgatccccaagggagatttcatgacgggggcgatggagctcaggggcccctgcaatggcgccgtgaccatccagctcgacggcaacctgctgggctccaacgacctcagcaagtacccgggcaagaagatgcccaactgggtcgaggtccgtcatgtcgacaacttcgt

SEQ ID NO: 413117 - DNA, 472 bp, Oryza sativa
gtgaaaaagcggtcccaatacagtgctttcaaagacgagcttctagttaatccttcagaagttactcgaagaatggaggaaatgactatatccaaagggaacagacataattctgaaggaattggagtgcttccaagggcagaaattgtccatgatgaacatcctctaagcctcgggaaaactagtgtctggaaccaatttttccaggaatctgaaactatagagcagattgatagagatgttaagcgtactcatcctgagatgcaatttttcaatggggattcttctgatgccttgtctaatcaagagtcgctaaagcgtatacttaccatatttgcaaaattaaatccgggtataagatatgtacaaggaatgaatgaagttttggcaccactctactatgttttcaagaatgatccagaagaaaatatgctgtaagtgtttttttttcccatgacgctatttgcttaaa

SEQ ID NO: 413118 - DNA, 483 bp, Oryza sativa
gtgaccgactcgacccccacccaagacacgccgccgcctacgcccccgaactccccatcgcctcgcccgcggattctcctcctcctcctcctccttcctcgccgccggcgacgcgccgccggctaccttttgacgctccgaccgtggtgccctttttctgtgggacccgggatcctagctcccctcctcccccgacgattcccggtcgcctcggcggctctcctcccgccctagggttccggcgaggtcccccgcggctgcgccggcgagatgggtgagcgcaaggtgctgaacaagtactaccctccggacttcgacccgtcgaagatcccgcggcggcggcagcccaagaaccagcagatcaaggtgcgcatgatgctccccatgagcatccgctgcggcacctgcggcacctacatctacaagggcaccaagttcaactcgcgcaggaggacgtcgaaggcgagaaatacctggggatac

SEQ ID NO: 413119 - DNA, 488 bp, Oryza sativa; identical to SEQ ID NO: 390430

SEQ ID NO: 413120 - DNA, 482 bp, Oryza sativa
ccgtagcagcagcatcaggggaagggtctagagggttctagaagcttcttccgggatgaaggtgatcgagaagatccaggaggcggcggcggatgggcggacggtgttctcgttcgagtacttcccgcccaagacggaggaggggctcgacaacctgttcgagcggatggatcgcatggtggcgcacgggcccaacttctgcgacatcacctggggcgccgggggatccaccgtcgacctcaccctcgagatcgccaaccggatgcagaacatggtgtgtgtggaaacaatgatgcacctgacatgcaccaatatgccagttgagaagattgatgatgccttaacaacaataaagtctaatgggattcaaaatgttctggctcttaggggtgatcctccacatggtcaggacaaatttgttcaagttgctggtggattcgcttgtgctcttgatttggtacaacacattagagccaagtatg

SEQ ID NO: 413121 - DNA, 365 bp, Oryza sativa
attttgtttaccaaacacactgaaacacggagcagtggcggctttgctcctttggctgtcatggcttctactctccctcctctccatctacctcctcgacctcctcgcacactcacgacgctgcctcccgccgggaccccgtccgctgccgctgatcggcagcctccacctgctcggcgacctgccacaccgctcgctcgccggcctcgccaagacgtacggccctctcatgtcgctccgccttggcgctgtcaccacggtggtcgccttctcgccggaggtcgcccgcgagttcctgcagaagcacgacgccgtcttcgccacccgttcaacccccgacgccaccggtgaccacgccaggaact

SEQ ID NO: 413122 - DNA, 318 bp, Oryza sativa
cagaaactaacccctctcactcccactaccatggagccgtgcaagttccggccgtggagctcgttcgacacgaagacgacgacgacgaacgcgggagctccggtgtggaacgacaacgaggcgctgacagtggggcccagggggccgatcctcctcgaggactaccacctgatcgagaaggtggcgcacttcgcccgggagcgcatcccggagcgcgtggtccacgcccgcggcgcctccgccaagggcttcttcgagtgcacccacgacgtcaccgacatcacctgcgccgacttcctccggtccccgggcgcccag

SEQ ID NO: 413123 - DNA, 397 bp, Oryza sativa
tttttggactggtgcccgacggggttcaagggcgggatcaactaccagccgcgcagcgtcgtccccagcggcgacctcgccaaggtgcagagggccgtgtgcatgatctccaactccaccagcgtcgtggaggtgttctgccgcatcgaccacaaggtcgacctcatgtactccaagcgcgccttcgtccactggtacgtgggtgagggcatggaggagggtgagttctctgaggcccgtgaggatctcgccgcgttggagaaggactaccaggaggttggctctgagtactaccagaatgaagatgggcatcatggtgacgagtactagaggagtcgtcctcgtctgggggcttgatgttctgtgtgtcaaggcctgattgataaccggtgctatc

SEQ ID NO: 413124 - DNA, 465 bp, Oryza sativa
tgttgctgtagtggtcagtggcaatagtggggacataggtcacactattgtgacaactgttggtggaagaaatgggcagccaaagcagacaattagttacatcgcagagcgtgctgttgggcgtggttcatttggagttgtcttccaggctaagtgtctagaaactggtgagagagttgctgtaaagaaagttcttcaagatgcgagatacaagaaccgggagctgcaaacgatgcaaggtctcgatcacccaaatgttgcatgcttgaagcattacttttgctcgactactgcgaaggaggagctatacctcaacttggttcttgaatatgtgccagaaactgttcatcgtgttattagacattacaataagatgagccaacgcatgccattgatttatggtaaactttatatgtaccagatttgtagggctttggcatacattcataactgtgtgggagtatg

SEQ ID NO: 413125 - DNA, 327 bp, Oryza sativa
gcttaaacaaacccctctcactcccactaccatggatccttgcaagttccggccgtcgagctcgttcgacacgaagacgacgacgacgaacgcgggagctccggtgtggaacgacaacgaggcgctgacagtggggcccagggggccgatcctcctcgaggactaccacctgatcgagaaggtggcgcacttcgcccgggagcgcatcccggagcgcgtggtccacgcccgcggcgcctccggcaagggcttcttcgagtgcacccacgacgtcaccgacatcacctgcgccgactttcttcggtccccgggcgcccagacccccgt

SEQ ID NO: 413126 - DNA, 492 bp, Oryza sativa
gtggtggtggccttcccgtcgtcgtcttcgactggactccaactccacctccacctccaccacccctctctcgaagccatcgccgcctgtctctcctctccagctcgcccggtcagagtccgcgggggattcgattgattggtagctagctaggcttccgcgcgcggcgacccaacgtcggtggaggcggtgctgaaggccgggcggcgtctcgttcgtggtgcggcggagatgggccaggacctcgccgagatccaccctcgcgagctccagttcacctttgaggtgaagaagcaaagttcatgtactgtccatcttgtcaacaaatccaatgaatatgtcgcattcaaggttaaaacaacatcacctaaaaggtattgtgttcgaccaaacactggagtcatccttccaaggtcaacatgtgatttcacagttaccatgcaagcacaacgtactgctccaccagacatgcaattaaaagacatgtttttg

SEQ ID NO: 413127 - DNA, 429 bp, Oryza sativa
aagagcagcgtcgcctctcctcctcctccctaagggctacgcttccagaaccgtgtcgaagctcccgctcccccccccttccgctccaatggcgaaggaaccgatgcgcgtgctcgtcaccggcgccgcaggacaaattggatatgctcttgtccccatgattgctaggggtgtgatgttgggtgctgaccagcctgttattctacacatgcttgacattccaccagctactgaatctcttaatggccttaagatggagctggttgatgctgcatttcctcttttgaagggaattgtcgcaacaactgatgttgtggaggcctgcactggtgtgaatgttgcggttatggttggtgggttccccatgaaggagggaatggaaaggaaggatgttatgtcaaaaaatgtctccatctacaaatcccaagc

SEQ ID NO: 413128 - DNA, 503 bp, Oryza sativa
aagaaacaccatcaactagttcaaaactggcggataaccaggattatgagggctggtgtaactatgtcctttgatgaacaactaaaagcctttggatcttgccatgaagggaatgaaatacctgaaaacttgtcaggtggagttcttattgatcaagtttatgctgttgcacccagtgacttgaatggacttcttttctcaccaagttcagatttcttgcaatcactagcggagatgcaaggaactactggtcttgaaatccaacaatggagacttgaaaatgatggtgaggtcttgaagagggtagtaagctacacaaaagctcctactgcactagtcaaggctgtgaaagcaacagaggatgtgtcatatctgaaggcagatggagatatatatgcaactttagctgatgttagtactccagatgttccatttgggaattcttttaggggtgggttttaacatgcataatgccagggcctgaactacctgataatgaaaaa

SEQ ID NO: 413129 - DNA, 496 bp, Oryza sativa
atgttttttagtttaacagacatgtctctaaatgaggagcatctcaacgggaaacgggcagatgcttttggttcccttactggccttgtaaattttgatatttcatccaataacttcagtggttcattaccaccttctctgggaagcctgtcatcattgactacattgcacatgcaagacaaccaactatccggaacccttgatgtcttgcaggatctccccctcaaagatttaaatatagagaataatttgttttctggaccggttcctccaaagttgctgaatgtgccaaacttcaaaaaggatgggaacccatttaataccagcatagctccttctgcatcaccctcttcaacacctacaggctctacaccaacacaaacaccatcgtcaccttcatcttctggaactccttcgccatctagttcgccctctaattcttctggtggatctactgctcgagacagcagctctccatcatctaggaaacataagt

SEQ ID NO: 413130 - DNA, 444 bp, Oryza sativa
agagtattagccttccggaagaatgtggtttgagcggggcaaattgcagaatcctgcggagcacactgacatccaaaggccagggacgtcagaaaagagtgacaggcaatgtcgcagctatctgtgaagcgttgacggacaacagatgccgtgaaacaataccaatggcaggaagagaaagatgcgatgcgcatgaaggaataaaggtcaccgatgcttcctctgtaccgttttccggaagctcaggatggccatcaatctgtggtgctcgagcttcggatggttctccttgtaagaatcagccaattgcagggagaaagagatgcgcgatgcataaaggccaaagagcatgtcggaccccctcaatcgactgagcagacatgatatgagtgatgctcaattgcttacgttcattcaggcatttgttggaatagcattttcagt

SEQ ID NO: 413131 - DNA, 462 bp, Oryza sativa
tcgttcctccgaaacccccacctccgcgagctgcgagtctctctccggcggcagaggcggcggcgacgaccagatggtgaagggacgcaccgggcagcgcgtgcggctctacgtccgcggcaccatcctcggatacaagaggtcgaagtcgaaccagtacgagaacacgtcgctggtgcagatcgagggggtgaacaccaaggaggaggtggcgtggtactgcgggaagaggatggcgtacgtgtacaaggccaagaccaagagcggcggcacgaactaccgctgcatctggggcaaggtcacccgcccccatggcaactccggcgtcgtccgcgccaagttcaagtccaacctgccccccgcttccatggggcgcaaagtcagagtcttcatgtaccctagcagcatctaaagactcttgaagtgtggaggatgttgcttatctctcttagattttacttc

SEQ ID NO: 413132 - DNA, 450 bp, Oryza sativa
tgtatgccatggacgaagccctggtgggcagggggggggccgcggtgtcccgggtgggaagctctcaatggcgccgccggtgccacggcgagaggaggctacggcggccaggtcgaccacgcgtcggcgcatgacccagcgatcctggcgttcgacgagctcgtcgccggcgccgtcgggagggtgtcggcggcggccggcaagatcggggcggaggtcgcggaggtgaccagggtgctggagaaggcgttcttggttgggaaggaccttcttgtcaggaccaagcaaactcagaagccaaccgtggattccatcgcagtattcatggggcctctgaatgaaacaatattggaggcaaattcattggcagaggggacaagatcgagccatggcaaccatctgaaagcagtcgccggtagcctggccgctctggcgtggattgggtacacc

SEQ ID NO: 413133 - DNA, 415 bp, Oryza sativa
  unsure (1)..(415): unsure at all n locations
tgtttaggttgcgacgaggaagatctatgacgcggtggaggaggacgcctggggggcgatcctccaccactacgacggccccaagttcaggctggagctcatcgtcgccgaggcgctctcccttcttgacatctttgcagacaaggatgacgcctgaggctactgcttccctgctgctgcttgctgaagaatatcangggactgccggtgaaggacacaagtaataaagattcgacgtgtatccgttgtgagatatacatacataaatacataaatacaagtagtaagtaattaacggtgtgtgctgatgaatttggaacgattagtacaatttctgagggggtttcccatctcgcgggctaagagatgatgcgtcccattgaattttttttaatcatgtgcgacgatgatgact

SEQ ID NO: 413134 - DNA, 506 bp, Oryza sativa
tcttttctctcctctcatctgacatatctcgggccgtgctttagaagcctctggaggcgcatcaccaagccggatggcgggcaccgccgacgtgaagctcgagggccttcgcgccgccaccgacaagctcgaccagatcagcgagaacgagaagtccgggttcatcagcctcgattcgcgctacctcagcggcgaggcggagcacatcgagcgtagtaagatccagaccccgaccgacgaggtggtggatccctacgacacgctctcggctgctcccgaagatctcaacgagactaacagctgctcgacaaactcgtcgtgctcaagctcaatggaggcctagggacgaccatgggctgcactggttccaaatacgtcattgaagtccgcaatggctttacgtttctagaccttattgtgattcaaattgagtccctgaacaagaagtatggatgcaatgtccctttgcttctaatgaactcattcaacactcatgatgacacaca

SEQ ID NO: 413135 - DNA, 470 bp, Oryza sativa
cgctctgtcctcatgacgcagatcgtgcgggagggcgagaacgccttcaactcgctgaccggcaccgaggtggccaccgtcacctccgtcgtgcagctcgagtcgcaggacctcgcgcagatcgcgcagcaggtgcagaatctcaccggcgcgaagaacgtccgggtcaagacccgcatcgacccggagctcatcgccggcttcaccatccagtacggccgcgacgggtccagcctcatcgacatgagcgtccggaagcagatcgaggagatcacctccgagttcgagatgcccgcagtaaccctcgacgtctgatcggcatccaccaccctcccggcggcgctgccttggcccttaggtcctctcctcctgttgtctcttactcttgtgcaagtgcaacatacattgctctcatgtgattgttgaatgtttggtaagcattactgctgaataatacatagctggattcc

SEQ ID NO: 413136 - DNA, 547 bp, Oryza sativa
  unsure (1)..(547): unsure at all n locations
attggtcccaaataataatagaggaaggggaaaaacagagtttgcagccacatcatccatggcctctctccgcaccattccggtgatcttcggcatcctcttctatgtccttgccagcactgccactgccaccgacgcaccggactacgtcgtccaaggccgtgtctactgtgacacgtgccgcgccgggttcgagaccaatgtcaccgagtatatcaagggtgccaaggtcaggctggagtgcaagcactttggcaccgacaaggtcgagcgtgcgattgacggtgtgactgatgagaccgggacatacaagattgagctcaaggacagccatgaggaggacatctgcgaggttgtcctcgtccacagcccccttgcaaactgctctgaaatcgaggccgaaagggatcgtgcccgtgttttgctcaccaggaatgtcggcatctgtgacaacctgcgcttagccacccactcggctacctcaggacatnccactgccatctgcgcgcgctgttaagcagtcgactgctgatgatgatacagaatg

SEQ ID NO: 413137 - DNA, 227 bp, Oryza sativa
tgcagtgggaggaggcgctggcggccgtgctgtcggggggtgtttgtagcgcggcggggcgcgccaccaaggccgtgccgctgcacgacgcgctcgggctcgtcctcgcggaggacgtccgcgcgcccgaccccctccctcccttccgcgcctccatcaaggatgggtacgccgccgtggcctccgacaggcccggggagtacccggtgattacggagtcgagggcc

SEQ ID NO: 413138 - DNA, 449 bp, Oryza sativa
cacgtcttcgtcttcccgtggctcgcgttcggccaccggctccctgccctcgagctcgccggccgcctggcctcgcgcggcctccgcgtgtccttcgtctccaccccgcgcaacatcgctcgcctccgccgcccgtgcccgtccgtcgagttcgtcgagctgccgctcccgcgcgtcgacggcctccccgacggcgccgaggccaccaccgacgtccccgatcacatgtcatccgctctctggaaggcctccgatgggctcaccgcgcccttctccgccttcctcgacgccgccgccgccgcggggaacaaggtcgactggctcatcctcgacggcatgctttcctgggccgccgcctccgccgccgaccgcaaggttccctgcgtcctcatgatgccgtacacggcgacggcgtgcgcgcatttcggcgtgccggatgaggcgcggga

SEQ ID NO: 413139 - DNA, 472 bp, Oryza sativa
cggtcgtttgggctaatttgcaaggttgtgggagaccgtgatgttaagttctgcacaaggacaactttaagcgacaatgctatcacaaatgcgatagatatacacagatctgcaagtggaagcttgcgtgttaccgtgtccaacaatgattttggtgttcgtgaatttgacatggaaacatttcagctcttgaaccacttcagttataactggccagtaaatcacacatctgtgagccctgataggaaacttctggcagtagttggagatgatcgggatgctcttcttgttgattcaagaaatggaaaggtaacctctaccctagttggccatctggactattcgtttgcttcggcatggcaccctgatggccgcaccttcgcaaccggtaaccaagacaagacctgccgcgtctgggacgtacgaaacctgtcaacctccctctcagtacttaggggcaacattggcgcta

SEQ ID NO: 413140 - DNA, 466 bp, Oryza sativa
  unsure (1)..(466): unsure at all n locations
tatttaccgaaaacgccgctacgctaccacgggcgcgctcccctcctcttcgccgtcgccgcctccgccgccgcgggctcgcatcgccgcccgtccccagtagcacggtttttgttctgctcttcactggtgtggttgctactctttgctcaacaatatggtttccttcgagatgaatgacctcaagaagattgggctaggcttgacaggctttggagtattcttctcattcctgggaatcattttcttctttgacaaggggcttattgcaatgggcaatattctcttcctgtcaggtttgggtttgacaattggtctgaaatcaaccatgcaattcttcaccaagcctaagaattacaagggtaccatctcatttggtgctggctntntcctggttctcattgggtggcccttcttcggcatgcttttagaggcatatnggctttgtgtactcttcagtggattc

SEQ ID NO: 413141 - DNA, 513 bp, Oryza sativa
  unsure (1)..(513): unsure at all n locations
gatctccccaatccgagagctccggaggagcagcgcggaggcggagatggcgctgcggcgagcgctgctcagatctgccgagatctcccccgatcgcaaggctgcacttgagtacctccattctctatcgagagcacagcctactcgttctctaacaggtgctggcctttattctgctggcaaatcattcagcactcaggctgctactacatcaagcacaccacaacctccaccaccacctccacctccggagaagactcactttggtgacctcaaagatgaggaccgcatttttaccaacctctatggtcagcatgaccctttcctgaaaggtgcaatgaagaggggtgactggcatagaaccaaggatttggtgcttaaaggggcagactggatagtgaatgaaatgaagaaatcgggacttcgagggcgtggaggtgcaggattcccttctgggcttaaatggtccttcatgccaaggtatctgatggacgcccttcttatnnctgtgta

SEQ ID NO: 413142 - DNA, 422 bp, Oryza sativa
ttttgatatgatgggatgcgtccatcgctgggggggaagctaaggggatatcctgcagatttcaaagcgctgatcgaagaatgctgggatactcagggtatagcaaggccaacattttcagagataatcatcaggctcgacaagatatacgcccagtgcatgaagcaagggacctggaaggactcgctaaagatttggaaatgacacgtgtgggctaagctgcatgaacgccttcttgtgtacatatcactgcgaagcaaatgcgtcactctctgtgaagaagaagcctgagctagcactcactcgtctggaggaggatgacacgacgtaccgacaaatttgtgtacgtgttgtaaaaggcccggcgaaaaaaaaagtacttgtaaaagatcaatttgagttaaattgggaggaacaaagct

SEQ ID NO: 413143 - DNA, 452 bp, Oryza sativa
  unsure (1)..(452): unsure at all n locations
caacgccggcaacaagatccgcaacgccgagactggttcttcttggagatgtgggcgcaggaaaatctagcttggtgcttcgttttgtaaaaggacagtttgttgagtttcaggaatcgacaattggagcagcatttttctcacagaccttagcagttaatgacgaaaccgtgaagtttgaaatctgggatacagctgggcaggagagatatcacagcttggctcccatgtactataggggtgcggctgctgccatagttgtctatgacatcacgaatccggcctctttcacccgtgcaaagaaatgggttcaagaacttcaagctcaaggtaactcgagtacagtggtggctcttgctggcaacaaagccgatttgctagagactangcaggtgcanatagaggaagcaaagacatatgcacaggagaatgggcttttcttcatggaaaca

SEQ ID NO: 413144 - DNA, 438 bp, Oryza sativa
tttctgtccatccaatcataaaggtcatggcccctgggtttgccctcatagccccagggtaccaattcacggcttcacacaggaacgggccaccggtatcacgtgacccggaagccctgaaggctaaatattcagaccagcttgtgttcaccgggtccatccaagttagaacagggtacgagatcctacgcctgacgtcgtatttgcaacagcacttgcacagaatcactgtcccgatgctggggatgcatggtgccgatgatatggtgaccgatccccaaggatcacagaaactgtacgaagaagcttcatcctcggacaagtccctcaatctgtacaacggtctgcttcatgatctgctcatcgagcccgagaaggagaagatcatggacaacattgtggattggctgagcccgacgatttgacagctgatatcca

SEQ ID NO: 413145 - DNA, 484 bp, Oryza sativa
agaggtttctcctagcctcgcctcgccttcttgcgccgcaagaagaaaagcagcagcaaagcaagccagccatggccgccgccgctgcgtcctccgccgcctggaagaggtggatccgccccgaggtgtacccgctcttcctcgccaccggcgtcgccgtctccatctgcgtcggccagctcgtccgcaacatcaccggcaaccccgaagtcagggtgttgaaggagaagagggcggccggtgtgctggagaacttcgacgaggggaagcgctactcgcagcacggcttcaggaagttcatcgacgggaagcgccccgagatcatgcccggcatcaacagcttcttctccgacccgcccaagtactaagaccgtgttgttggctggtgggattgattgccatatgccaccgttttgccggaatttcaattcatatgcatgtttcaacatgttcgaatatttgatttgagcgtatacaaatattg

SEQ ID NO: 413146 - DNA, 430 bp, Oryza sativa
gaatattatcgcaccaaatttgactgcacttgtgggcgaattggttggtgctcgacgtgattgcacatggcggcagctcggtaaatctggccaagcagcctggcagcacaattcagatacttggtgcagagaaggctttgttcagagctctaaagacaaagcatgctacgccaaagtatggtctcatctaccatgcatgcttaattggtcaagcagctccaaagcacaaggggaagatttctcgttctcttgctgcaaaaactgctcttgccattcggtatgatgcccttggtgatggtgaagataactccattggtcttgagagtctagtcaagcttgagacacggctatcggttcttgagggtaaagaacttggcaggtctgcaggttctactaagggaaagcccaagatagaagtgtatgaaaagga

SEQ ID NO: 413147 - DNA, 367 bp, Oryza sativa
cctttattgcggattcagggacttcattgctcggggggcgcatcaactattgttggtgagattaatcacgcaattggagctgagggaattgttagtatggaatgcaaacaagttgtgcgggactacggggacatgatcctcgagatgctcatagcacaggcaagccccatgaaactgtgctctcagattggtctctgtgcatttgatggtactcgttctgtcagaaacaatatagagtctgttgttgataaagaaaaggtgggctcagatctttcctgcactgcttgcgagatggctgttgtctggatacagaatcagctccgacataaccaaacaagggagctcattttgcaatatgctgaccagc

SEQ ID NO: 413148 - DNA, 473 bp, Oryza sativa
tttgttctttcttgcccttcagcttggagtgaaaccaggaatgaaggttttggacgtcggttgtggaataggcggaccactaagagaaattgccaaatttagcttggcttcagtcactggattgaacaacaatgagtaccagataactaggggaaaggagcttaatcgggtagcaggagttagtggaacttgcgactttgtgaaggcagacttcatgaagatgccgttttctgataacacttttgatgctgtctatgccattgaggcaacatgccacgcacctgatccggttggctgctataaggagatctatcgtgtattgaagcctggccagtgttttgctgtgtatgagtggtgtattactgatcactatgaaccgaacaatgcaacacacaagaggatcaaggatgaaatcgagctggcaatggcctgccagatattcgaagcactcaacaatgtcttcaagctgcaaa

SEQ ID NO: 413149 - DNA, 532 bp, Oryza sativa
  unsure (1)..(532): unsure at all n locations
tatttatgctgattattatggtgctgcgttgaatatattccttgccccactccagtttggtttcactgtcccgctgaactcgtgttgtggaagtgatgctccatacaattgttctccgtcaatattgtgcgggcaccctgggtctgtggtctgctctgacccatcaaagtacacttcatgggatggtctccacttcaccgaggcaacctacaagattatcattcaaggggtgctagggtcatatgccaaccctcctctttcagaaacttgtcggggtggagcatacaaagtctcacaacttcatcaatgtacagataacccaacaaacactgtaacgtatgattctatgagctcttttatttgatcctctgagctctagggcatgtagagtattaaggagcaatatagatataacaggccccatccccttggacacttctaaaggtgagaagagcattggttggngatctttgtacttctcaaatccatttttctgctacaggtagaaaagagaatttgagagcagaaattg

SEQ ID NO: 413150 - DNA, 381 bp, Oryza sativa
ttcatcagcagcagctgagcttgaagcagcagagcgaggtagacatggccgccgccaccatggccctctcgtccccggcgctggccggcaaggccgccgcgaaggtgttcggcgaggggcgcatcaccatgcgcaagtcggcggcgaagcccaagcccgccgcgtcggggagcccgtggtacggcgccgaccgcgtgctctacctcggcccgctctccggcgagccgccgagctacctgaccggcgagttccccggcgactacgggtgggacaccgcggggctctccgccgacccggagacgttcgccaagaaccgggagctggaggtgatccactccaggtgggcgatgctcggcgcgctgggctgcgtgttcccggagc

SEQ ID NO: 413151 - DNA, 418 bp, Oryza sativa
tagttacttcgttggaggctgcaaaacagcggatgcatgaacaactgagcgctggaactgctgagatggtaatgctgtccactgaagaacctgagaagaagaagaagcatgaggcctcacacaaggagggtgcctccaacggaagtacaaaacatgtggttgaagaggctaaaagcagtccttatgatgatctggtcaaggagatgaaggataacttgagcaagggtgccaatgctgttcagctcaagggtctgatgacttcctcagcgctgccaccccaggatgctatgaatgctctttttgatgcactctatggcggcctcggcaaaagattcgccaaggaggttgtgaagaagaagaaatttctcgctgctgctgtgcctgatgaagcctcccagatggtcctgctgcaagcgct

SEQ ID NO: 413152 - DNA, 450 bp, Oryza sativa
tttattaatagaactgcaacgtaccatgaactaccggtgattaccagaaacagagggctgataaaacatcaccaggcggttcctcacaggggggttgtgcagtctacaagcaaattgtacataagaggaattgaaagagatgtatcatcatcaacaacagctccaaagccacaaccaactcttgccatctaggcagagtttcccttcagaacggcacttgcttatgcaaggaggaagtgtttcaggggaatcagggcttgttctctcaactgatgcaaagcctaggttaaaatggacccctgagctacatgagcgatttgtggaggcagtaaatcaacttggtggtccagaaaaagctaccccaaaaacaatcatgaggctcatgggcgtccctggattaacactgtatcatctcaagagtcatcttcagaaatacagactaagcaaaaa

SEQ ID NO: 413153 - DNA, 524 bp, Oryza sativa
atttattggggtgcattcggatggatctttctcagtgcgttcattgggtactctgtgccaatgagcctctactactatggcctcaaggataccacatcatcctattccgttatctttcttaatataactcccctgttcaccttcatcctctcacttatgttcaggttggaggcattcaaacttagaagcatacctggagtactgaaaatagcgagcatactgctttccattggagggacaatgcttataagcctttacaaaggcaagtcattgcatctctgggattctatcatacaacaccaaaatgaacacaagtcagcaaccaatcagctaagaggaacaattctattggttggcagcagcttcacctttgcttgctggtttcttattcagtcaaagattctcaaagtgtatccatacaaatattggtcgtccatggtgacatgcttggttggagtatttcaaaccgcattggtcggaatcatattaaggagagacaagagtgcatgggagctaggatggaa

SEQ ID NO: 413154 - DNA, 473 bp, Oryza sativa
ccttggtttggaaaaagggctccccgctggcgcgggcgcagccgaagtccgggctcttcgtgggcatcaacaagggccacgtcggcaccaagcgcgagctgccgactcgcccgtccgaccgcaaggggaaatccaccaagagggtgacctttgtcaggaacttgatcagggaggttgctggatttgctccctatgagaagcgtatcactgagcttctcaaagttggcaaggacaagcgtgcactgaaggtggcaaagagaaagcttggcacccacaagagggccaagaagaagagagaggagatggctggtgtcctcaggaagatgaggtctggtggcggtcacgctcacaccgagaagaagaaatagagtatcttcaagttcatgaagtccatggcaatattgtcttggtgagtgtactcttggagaaccctactactagaattgcactctattatccagctaaacattcat

SEQ ID NO: 413155 - DNA, 355 bp, Oryza sativa
ctcgtcgtgagatggcgatgaggcgatgagatcatgggcttttcggtcgaatctagcagagcggcgagcaacccccacccactttgactccgatcctccccgcccccagcgcgatagcccatccgatcccaaattccggcgagatggcggtcagcctgtggcgcgcggtgatgggcgcggccggcggcggcggctcctcatcgtcgtccgcggccggcggcgacacggggggcggcgtggagttctggcacggcggggagcgcacggggtggctgaacaagcagggggagtacatcaagacgtggcggcggcggtggttcgtgctcaagcaggggcggctgttctggttcaagga

SEQ ID NO: 413156 - DNA, 388 bp, Oryza sativa
  unsure (1)..(388): unsure at all n locations
cgtttctgttggaaagctgaaggtgtatgtctacgagctgccccccaagtacaacaagaacattgtggcgaaagattccagatgcctcagccacatgtttgccacagagatcttcatgcatcgcttcctgctgtcgagtgcgatccggacttcgaatccggacgaagccgattggttctacactccagtgtacaccacatgcgacctcacgccatggggccatcccctgaccaccaagtctccacgcatgatgagaagtgcgatcaagttcatctccaagtactggccctactggnncngtacggagggtgcggatcatttcttcgttgtgccacatgactttgcagcgtgcttctacttccaggaggcgaaggctattgagcgaggc

SEQ ID NO: 413157 - DNA, 422 bp, Oryza sativa
cgcttcctccccctctcccacgaaagagggcgtcttacattgttgggggcccccgcatgggccccaagagggagctcaagtttgccctggagtctttctgggatgggaagagcagcgctgaggatttggagaaggttgcgaccgacctcagggccagcatctggaagcaaatggctgacgctgggatcaagtacatccccagcaacaccttctcgtactatgatcaggttcttgacacggctgccatgcttggtgctgtcccagagcgctactcatggactggtggagagattgggttcagcacctacttctcgatggctaggggcaatgccactgtccctgccatggagatgaccaagtggtttgacaccaactaccactttatcgtccctgaacttggtcccaacaccaagttctcctac

SEQ ID NO: 413158 - DNA, 434 bp, Oryza sativa
  unsure (1)..(434): unsure at all n locations
gggtggcagagctttattgaaagccaagtgaagaggagggcagagttgagaagatggtgtacataatctatcgcagtgagaggggttgcctcctagccgccaccgcttcaccaaatcaaaagctctcgctgctcctcgagagggagttggtggagagagaaagagagagagagagatggcgtccccntcgtcctcctcatcgctgtgctcgaccttctgctctccgcgcgccgtctccctcggacgccgtctcgccttctcctcgcccaggaaagcattccgagtgagggcatcatccatggttgacaagttctcgaagaatgacatcatcgtgtccccttccattctttctgcacacttttccaagcttggcgagcaggtaaaagctgtggaagcggcaggatgtgactggattcatgttgatgtcatggatg

SEQ ID NO: 413159 - DNA, 425 bp, Oryza sativa
acggtccaaatgcatcatgaatttagtatttgaaaacattgatgataagactgtggtatgagtatactcttttactttgttacagtgggatactgctggacaagaacgtttcaggacaattacaagcagctattaccggggagctcatggaattattattgtatatgatgtgacagaccaagaaagcttcaacaatgtgaagcagtggttgaatgaaattgatcgttatgcaagtgacaatgttaacaagctcctcgttgggaacaagagcgacctaactgccaacaaagttgtgtcatctgaaacagctaaggcgtttgctgatgagatgggcatcccattcatggagacaagtgccaagaacgccactaatgtggagcaggcctttatggctatggctgcatccatcaaggacaggatggcga

SEQ ID NO: 413160 - DNA, 475 bp, Oryza sativa
  unsure (1)..(475): unsure at all n locations
caccactccatttctgagctcttctagtttgagtgagagagcagcagaagggagtagtgcaagatgccgatccgcaatatcgccgtggggagccaccaggaggtgtaccacccgggtgcactcaaggcggcgttggccgagttcatctccaccctcatcttcgtcttcgccggccagggctccggcatggccttcagcaagctgaccggcggcggagcgacgacccccgccgggctgatcgcggcggcggtggcccacgccttcgccctgttcgtggcggtgtccgtcggcgccaacatctccggcggccacgtgaacccggccgtgaccttcggcgccttcgtcggcggcaacatcaccctgttccgcggcctcctctactggatcgcccagctcctgggctccaccgtggcgtgcttncttctccgcttctccaccggcgggctcgccaccggcaccttcggcctgaccggcg

SEQ ID NO: 413161 - DNA, 455 bp, Oryza sativa
gagtatattgattgctgagggcgcaagggagcggagtgtacccggtgtgatgccgactggatgcttccctgtctacttgaacatgctcgatgagccggccgatgggtatggcccccagagcggctgcgtccgtcggtacaacacattctcatgggtgcacaatgcacatctcaagcgcatgcttgagaagctccggcccaagcaccccaatgtgaggatcatatatggcgattactacacgcctgttatccagttcatgcttcagcccgagaagtttggattttacaagcagctacctagggcatgctgcggggctcctgggtccgttgcgaaggccgcttacaacttcaatgtcacagccaaatgtggtgaggctggtgcaaccgcgtgtgatgatccatcaacccattggagctgggatggcattcacctgacagaggcggcttacggtcaca

SEQ ID NO: 413162 - DNA, 498 bp, Oryza sativa
  unsure (1)..(498): unsure at all n locations
ttcttattcttgcacacgcgcagctcgagccatgggcggagtgagcaccagcgtggggggcctcaagcccgccgcgggggtgccgcagtcggccgcctcgccggtgccgaagcgcgtgcacgtcgctgtgccgcccaaggaggagcagggcggtggcaggcgcgccgcgctgctgggtctcgccgccgtgttcgccgccaccgccgccgggcaggccaaggccggcgtgttcgacgagtacctcgagaagagcaaggccaacaaggagctgaacgacaagaagaggctggcgactagcggcgccaacttcgcgagggcgtacaccgtcgagttcggcagctgccagttcccctacaacttcaccggctgccaggacctcgccaagcagaagaaagtcccattcatctcagatgatctcnagatcgagtgcgaggggaaggagaagtacaagtgcggatccaacgtcttctggaaatggtgatgatctgatgatgatca

SEQ ID NO: 413163 - DNA, 501 bp, Oryza sativa
ctatgttgtgttgtctccatggaaggatgtattggatgccgcaagctgggaagacttgattgtgcgttatatcgtaccaaaattgaaaatggcacttcaagaatttcagatcaaccctgcaaaccagaaactcgaccagttcaactgggtaatgatttgggcttctgcaattccagtacaccatatggtccatatgttggaagtagatttcttcagcaagtggcagcaggtcctgtaccattggctgtgttcaccaaatcctgatttcaatgaaatcatgaactggtacaagggctggaagggccttttcccaccagaattgcttgccaatgagcgcatacggatgcttttaacggctggccttgacatgatgaaccgagctgctgaaggccttgaggtggtgcaacctggcgctagggaaaatgtgggctacttgagagcaacagagaggaggcaatttgatgcagcacagcaggcatcacaatacacgactcaccatgc

SEQ ID NO: 413164 - DNA, 453 bp, Oryza sativa
gtttgtcgtcaccattcctatccttattggctatcaggtcgagtttcacatacatcatgtgaaggaggctgcgagggttacgaaaatcgtggcattgcttgacaaggctggcaaaccaagcaaaactgcacctcgatttcttaagtcaaagcagaatgcagttgtgcaggttaccttagacgctccggtctgtgttgaagaattctccaaatgccgagctcttggcagggcattcttaaggtcttgtggaagcacaatcgctgttggagtcgtaacgcgggtactcgggcaagatgagaactgaaagacctccgcccaacatctgaaaatttgaacgtatctgcagccgtgccctgctttggggtccataatattgtagttgactcaaaacggtattgccgatgagaagaagtttggcgacggcatttttcactgtgtgttcgtcgccatttc

SEQ ID NO: 413165 - DNA, 499 bp, Oryza sativa
  unsure (1)..(499): unsure at all n locations
aggttatcagactcaatctcttttggcgtctgatgtagattctcaatcagatcaatttataagttcttcggtgaaatctccaatggatggtaacacatctattcctaatgaggtgcctgctaggcagaacagtcttggactgtggaagtacttggatgatgacagtcctggtttaggagataatccaagttcagttccacagagcttctgtccagtgaccaatgaaagactattagaaatcaatgagatctccccagaatgggcttactctacagagactaccaaggtcgtggtgattgggaatttctatgagcaatacaagcatttggctgggtctgctatgtttggtgtctttggtgaccaatgtgttgccggagatattgttcaaactggtgtttaccgtttcatggttggaccacatacacctggaaaagtggatttttatttgactttggatgggaaaacgccaatcagtgagattngcagnntcacgtatcat

SEQ ID NO: 413166 - DNA, 473 bp, Oryza sativa
gattcctgacaaggagatcctcaagattgtgaaggagaacttcgacttcaggcctggcatgatcatcatcaaccttgacctcaagaaaggcggcaacggacgctacctcaagacggcggcttacggtcacttcggaagggacgacccagacttcacctgggaggtggtgaagcccctcaagtgggagaagccttctgcctaaaagctccctttcggaggcttttgctctgtcccattatggtgttttgtttcctcgctgctcagcattgtgattcttaacctgccccccgctgccatttatgcccatgcacgctactttcctaataataagtacttataagggtattgtgtttgaatattttacctaaaggaggaggaggatttggtatctgttattgcttaagcttatgtaatggtgaaaggaggaaagatgctacactactttgagaagagaaatgaaacccctatgtttg

SEQ ID NO: 413167 - DNA, 413 bp, Oryza sativa
ccctctcgaggcttgcgctccggtccactccgatccggggccttcttatcgaccctatgaaacgagaacccatcccggcgtgccgttgtaggctacctgctccaccatccatccatacaagcgcggcgcgtattacagagaagagaagggggggagggcaaagcgacggctccgatgaatctgtacgggtctaccctatcttggaacgtgacaaggtgcgtaccagagctggaggaggccgggtcctacaacgagatcgcactcgctcgattactgcaaaggagagcacatagcccccgaccacctagacaggaacccctgtagttaggtgccggctctgcaaagaagagacttgtgtctctaggaatcacgtgccatcgcaagtgaggatgccgcgagaacaaaacagagct

SEQ ID NO: 413168 - DNA, 250 bp, Oryza sativa
ttgtactttgcggtaccataccgctgttattccactggctatattcttgagaaaacctgaaacttacttgggagctctagtttaatgtattaaaagatcgatttgtagcttaaggaaggtggcacttccagtcctttttgtttcttttgtggtggttcatgcaaagttttttgggttaggctggatttgctgctcctgagcaaacggatttaatctcattcgtggtgaataaaaaacacggcattgtagc

SEQ ID NO: 413169 - DNA, 443 bp, Oryza sativa
tcttatctcatcccatcatcggtcatattcgcctcagcttcatgttgctgagctataggcgaatggttgacaagagtactagttagcttaataatatagctttgcaaaagttgaggtaaggggttgtgagaagaagcagcttgatttgctactggctttgtgctgctgtgtggttgttctggtgtggatcgatcagagatggggaggggaagggttgagctgaagcgcatcgagaacaagatcaaccggcaggtcaccttctccaagcgccgcaacggcctcctcaagaaggcgtacgagctctccgtgctctgcgacgcggaggtggcgctcatcatcttctccagccgcggcaagctgtacgaattcggtagcgccggaataaacaagacattggaaaagtacaatagttgctgttacaacgcttaaggttcaaatagtgc

SEQ ID NO: 413170 - DNA, 391 bp, Oryza sativa
  unsure (1)..(391): unsure at all n locations
ttttatcgcagagaaaaaaaaatctcccctcgaagcgaagcgtggaatcgccttgtgaagatgcagatctttgtgaagaccctcaccggcaagaccatcaccctcgaggatgagtcctcggacaccattgacaatgtcaaggccaagatccaggacaaggagggcatccccccggaccagcagcgtctcatctttgctggcaagcagcttgaggatggccgcaccctggccgactacaacatccagaaggagtccaccctccaccttgtgctcangctcaggggaggcatgcaaatcttcgtcaagaccttgactggcaagaccatcacccttgaggtcgagtcgtctgacaccattgacaatgtcaagggcaatatccaggacaaggagg

SEQ ID NO: 413171 - DNA, 471 bp, Oryza sativa
  unsure (1)..(471): unsure at all n locations
agatagttggcagtgcaggtgtcgctggccatggggaggaggagcagcancagagcgtgcgcggccatggcgacngccgccgtctttgcgctgctggccgcgacggcgacggcgtcggggctcgtacgggtggagcacccggccaagagcgacgggtcgctgagcctgctcgtcgtcggcgactggggccggaagggcacgtacaaccaatccagggtcgccgagcagatggggaaggttggggagaagctaaatatagacttcgtcatatccaccggtgacaatttctacgaggatggactcactggcgtcgatgaccaggcgtttgaggaatcgtttaccgatatctacacggcaaagagcttgcagaagccatggtacctggtgctgggaaatcatgactacaggggtgatgtgctagcacagcttagcccagtcttgcgaaagatcgaccagcgattcatttgcatg

SEQ ID NO: 413172 - DNA, 514 bp, Oryza sativa
  unsure (1)..(514): unsure at all n locations
agggatactttgctatgatttcttaaacttggagaagttttttggagataaagcagtcaaagaagtaattggagctggcgaccttgaatttgtctcatgcagcactactgattagtcaagcaatgctgacagactggatgagaaacttggaagttggcatcccagctctacttgaggatgggatcaatgtgcttatatatgctggagagtatgatcttatatgcaattggcttggaaactcgaggtgggtccactcgatggaatggtctggccagaaagactttgtatcatctcatgaatcgccatttgtagtagatggtgccgaagctggtgttttgaagagccacgggccactcagcttcctcaaggtccacaatgctggtcacatggttccaatggaccaacccaaagcttccctggaaatgctgaggagatttactcaagggaaactcaaggaggaatggcttgccgagcttnctgagcaaccgatgtatgctgcgatgtgataaaaata

SEQ ID NO: 413173 - DNA, 518 bp, Oryza sativa
  unsure (1)..(518): unsure at all n locations
gtgttaaccacaggtctcccggatactacgatggggggtattggaccatgtggaagctgcccatgttcggctgcaccgatgccacccaggtgctcaaggagctcgaggaggccaagaaggcctaccccgatgcctttgtccgtatcatcggcttcgacaacgtcaggcaggtgcagttgattagcttcatcgcctacaagcccccaggttgcgaggagtctggtggcaactaagctaagatcaagcatcgcgctggtggattgctgcctataataatagtatgcagctttgttttgggctatgttgatgatatatcaatatataatatgctatatatttttattttacaatttggttatgtaccatctcaatggcctctgctcttaacacatatgtaataatctcttccctccctctccgaccggttntattgtaagagtactacaattatcgttgggtgaggatatgtgaaaacaaagctccggctatatacacacaagatatgtatctagagcata

SEQ ID NO: 413174 - DNA, 457 bp, Oryza sativa
  unsure (1)..(457): unsure at all n locations
cggacgcgtgggtcttctcattcccaactcatcgatccatcagtagctagctagctagctagctgcattgtccggcgagagagatagctgctgcagggggcggccatggggaggggcaagatcgagatcaagcggatcgagaacgcgaccaacaggcaggtgacctactcgaagcgccgcacggggatcatgaagaaggccagggagctcaccgtgctctgcgacgcccaggtcgccatcatcatgttctcctccaccggcaagtaccacgagttctgcagcccttccaccgacatncaaggggatctttgaccgctaccagcaagccatcggcaccagcctttggatcgagcagtatgagaatatgcagcgcacgctgagccatctcaaggacatcaaccgcaacctgcgcaccgagatcaggcaaaggatgggagaagatctggacgggctggag

SEQ ID NO: 413175 - DNA, 438 bp, Oryza sativa
tagtcagtaagctagctaactaactacgtggcgtatggcccccaccgtgatggcctcctcggccacctccgtggctccattccaagggctcaagtccaccgccggcctccccgtcagccgccgctccaccaactcgggcttcggcaacgtcagcaatggcggaaggatcaagtgcatgcaggtgtggccaattgagggcatcaagaagttcgagaccctatcgtacctgccaccactcaccgtggaggatcttttgaagcagatcgagtacctgcttcgatccaagtgggtgccttgtctcgagttcagcaaggttgggttcgtctaccgtgagaaccacaggtctcccggatactacgatggcaggtattggaccatgtggaagctgcccatgttcggctgcaccgatgccacccaggtgctcaaggagctcgagga

SEQ ID NO: 413176 - DNA, 518 bp, Oryza sativa
ggctcttggagtgactgccaatgatttgtatcagcggtggtcaagtctacatatgagggtgaagaatttgtgaaactgttaaatggtagcagcgttcctcacacacgccatgttgtgggatcaaattactgcttcatgaatgtctttgaggacagaattcctggacgtgccatcatcatatctgttatagataatcttgtgaagggagcatcaggtcaggctgttcagaaccttaatctgatgatgggtctgccagagaacactgggctgcaatatcaacccctatttccttgatcctctatgtctgtgttccgtatgttctttgtcgggatgatactttggagttcagctacccatttccctctgtttactgttgagacaaggtgctcaacatcagaatgtaaccaagacaaattttctcaaagagtagcttggtttgtgctgttgtagtttttatagagataaatgacaatttagtagtttaatgagaatattagctcggtggatttgggcattga

SEQ ID NO: 413177 - DNA, 497 bp, Oryza sativa
cggtcttttgggcgtttgcactgacatgatcaccatttaccagggaaactggaggtcactgaaattttcaacttttcacaagatgatttgctgactgaagacatgatggttcttgatacacatggggaagtctttgtttggatgggtcagtgtgtggatgctaaagagaagcagaaggcatttgaaattggccagaaatatgcagaacatgcggcggccttcgaatctctttctcctgatgtgcctctgtacaaagtcgttgaagggaatgaaccatgcttcttcagaacttacttctcctgggataacacaagatctgtgattcatggaaattcatttcagaagaagctttcacttcttttcggaatgcgctcagagagtggatctaagagttcaggtgatggtggaccaactcagagggcatcagcattggctgctctttcatctgcattcaacccatctttccaaaagaataaggtaatgataggcctaaaagc

SEQ ID NO: 413178 - DNA, 502 bp, Oryza sativa
attttgtattattctaaagaaagaatcacagtcatggtttctcagtttcttggaagatgctcttgaagctggattcaagttcgagggccaaaacaagaacaccagagaacgagtaagagggcactccaagggcggagacgggcaaatcgcggttcggttgtcgcaactgaaggagacgagtaactggctcgaccagttgcatagtgaggttgataaatctcaagatgctttggttgaaaccattgagcagctgaagcagaaggtgtacacctgcttacttgggactgtcgagactgcggcatcagcacttgaagccaggtagatgctgtcacaggagctcagggctggttgtgtttattttttggcttggaaccagctgaagggagtactctgctgtaacagaactgcaacacacaatatgatcgatcctgatgccaaggagagtgaaggaatcgatcatctaagttatttattccacttgtacaagatgacgtatggagtg

SEQ ID NO: 413179 - DNA, 484 bp, Oryza sativa
gcctcattttattgtcacttccatctcattctcctgattgtcatcactagcttctagctagcttaattaattaattagccatggcggaggagaagcaccaccaccacctgttccaccacaagaaggacgacgagccggccaccggagtagactcctacggcgagggcgtctacacgtcggagacggtgaccaccgaggtggtcgccggcggccaggacgagtacgagaggtacaagaaggaggagaagcagcacaagcacaagcagcacctcggcgaggccggcgccctcgccgccggcgccttcgccctgtatgagaagcacgaggcgaagaaggacccggagaacgcgcacaggcacaagatcacggaggagatcgcggccacggcggcggtcggcgccggcggctacgccttccacgagcaccacgagaagaagaagggaccacagagcgccgaggagtccaccggcgagaagaagcacca

SEQ ID NO: 413180 - DNA, 513 bp, Oryza sativa
tgattgtcggggagttggtgatatcgatgcatccactgattacaatatggaagatgccttactgaatgatgaaactcgccagcctctctctagaaaagttccccttccttcatccagaataaatccctacagaatggtcattgttctgcgtttggttgttctaagcattttccttcactaccgtattacgaatcctgtgcgcaatgcgtatccgctctggcttttatctgttatatgtgagatttggtttgctttgtcctggatattggatcagttcccgaagtggtttccaatcaaccgtgaaacctaccttgataggctggcattgaggtatgacagagaaggtgagccatctcagttggctgctgttgacatttttgtcagtacagtcgaccccatgaaggaacctcctcttgttactgccaataccgtgctgtccattcttgctgttgattacccagtggacaaggtctcttgctatgtatctgacgatggtgctgcaatgctgacttt

SEQ ID NO: 413181 - DNA, 455 bp, Oryza sativa
ctgttggcggagatcgcggcgatccgcgacgaggtcgaccggtacccgtacgtcgccatggacacggagttcccgggcatcgtgtgccgccccgtcggcaacttccgtaccaccgacgagttcaactacgccaacctcgaggccaacgtcaacatgctcaagctcatccagctcggcctcaccctctccgacgagggcggcgacctcccgcggcgggggacggggggcaggcgctgcatctggcagttcaacttccgcgggttcgacccccggaccgacccgtccaacgccgactccatccagatgctccgcacctgcggcatcgacttcgatcggttcgccgctgagggggccgacccgatccgcttcgccgagctgctcatgtcgtcgggcgtcgtgctcaacgccgacgtgcagtggatcaccttccacagcgggtacgacttcgggtacct

SEQ ID NO: 413182 - DNA, 522 bp, Oryza sativa
tttttatcccctcgaaccaaagaattcgaagcgcgcaggcgggcacacgccccaaatgcgccggcggacgacgcgcgccgccgcagaagcagcacggcgccgatgagtcgcgcccctccggacgccgccggcgacctcttcgccgccaacctcaagggctccctcctcgccgtcgcctcctccgcgttcatcggggtcagcttcattgtcaagaagaaggggctccgccgcgccggcgccgccggcccccgcgcaggtgttggaggctatggatacctcttggagcctctctggtgggttggaatgattacaatgctcattggtgagattgcaaatttcgtggcttacatgttcgcaccggctgttctggttactcccctcggcgctctcagcataattgttagtgctgttctagcccatttcatcctgaatgagaagctgcaacggatgggagtgctgggctgcgtgctctgtatagtcggatcaacagtgatcatccttcatgctcctgaagaggagaca

SEQ ID NO: 413183 - DNA, 495 bp, Oryza sativa
cgtctacttccagctagcctgagctctagcttagctctagcttagcctgaagaagctaagagaggaagcaacaatggagattgagagagagagcagtgagagagggagcatcagctggagagctagtgcggcacatgatcaagatgccaagaagctcgacgcagatgatcagctgctaatgaaggagcctgcatggaaaaggttccttgcccatgttggtcctggattcatggtgtctttagcctacttggatcctggcaatttggaaaccgatctgcaagccggagccaaccacagatatgagctgctctgggtgattctgattggactcatcttcgcacttatcatacagtcgctagcagctaatcttggagtggttacagggaggcatctggctgagatctgcagagtgagtaccccaagttcgtcaagattttcctatggctgctggagagttggccgtcatcgctgcagatatcccagaagtatagggac

SEQ ID NO: 413184 - DNA, 519 bp, Oryza sativa
  unsure (1)..(519): unsure at all n locations
gttctgagacgtgtaaaaaaggagcatcttaaaagagcttacaaaattgaagactgggttgatgataatgattttcttgtccaactgagcaagaccactggaaagctactcaggggtggggagcctgatcttacaacaacggccaagatggtgcttcatgactggcagaggggcaagattcccttttttgtgcctccaccacagcaaggtgaagatagtccatctgaaacagctgaacctgtggataaatccgatgaggaaggggtgagtagtgacaggactgctgccgccatgaaagcgatagcgggaataatctcatcacagcagcagatgaatgttccttgccaaaaggaatttggtgtaactaatgaagatagtgaagtcgcggagcaatcagagtgatctacaaaaggctaggaaccctgcatgataaagaacagggcacaattttgccaaatacctagagattttatgaagattggtgtctaacangaatgttacgatgaatggtacgatcgt

SEQ ID NO: 413185 - DNA, 303 bp, Oryza sativa
tattatcgtcaacagacgtctcttgccaccggggggtttatcggcacgcagggcaagggcaccgcttgcgacaagaccgtccacttcatcgaccttctcaccgacaacggctgtccgtaccacaagacctgcttcaagtgcagccactgcaaatggattctctgcatgtgcaactactcgtccatggacggtgttctctactgcaagacccactttgagcagctcttcaaggagacggggagctacttcaataagttcgcgccagggtgcagatctacagaccatgaactggtcagggccccc

SEQ ID NO: 413186 - DNA, 489 bp, Oryza sativa
  unsure (1)..(489): unsure at all n locations
gatttgttacagcacaaaaactcaaacaaaacggggggtattccccatctgtggagtcgcaaaaccctagcgcggcggcgatgtcgaacacgagggtgttcttcgacatgactcgctgcttgatctccttcttcctccctccatcttcgcttgtgagctcctccgcgcgtcgcgagccttactgaaacttctgatccctccgaaaccgagaaaagaggggaatctgtgaagagattttagcagcagtgcaatggaggtatttggaaaatccgtgattgctgagcccagcaatgtgatttacttgtccagtattcttaacacagaagggccaatccctagtcacaagtgtgacaagaattgccagaacgagcacgtctttggcaacatgtaccgttgcaaactgaccgggaccacgcacatctgcgacagaaactgtaaccagaggatcctttacgacaaccacagttngctcttgcgggtcagcgggca

SEQ ID NO: 413187 - DNA, 437 bp, Oryza sativa
cctatgtttccggtgcgctactggccaccccaggggtgggatgtcctgctcattcaggtggcaggtcattgctcagcttgagctgtggaaggagaagagcactggcaagtacgagaagaaggtgtacgttcttcccaagcacctcgacgagaaggtggccgccctccacttgggcaagcttggtgccaggctgaccaagctctccaagtcgcaggctgactacatcaacgttccagttgagggtccctacaagcccgcgcactaccggtactaggctgcccaacacgactagcggctgtggcatgagaagtgtcaacttgaagttcgccatgacgactctggagtatcctgctttggtttcatcatcttatatgccgtcacttaagaggatttgttgtggggtttatggtttgacgactgtgaaggggaggaatggg

SEQ ID NO: 413188 - DNA, 523 bp, Oryza sativa
cgattacgttcctagatggggaatgacatggatgcggatcagaaatggtccagagagcctatacagcacagaagtccagaaagtgaactatggagatcagcagcttaatgtgcgacgaaaggcagggaagttaactcaagtgatctttgacagtgggagttcatatacgtatttaccacatgaggactacgcaaacctgattgcttcacttaaaagtctctctccaagccttttacaagatgagtcggatcgaacactaccgttctgcatgaaacccgattttccagtgaggtctatggatgatgtgaaacacctgttcaaacccttgagtctggtgttcaaaaaaagattgttcatcttgccaaggacattcggtatccctcctgaggactacttaatcatcagtgataagaacaatatctgcctaggagtattggatggaacagagattggtcatgactcatcgatagtaatcggagatgtttcccttcgaggaaagctagttgtgtataacaatgatgag

SEQ ID NO: 413189 - DNA, 517 bp, Oryza sativa
  unsure (1)..(517): unsure at all n locations
gctgtaggagatctcaatcaagttccaacaagaacgaaagtcaattctagatacatcagataaatcaaggaaagggggaacatggctccaaggtgctgtgcttaatattgctgaatgttgtctgttaccttggccttcccaaaacaggacagatgacagcacagctattgtttggagggatgagggtcttgacaatcacccagtgaaccgtatgtcactgaaggagcttcacaatcaagtgattacagttgctactgcgcttgataccatgttccaaaagggggatcgaattgcaatagacatgcctatgacatgcaatgcagtcatcatatatttggctattgtccttggtggttttgttgttgtgtcgatagcagacagttttgcacctcaggagattggtacacgcatgagtgtgtcaaaggcgaaagctatttttactcaggatttcataattagaggagggaagaaggttccactatacagccgtgtngtgcaagggacttcatctaaagct

SEQ ID NO: 413190 - DNA, 548 bp, Oryza sativa
gtgttttgttgtaaagttgcgagagagagagagggggatcatttagtttgttgagtggaagcagatcaggaagatgctggagaagctgtgggacgacgtggtggccggtcctcgaccggagaccggcctcgagaagctccgcaaggccgctacaacccgcccccttgtcatcaacaaagatggcgactgcgaggcgagcggagtggcgtacaagcggacgcagtcgatgccgacgaccccgacgacgccggtgacgccgtcgtcttcgtccccgacgacggcgacgacgacgacgccgcggggcagcaacgtgtggaggagcgtgttccacccggggagcaacctcgccaccaagagcctcggcgccaacctcttcgaccgcccccagcccaactcccccaccgtctacgactggctgtacagcgacgagaccaggagcagccatcgctgaactgaataatcccattgatcggaggctggtcgatctctctgtcacgccatgtttgcttggcccttgtggtatctaatacgtaattaattatctagta

SEQ ID NO: 413191 - DNA, 525 bp, Oryza sativa
tattacaaacccctctcactcccactaccatggagccttgcaagttccggccggcgagctcgttcgacacgaagacgacgacgacgaacgcgggagctccggtgtggaacgacaacgaggcgctgacagtggggcccagggggccgatcctcctcgaggactaccacctgatcgagaaggtggcgcacttcgcccgggagcgcatcccggagcgcgtggtccacgcccgcggcgcctccgccaagggcttcttcgagtgcacccacgacgtcaccgacatcacctgcgccgacttcctccggtccccgggcgcccagacccccgtcatcgtccgcttctccaccgtcatccacgagcgcggcagcccggagacgatccgcgacccgcgcgggttcgccgtcaagttctacacccgcgagggcaactgggacctcctcggcaacaacttccccgtcttcttcatccgcgacggcatcaagttcctcgacgtcatccacgccttcaagcccaacccgcgctcccatg

SEQ ID NO: 413192 - DNA, 486 bp, Oryza sativa
ttgtcgcgtgggctcgcctcgcctcgctgccggtagcctaggcgtgcgctaccagccagcacaggtggtgatctcatcatcccccgcccgcccgcgcgcgcgttcgcgctcccccgcccccaccaccccagatcccgaggccccgctccgccgcccgcgggatcgcgggccccgacacaagattttgcttaatgctactttatgcgtgtgtggataatggagtaatcactgctctgtgtatctgagctcacaccatgggtagcagtggcgcagacgcaccgactaagacaagcaaggcatctgcacctcaggagcaacagccacctgctagttcaagcactgcaacaccggctgtttacccagattgggccaactttcagggatatcctccaattccaccacatggcttctttgcatcacctgtggcgtccagcccacagggtcatccttacatgtggggagctcagcctatgataccaccatatg

SEQ ID NO: 413193 - DNA, 436 bp, Oryza sativa
  unsure (1)..(436): unsure at all n locations
gctagctcggctcagctcagctcacctcgcgcgcggatcctaatgcaccaaccgggcataatgcancgggctctcgccgtcgtcgccctcctcgccgccgcagccgccatcgccgccgcccagggggagtcgccggagttgctgccgttcgcggtgggggcggcgccggaggggtgcgacgtcggggaaggggagtgggtgttcgacgaggcggcgcggccgtggtacgccgaggaggagtgcccctacatccagcccgacctcacctgccaggctcacggccgccccgacgccgcctaccagcgctggcgctggcagccgcgcgactgctccctcccaagcttcaacgcgacggggatgctggagatgctgcgggggaagcggatgctgttcgtcggngactcgctgctccgggggcagtacacgtcgctgctct

SEQ ID NO: 413194 - DNA, 409 bp, Oryza sativa
ggcttacttgtcgccgcatagcggaaggatcttgggggggttctttttcaactgggggaggaatgctacagctaaaaaggcggctaggccgtctgctcccacgacggacaggccgctgtggttccccggctcggtggcgccggactacctggacgggtcgctcgtcagcgactacagcttcaacccgttcggcctcggtaagccggccgagtacctgcaattcgagctggactcgctggaccagaacctgtccaagaacaacgccagcaagatcggcacccggttcgagaccagccaggtgaagtccaccccgttccagccctacaccgaggtgttcggtctccagcgcttccgcgagtgcgagctcatccacgggcaatgggccatgctcgccaccctcggcgccctc

SEQ ID NO: 413195 - DNA, 423 bp, Oryza sativa
  unsure (1)..(423): unsure at all n locations
cttttacttgttcgccatttgaagagctcacattggtgggccaaacaatatggcgagtggggatctgtcaaaaccatgctgccatcggatttcaactccattttggatccctgagtgtagacagggtggagaggatttgcgctccagacaactgttttgtcggccgagttggtgaaccagatagagaaggtgcaggaattgggggagatcttgtagaggccgcatgcgaaatcgccatccggcgaatagagcacatcgtcttcagatagagatgcgcctggcgagaagaaatcatgtgctgatattcacagaagaggatgaatcatgagaatgagcatagaggcagagcttgcaaccatttttgctggagctggagagcangtgtttcgtctttcaagcgtctgctgttacttattataagaa

SEQ ID NO: 413196 - DNA, 327 bp, Oryza sativa
aattctttcttaaatcctcctttgctatatatgggtggtttattttcttctatatggggagggattctttcccacgtagacttgttttatataaaaaagattcctctaaaacgcatacatgatgagatgaggacgagccctgcaaacaaccttgacggaatgcgattcatattacattcatcgacaaatctatctgacttgagtaaaacaacctatggcataaaaactgtcactgacaaacgagaagaaatcattgcccatattcttctgtcaactacaggtcgcacaccaaactcccataggttgaacttagaatctgctcgcgtt

SEQ ID NO: 413197 - DNA, 297 bp, Oryza sativa
  unsure (1)..(297): unsure at all n locations
ctgtatctttcatgggcctggtaatcccacccaggatcggttctatcataaccagggggggtcnactactctaagggtgcacacaggattatgcggatttttacatggggccaggccatgtggaacactgtgctcttggccatattctggtgtacaagaacccatatgcatacgggaggcacctctgcatgcagtccattgctcactggaacgattttcgttccaaagtcgccgagctctaccccgagtacaaagtgccaaaattacccaagggaacgcaccctgggctggtgagag

SEQ ID NO: 413198 - DNA, 404 bp, Oryza sativa
tggatgccgctgagatgaacaagaggtcctgggagggctcgtttgaactcgagggggggaaggccaaacgtgagagaggtatcaccatcgatattgccctgtggaagttcgagaccaccaagtactactgcacggtcatcgatgcccctggtcaccgggacttcatcaagaacatgatcacgggtacctcccaggctgactgggccgtgctcatcattgactccaccactggtggttttgaggctggtatctccaaggatggccagacccgtgagcacgctcttcttgctttcactcttggtgtgaagcagatgatctgctgctgcaacaagatggatgccaccactcccaaggactccaaggcccgttacgatgaaatcgtgaaggaagtctcatcctacctg

SEQ ID NO: 413199 - DNA, 371 bp, Oryza sativa
tgctttcaccatggcgctctcctcccccgtggggggcctcactggaccttcggggggctccacgctcttcggcgaggcgcggatcaccatgcgcaagaccgccgggaagcccaagccggcggcatcgtcggggagcccgtggtacggggccgaccgcgtcctctacctcgggccggtctccggcgaggccgccagctacctcaccggcgagttcccgggcgactaccggtgggacaccggggggctctacagcgacccggagacgttcgccaagaaccgggagctggaggtgatccactcccggtgggcgatgctgggcgcgctcggctgcgtcttcccggagctcctcgcccggaacggcgtcaagttcg

SEQ ID NO: 413200 - DNA, 463 bp, Oryza sativa
  unsure (1)..(463): unsure at all n locations
tcttctttataaaggtctaacagatgaangtatggcggatcacattctttctggggggggcaagaacctctacagcatatactccaagatgataaagaagaacttaacgatggatgatgttcatgacattcatggtctacgtcttgtggttgatacagagcaagattgttaccaagctcttgacattgtccataatctctggccccgagttgctggacgatttaaggactatatcctgcatccaaaattgaatgggtatcggtcattgcacactgtcatcatgtgtgagggcatacacccatttgaagttcagatccnaacaaaagaaatgcatctacaagcagagtatggatttgctgcacactggagatacaaggaaggtggttgcaagcactcttttgtactccaaatggtggaatgggcaagatgggtgctcacatggcaatgcgaatcaatgagcaaa

SEQ ID NO: 413201 - DNA, 319 bp, Oryza sativa
tggttactggtctcctttggctgatccaaaatccagggggatcatatgtggcttgacacttgatacaagtgagaagcacttggcgcttctttatctagcaacaattcaaggcattgcttatggtactcgtcatattgtggagcattgcaatgctcatgggcacaagatcgatactcttcttgcttggggcggacttgcgaagaattccttgtatatccaagagcacgcagatataactggatgtccaataatacttcctagagagaatgagtctgtgcttttaggagctgctgtcctgggagctgttgttgcaaagaag

SEQ ID NO: 413202 - DNA, 480 bp, Oryza sativa
ctctctctttcgcctcctcttccgccgcgagacaggaagagctgcatctcacaggggggcctgcgcgtcggcggccatgggagacagccagtactccttctccctcaccaccttcagcccgtcggggaagctggtgcagatcgagcacgcgctcaccgcggtcggatccggccagacgtccctcgggatcaaagctgctaatggtgtagttatcgccactgagaagaaattgccttctattttagtcgatgaaacatctgtgcaaaagattcagtcattgactccgaacattggagttgtctacagtgggatgggtcccgatttccgtgttcttgtgagaaaaagtcggaaacaagcacagcagtattatcggttgtacaaggaaactatccctggtactcagcttgtccgagaaactgctgctggtatgcaggagttcacacagtctggtggtgtaagaccatttgggggtttattatt

SEQ ID NO: 413203 - DNA, 333 bp, Oryza sativa
  unsure (1)..(333): unsure at all n locations
acccgctctctttgtccccccctctccaccaaaaanggagggctttatatatctgggggccttacaacctcaacatgtagacatccatactcctttccctcaccacctcagcccgtcagggaagcttgtgcagatcgatcacactctcaccggggtcggatccggccagacgtccctcgggatcaaacctgctaatggtgtatttatcgccactgagaagaaattgccttctattttagccgttgaaacatctactgcataagattcagctcattgactcctaacattggatctggtctacagtgggatgggtcctgatctccctgtcctttg

SEQ ID NO: 413204 - DNA, 320 bp, Oryza sativa
tacttgctaggccggccatggagactgtgggggtggtctgtttcaccctcgggggggggacacactcgccagcgtgctgcgccgccatgtccttctcgcagtcctacaggcccaaggccgctagaccgtcgagcacgttctacagcgagtcgctgcgggttaacacggcgaggtctctgccgtctgggaggctgttcaaggcggcgagccgggcggtgctcagcacccggtgcgagatcggggacagcctggaggagttcctgaccaaggcgactccggacaagaacctcatcatgctgctcatctgcatgggggaggct

SEQ ID NO: 413205 - DNA, 382 bp, Oryza sativa
tacttcctgaagtctgttatcaagaagaagtgggggcaggatgccaccaatgtgggggatgaaggtggttttgctcctaacattcaggaaaacaaggagggtcttgagctcttgaagactgcaattgaaaaggctggatacactggcaaggttgtcattggaatggatgttgctgcttcggaattctacaatgacaaggacaaaacctatgaccttaacttcaaggaggagaacaatgatggttcacaaaagatatctggtgatagcctgaagaatgtatacaagtcatttgtcagtgaataccccattgtctcgattgaggatccgtttgaccaggatgactgggaacactatgctaagatgaccgctgaaattggagagc

SEQ ID NO: 413206 - DNA, 377 bp, Oryza sativa
tcagtgaggggccgtgggccacgccagccctaccggggaggtggtcgccgcggtggctatagtgatgggcagagtggagacgactatggacgtccgcgcagggcgtatgagcgccacagcggcactggccgtggctatgagttgaagcatgaggggtctggccgcggcaattggggaactgtcaccgatgaaggccttgcacaggaagttgcggaggctgttaacactgaggaggctcctgcaactgcataggatgagaagaaacctgaagatgtgccacaggctgaggtcgacaaggacaaggagagtccagagaatgaagaagaagaaaaagaacctgaggataaggagatgactttggaggaatatgaaaaagg

SEQ ID NO: 413207 - DNA, 428 bp, Oryza sativa
gttttccttagattcagattgatgatgattctgagcggattgatgaagacagccgggggactgaagacgacttgaagaaaccagaacttccagttgttggggattgtgaggtgggagccacaaggaaggcatgcaagaactgtacttgtggccgggctgaggctgaggagaaggtggagaagctaaatctcacatcagaacagatcaataaccctcagtcagcttgtggcaattgtgggttgggcgatgcatttcgatgtggtacttgcccatacagaggtctaccagcattcaagccgggcgagaagattgccctgcctggcaacttccttgcggctgacttgtgatgatagaaaggaacatcggcgacagcagcagataggaattggcttctttaattcgttcgtttgtaggatgttaagttgctg

SEQ ID NO: 413208 - DNA, 487 bp, Oryza sativa
gtcgttattatgattcctgttacggcgccagacagggagagctgaaactcacaggggggcatgcactttaacagccataacagacagccaaggctaatttgcactaaacacctttagtccgaatagaaagctagctcaaatcgatcacgcgcttaccgtggtctgattgtggatgccatatttggatcaataacttcaagcgagcatttgtgcataggagtgcggacatcgacgagtgcattgatgatcaagacagcatatgctcaggatgcagagaagatggataaactgaacacaatttgtttcactctaatgacccatggacctgatgctgatgtaagtgatgtttcggagaaggaacaggcagaacaacatcattcataggaaggccggggcacgaggcagctatgtataggttatgtcttgattttgataaagtaactcttaattgatgtaggtgaaaagaaattttggctttttaattgat

SEQ ID NO: 413209 - DNA, 484 bp, Oryza sativa
gaggtcctatcgacggaggcacccgcgtcattcctgcggttctgtgcccgtcgtcttgtcgcattgagagagagagagagatcgaccaggcgttcactgaattctactagaactcggcatgaagcgacccggcggtgccggcggctgcggaagcagcccatacatcgccacgatggctgattagagcgatgactgatatgggaggctcgtgctcaaggtcaccgacaaccacgagtgcttgaagtttaagacagatcaagctcaggatgcatagaagatggaaaaactgaacaccattttttttactctcatgacccatggacctgatgctgatataagtgatgtttcggggaaggaacaggctgaacaacagcattcatagaaaggccggggcaggaggcagcagtgtattgggtctgtcttgattttgttcaaagtaatcataactggaatgggggttgggactatttggctctttgattgc

SEQ ID NO: 413210 - DNA, 509 bp, Oryza sativa
  unsure (1)..(509): unsure at all n locations
ctttcttctcatcctccccaaccactgcatccggggcggggttctcctcctcctgctgctcctcgcagaatgcaacgggcaattcaagctatcgggtcacatggcagtctcctcaagtctgctgttctgcgacacatcagtgctccaaaaccatctattttacctgctgtatattcacgctccatgtcagtttcatctgctcaaatagaggagagtggatttgagactgccactgtggcagatattntgaagtctaaggggaagagtgctgatggatcttggctctggtgcactactgatgactctgtctatgatgctgtcaaatctatgacgcaacacaatgttggagctctggtggttgttaaacctggacaggataaatcaattgctggtattgttactgagagagattacctcaggaaaatcatagtgcagggacgatcttccaagtcaactaaagttggagacatcatgactgaagaggaccagctgatcacggtgaagcctga

SEQ ID NO: 413211 - DNA, 354 bp, Oryza sativa
  unsure (1)..(354): unsure at all n locations
ggctatgttgatgatatatcaatatataatatgctgtggatttttattttacaatttgggtatgtaccatctcaatggcctctgctcttaacacatatgtaataatctcttccctccctctccgaccggttttattgtaagagtactacaattatcgttgggtgaggatatgtgaaaacaaagctccggctatatacacacaagatatgtatctagagcatatctgataaattcgtcgacaatgnattaaaataaaagaacaactaaaatggggaaaggaaaaaccctaaattggctgaaaaatgtatacagaatttattcaagcccatataaaaaaactgcaacttatttcac

SEQ ID NO: 413212 - DNA, 550 bp, Oryza sativa
tctcgagcggtgcagtgcaggcgaaaccctagtggaagcccgtggcgagccaccgccacctccagatccgaccacaccgcgccgccgcagcgatggtgtacttcgattcgtgggacgagttcgtcagcaagtccgtcgagctcttccgcaaccaccccgacaccacccgctacgttgtcaagtaccggcactgcgaagggaagctcgtgctcaaggtcaccgacaaccacgagtgcttgaagtttaagacagatcaagctcaggatgcaaagaagatggaaaaactgaacaccattttttttactctcatgacccatggacctgatgctgatataagtgatgtttcggggaaggaacaggcagaacaacagcaatcaaagaaaggccggggcaggaggcagtagtgtattgggtctgtcttgattttgttcaaagtaaatcataactgaagtggtggatggacattttggctctttgattgctctcgtaatgttctgacagagatgtgagatattttgggattaattctcttgaaaagactgaatacctt

SEQ ID NO: 413213 - DNA, 202 bp, Oryza sativa
tgactacgtcatctccaagtcgtacatctcctgcggtggtggctggctcatggacgtgttccatgtgacagaccagatggggcggaagctgacggacccgtcgctgccggagttcatccagcgggcgctcgtcccgtgccagcgccccggcggcaacgggccgtcgcccaggttcacgacgtgcctcggcagcgtgggcggg

SEQ ID NO: 413214 - DNA, 477 bp, Oryza sativa
ttgtgtatccgtcgctgatggcctctccaatgggcggaagtgccgtttatcaacgaccatacgctgtctttcgcaccccagcgcgcatgtccgtgcactcagcatgtccgtccttcgcgacatcttgaacagcggacaaattaactccagtaagctcatacaaggggaacaccggaatggcatgcagagcccaacctaccagtgcttggcagcaagcatcatcaactggcaagccgatgtggagagatgcatagagtgggaagcccacagccgacgcgccaccgggctgacgctcgccttactcaccgtggcggcgaaggagctcggctgcccactcacttgctgacaaggccacaccatgactgtcactgcaagcagctgctgtaggatcagcgagtaggaaaggatgactagccggtcagtttcctgagatgcgatttatgactgatattagctgatgttcccaagcatgatacg

SEQ ID NO: 413215 - DNA, 257 bp, Oryza sativa
gcgtcgtctacgacgacgaattcgagcgaggcgagcggcgatggaggcggtggcgatctgatccgctcttcccgtctcggcctcgcgctcctctccctccctcgcggtgtctcgggtaggaaatggcgatcatggtggatcctccaaatgggatgggttaccaagggaagtattactactcgatgtggcaaactttgtttgagatagacactaagtatgtgccaataaagcccatttgtcgaggagcatatgggact

SEQ ID NO: 413216 - DNA, 259 bp, Oryza sativa
ttagctactgaggtaccactccaccaagagcgggggggtgctgaccagcctcaaggattacgtgacgaggatgaaggaaggccagaacgacatatactacatcaccggcgagagcaagaaggccgtggagaactcccccttcttggagaagctgaagaagaagggttacgaggtcctctacatggttgacgccatcgacgagaatgccgttggtcagttcaaggaggtccagggcacgatgtttctctttgccacctag

SEQ ID NO: 413217 - DNA, 342 bp, Oryza sativa
cttttgctcgctcaaccacccgtcggccggcgatgctccggccgtctacgccgacgcggcgcctcctccagagcgtcggcggtgggagcaaccccaaccggatccctggcatcccgcccgccgatcccccctccggcggcgtcagctccgatgtcgtcgtcatcctcgccgccctcctctgcgccctcatctgcgtcgtcggcctcgccgccgtcgcccgctgcgcccgtaaccgccgcaacagcggcggagccggcgccggcgccggctccgactccccgtcgcacagaccggcccacgcggggcacttccgcggaggaaggagcggaagtggcggcgtaa

SEQ ID NO: 413218 - DNA, 554 bp, Oryza sativa
  unsure (1)..(554): unsure at all n locations
gttaaattctgggatatggataacaccaacatacttacaacaacagattgtgacggtggactgcctgcgagcccacgcttgagattcaacagagaaggttcattgcttgctgttacagcaaatgaaaatggaataaaaatattagccaacactgatggacagcgtttgctaaggatgctagagagcagagcatatgagggctctcgagggccacctcaacaaattaataccaagcccccaattgtcaacacccttggttctgtttccaatgtgtctagtcctatggcagtgaattcggagagacctgatcgggcattgcccacagtgtcaatgagtggcctggcgcccatggatgttagcagaaccccagatgttaagccaagaattacagatgaatctgaaaaggttaaaacctggaagttggcagacattggtgactcangacatctccgagcactgcgtatgccggatacatcagcaacttaaagcaaagtgtgcgtctgctgtatacatataatggggtngcgcttttggctcttgggctctatgctgtt

SEQ ID NO: 413219 - DNA, 562 bp, Oryza sativa
ggctcattgagatcatcaagtacaaggggttccaggggccaccggacgagctggaggcgctgctcatcactcacccggagatcaaggacgccgccgtcgtctcgatgaaggatgatcttgccggtgaagtgccagtcgccttcattgtccggacagaaggctcagaaatcaccgaggatgagatcaagaaattcgttgcaaaagaggtggtgttctacaagaggatcaacaaggtgttcttcaccgattccatccccaagaacccttccggcaagatcctcaggaaggacttgagagccaggctcgccgccggcatccccgacgccgtcgccgccgccgccgtcgatgcgcccaaaagcagctaaggccaacgccgacgttttctctattttcagtcacacaaccggtgaaaaaaaaatgcagagatatgatgttgctgtccatgaaaatggaggcagaaatggagcataggaagtttatagtttggtctgtggttggttgatgctgctgcagcagcttgtgcaaatgtcataaaatggcatttaatatattatttatatta

SEQ ID NO: 413220 - DNA, 510 bp, Oryza sativa
ccttagtttgatttcagccagggatatgatggagggggggttgtggttcaaaatggggatcaaatttgtgtattcaaggctgctaatgagagtgggaagccatggttgtggtgggactatgtgcatgacttctcaattaggtgccctatgaaggagaagaaatacacacctgaatgtgctgttcatgttattaagtcactcgggttggatgttgagaagataaagaagtgtgttggagatcctgaagctgatgaggaaaaccctgttctgaaggcagaacaagatgcccaaattggtcatgataaacgaggagatgtcacaatactgccaacccttgtcatcaacaacaggcaatatcgaggtaagttggacaaatctgccgtgctcaaagcagtctgcgcaggatttgaggagacaactgagcctgctatttgtttgagcgaggatgttcaaacaaatgagtgtttggaaaataacggatgttgctggcatgaagggataatatgtact

SEQ ID NO: 413221 - DNA, 537 bp, Oryza sativa
cattcacttaagtacaacatgaagtctagggctggggggggcttcacccttgaagagctgaaggcagctgggatccccaagaagtttgccccaaccattggcatctcagtggatcaccgccgtaagaaccgctcacttgaaggtctgcaggccaatgtccagaggctgaagacctacaaggccaagcttgtcatcttcccaagacgtgcccgcaaggtcaaggctggtgactcgactcctgaggagcttgccacagccacccaggtccagggtgactacatgcctatcacccgtggcgagaagcgctcggttgaggtcgtgaaggtcacggatgacatgaaggcattcaaggcctacgccaagctgcgcgtggagaggatgaaccagcgccacatcggtgcccggcagaagagggcggccgaggctgagaaggaagagaagaagtgaaaggattgcaacctgcaacgttaagaatagatgccctaagtttattaccattattgttatcagcttctcctgatgcgagactggcattct

SEQ ID NO: 413222 - DNA, 534 bp, Oryza sativa
tgttttctgcagaaggcatcagaaaaatcagggcaggcaaaaaaatgggctgagccacatgtggagactgctaaaatgaaatgggttccagtgaaggaaaaattggttgtcctcaagaaaaacacagaaccttatgtacaaaaggtctcatcaaaatccgtggaggtctatgaggcatcaagggatgctgttaaacctcatgttgcaaaggttaaagagtttgctgatccctacttccaggaagccaagaagttctccaaaccctacattgatcaagttgctgaggttacaaagccacatgttgagaaagttagaactactcttaagccgtatactaaaagagcagttcgtgtgtatgggtcatttcttgaatcagcaaccacataccatcggcaggcgcaatcaaccatcttagattacctacaccaacatgaggtatccaaatcacttgcgacgaaggagttggttaggttcctggcttctgctttgctggctatccctgtctatattatatacagggcttctatggaagca

SEQ ID NO: 413223 - DNA, 361 bp, Oryza sativa
  unsure (1)..(361): unsure at all n locations
tcttttcagaagctttcaaaccctaggcgagggagagtggtgagacgccatggacgcggacactgtgtnaaagttttcccatttctttattcaagaactgattgtgtttgttgattgattttttttttttcttgataaaactttttgtgtttttgcatgcatgcaacttaagtgagcattcttgataaatttttttgagcttttaatttgggatctatattttaatatatctatcttttcttatcttttcatatgctactattatctaacttgatcatatgtttgcttataacttattttattagttatttttaaaattactagctttatggcttttaagatcatttaacatgcttttaat

SEQ ID NO: 413224 - DNA, 161 bp, Oryza sativa
  unsure (1)..(161): unsure at all n locations
ccctanttaaaaagaaagaaattaaaaagaaaatcacggggcgtgagcttgcagagacagcattggtgagagttgaagccaatcacgcctcgcgggggcgccgcaccctggaggagatcctgcagatgagagccccctaaaggatgcagttccactacaac

SEQ ID NO: 413225 - DNA, 150 bp, Oryza sativa
accgacccggaactgtaccggctggacccacgcacgcgttctgactctaagttcaacattggcgatgctggaggtgacatgagtgtctacttggggtacaccaaggctgacaagaggctcactgccttgcaccctgaaatttgaggagct

SEQ ID NO: 413226 - DNA, 53 bp, Oryza sativa
tgctgctctcacagctcactgcatcaatggccggggtcaccatgacactctcc

SEQ ID NO: 413227 - DNA, 434 bp, Oryza sativa
gctttatgttcagggaaaagaagtaaacggtgctgggtggactccagctttgctgggcaccaggatgttgatggaagagcaacagatgtcgctcttggatggtcagttgctctaggttctcctttcacatttgctactactctagagcaggagtaccgaagcgatatttttggcgagcgaggtattttgcttggggctgtacatggtattgtggaggctcttttcaggagatacacagagcatgggatggatgaggactcagcatacaagaacactgttgagtgcatcactggaatcatctctaaaactatttcgaaaaaggggatgcttgaagtgtacaattcattgacagaagaaggaaagaagcaatttatcgaggcttacagtgcagcatattattcatgcatggatatactatatgaatgctatgagat

SEQ ID NO: 413228 - DNA, 516 bp, Oryza sativa
  unsure (1)..(516): unsure at all n locations
ccaaaattcccttttctacccacacctccnntcctactttacacacacaaacactcttcaacaagaggcgggtgttaatataaactaaccatcgcgaaacctaactacccattcaacaaaagatgacctccctaattagaccaaacaccggagctgcacacattgtatttccactttttacctcgactacttcgcggctgtgagggctaactttcctactactcctccctacatctctgacaatatgtcctatagcatcaacaaagccaaagaggcttgcacgtatgacacctcaagcggccagtgcactgcatcgtgcaacaatgtggaggatcttaacacttctgcaagccacgcgcccgacaaactcaaggatacctcctacccgctcgaggcctacttcaatgacaacccctataccgactaatgccctacctacgacaacttattcttaccattatatgtttgctaatccctctgtaattaattataagttacctgctttaaaagattatt

SEQ ID NO: 413229 - DNA, 410 bp, Oryza sativa
ttgatcttgagggtgaggcagcggaaaacactgagggacaagattcacaatgcaggagggtcacttccattctcagaacgctcacacaatgcagttaaaccgcttgctaagcatgttcctagagctttaaatgatcatgaagagaagttctcttgtatattttatggaaatgactcgttttatgttttgttcaggctacaccagatcctatatgaaagaatactgtcagctaagactaactcctcctcagctgaaaagaaatggaaagcttctaaggataccaacttgccagaccaatattcaaaggttatgagtgcactggataacttgcttgatgggtcttctgacaacaccaaatttgaagatgactgccgttcaatcatcgggactcagtcctattgtccttttac

SEQ ID NO: 413230 - DNA, 436 bp, Oryza sativa
ttcttcttcttcccactagccaaaagcacaaaggacggagaaatcgcttctcagatgggcatcatcaccatggcggcgtctcttgcctgcgctttcttcttcgacgccgagccggtgggcgagcagggcaggcacgcgctggacgcctgcgcgctctgcaccaagcagctcacgagggacagcgacatcttcatgtacaagggggacacgcccttctgcagcgaggagtgccgctacgagcagatgcagctcgacgcggtgtacgcgaggtcagccggactgaggcagcagcagcagtactcccggagggcggattcgcggcgcgggcaccgggagaccaggaatgtgtccgtggcgagctaatcaagctgcgtcgataatataatgatcagctgagaagaattggcgttgaatccagacgagatttcaagagcta

SEQ ID NO: 413231 - DNA, 392 bp, Oryza sativa
tttccttttctaatctcaagtctctatctcggggtccgcgtatatccactcggggtgggcgtaattaaaatcggaatcaacggtttccgaaggatcgggaggctcgtggccagggtggccctccatagcgaggatgtctagctcgtcgccgtcaacgaccccttcatcaccaccgactacatgacctacatgttcaagtactataccgtgcacggccaatggaagcacagccacatcaagatcaaggactccaagactctgctcttgggcgagaagccggtcaccgttttcggcatcaggaaccctgacgagattccgtgggctgaggctggtgctgagcatgtcgtgcagtccaccggtgtcttcactgaccaggagatagctgctgctca

SEQ ID NO: 413232 - DNA, 374 bp, Oryza sativa
gtaccggacctcccttcccgagtcaacccacccgtctcttacttttcttgctaaagcaatcgccaatggtacggattctatttatatccgggtgatgtacattaaattaattcaaaaatatgttggtgaaggggcaccaatggtccaggaattatctcacatagccctctcaaataaagcatgcattgccttctttataatgttgatactattggaatgtgcctcactctccatgatcagggttatggggtgatatctatgttcaacataccatgttcgaaattgtgaaccaactccatgagtctgatacgacgggaaacatcaaagttctaatagccacaaacacgcctgataccttagatccttcacttcta

SEQ ID NO: 413233 - DNA, 496 bp, Oryza sativa
gtcataatgtgtaccaccaccgcactgagatgaatgagagggtttactagatcgggaggtgtggccaggaaagccatgctgcctgcactgaatttgacaggactgagaaggacatcactcccatgggtggcttccctcactacggtgttgtgaagggcgactacctcatgatcaagggttgctgtgttggccccaagaagagggtcgtcaccctccgccagtccctgctcaagcagacctctcgtttggcgctcgaggagatcaagctcaagttcatcgacacctcgtccaagttcgggcacggtcgcttccagaccaccgacgagaaacagaggttcttcggcaagctcaaggcttagtttgggcggttcctcagcaaagtcagaatttgtcaaaacgatcatcactactctatacttgggtctcttctcttgatattttctggggtattaagtttttgtagcagatgtttcaggacctgttgatctatgaattt

SEQ ID NO: 413234 - DNA, 447 bp, Oryza sativa
ggattatttcacggtggaacgcgtacttacccacagggtagttgcattccatggggcgatgggtggcgtgcacctcgccaccggtactcacgctggccctgctcgcgtcgtgcggtgcccttctcgccacctccatgctcccggcgcgtgcgacggcgggcagctgcttggacgtcggcgacatggtgatgatggacaggttccgcgcttggcagggagctcacaaccgatcgtacccgagcgcagaagaggcgctgcagcggttcgatgtgtaccgccgcaacgcggagttcatcgacgccgtcaacctgcgcggcgacctcacttaccagctcgccgagaacgagttcgcagacctcaccgaggaggagttcctggccacgtacaccgggtactacgccggcgatggccccgtggacgactccgttatcacgacgggtgccggag

SEQ ID NO: 413235 - DNA, 341 bp, Oryza sativa
tccctactttgcaaatatgggatactgctggccaggaaaggtttcagagtcttggtgttgcattctaccgtggagcagattgctgtgttctagtttatgatgtcaattctatgaagtcatttgataatcttaacaactggcgtgaagaatttctaattcaggcaagcccatcagaccctgataacttcccttttgttcttttgggcaacaaagttgatgtagacggtggcaacagccgtgtggtctctgagaagaaggcataggcatggtgtgcctctaaagggaatatcccatactttgagacatctgccaaggatggtacaaacgttgaggaggctttc

SEQ ID NO: 413236 - DNA, 513 bp, Oryza sativa
tctccaatccaagctccaacaatggctaaacggtccgtgctcctccttcttcctctgctcatcttctccatcggcgcggctctcgcccgcgccgatctcatgctggacaggttcgagcagtggatgatcaggcatggccgcgcctacaccgacgccggtgagaagcagaggaggttcgaggtgtacaggaggaacgtcgagctcgttgagacgttcaactccatgagcaatggctacaagctggctgacaacaagttcgccgacctgacgaacgaggagttcagagccaagatgctggggttcagacctcatgtcacgattcctcagatttcaaatatctgctccgctgacatagcaatgcctggagagagcagtgatgatattctgccgaagagcgtaaattggaggaagaaaggggcagtggtggaagtgaagaaccaaggagactggggttcttgctgggcgttctccgggtggcggcgatagagggatcaccagatcaagacggcgagc

SEQ ID NO: 413237 - DNA, 396 bp, Oryza sativa
ttcacttccatctcctccgctccctccccaggggcgaggttgcacaccaccggggccggggcagtataaaccccttcgcgaagaatcccactccgcgagaggcgatccggagcatcaaacgtgagctgacgaatgctaccagaggtattgagagagatattggaacgttgcagctagaggaaaagaggctagttgctgaaatcaaaaggactgcaaaaactggcaatgaggcatcaaccagaattctggcccgccagctgatcaggctaagacagcaaatttctaatttacaaggtagcagagctcagattaggggcattgcaacacatacacaggcaatgcatgccaacacttcagtggctgctggcatgcaaagtgcaagcaaagcaatgggag

SEQ ID NO: 413238 - DNA, 470 bp, Oryza sativa
atcttgggttccaaacacaggttcttccttaaatggaagggtttattttaatgaaggctgggggtgacaaaaagaagtctagcagcgcgtcgatccttgacggatgaagcgtccctgggctacagcattgatgacgctccacctgccggaggcgtgaagaacctccagcctggtgcttactccaactgcgcgaagaagccatactgatagccctttcggcttctccatcctagtaggtgatgatgtcttgcactgccatttcggcacttttcttctgacctatatctctgggtggtgcttcctgaaaatcgaccaggtctgtagccttggtccctgcactcctacctgctgcatctgcggcacagtgttctgaccaacctgcttcaatgggtgacttgtctgctgctgacccttccccaggctcagcaattgggcctgagggctatgagaagcgccttgagatcactttt

SEQ ID NO: 413239 - DNA, 501 bp, Oryza sativa
ggcgtggctacgaactcatcacctccactctctgggtgagcacgagtgaatcggaggcggcacgatgcgcaagtgggcgctctcctccgcgctcctcctcctcctcctcctcaccacactccccgatccagctaagaagctccaagtcaatgctgatgacagcactgatgagttagttgatccgccgaaggtagaggagaagattgggtggtgttccccatggcctgtccacggactctgaggttgttcagagggaggctgagtcaatctcgaggaagaccctcaggagctcagcggagaaatttgagttccaggctgaggtgtccagactcatggacatcatcatcaactcactctacagcaacaaggacattttcctgagggagctcatctccaatgcttctgatgctttggacaagattaggttcctggctctcactgatcaggaggtttttgggcgaaggtgacactgctaagcttgaaatccagattaagctggat

SEQ ID NO: 413240 - DNA, 288 bp, Oryza sativa
ggctctcctgccgatgaggatctcggcggctgcgggacggtcaagattggcgccgggcgcgacaaggacagcgcggagcccaagtcgcgggtcgccaagggcaccggcgaacacggcggcggaggaccttccgagatggagctgatgaaggagaagttcgccaagctgctgctcggggaggacattgcggggtccgggaagggcgtgccgtcgtcgctggccgtgtccaacgccatcaccaatcttgcagcttctgtgtttggtgagcaacggaagctggagcccatg

SEQ ID NO: 413241 - DNA, 413 bp, Oryza sativa
  unsure (1)..(413): unsure at all n locations
atggtacaaatcctgcaagtgctgctatgtgtggggtgaagatcgatgctgttgggagctgattccaaagggaacattaacatcgaggagttgaggaaagctgctgaagcaaacaaggacaacttggctgctcttatgggtacctatccttcgacccatggagtctatgaagaaggcattgatgagatatgcaggataattcatgagaacggtgggcaggtatcatggatggggctaacatgaatgctaggtcggattgacaagccctggctttattggagcagatgtttgccaccttaaccttcacaagacattctgcattccaatggtggggngggggcctggaatgggtcctattggtgttaagaagcacttagcaccatttttaccatcttatccagtgatcaccactg

SEQ ID NO: 413242 - DNA, 499 bp, Oryza sativa
tccttctcaagttctgggacatctgaagcaaatacttccacgtctaagaacacaactcctgaaccttttgatccttttggtgctattcctataaacagctttgatggatctgatccatttggtgccttcaactccgatgttggatcatctagtataccaccacccacgcagagttctgttggaaatatcagcacaccaagtcagaaccctcaagcagcatctgactttggtggctttgtgtcgagcactgtagaaacagcagctaaggacccctttgatttttcaagtagcaatcttgggaaaacacctttggcagatccaaaggctgatgcatccgattttggtgcctttgtatcgcacagtggggaagtagccaaggatcctttttgatctttctttgagtaccagctctggaaggacaaaccaagcacctctggcggctcccatgtcagataccaagaaagataatttttagggcaagtctggcatatgggctgac

SEQ ID NO: 413243 - DNA, 472 bp, Oryza sativa
  unsure (1)..(472): unsure at all n locations
taatctcccacatcacacgcagaaatcctcatgaacggccagccatggcgtgcgcgctgaccaacgtcggcctgtctaccccggcgggggcggcgtcgtccctcgttaggccggtcaccggagctggacgcgtggtgtttccccgtgttggccgcggcgggttcgcggcggtgagggcgagcgggccggcgactcctccggacatctcggacaagatgtcggagagcatcgacaaggcgaaggaggcgtgcgcggaggacactgcgagcggcgagtgcgcggcggcgtgggacgaggtnggagtagctgagcgcggcggcgagccacgcgcgcgacaagctcaaggagacctccgacccgctcgaggcctactgcaaggacaacccggagaccgacgagtgccggacctacgacaactgattcttaccattatatgggtgctaatctctctgaattaattataagttactgg

SEQ ID NO: 413244 - DNA, 460 bp, Oryza sativa
ggactcctatagaagtggacatcgaggatttgggtgggggggtccacttaagcctggcccggacatcttacctccctcaacctttggtgcctcagccacagcaaagatcagtgttgatgcatccctggctggcggtatcattgggaagggtggaaccaacacaaagcatatatcccggatgactggggccaagctagccatccgggataacgagtccaaccccaacctcaagaatatcgagcttgagggtacatttgaccagatcaaacatgctagtgctatggtcacggagctaatcgttcgcatcagtggtaatgcccctccagccaagaacccgggcagggggtcgcatgctggggggcctggaagcaacttcaagaccaagctgtgtgagaacttcaacaaaggctcctgcacgtttggagacaggtgtcatttcgcccatggtgaaagtgagctg

SEQ ID NO: 413245 - DNA, 292 bp, Oryza sativa
gacctggattgcttcttgcttgcactgcacatggctgctgaagccgtttgcaccatacttcaggcttggctataatagtttgggtgcctttgcaaccatcaaccacctccactttcaggcatactacttgacagtgcctttccctgttgagaaggcagctaccaagaggattttccttgctgagggcacaatgaatagtggagtaaaggtgtccaagctgatgaactaccctgtgaggggactggtttttgagggaggcaactcactgatcgttttgtcctatgttaccttc

SEQ ID NO: 413246 - DNA, 464 bp, Oryza sativa
  unsure (1)..(464): unsure at all n locations
gagtcccttaaggccggcatcatcgacacgcagtggctgcgtgtatgtgcaagggtgctgcctacaccaagatcaccttccacatcgagaagggctccaaccccaactaccttgcgctgctagtcaagtacgtcgctggtgatggtgacgtcgtggaggtggaaatcaaggagaagggctccnaggagtggaaggcgctcaaggagtcatggggtgccatttggaggatagacacccccaagccgctcaagggccccttctccgtccgcgtcaccaccgagggtggggagaagatcatcgccgaggacgccatccctgatggctggaagggccacagcgtgtacaattccaacgtccaggccaagtggagcattttaagcaaggaagaaaccagcgtacgtacgatccagcgctggctggctatatatatatatatatatatatatatacatatacttatatac

SEQ ID NO: 413247 - DNA, 202 bp, Oryza sativa
tgaattcgagagaagagaactcggtgcaatgcgtagagattgttagacactggatgcaggcaaccctgacagagaacgtaggcacggtaagtgccctctcacaccagaagagggtgggctcatgctccgagcattgggatttgggaagggtgtgcacatatatgttgcatcatgggaggggtatggtggacagtcgattttt

SEQ ID NO: 413248 - DNA, 352 bp, Oryza sativa
tggatgagtggaagggctcggcaaacatcagggaggcgtccctcctatatccactgggctctctactctgcagcgctgcatcctactccctgggtagcaatagcaagggtaggaagatgagcacgttagatgccacgcgagcagagctcggccttgttggactggactcgaacaaagccgaggccagggacaagatatgcagggcgatccaatacggctcgaagtttatcaggaacgggcagcctggcacggcacaggatgtccacaggtccaccacccttgctcgcaaagttttccggcttctcaagtgggtcaatgatctgcatgggcttatcagccctcctgctaaagg

SEQ ID NO: 413249 - DNA, 323 bp, Oryza sativa
  unsure (1)..(323): unsure at all n locations
tgggtggcgcagtgggcgacggcgcagagggcgctggacgggctcaaccagtcgtccaccagctccgacctcttcaacgacaagaccggctaccgcgagctctccgagatcgccgagcaggccgcaaagcgagccgaggtcgccagactgagggagttgcacacgctcaaggggcacgtagagtcggtggtgaagctcaaggggctcgacatcgacacaatccaacagagctacaccgtgtaacatacagcatgccatcgatgtgttgttgtntgttgntcatacctgtgttttacttcttcccatctgcnagttatttggag

SEQ ID NO: 413250 - DNA, 374 bp, Oryza sativa
tctattccctaaataaagaggatgtgtggtgtagtatttaatttaataagaggtggactacacacaaacattcgatctcctatagtctgttcctactactcttacttatcacactgcccgatccaactaagaagctccaagtcaattctgatgacatcactaatcatttagttgatcccccgaaggtagaggagaatattggtggtgtttcccatagcctgtccactgactctatggtttttcatatggaggctgattcaatctccaggaaaaccctcaagaacctcaacgaaaaattttagttccaggcttatgtgttcagactcattgacatcatcattaacttactttacagtaacaaggacattttcctt

SEQ ID NO: 413251 - DNA, 482 bp, Oryza sativa
gagttgattgatctatctatagcagcaagcaagcggagaatattatcatcagaagaggggtgattaatcgatcgggcggagatcagagagatatattagattgttttggttgatcgatcgatcgatcgggatggctgctgcttcatctgctgacatggagaggatcttcaagcggttcgacaccaacggggacggcaagatatcgctggcggagctgaccgacgcgctgctgacgctggggtcgacatccgccgacgaggtccatcgcatgatgggcgagatcgacaccgacggcgactgcttcatcgacttcaacgagttcatctccttctgcaacggcaaccctggccttatgaaggacgtcgccaaggtgttctgattcttttttctttatctctcatcgcttcccatacatcatatcatcttttctaatttatttatatctattctgcattatattcttccctttcatttctaccact

SEQ ID NO: 413252 - DNA, 448 bp, Oryza sativa
gattatattttatgcgaattcgctcttcgtcatcggggagtttggtggcaacgactacgatgcgccactgtttgcggggaatggccttgaggaggcctacaagttcatgccggatgtcatccaggctatctccgatggcatcgagcaattgattgctgagggcgcaagggagctgattgtaccctgtgtgatgcccactggatgcttccctgtctacttgaacatgctcgatgagccggccgatgggtatgggccccagagcggctgcgtccgtcggtacaacacattctcagggtggcacaatgcacatctaaagcgcatgcttgagaagctccggccaacgcaccccactgcgaggaccatatatggcgattactacacgcctgttatccagctcatgcttgaggcactgacgtcggattttacaagcagctacctagggcatgct

SEQ ID NO: 413253 - DNA, 535 bp, Oryza sativa
  unsure (1)..(535): unsure at all n locations
aggtcaagttcaagccaatcatcttctccatggctcgtcttgaccgagtgaagaacatgacaggtctggttgagatgtatggtaagaatgcacatctcagggatttggcatacctagtgattgcttgtgttgaccactgcattcagtccaaggacagggaggagcaggctgagctcaataagatgtacggtctcattgaccagtacatgttgaaggggcatatccgctggaactctgctgatatgaaccgcgttcgtaacggggagttgtaccgatgcttttgtgacaccactggtgtctctgttcagcctgcattctatgaagcgtttgaaccgactgtgatggtagccatgacatgtggcttgccaacaatcgcaacatgccatggtggccctgctgagattattgttgatggcgtgtctggtctgcacattgatccttaccacagtgacaaggctgctgatatctnggtcaagctctttgagacatgcatgcaggattcaacctactggngacatatttcacagggaggtct

SEQ ID NO: 413254 - DNA, 506 bp, Oryza sativa
gcctctgctgccgcgcccgcttcctcccgaggtgcatctctggccggggcacgcgcgcgcctccccggcggggggccgccgcagtcggtggactacggcggcggccaggcatccgacagcagcggaactgctgatgatcttcctccaccatatccaagcaataggggtattagaggcagtggacgtgtcagtggtaatggaagagctattgttcctgctggttcatacactagagcccatactgatatggcaacacaaatccatcatcttgaacaagaagcatattgctcggttcttcgtgcatttaaagcccagtctgacgccattacatgggagaaagaaggtctcataacagaacttcggaaagagctaagggtatctgatgtagaccacagggaactactaaatcgggtcaacagtgatgatattatccgtagcataagggaatggagatcagcaggagggcctcaagcatgttacccataatgctcagcctatgcatgatc

SEQ ID NO: 413255 - DNA, 493 bp, Oryza sativa
gctttgaaggagagagcttggtgagctgcagagatggccccctccgtgatggcgtcgtcggccaccaccgtcgctcccttccaggggctcaagtccaccgccggcatgcccgtcgcccgccgctccggcaactccagcttcggcaacgtcagcaatggcggcaggatcaggtgcatgcaggtgtggccgattgagggcatcaagaagttcgagaccctctcctacctgccaccgctcaccgtggaggacctcctgaagcagatcgagtacctgctccgttccaagtgggtgccctgcctcgagttcagcaaggtcggattcgtctaccgtgagaaccacagatcccccggatactacgatggcaggtactggaccatgtggaagctgcccatgttcgggtgcactgacgccacccaggtgctcaaggagctcgaggaggccaagatggcgtaccctgatgcattcgtccgtatcatcggcttcgacaacgtca

SEQ ID NO: 413256 - DNA, 456 bp, Oryza sativa
catttccacatccaatgggatcaatgccgtttgaggctccaccaatgcctggcccggacatcgttcctccctcaacctttggtgcctcagccacagcaaagatcagtgttgatgcatccctggctggcggtatcattgggaagggtggaaccaacacaaagcatatatcccggatgactggggccaagctagccatccgggataacgagtccaaccccaacctcaagaatatcgagcttgagggtacatttgaccagatcaaacatgctagtgctatggtcacggagctaatcgtccgcatcagtggtaatgcccctccagccaagaacccgggcagggggtcgcatgctggggggcctggaagcaacttcaagaccaagctgtgtgagaacttcaacaaaggctcctgcacgtttggagacggtgtcatttcgcccatggtgaaagtgagctgcg

SEQ ID NO: 413257 - DNA, 470 bp, Oryza sativa
tgccttacgtgacgttcctggacatcagcaggggcaccatgatcggggcgcgcgcgctggaggcgttcggcaagaactgcaagtcgctggtggggctccggcgggtgatgcacccgacggacgtctccgtcaaggcgtgccatcgcgacaaggcgcgcgccatctcctgcaccatgccgaggctccggcacctggagatgggctacatggtgatcgcgacggatgcggtgctcgacatcctcgcgcggtgccgcgacctacggttcctcgacctccgcggctgctgggccgtcgacgacaagttcctgcaggagaggcacccggggctgagggtgctcggccccggcgtcgacgactggcttgagaacagctacctggaggagtgctccgactactgcgacgactccttcatctactcgtgggagctcatggaggacgacgacgacgactactacgccgtcgggagcgac

SEQ ID NO: 413258 - DNA, 422 bp, Oryza sativa
gcatttcttgagctcaatcagcaacaacatgtaggggcttcttgcttagttaagtgcgtcgccctcccaagaagaagaagatgtcttgctgcggcggcaactgcggctgcggcagcggctgccagtgcggcggcggctgcggcggatgcaagatgttccctgatgtggaggccacagccaccaccaagaccttcgtcctcgctgctccatccaacaaggcgagctctggaggaatggagatggcggtggagagcggcgagaacggcggctgcggctgcaacacctgcaagtgtggcaccagctgcagcggctgctcctgctgctcctgcaactgaatctatcgtccgtcgtcgcccggctgcatgaggatttactcgatggatgctgctactgtcgatcagagctttgatcgaggccttaat

SEQ ID NO: 413259 - DNA, 512 bp, Oryza sativa
cgtctttggccgtcgagtggttcgagcgcatgtacgcctgggacggcgtcctccccgacgaggtcacctactccgccatcctcgacgtctacgcgcagctcggcatgaaggaggaggtcctcgcgctcttcgaccgcgcgcgcggcagcggctggaagcccgaccatgtcgctttcgccgtcctcgccaagatgttcggcgaggccggcgactacgacggcatccagttcgtcttcaaggagatgcgcgaggtaggcatcaagcccaacatcttcgtctacaacgcgctgctggaggcgctgggcaagaccggcaagccaggcctggcacgcaacctgttcgaggaaatgacggccgagggcgtttagcccaacgcgcgcacgctcacggtgctcgcaaagatctacgggagggcgcgctgggggcgcgacgcgctgcagctctgggagcagatgcgggagaagaagctgcccgccgacaacatcctctgcaacacgcttctgagcatgtgt

SEQ ID NO: 413260 - DNA, 395 bp, Oryza sativa
ctctcttgcactgcacatggctgctgaagccgcaagcccgtacttcaggcttggctataatagtttgggtgcctttgcaaccatcaaccacctccactttcaggcatactacttgacagtgcctttccctgttgagaaggcagctaccaagaggattttccttgctgagggcacaatgaacagtggagtaaaggtgtccacgctgatgaactaccctgtgcggagactgccatttttaggtgcacttgcaacctgtgcaaacacttcaattcaagaaagtggactcctgtaacatgcaaaatcctataggctgtcaaatgcaatccatgcaagtaaaaacatggacattcccttcagatctcatgaaaaggccattaaccataataaagatgata

SEQ ID NO: 413261 - DNA, 468 bp, Oryza sativa
cgcttctctcctcctctaatctcaagtctgtgtctcgtcgtcctcgcatctccactcgccatgggcaagattaagatcggaatcaacggtttcggaaggatcgggaggctcgtggccagggtggccctccagagcgaggatgtcgagctcgtcgccgtcaacgaccccttcatcaccaccgactacatgacctacatgttcaagtacgataccgtgcacggccaatggatgcacagcgacatcaagatcaaggactccaagactctgctcttgggcgagaagccggtcaccgttttcggcatcaggaaccctgacgagatcccgtgggctgaggctggtgctgagtatgtcgtggagtcaccggtagtcttactgcctaggaaaaggttgctgttcacattgaacagtgtcgccaacaatgcaacatgataccctctcttgccttaccattcgtttttggcttttttt

SEQ ID NO: 413262 - DNA, 285 bp, Oryza sativa
tggagtaagaaagacttactttcgttgatgaggtccagtgtaccgtgctggaagtcaaggttgttgaaggtcatggtactacagttgatgttgtgttgctcaacggtctactccatgaaggatatcaaatatttgcgtgtaggatgcactgacctattgaacaacatatagtgccttgttgacaccataccctttgatgtttcttcattaaatgttctcattccaatatctttagatgattttagtttttcatggattcaatatttcatcttagtggctttgtat

SEQ ID NO: 413263 - DNA, 413 bp, Oryza sativa
ttactcacgcaacagaggtcattgtgaccaagcctggacacttgctcataaattctgggatccaaggatactccctgctaaagacaactcattccggggtcgaaaaatttgcgagggatcgctacacacttattcctgatacaagagataggattgcagcaacagaagctactgcctggaggaggtatccttttgagcatgttccccatattccatcaaaggcattctgcttcacacaaaggtatcaggacgtaaagacagttcttgcagatacgttctttggtcctcctgatgttggagtgcatagtccatcactgcagactacactatacctgatggctaaggaagcatctaacaggctcccggatatagcatctgctccgctaaggatggcggacctccacttatccctg

SEQ ID NO: 413264 - DNA, 252 bp, Oryza sativa
agcctttcgatgcgtcttctccccttcttctcctggggctggtggattttgagctgcacccggagccatggctaagaactaccccgtcgtgagcgccgagtaccaggaggccgtcgagaaggccaggcagaagctgcgcgccctcatcgccgagaagagctgcgcccctctcatgctccgcctcgcgtggcactcggcggggacgttcgacgtgtcgctaagaccgggggcccgatcgggacaatgaatacc

SEQ ID NO: 413265 - DNA, 214 bp, Oryza sativa
ggatcctgagcttggagagagacaacaatggcggctcaggctcttctctctgggaggcagctgctggggaggccattgcaatcttcagtctccaggtcttcttcctccaggaaggcacccttcatggtcagggcagaggccactccccctgccaagcaaggtgctgacaggcagctgtggctcgcatccaagcagtccctgagctacctgtatg

SEQ ID NO: 413266 - DNA, 305 bp, Oryza sativa
tctcgtactcgccgcgagagacccaccgatctgccctccgccccccaacatggcgacgccaccgccgctccgccgcgtcgccgccctcctcctcctcctcgtcgccgccgcctccacccccaccgcacgggccgatctcgtcgtcaccagggcggatcggaaggttgacctgacttcgcacatcgttcgtgtcctcacttcgctcaaggttgagaatagtggaccggaggctgtttctcaatttctactggcgtttcccattgtccaagcatagaacttatgagctattaagagtatttggtact

SEQ ID NO: 413267 - DNA, 190 bp, Oryza sativa
tgcgtactctccacgcctccacaaataaagctggtcccgtggaagggcggtgacccaccccccccaatcgccaaaaccctaactccgatccgatcgagctctgcttcccatggcgactgccgcgagccaggcgagcctcctgctccagaagcagctcaaagatctcgcgaagaaccccgtggatgggttc

SEQ ID NO: 413268 - DNA, 416 bp, Oryza sativa
tagatgaggcacctccagtaatcaaagagacggctggattggtcgaagacacggaaaagattaactcactgacagcagaggttgaacaactgaaggctttgctgcaaacagaaaggcaagcaacagaaactgcaaagaaagaatatgctgaagctgaacggagaaatgaagaactaatcaagaaatttgaaggtgcagagaaaaagattgagcaacttcaggatactgtccagaggctggaagagaaagcaactaacatggagtctgagaacaaagtgctacgtcaacaggctgttgctatttctcctacggcaaaatcattagctgcatatcctaagtctcccttccaacttaaaactccggagaatggtgtagctccgtatggggaagtggaaaccgttaccttatatcacccc

SEQ ID NO: 413269 - DNA, 370 bp, Oryza sativa
ggcagcagcagcagctagggtttagagagcatccgggaatcccatggccccaccctgcgactccgacgactcgggcccgatccccgccggcgccatctccaagctcctcatcgtcatagcgatgcagacggaggcgctcccgctcgtcaacaagttccacctcgtcgaggcggaggaatccatatttcctaaaggtgccccatggattagataccatggcaactacaaaggccttcacgttgaccttgtatggcctggaaaagatcctgttctcggagttgactgtgtgggcacggtatcagcagcacttgtgactcatgcctttattcagtcattgaagccagagctggacatcaatgctggcactgct

SEQ ID NO: 413270 - DNA, 501 bp, Oryza sativa
gggttgtttactatgatatcaagaataatgctgggcagcgggttctaaattggtggggggtgctaaactctaattccagatttgtatcgtggtcaggttgctcttgatgtagcggaagctcaggatctgatggaaggtctagactgaccgggtgcggtcaaggatattcaagctttagttaaatggctcaaggcccatggatcacccaaggttggtgttactgcatattgcatgggaggcgcttcgtcaatagcaagtagagtttcaataccagaggttgatgctgatgtggctttctatgggacaccaccttctgagcttgccgatgcttccaaggcccaagctcacatccaggctcatttttgggagctcgacagtactagtggatttgcaaatgtcaccgcagccaattcggtggaagagaagctcaagtcacttggcgtgccacatgaagttcacatctaccctggctgctcacatgctattatgaacacatcacct

SEQ ID NO: 413271 - DNA, 462 bp, Oryza sativa
aaataagtgagagagatggcagcaacagcctcccggaagggcagcctactgctaccgagggctatctctgacttcagtagtgcagcactctccatctcaacccaggctaggaggaggtcatggcagccaaggggggcaaggatgcaggtagcagcagctgcagactccaagaacattcttgtgatggggggaaccaggttcattggtgtcttcttgtccaggctccttgtcaaggaggggcaccaggtcacattgttcactagaggaaaggcccccattacccagcagttgccaggagagtcagatgcagagtatgcagagttctcttcaaaggtgttgcacttgaaaggtgacaggcaagactttgatttcgttaagacaagccttgcggcaaagggcttcgatgttgtttacgacataaacgggagagaagctgttgaggtagccccaatcctagacgca

SEQ ID NO: 413272 - DNA, 482 bp, Oryza sativa
  unsure (1)..(482): unsure at all n locations
ggttgaggcggatctgagggggaagaaggcgttggggcgggccgacctaaacgtgccgctggacgacgcccagaagatcaccgacgacacccgcatccgcgcgtacgtgcccactgtcaagttcctcctcgagaagggcgccaaggtcatcctcgccagccatctgggccgtccgaagggtgtcacccccaagtacagcttgaagcctattgttccacgcttgtctgagctacttggagtcgatgttgtgatggccaatgattgcattggtgacgaagttgagaaattggctgctgctttgccggaagggtggtgttctactcctagagaatgttagattctacaaggaggaagaaaagaatgatcctgagtttgccaagaagcttgcagctgtcgctgacctctatgtaaatgatgcttttggcactgcacacagagctcatgcttcaactganggagtgaccaaatttttgaagcctgct

SEQ ID NO: 413273 - DNA, 386 bp, Oryza sativa
  unsure (1)..(386): unsure at all n locations
gcgttcgatcgatgctattgctgaactggacactggtggggaggagtcttacaaggacagcgccttgatcatgcaacttcttcgtgacaatctgactctctggacctctgacaatgcggaggatggtggtgacgagatcaaggaagcagcgaagcctgaaggagagggccactaatctgtcctgaagtctatttctgagtccatttactcagctacctgctgtattactggatcataagatgtactaggatcaattgctatgtggaatcataagattagggctgcgtatgtcaaaatgtgtcgagctgaagtacccagtggacacagtttatgtgcactacattgcttccgngacttatttactaggtaattagcaactttcaacc

SEQ ID NO: 413274 - DNA, 423 bp, Oryza sativa
aggtcgtgggcaagagcggcaagccgctgcgctacaaggggagcaccttccaccgcgtgatcccggagttcatgtgccagggcggcgacttcacccgcggcaacggcacgggaggggagtcgatctacggcgagaagttcgccgacgaggtgttcaagttcaagcacgacagccccggcatcctgtccatggcgaacgccgggcccaacactaacgggtcccagttcttcatctgcaccgtgccctgcagctggctggacgggaagcacagtcgtgttcggcctgcgtcgtcgagggcatggaccgtcgtcaaggccatcgagaagggtgggatcccgcggcgggagcaccgccaagccgtgtcgtcatcgccgactgcggccagctatcctagatctgtgctgttccccttcgccttcgcca

SEQ ID NO: 413275 - DNA, 453 bp, Oryza sativa
ggttccaacatcctacgtgccattgctggtgctggtgtgctatcaggctatgaccagctgcacatcctcttctttggaaagaagtacggctcgggcggtgcctaaactggcagagaatgatgacgaacaagtgtttattcctggtcctgcactaacgggatctggtgaattttgcctttttaacattgaaaacaataataattcttgtaggggagaacactccccgacattcgttttcttggtggaagcgtttatctccaaacattgacataggcggaggcgttaatcgcaaacagtttaccatcataaggttgagtttgagttgagtctggccggctctgatatgtctggcgattttcctaccatacattaccctcggtgaaatatcgaaagattattgagttgctgtcttttgttggtgttactattttgcgatgcttcattatttctact

SEQ ID NO: 413276 - DNA, 448 bp, Oryza sativa
  unsure (1)..(448): unsure at all n locations
tattctgccacctgcttttctcagcatggaggaagggagtctttacgagtctggaaaggggatgcaagttgtacagattgcagaaaagagctatctttcagcaccccaccatgcagagttgcttgaacggcgatggggtggttcaactcgcaccacagtagacgctgtaaagttgaggattactgatcttcttaaggaatatattaagaatggtgacacagctgaggcgtgtaggtgcatcagagaattggcagtgccattttttcaccatgaggttgtcaagcgagctctcactcttggaatggagagtccaactgcagaagctcttattgtcaagcttctgatggaagcatctgaggaattgctgataagctctagtcagatgatgaagggattntctcgtgttggagatagacttgatgacctatctcttgatataccatctgca

SEQ ID NO: 413277 - DNA, 467 bp, Oryza sativa
  unsure (1)..(467): unsure at all n locations
tccctcgccgtcgccgccgccgccgcctccggcgcggactcgaccacctctggcggggggatactcaaggggtttctgatccgaggagcggccgatgtcccactccgatgagcaccacttcgagtggaaggccgacgccggtgccttcaagacctacccgcagcaggctgagaccatccgcaaaaatgggtacatagtcatcaataaccgcccctgcaaggttgttgaggtttcaacctctaaaactgcgaagcacggtcacaccaagagccactttggtgcaattgacatctttactgccaagaagctccaacatattgtgccatcttctcacaactgtgatgtcccgcatgtgaaccgtaccgagtaccaactcattgatatatctgaagatggatttgtcagtctgttaactgaaaactgccacaccaaggctgacctcangctccctactgatgataacctgc

SEQ ID NO: 413278 - DNA, 478 bp, Oryza sativa
gtcgtcttttccccttcttctcctcctcctcctcgatggggagctccacccgcagccatggctaagaactaccccgtcgtgagcgccgagtaccaggaggccgtcgagaaggccaggcagaagctgcgcgcgctcatcgacgagaagagctgcgcccctctcatgctccggctcgcgtggcactcggcggggacgttcgacgtgtcgtcgaagaccgggggcccgttcgggacgatgaagaccccggcggagctgtcgcacgccgacaacgcggggctggacatcgcggtgcggatgctcgagcccatcaaggaggagatacccaccatctcctacgccgatttctaccagcttgccggagttgtggccgtcgaggtgtccggtggacctgccgtccccttccacccaggaagggaggacaaacctgcaccctcacctgagggccgacatcctgatgctacaagggttctgaccacct

SEQ ID NO: 413279 - DNA, 500 bp, Oryza sativa
gccatatagtcattatcttgattctatcaggagggtggggctagcgaattcttgttagcaacaaattgacatattgctcggcacatccccaccgagaataccaagatgacgttctctggtacacaggacaagtgcaatgcttgtgacaagaccgtgcatttcattgatctccttaccgcggacagtattccctaccacaagtcttgcttcagatgcagccactgcaaaggcacactttcgatgtgcagctattcgtccatggatggggttctttactgcaagacccattttgagcagctattcaaggaaacaggcaccttcaagaagaacttcccctcaggtacaaaggcaaacagtgaacaggctaagattcccagcaagctgtcctctgtgttctgtggaacccaggacaagtgtactgcctgcaagaagactgtgtatccattggagaagatgaccatggagggtgagtgttaccacaggacctgcttcaagtgcgc

SEQ ID NO: 413280 - DNA, 458 bp, Oryza sativa
caatatttgcttcatgagcgtcggccggaccttgggcgggaagcaggccatcatgggcagcggcgtcaactaggagcccgacaaggagaccctcgagcacatcggccacatcctggcgatcgaggagttcgtcttcctcgagctatgatgaacagcagcagcagcagcagcagctcgtcggattcaagtaggttaagctaagctaagtagcagcacgtaatttgggccaagttgccacaggtggcaacttgggggcttctgcattttttcctgtcacgagtaagtatatatgtgatcatgtgaaggggtgccttcgcttggcccctgcttaaataagcagttaagcacggtgtatgtctatgtacgtatgtgtaactgcgtattattattgatgaatgcttgtgctgtatcagacatatattgtgctgcttgatgctatgaaaatagtcgctaattct

SEQ ID NO: 413281 - DNA, 443 bp, Oryza sativa
  unsure (1)..(443): unsure at all n locations
gcataagcaacacaagggattaactcatcactcaggtagctaattaaatcttcgaccatgtcggacaagtgcggcaactgcgactgtgctgacaagagccagtgcgtgaagaaaggtaccagctatggcgtcgtcatagttgaagccgagaagagccacttcgaggaggtcgccgccggcgaggagaacggcggctgcaagtgcggcaccagctgctcctgcaccgactgcaagtgcggcaagtgaagtcacgaagcaaccgaacactcgccgccggcgagtcacctaccttaattagtccacaataaaaaccacccatatgagtgtggtttgtngtgtgtgctgattattgctgaattaaaccctgtgtgttatcgattaattaagcagctggtcgcttcggcgactatgcgtgtatcaacgtatgaatttgtgtgatgtga

SEQ ID NO: 413282 - DNA, 498 bp, Oryza sativa
  unsure (1)..(498): unsure at all n locations
gcttgatcctgtgccaataacaattccagggtcgggaatgatgcacgactgtgccattacagagaattattctattttcatggaccttcctctgttgttccgaccaaaggaaatggtgaagaatggtgagtttatctacaagtttgatcctacaaagaaagctcgttttggtatactccaacgttatgaaaaggatgacacaaacatcagatggtttgaacttcccaactgcttcatattccacaatgctaatgcttgggaagagggtgacgaagttatcctaattacctgccgcttggagaatcctgacttggacaaggtgaacggttaccaaagcgacaatctcgagaactttgggaatgagctgtatgagatgagattcaacatgaaaaccggtgctgcttcacaaaagcaactatctgtttctgctgtagattttcctcgaattaatgagagctacactggcagaaagcaacgngatgtgtattgcgctattct

SEQ ID NO: 413283 - DNA, 347 bp, Oryza sativa
gtcgttttttcgcctgcttctcctcctcctccttgattcggatcttcacgcgcagccatggctaagaactaccccgccgtgagcgcctggtaccaggaggtgcgggagacagccaggcataagctgcgcgctctcatcgccgagaagagctgcggccctctcatgctccgtctcgcagggcacttggcggggactttcaacttggcggcaaagaccgctggcaccgttcggacatgaaacccaaccgagctgtgcacgccgccaaccggggtggacatggtgcggatgctcagctcatcaaggaggagatacccacgatctactacgtccgatattctaccagactt

SEQ ID NO: 413284 - DNA, 468 bp, Oryza sativa
gttcgcctccgcttcttcctcacgcagctctcgcctcgcctcgccgcccgccactagagaggagagggagaaggaggaggaggcaaatcccagcaaaagaagatgcagatcttcgtgaagaccctgacggggaagaccatcaccctcgaggtggagagcagcgacaccatcgacaacgtcaaggccaaaatccaggacaaggaagggatccctccagatcaacagcgtttgatattcgccggcaagcagctggaagatgggcgcacactggccgactacaacattcagaaggagtcaactcttcacttggtcctcaagctcaggggtggcactatgatcaaggttaagaccctcactggaaaagagattgaaattgacattgagcccaccgacacgatcgataggatcaaggagcgtgttgaggagaaagaaggcattcttcccgtgcagcaaaggcttatctatgct

SEQ ID NO: 413285 - DNA, 491 bp, Oryza sativa
ctccgccgccggccttgcttcttccccattgctgctcttcgaggcgttttttaacttcacaatgaagctgatcgctgcctacctgctcgctgttctgggtggaaacacctctccatctgctgatgacattaagaacattctggaatcagttggcgttgaagctaatgacgagaggctggagttcctgctctcagaactggagggcaaggacataacagaagtgattgctgctggaagggagaagtttgcttctgtgccctcaggtggtggtggtggcatagctgtggcagctcctacagctgcaggtggcggtgcagcacctgctgaagaggcaaagaaagaggagaaggtcgaagagaaggaagagtctgatgatgatatgggtttcagcttgtttgactaagtaccttcggctgcatatttacccccgttcaccccagtatctttctgcattgcttgctttatactatgtgtgcaaaaatgagcaatgt

SEQ ID NO: 413286 - DNA, 405 bp, Oryza sativa
  unsure (1)..(405): unsure at all n locations
cggtgagccggttgccataaaaaagcttgagccgggcgtgtcaagcgactctggagcagacttctctgctcagctgtcaatgggttcgaggctcaagaacgagtatttcatccggctgatgggctactacctggatgcaaaccgaagaatcctggtctaccagtttgccacgcacgggtccctgcatgacatcctacacgggaagaagggcgtgagggacgcggcgccngggccggcgctgaactggagccagcgggtgaaggtggcgtacggcgccgcgagagggctcgagtacctccacgagaaggcccagccgcccatcgtccaccgcgacgtgcggtcgagcaacgttctcctcttcgacggtacgagtccaagctcgccgacttcaacctcaccacccag

SEQ ID NO: 413287 - DNA, 482 bp, Oryza sativa
  unsure (1)..(482): unsure at all n locations
gtgctgttaaggggcttgagttcctgcacgagaaggcggagcctcgtgtcgtccaccgtgacatcaaatccagcaacattatgctctttgacaacgatgttgcgaaagtaggagacttcgatgtatccaatcagtccccggacatggcggctcgcctccactccacccgtgttcttggcaccttcggttatcatgctcctgagtacgcgatgacagggcagcttagcacgaagagcgatgtctatagcttcggagtcgtgttgctggagcttttaactggtcgcaaaccggtcgatcatacgctgccccgtggccagcagagtcttgtgacatgggctactccaaggctaagtgaagacaaggtgaagcaatgcgtggatccaaggcttgaaggggattatcctcccaggctgttgccaagatggctgccgtagctgcgctgtgcgtgcagtacgaggcggacttcangcccaacatgagca

SEQ ID NO: 413288 - DNA, 492 bp, Oryza sativa
gttctttgagaaggagatcccagttgatgctgtgttcgagaaggacgagatgattgacatcattggtgtcaccaagggtaagggttatgaaggtgttgtcacgcgttggggtgtcactcgccttccccgcaagacccacaggggtctccgcaaggtcgcctgtatcggtgcctggcatcctgctagggtttcctatactgttgctcgcgctggtcagaatgggtaccaccaccgcactgagatgaataagaaggtttacaagatcggcaagtctggccaggaaagccatgctgcctgcactgaatttgacaggactgagaaggacatcactcccatgggtggcttccctcactacggtgttgtgaagggcgactacctcatgatcaagggttgctgtgttggccccaagaagaagggtcgtcaccctccgccagtccctgctcaagcagacttctcgtttggcgctcgaggagatcaagctcaagttcatcg

SEQ ID NO: 413289 - DNA, 483 bp, Oryza sativa
ggccaccgcccacagacagacccgtcagaaaacctctccctccggcgatgtacggcgacaccgagccggccgccgccgccgccgcggagcgcacggcgttccggcgagccgagaagcagtacaagctctacaagccgctgaagcccaagggcggcagggcaaggagcaagccgggaggcggcggcggcggcggaggattggaggacctgtccgcggtggtcgacttccacgcgctgtcgctgccgcgcggcggcggggggagctgcccgtcgggatcgggaggcgcgacgtcgccgggttcgacctcttctgcttcttggaccgacctggattctatttcatacctggtgctctatctattgaggaacaatgctattggatcagggaaagcttgaaaaccttcccacagcctcctaatagaactaacctgacagctttgtatggtccaatttttgacttactcactgctgccaaagtggaaag

SEQ ID NO: 413290 - DNA, 487 bp, Oryza sativa
gcgcgaggtgcacaagcgatccagggatgcccggcagttgcttggtgctaagggtaagaggttcgccaagaagcggtatgccgagaaggcacagatgaagaagaccctgaaaatgcacgacgagtcaacttctcggcagaaggttgaggatgttcaagagggtgctcttcctccatatctgctggaccgtgatcagacacaacgtgccaaggttctcagcaacacaattaagcaaaagaggatggaaaaggctggcaaatgggaggttcctttgccaaaggtcagacctgtggctgaagaagaaatgttcaaagttttacgaactggcaagagaaaaaccaaacagtggaagagaatggtcactaaggccacctttgttggacctgggtttacaaggaaaccaccaaagtatgaacggtttattaggccaactgggcttcgtttcacaaaggcccatgttactcaccctgagctgaaatgtactttc

SEQ ID NO: 413291 - DNA, 497 bp, Oryza sativa
ttattttgttgccaaccaaatccacccgccggggcgccttccccctcctcggcggcggcggcgaccccgcggcggcggagagatgatgatgctgatcgactgctcgggctgccggacgccgctgcagctgccgcacggggcgccctgcatccgctgcgccatctgcggggccgtcacctacgacgccgacgccgcgccgccaccggcccacggtgaccccgtccgcggcgccgcggggccggtggcggtggcgccccagcaccaggcgccggggtgggggctcgtctcccccgcccgcgcacgggcggaagcgcgccgtgatctgcgggatcttctacaagttctcgcgccacgagctcaagggttgcatcaacgacgccaagtgcatgcgctaccttctcacgacgagcttccacttccccgacgactccatcattatgctcaccgaatacaaactgacccttacaagatttcaacaaagcacaacataaggttgg

SEQ ID NO: 413292 - DNA, 498 bp, Oryza sativa
  unsure (1)..(498): unsure at all n locations
acgggctgacctccaacctggccggcagccgcaacccgagcttggactacgggttcaagggcaccgagatcgccatggcctcctactgctctgagctccagtacctcgccaaccccatcaccaaccatgtccagagcgcggagcagcacaaccaggacgtgaactcgctgggtctcgtctcggccaggaagaccctggaggcggtggacatcctcaagctcatgacctccacctacatcgtcgccctgtgcctaggccgtcgaccttcgccacctcgaggagaacatcaagagctccgtcaagaactgcgtcacccaggtggccaaggaaggtgctcaccatgaaccccaccggcgacctctccagcgcgcgcttcagcgagaagaacctnctcaccgncatcgaccgcagggccgtgttcagctacgccgacgacccgtgcagcgccaactacccgctcatgcagaagctcctgcgccggctcgtcgagcacgccct

SEQ ID NO: 413293 - DNA, 496 bp, Oryza sativa
  unsure (1)..(496): unsure at all n locations
gggccatgaacgctttggttcgagtatccgcagttctgacaaatgccccttacattcttaatcttgactgtgatcactatgttaacaatagcaaagctgttcgtgaagcgatgtgtttcatgatggacccttctgttggtagagatgtctgctatgtccaattcccacaaaggttcgatggcattgatcgcagcgatcgttatgccaataggaatgttgtgttctttgacgttaacatgaaagggcttgatggcctccaaggtccggtttatgtgggaactgcgttgttgtttctataggcaagcgctctatggttatggaccaccatcactgcctgcgcttccaaagtcttctgtctgttcatggtgctgctgctgctgtcctaagaaaaaagctgaaaaaagtgagaaagaaatgcatagagacttncgacgtgaagaccttgagtccgccattttcaatcttcgggaaattgacaactatgatgagtatgaac

SEQ ID NO: 413294 - DNA, 487 bp, Oryza sativa
ccttcctcctcgccgccgccaccaaatccggcctgctccaccaccgccccctcccggtccgcctcgccgcctccatgtcgtcgtcgtccccttccccctctcccgctgctccggcctccgcctccgccatcgacttcctcacgctctgctaccgcctcaagacgacgaatagggcccggtgggtgaggcgcggggtgcaggggccggagtccgtcgccgaccacatgtaccggatgggcgtcatggcgctcgtcgccgccgacctgcccagcggtgtgaaccgcgacaggtgtgtcaagatggcgatcgtgcacgacatagccgaagctattggtggggatatcaccccttcaatggcgtgccgaaggaagaaaagagccgcagagagcaagaagcattggaccatatgtgcagtttgctcggcggtggtccgagagctgaagagatccgtgaactttggatggaatatgagcagaatgccactttg

SEQ ID NO: 413295 - DNA, 502 bp, Oryza sativa
gagtggcagctgatcgccacagcgtgctcctcggggcccgcctgacatggccgacgcatacagcaacggcaagggcctcaagcagcagcagcgccagaagctcaagcccgcgctcgaggtggaggacttcatcaacctcctccacggctccgatcccgtccgagtcgagctcacccgcctcgagaacgagctccagtataaggagaaggagcttggggaggcgcaggctgagatcaaggctctgcggctgtccgagcgagcgcgcgagaaggccgtcgaggatcttacggaagaattgacaaaggtggatgggaagctgaagcttacagagtctctcctcgaaagcaagaaccttgaggcaaagaagataaacgatgaaaagaaagcagcacttgcagcccaatttgcagcagaggctacatttcgaagggttcatgcagcacaaaaggatgatgacatgccccctattgaggccattcttgcgccattggaagctgaactg

SEQ ID NO: 413296 - DNA, 469 bp, Oryza sativa
  unsure (1)..(469): unsure at all n locations
gtagtccctccacacacctcgtacctcgatctcgaagcttaattactagttaacattaacaatggctgctaataagctcaagttctcccctctccttgccctcttcctcctcgccggcatagccgtcacctcccgtgccggcgacatcgccgtgtactggggccagaacggcgacgagggcagcctggccgacgcctgcaactccggcctatacgcgtacgtcatggtcgccttcctcagcaccttcggcaacggccagacccctgtcctcaacctcgccgggcactgcgaaccaagctccggcggctgcaccggccagagctcggacatccagacgtgccagtcgctgggcgtcaaggtcatcctgtccatcggcggcggcgccggcagctacgggctgtcgtccacccaggacgcccgngacgtggccgactacctgtggaacaacttcctcggcggcagctcgggc

SEQ ID NO: 413297 - DNA, 498 bp, Oryza sativa
ctctccttcgccgctcgcgtcgccgcctttttcccctatggcgctgccgaatcaggggaccgtggattaccccagcttcaagctggtcatcgtcggcgatggcgggactggtaaaactacatttgtgaagaggcatctcactggagagtttgaaaagaaatatgagccaaccattggtgtcgaagttcaccctctagattttaccaccaactgtggtaagatccgcttctactgctgggacactgctggacaagagaagtttggtggacttagggatggatactatatccatggtcaatgtgcgataattatgtttgatgtcacttcaaggctgacttacaagaatgttccaacatggcatagggacttgtgcagggtgtgtgaaaacatccccattgtcctgtgtggtaacaaggttgatgtgaagaacaggcaggttaaagccaagcaggtcacattccacaggaagaagaatctgcagtactatgaaatttctgc

SEQ ID NO: 413298 - DNA, 490 bp, Oryza sativa
cgtttctttaggagaggggaggagagagcgcacggaagagtccgtaatacgttcgcgggggggaggaagaggtgggcccagcgatgcaggcgcacagatcgccggcgatggtggagggcggcggcgcgggggccgtctggccgccgtcgccggcgacggtgccggtgaggcggcgctgcgagggcacggccatgggggccatcacgctcgacctccggcccggcaacggcgtcgggcccttcaccctcgggatgccgatttccgatgcgttcgcgcatatagagggccagccaacactctacgacgttgtccacgtgaagtacttcgatgaggagcctctaaagttggattttgtcataagctttcctgaccatgggttccacctgcgcttcgatccttggtcacagaggcttcgtctcattgagatctatgacgtgaaaagactgcaactgcgatatgcaaagtccttaattggtggcccatcaacatt

SEQ ID NO: 413299 - DNA, 499 bp, Oryza sativa
taataaaaacaaaacacaccaagccaaatagaggcgacaatgggatcgctcaccaccaacatcgtcctcgccgtcgccgtggtggcagcgctggtcggcggcgggtcgtgcggcccgcccaaggtgccacccggcccgaacatcacgaccaactacaacgccccgtggctccccgccagggccacctggtacggccagccctacggctccggctccaccgacaatggtggcgcgtgcgggatcaagaacgtcaacctgcctccctacaacggcatgatctcctgcggcaacgtcccaatcttcaaggacggcaggggatgcggctcatgctacgaggtgaagtgtgagcagccggcggcgtgctcgaagcagccggtgacggtgttcatcacggacatgaactacgagcccatctcggcgtaccacttcgacttctccggcaaggcgttcggcgccatggcttgcccggtgaaggagaccgagctcctgcaggccggca

SEQ ID NO: 413300 - DNA, 487 bp, Oryza sativa
tcattatggagctggtactacccattctatgttgctcctttcgtatctgacctcaaaagtcattgtcggttcgagatatctttcaccgtagacaaaccactgcgaccatttgatcagctcatggcagttttaccactacgaagttcgtgtgctctcccagaatgttacagaaaagtaatgggccgtaaagaatttgaccatccgaagttgcaggctgacacaattggaaaacgtttcttgtggaaatgtatctctgaggaagaactgcttcaggccaccaaagagttagataaagagctgtcgatgcatgagatgagacggaatactccccggcagagaagatctttctgcagaggaactcaaatgctcaggcacttgccaaagttattgtgcaactgcaaacatcgtcatgttcgccggagcaaaagcttccaatagattcagctataagtggacttggaggctggttatcgcctgatggcttgag

SEQ ID NO: 413301 - DNA, 488 bp, Oryza sativa
  unsure (1)..(488): unsure at all n locations
gcagggagcaattacaaagaggatgacagctattgaggaaatggctggtatggatgttctttgcagtgacaaaacaggaacactaaccttgaacaagttgactgtggataagagtcttattgaggttttccaaagaggtgttgaccaggatactgtcatactaatggctgccagagcttcacgtaccgaaaatcaggatgccatagatgccacaatagttggtatgcttgctgatccaaaagaggctcgtgctggtattcaagaggttcattttctgccattcaatccaactgacaaaaggactgctttaacctacattgatgngtgaggggaaaantgcaccgtgtaagcaagggagcaccagaacnagatccttaatcttgcacacaacaaaactgagattgaaagaagagtcagagctgtaattgacaaatttgttgagcgtggcttgcgatccttggtgtggcatacagcaagtgccgatggta

SEQ ID NO: 413302 - DNA, 485 bp, Oryza sativa
gatgtgagttgagttggggattgattgattgattcggattgggaagaagaagaagcaggggagcatgggcagcaagtcgtacccgacggtgagcgatgagtacctggcggccgtgggcaaggcgaagcgcaagctccgcggcctcatcgccgagaagaactgcgccccactcatgctccgcctcgcgtggcactctgctggcaccttcgatgtgtcgtcgaggaccggcgggcccttcggcaccatgaagaaccccggcgagcagtcccacgccgccaacgccggcctcgacatcgccgtcaggcttctcgaccccatcaaggaccaacttcccatcctctcctacgccgacttctaccagcttgctggcgttgtggccgtcgaggtcaccggcggacctgaggtccccttccatccgggcaggcaagacaagcctgagcctcctctgaagccgtctcctgatgccacacaggttctgaccacct

SEQ ID NO: 413303 - DNA, 500 bp, Oryza sativa
  unsure (1)..(500): unsure at all n locations
gcagcagtatacgagcaccacacaccagcagcaggggcaagtcgatcgatcgtcagcacacacgaccaagatcgagatggcccgtgcacagctggtgttggtcgccctcgtggcagcggctctgctcctggcgggcccacacaccaccatggccgccatcagctgcggccaggtcaactccgccgtgtcgccctgcctcagctacgcccgcggcggctccggcccgtcggcggcctgctgcagcggcgtcaggagcctcaactccgccgccagcaccaccgccgaccgccgcaccgnctgcaactgcctcaagaacgtggccggcagcatcagcggcctcaacgccggcaatgccgccagcatcccctccaagtgcggcgtcagcatcccctacaccatcagcccctccatcgactgctccagcgtgaactaatccgatcgatcgctaccggaggatgacatgcagcgcctgccgagatgcagctgtcgtctcacgcttt

SEQ ID NO: 413304 - DNA, 500 bp, Oryza sativa
attatgagcaccgtgagaggcattgccctgtggagcctcctacctgtgttgttccacttcctgaaggatataaacgcccagttgagtggcccacgagcagggacaaggtgtggtacagcaatgtcccccacactaagcttgctgagtacaaggggcaccaaaactgggttaaagtttctggggatcatctcctatttcccgggggtggcactcagttcaagaatggtgcacttcactacattgatactattcagcaggcattacctgatattgcatggggcaaacgaagccgtgtcattctagatgttggctgtggagttgctagctttggagggtatatgtttgagagagatgtactcacgatgtcatttgccccaaaagacgagcatgaagctcaagtacagtttgcacttgagagaggtattccagcaatatcagctgtcatgggcaccaaaaggcttccataccccagcagggtctttgatgtcattcattgcgct

SEQ ID NO: 413305 - DNA, 502 bp, Oryza sativa
gggtgcgctgaggccgtcggcgctggacctggtggcggcgctgctcacggggcggggacgaccggaggaggaggggtggccgccctcgctcgccgagaaccgccacctcatcgtcctgctcaccacctccctcgccgtcctcgtcggctgcggcgtcgcgctgctcgtccgccgctcctccatctccgcgcccgccgtgagggcgcaggagccgcagccgcgggcccccgcccccgcgaagaggaagcaggaggccgagcctgaccccgacgacggcaggcagagggtcgccgtcttcttcggcacgcagaccggcaccgccgagggcttcgccaaggcgcttgcggaggaggccaagtcgaggtacgacaaggccgtcttcaaggtgctcgatctggatgagtatgctgcggatgatgaggagtatgagcagaagcttaaaaggagatcatcgcctttgtcttcgtggcaacgtatggggatggggaaccaactgacaatg

SEQ ID NO: 413306 - DNA, 490 bp, Oryza sativa
  unsure (1)..(490): unsure at all n locations
aaaccccctccaaaccctaaccctactacgacctccccttcctccgccgccgccgccaccgccaccgccaccgccacgtccagcctccggtcgcctgttcggatcgaagcgatgtcgtcggacgatgaggtcagagaggagaaggagctcgacctctcctcctccgacgtcgtcaccaagtacaaggacgccgccgatatcatcaacaatgctcttaagttggtagtgtctttgtgcaagccgaaagccaagattgttgacatctgtgagaagggcgattcttacataagagagcaaactggcaacatctacaagaatgtgaagaggaagattgaagaggtgttgcttttcaacatgtgtatctgtgaacaacacagtctgccatttctctccgctgccactgataggcagtcctggggaaaatgatatggtcaaaattgattgngatgtcatatgatggttttaatgcgcgggtggctcatacacatgt

SEQ ID NO: 413307 - DNA, 503 bp, Oryza sativa
cgctgacttcatcatcaccagtaccttccaagagagtgccggtaacaaggacactgttggtcagtatgagtctcacatggcattcaccatgcctggtctgtaccgtgttgtccacggaattgatgtttttgacccgaagtttaacattgtctcgcctggtgcggacatgtccatctacttcccttactctgagtctcgtaagaggctcacctccctccacccagagattgaggagttgctctacagcgaagttgacaacaacgagcacaagtttatgctgaaggacaggaacaagccaatcatcttctccatggctcgtcttgaccgtgtcaagaacttgactggtctggttgagctgtatggtcgcaaccctcgcctgcaagagctggttaaccttgtggttgtctgtggtgaccatggcaacccatctaaggacaaggaggagcaggctgagttcaagaagatgtttgaccttattgagcaatacaacttgaatggccaca

SEQ ID NO: 413308 - DNA, 465 bp, Oryza sativa
actttttctagatcgcgagcggctgcttcttcttcgtcattccaatctccccccagtgtcggttggattcgtggaggcggattggggatttggatttggattggagagaggggggagatggaccaggtgctgaacaaggtggggagctactggttcagcaagagggcaagcaaggagatcgactccatcggcgacgacatcagctcaatctctacaagcattggaacaggagctaaatggatggtgaacaagatcaaagggaagatgcagaaagcattgccagaccttctcaaggaatatgacatgcccgcgggcctcttcccaaaggatgctactaactatgagttcaatgaggagacaaagaagctcaccgtgtacattccttcaacttgtgatgtccggtacaaagattccgctgttctgcgattcttacctgtgagactggctacctggagagggaaagct

SEQ ID NO: 413309 - DNA, 488 bp, Oryza sativa
  unsure (1)..(488): unsure at all n locations
cgattccccactcctctcgcgggtcgcggccacttcgccgccggcgctcgcatcggtcaactcgacgccacggccacacacgcaccggccatggccgcggcggcggagcagcagcagcagcagcagcagcagggcttccgcccgctcgacgaggcgtccctggtggcctacatcaaggccacgcccgccctcgccgcgcgcctcggcggcagcctcgacgccctcaccatcaaggaggtcggcgacggcaacctcaacttcgtctacatcgtcctctccgacgccggctccgtcgtcatcaagcaggcgctgccgtacatccgctgcgtgggggattcgtggccgatgacgagggagcgcgcctacttcgaggcctccgcgctgcagaagcaccgcggcctctgcccggaccatgntcccgaggtctaccacttcgaccgggccatgtcgctgatcgggatgcgctacatcgagccgncgcacattat

SEQ ID NO: 413310 - DNA, 497 bp, Oryza sativa
  unsure (1)..(497): unsure at all n locations
cggtatttcatttgcattggggggcattgctattgcttggcttgcgcttggccacccaccatttcggcgcggagaggagaccgcttcacccgccgatctgcgagaaaccctctccgcctcgccttctccacctcccaatcttaacccaacctccccccttcctctcgcgtcgaccccttgctttgctcctccttcaaccttcttctttcttggagtttcttgagagagagagagagagagagagagagagagagagagagagagggggtacgcggtcgcaggaggaggaggacggcggcgtctgctgcgaccgacggggagcggcgaggatgagcgcgtccaggttcataaagtgcgtcaccgtcggggacggcgccgtcggcaagacctgcatgctcatcttctacacctncaacaccttccccactgattatgttccgacggtgtttgacaacttcagtgccaacgtcgtggttgatggtaacaccgtcaacctc

SEQ ID NO: 413311 - DNA, 499 bp, Oryza sativa
  unsure (1)..(499): unsure at all n locations
ggccggggctggtggtgccggggatctactactccgacgacaagatgctgcagtgcagggtgttcgcgtacgccgacacgcagcgctacaggctggggccaaactacctgatgctgccggtgaacgcgcccaagtgcgcccaccacaacaaccactacgacggcgccatgaacttcatgcaccgggacgaggaggtggactactacccgtcgcgccacgcgccgctccgccacgcgccgccgacgcccatcacgccgcgccccgtggtggggaggaggcagaaggcgacgatacacaagcagaacgacttcaagcagcccggggagaggtacagngtcgtgggcgccggatagacaggagaggttcatccgccgcttcgccggcgagctcgcgcaccccaaggtctcccctgagctccgcgccatctgggtcaactacctctcnncagtgtgatgagtcgtgggggtgaagattgcgaataggctcaacgtgaagccaa

SEQ ID NO: 413312 - DNA, 460 bp, Oryza sativa
ttctatgccatccagcaatcctggaattaccatcagaacttttctatgggggagaattaattgcctgtaaagaagatgaagtgtcgtctatttatgacagcattgatcttcctaacaagtcgttccctgttctttttgttggcattcagggatgtgatgagagagaaggaaataatccttcatggtttaataggattgaagctagtaaagtagtaaatatcattaggaatctgacaaggggtggtgatgttcgtgaagctgacataggagtcattactccatatcgacaacaagttgtcaagataaagaaggcacttgagacatttgaaatgcctgacttgaaagtgggaagtgtcgaacaattccagggtcaggaaagggaaataataatcatctccacagtcaggtctacagtaaagcataatgagtttgacaaattcttcaacctgggattcttaag

SEQ ID NO: 413313 - DNA, 492 bp, Oryza sativa
  unsure (1)..(492): unsure at all n locations
cgacgatggttcacgtcagcttctaccgcagctatggtaagacattcaagaagccacgtcgcccttacgagaaggagcgtcttgatgcagagctgaagctagtgggtgagtatggactgaggtgcaagcgtgagctgtggcgtgttcagtatgctttgagccgtatccgtaacaatgcaaggcatctgctcacacttgatgagaagaatccacgccgcatctttgagggtgaggcactgcttcgccgcatgaaccgttatgggctccttgctgatgggcagaacaagcttgattatgtccttgccctcactgttgagaacttcctcgaaggcgtcttcagactcttgtcttcaaggctggcatggacaagtccatccaccagcttcgtgtcctgatcaggcaacgccacatcagggtcggcaggcaaattgtcaacatctcgtcngtcatggtgagggttgagtctgagaagcacattgacttctcactgac

SEQ ID NO: 413314 - DNA, 507 bp, Oryza sativa
gtgacgttctcgagcgagcaggccatgcgcgacggggtcgaggggatgaacggcagggagctcgacggccgcaacatcaccgtcaacgaggcccagtcgcgccgctcctgaggcggaggcggcggtggctactgccagcgcggcagaggcggaggctacggtggcggcggctacggtggtggtggcggcggcggtggctacagccagcgccgtgaaggcggctacagcggtggcggtggctacagtggcggccgtggtggcggcggctactgcggcggctacggcagccgcggcggcggcaactccgacaggaactggaggaactgagcggtggggccctcatggccaagttatctatctatctaatcgagctaccatcatcatcatcccgatcgttatcatcggtagttgttgtgtggaactatctagtttggtgttactgtgtgggtgccccatctgtgttttgatcgcaagaagaaagctcgtctcgtttgctttgatcaaatg

SEQ ID NO: 413315 - DNA, 471 bp, Oryza sativa
gcgaattttgtagagaaaaaaaaatctcctccttaggggaagcgtcaaatcgtcttggtgggaggcatatctttgagaagaccctcaccggcaagaccatcacccttgaggttgaggcctcggacaccattgacaatggcaaggccaagatccaggacaaggagggcatccccccggaccagcagcgtgtgatctttgctggcaagcagcttgaggatggccggaccctggccgactacaacatccagaaggagtgcaccctccaccttgggctcaggctcaggggaggcatgcagatcttcgtcaagaccttgactggcaagaccatcacccttgaggtcgaggcgtctgacaccattgacaatgtcaagggcaagatccaggacaaggagggcatccccccggaccagcagcgtctcatcttcgctggcaagcagcttgaggatggacgcaccctggccgactacaaca

SEQ ID NO: 413316 - DNA, 506 bp, Oryza sativa
agtcactatgatgtcaaatcatccaagacaatatgtgtgaaggactttgcattatccatgattgcttctgcagatatgaatcacataaacaagctacttgacagagctgatgattatgatgattatcctgatctcaaggatttgcgcattacctttgaggagttcaaggcttttgctgatctgcggcgaaaattagaaccatttgcaatggcaatcttcagctatggcaaagaaaacggcttgctgaccaagcaggatctaaaacgtgcagcaactcatgtttgtgaagtggacttgactgataaagtggtggacgtcattttccttgtgttcgatgcaaaccgggatgggagccttagcgcagatgagttcttgagggcattgcaaagacgagaaagtgatattcgccagccagcttcttcaggtttaatgggagtatttacctgtttgttgaactgtacaaagtgttctcttcagcagactgtgatctagtgctggggagcgaa

SEQ ID NO: 413317 - DNA, 479 bp, Oryza sativa
  unsure (1)..(479): unsure at all n locations
ggcagcttcaagtacgtgttgctggcgccgtggggggcgcacgggtggtatgaggtggcgaccaaggggtggcgggaggtggatctcgggtacatcgccatcctcccgtcgttgctgctgcggatgctgcacaaccaagcctggatcaccatctcccgcctccaaaacgcccgtggccgccgccagattgttcgccgcggcatcgagttcgaccaggttgaccgcgagaggaactgggacgaccagatcatcctgagcggtatcctactatacctcggcgcactgtacgtaccgggcgggcaacacttaccgctgtggaggacggatggcgcggggctgatcgccttgctgcatgcggggccagtggagttcctctactactggttccatcgtgcgttgcaccaccactttctctacacccactaccactcgcaccaccactcnttaatcgtcactgagcccatcacatccgtcatcca

SEQ ID NO: 413318 - DNA, 498 bp, Oryza sativa
gctcgatctcgccgcgcgcgctcagctcgtcgacaaggcggcgtgcacccaccaagatagcgggatgatccagtgagcgcgtggaggcggtgtttgattctagattgttctagaaccgaacgagcgagcttagctagctagctagctgctgctgcttcgatcgatcggtcgttgcctcatgcaggagttccagtccatcccggggctcgccgggcggctgttcggcggcgcggcggcggctgacatccggcgcgcgcaggcgcagcagggcccggcgtcgcggtgcggcgggataccgtcgccggaggcggtgaagtgcccgcggtgcgagtcgaccaacaccaagttctgctactacaacaactacaacctctcgcagccgcgccacttctgcaagagctgccgccggtactggaccaagggcggcgtcctccgcaacgttcccgtcggcggcggctgtcgcaagaccaagcgtagcggcagctcgtccgctgcgtt

SEQ ID NO: 413319 - DNA, 492 bp, Oryza sativa
gccggcatctccggaggacacatcaacccagcagggacttttgggctgttcttggccaggaagctgtccctgacccgggccatcttctacatagtgatgcaatgcctaggggccatctgcggagctggagttgtgaagggcttccagcagggtctgtacatgggcaatggcggtggtgccaatgtagttgccagtggctacaccaagggtgacggtcttggtgctgagattgttggcaccttcatcctggtctacaccgtcttctcagccactgatgccaagaggaatgccagggactcacatgttcctatccttgccccactgccaattggttttgcggtgttcctggtccacctggccaccatccccatcaccggtactggcatcaacccagccaggagccttggcgctgccatcatctacaacaaggaccatgcctggaatgaccattggatcttctgggttgggtctcttcgtggcgctgccctggct

SEQ ID NO: 413320 - DNA, 422 bp, Oryza sativa
  unsure (1)..(422): unsure at all n locations
ccacccgccgctcgccgctcgcccaccatggccatggcgacggcgctccgcaagctctcctccgacgccctccgccgccagccgctctcccgcatcaccccgctctactacatggcgtccctgccggcgacggaggagagatccggagtcacctggccgaagcagctgaacgcgccgctggaggaggtggatcccgagatcgccgacatcatcgagcacgagaaggcccgccaatggaagggtctggagctcatcccgtcggagaacttcacctcggtgtcagtgatgcaggcggngggatccgtcatgaccaacaagtacagcgaggggtaccccggcgcgagatactacggtggaaacgaatacattgatatggccgagtcattgtgccaaaaacgtgctttggaggcctttcgcttgga

SEQ ID NO: 413321 - DNA, 438 bp, Oryza sativa
  unsure (1)..(438): unsure at all n locations
tggttctcatcgtcctaccttcacacagctgaaagggttccctcatatacaagataagggtaggaggagggccgggagctcgacggatttcgatcaattgtggtttttttttgtggtaaccgtataagagaggagattttgtttaacgtagctagatcatatctgagttgagttttagcaatggaggtgctgatccggtggagcaagctgccggcggccggctccttggtgctgtacgccgtcttcttattgctgtcggcggcagccacatcggaggccaacatcggggagtacgatgagtactggcagaagcgcaagctcatggctgatgccgccgccgaggctacctacaagcgtgaccccttcgaggtcaccaacagcttcaaccgcgccgtccacagatcggaggaggagagcgggaggagggagcntgcgatg

SEQ ID NO: 413322 - DNA, 503 bp, Oryza sativa
gagtttgatgaagctaaagatgaccgttcttctggggaagaatcagaagatgccgggccaacatctgactcgaacaaaatttcctccaatgctgatgagccggtggcaaaatccagtgagacagatagagatcaggagggagacaaagatcatagttctggcagtgacattagtgaagctacgataaaaaatgctattgtcaaaagggcctcatattttagagagaactcagaaactattactttacaaggagttcgccggactttagaagaagatctcaagcttcagaagaaagctttggatgcttacaagtcttttatttcgacggaattagacaatattcttcaagaacctgcaaatgggacaaagaaaactagtaaaactgaatctcataaggattctggccagaagacaagcgaaaactctaagagagctcgtcaagactctgatacttctgaaataaatgatagccattgtgagaggggagacagtgatgaggatgc

SEQ ID NO: 413323 - DNA, 476 bp, Oryza sativa
  unsure (1)..(476): unsure at all n locations
gttttatgggtgtgcttatgtgtgttactatttggggtttattacttaatgtatgctggttatcatgcactcggacaatacatacatcttttctaaagtgtcctagtggaaagctgttttccagagttcacggtctgcagatctgttctcttaaatgtcatataatatgttcatttatcagttacttgattacttcagatctgttccctttaggtacgtttggtgcggattacagaaatggtccatgatgcatactattctcgattgtatcttgctaaggtaaaatgacttcacatgaactactccctccatactcgtaaaggaagtcgttttggacagcaacacggtctccaaaacacaactttgacttcttgtttctataaaaatatttattgaaaagtgatatatgtatacttttatgaaagtagttttcaagacacatctattcatataatttttacattntcaaaactcac

SEQ ID NO: 413324 - DNA, 450 bp, Oryza sativa
cggtttcccccgccgccgccgccgcggcgggacgggggcccagcgccggcgcgcgcggtagaaaccgcaagagcgaagcgcggcgagatccggagcccgcgccgctcgccgccatgcagccgccggtcctcctcaacatcgggggcagcaggtacgagacgacggcggacacgctcacgcagcgggatcccgggtcgctcctcgccgccgcgctctccggcgccgccgcccacggcctccccaccaccgaggatggggccgtgttcgtggaccgcgacggggagctgttccggcacgtgctcaactggctcagggacggcgccgtccccgcgctcgccgacgccgagtaccggcagctgctgcgggaggcggagtactaccggcttcctggattgatcgattgcataagtgaaaggattgaggattgggatgataagattgaagatcttc

SEQ ID NO: 413325 - DNA, 469 bp, Oryza sativa
cttttccccagatctccagccccaggagctccggggggttcccaatggcggtgagggtctatgtcgtgtactactctatgtatggacatgttgctaaactagctgaagagatcaagaagggtgcttcatctattgaaggtgttgaggctaaaatatggcaggttcctgaaactctccatgaggaagtacttggaaagatgggcgcgcctcctaagccagatgtgccaacgatcacaccacaagaacttactgaggctgatggaatcctgtttgggttccctacaaggtttggcatgatggctgcgcagatgaaagcattctttgatgcaaccggtggcctgtggagtgagcagagccttgcaggcaagcccgccggcatcttcttcagcactggtacccagggcggtggtcaggagactacaccgttgacagcaataactcagttgactcaccacggcatggtgttcgt

SEQ ID NO: 413326 - DNA, 513 bp, Oryza sativa
ttttaatgtaccagtgcccgtggttccccagagggaaaggtttattttccaacgggtttgtacaaggggttatcacatgttccgctgtattgcaaggtacggctacaaagataagaaccaggagagccaaagcacatttgagcgccttctgattgaaggcctcgagaagttcatacagcgggaggcagcagagctatccctacaaagtggagacgacatctactctgacaaggagcctccaaccccatctaggacaatcgtagcgccaaatggtagcctctactcgcttgacgtccctctcctggcagactttgtgccttcggcagaagttattcctgaggccagttgctcaacgcctcagcacgatcctgtggtggattacacacagaaccttgagctggagctcgcattcatcaggcaggccaagcaatctggagccgtctatctcattgacaacctcatcgtcaaagccaggaagaattcctggttctttcagaagctgatcataaacta

SEQ ID NO: 413327 - DNA, 509 bp, Oryza sativa
  unsure (1)..(509): unsure at all n locations
gtttctcccaaaaaatcctcaaaatctcattggggacccgtgttatataaccgggggcggacattgggagggacgcccataggggtgctcgtttcatcgcgggacgagatcagatcgggctcatatcttgcaaatggccgcgccgcctacgacgccgcatcatgaaaagagagggttatgagaggaggaggctacaatgtttagcgggacacaccagaagtgcaaggtgtgcaccaagactgtgtactctatggaccagctgtccaccgacggggtcgtcttccaccgctcctgcttcaagtgcgaacactggaagtacaccttctaccttggcaactactcctcgatagaaggagtgccatactgcaagccccatttcgagcaactgttcaaggagaccgggagctacaacaagagcttccaataaccctggaaaacctcatacgagaagttgactcctgagctgacaagatcacctagcanagccgcactcatgttttcagggacac

SEQ ID NO: 413328 - DNA, 417 bp, Oryza sativa
gcgaataaaaaaaaaatcatcagcacaagatcgagggggctttatctgaacaagggagatggcggactacgtgtatgggccggggcggaaccacctgttcgtgcctgggccggtgaacatctcggaccaggtgatccgcgccatgagccgtcagaacgaggactaccgctcgccggcggtgcccgccctcaccaagaccctcctcgaggacgtcaagcagatcttcaagaccaccaccggcacccccttcctcttccccaccaccgggacgggggcgtgggagagcgcgctgactaacacgctgtcgccgggggacaagatcgtgtcgttcctgatcgggcagttcagcctgctgtggatcgaccagcagcaacgcctcaacttcaacgtggacgtggtggagagcgactggggcta

SEQ ID NO: 413329 - DNA, 492 bp, Oryza sativa
gtttttatggacataatgtcgcctataataggtggggaaggtgaaggtaactggctgttgccagatgttttggttaatgtgttgagggcaggcgatgatggtcctggtgtggtgagggaagttcttgcggatggatcttgtcgcgtcgcccttgggtcatcaggtaatggtgagatcgtgacggttcttccaaccgagctcgaggttattcggccaaagaagagcgacaagatcaagataatgaacggcaatttccgtggatactctggaaagctcataggtatagatggttccgacggcattgtgaagcttgatgacacatacgaagtcaagatcttagatatggtgattttggccaaactggcgagttgagatggatgtatattttgtacgagtccatcgtatagccaaatgtttgtaacagataccctttgtagtcaataaaaacgtttgttatttattccattatttagttgtatccagattttgaca

SEQ ID NO: 413330 - DNA, 406 bp, Oryza sativa
aggagatcaaccgcaaggcggagtgggcgtactcggactacccgtgcggccacaactacccgctgatgaaaaagctgcgcaacgtgctcgtggagcgcgccctcgccaacggcgcggccgagttcaacgccgacacctcggtgttcgccaaggtcgcgcagttcgaggaggagctgcgcgcgactctgccaggtgcgatcgaggccgcacgtgcggctgtggagaacggcacggcggcgattcccagcagaatcaccgagtgcaggtcgtatccgctctaccggttcgtgcgcgaggagctcggaacaaagtacctgaccggcgagaagacacgatcgccttgcgaggagctgaacaaggttcttgtggctatcaacgaaggcaagcacatcgacccgttgctcga

SEQ ID NO: 413331 - DNA, 439 bp, Oryza sativa
aattttgagtcgtggtaaagaagacggatggacggggggatgggcatgggcggggagcgatggacacgacgcgacccatcctggtttcccgaaacgcgctacgctgccgagcatctagggtttcccacccgctggagatcgatcgggatggggaggggtcgggtggagctgaagaggatcgagaacaagatcaaccggcaggtgacgttcgccaagcgcaggaatggcctgctcaagaaggcgtacgagctctccgtcctctgcgacgccgaggtcgccctcatcatcttctccaaccgcggcaagctctacgagttctgcagcacccagagcatgactaaaacgcttgagaagtatcagaaatgcagttacgcaggacccgaaacagctgtccaaaatagagaaagtgagcaattgaaagctagccgcaatgaatacc

SEQ ID NO: 413332 - DNA, 541 bp, Oryza sativa
ggtgttcaagtcaattggaaccttgaggaaagaggttgcagaattacaggaaggattggcaaaagctcacaatcaggttcatctgtcggaaactagagtatcatctgcccttgataagttggcacaaatggagacccttgtcaacgacagactgttgcaagatggaggctctagcgcatctacagccgagtgcacttcccttgctccaagcacgtcatcagcgtcccgtgttgtaaacaagaaacctcctcgccggagtctgaacgtgtctggtccagtgcagccatacaatcccagtctgaagaacttctggtacccagttgctttctccagtgacctaaaagacgatacaatggtgccaatagattgttttgaggagcagtgggtaattttccgaggaaaggatgggagacctggatgtgttatgaacacatgtgctcacagagcttgccctcttcatcttggctcagttaatgagggcagaatccaatgcccttaccatggttgggagtattcaactgatggaaaatgtgagaaaatg

SEQ ID NO: 413333 - DNA, 443 bp, Oryza sativa
ttttactagaggagagagatggccactgcttatgctcccatggcgagccagctgatgaagagcagcttggtgtgctccaagccgagggggctgtctggtgcttcgctgacaaggaggccccgcttcacagtcaaggccatccagtctgagaagccaacgtaccaggtggtgcagcccatcaatggcgaccccttcatcggcagcctggagacgccggtgacctacagcccgctggtcgactggtacctctccaacctcccggcgtaccgaaccgacgtcagcccgctgctccgcggcatcgaggtcgggctcgcccacggctacctcctcgtcgggcccttcgcgctcaccggcccgctccgcaacacgccggtgcacgggcaggccggcgccctcggcgccgccggcctcgtcggcatactcagcgactgccttaccatgta

SEQ ID NO: 413334 - DNA, 523 bp, Oryza sativa
acatcactgatgagtcaatccgagcttttgctggagcttctatgacaactgcttaggagaagaaatggccgctttatcttagcaccaaaaacacaatcctgaagaaatatgatggaaggttcaaggatattttccaggaggtctatgaagctgggtggaaatccaagtttgaggctgctggaatatggtatgagcatcgtctcatcgatgacatggttgcttatgcacttaagagtgaagggggctatgtgtgggcttgcaagaattacgatggagatgtgcagagtgatttcttagctcaaggctttggttcattgggtttgatgacatcagtattggtgtgccctgatggaaaaacaattgaagctgaagctgcccatggcacggttacccgtcatttccgtgttcaccagaagggaggtgaaaccagcacaaacagcattgcttcaatctttgcttggaccagaggacttgcacacagggcaaagcttgacgacaatgctagacttcttgactttgcact

SEQ ID NO: 413335 - DNA, 585 bp, Oryza sativa
gcgcatgcttggtggttctgctcttgcacaggctttggatcaaattggaaatgactgcccagacattgatgatgttccctacttaaagaaagcttttgaggccgttcaggaattgcttagtcagcgccttatctcagctggccatgacattagtgatgggggtcttattgtgagtgttcttgagatggcatttgctggtaattgcggtgttaagctgaacattgactcagaagattcgggccttcttcaagcactctttgccgaggagcttggccttcttcttgaagtgcacttgaaagatctcagtgttgtgaagcaaaagcttgaagcaggaggcatttccgctaatgtaattggacaagttacagcatcaccagatattgagctagttgttgatggcaggctgcatctcaaggaaaaaacttcagatctcagggatatctgggaggaaacaagcttccagcttgaggggctacaacgcctgaaatcttgtgtcagacttgagaaagaaggactaaagcacagaacatcaccatcgtggtctttgctttcacttccaaattacagatgaaaacctgtgactgt

SEQ ID NO: 413336 - DNA, 489 bp, Oryza sativa
aattggtgctttcagatttttcaggctcttgcatacatgcaccagaggggttactttcatcgtgacctgaaacctgagaatctgttggttagcaaagatgtcataaagctggcggactttggtcttgcaagggaagttacatccgtgccaccatacacagaatatgtgtcaactcgctggtaccgagcacctgaagtattgctccagtcatctatctatgattctgcagttgatatgtgggctatgggtgccataatggccgagctgttgacacttcatcctctttttcctggcacaagtgaggctgatgagattctgaagatttgcaatgttatcggtagccctgatgaacaatcatggccacaaggattgtctcttgcagagaccatgaagtttcagttccctcaggtcagtggcaatcaactggcagaggtaatgacatcagtcagtagtgaggcagtcgacctgatttcatcactgtgctcatgg

SEQ ID NO: 413337 - DNA, 492 bp, Oryza sativa
gatattttcatgcaccggttcctgttgtcaagcggtgtccgaacttttaatcccgaggaagctgattggttctacacaccggtgtacactacatgcgacctgactccctccggtcttcccttgcccttcaaatccccaagaatgatgcgcagcgcaattgagctgattgcaacaaattggccttactggaatagatcagagggggctgatcatttctttgttacaccacatgactttggcgcttgcttccactatcaggaagaaaaggcaattggacgtggaatcctcccattgcttcagcgtgccaccctggttcagacctttggacaaaagaaccatgtctgcttgaaggacggctcgatcaccattccgccatatgcacccccacagaaaatgcaggctcatcttattcccccagacacccctcggtctatctttgtatatttccgtgggctgttctacgataccagcaatgatcctgagggtggatac

SEQ ID NO: 413338 - DNA, 505 bp, Oryza sativa
  unsure (1)..(505): unsure at all n locations
aatatcagcagatgcacaagatccgagtaaaatgccacttctaggagatgcccttgtcattgccgggacaatattttttgcatttagcaatgttggtgaggaatactgtgtcaagaaaaaagatcgagttgaatttgttgccatgtttgcactctttgggttgcttgtcagtataattcagatattaatatttgaaaagaagaacttagttgcaattgcctggtctccaacaatgttatgtctgttcgcaggatttgcagtggcactatttatgttctacagcatcactccttttgtccttaagatgagtggatcaacattgttcaacctttcactcctaacatccgacatgtgggcagtcgccattcgagttttattctatcaccaacagataaactggctgtactatatagcgttcgcagttgtggccattggattgatcatctattcgctgaatgaccattcttncgacagtggaacaagaacaactgcanatacagaagca

SEQ ID NO: 413339 - DNA, 496 bp, Oryza sativa
gatctctactggctcgagcacggcatcgagcgggggggcaccatgcccagtggggcaacggttggcgtcgcacatgatgcgttcaacactttcttcagcgagacaggcgctggcaagcatgtgcccagggccatctttgtcgacctggagcccactgtcatcgacgaggtgcgcactgggtcttaccgtcagctcttccaccctgagcagctcatctctgggaaggaggatgccgctaacaactttgcccgtggccattacactgttggaaaggacatcgtagatctatgcctggaccgtgtgcgcaagttggcagacaactgcactgggctgcagggattcttggtgttcaatgctgttggtggtggaactggatcaggacttggttctcttctgttggagcgtctctctgttgattatggaaagaagtccaagcttggcttcacaatttacccttccccccaggtctcaacagctggtgtagaaccatacaaca

SEQ ID NO: 413340 - DNA, 511 bp, Oryza sativa
cccaaaaaacctcgcaaaaccctcggccctcacccgccgccgccgccgtcgcctccaccggtaaacggcagcatgagtcggcaccctgaagtgaagtgggctcagaggattgacaaggtttacataactgtacaattagctgatgctaaggatgctaaggtcaatctggaaccagaaggtgtattctctttctctgctacagctggaactgatgggaacttatacgaatcaaagctagagttgaacgacaaagtaaatgttgaggagagcaaaataagtgtaggtgttaggtccatattctgtattgtagaaaaagctgaggccaaatggtggaagaagcttgttcgagatgatcaaaaggcaccacactttgtgaaagttgactgggacaaatgggttgatgaagatgatgatggtgctgatgtcaacgtggatggaatggacttttcgaattttggtggcatgggtggaatgggtggaatgggcggaatgggtgatatgatgggtggca

SEQ ID NO: 413341 - DNA, 542 bp, Oryza sativa
ctttaatgagacagggagagaaggacgacaagatgcatagccgtctgcgtggacgatcctgagtaccgccactacaacgatctcagtgagctttcgcctcatcgcgtccaggaaatccggcgtttctttgaagactacaagaagaatgaaaacaaggaggtcgccgtgaatgaggtactgcctgtgaccgctgctcgggatgccatccagtattccatgtaagtgatgaactgtccatcagttcagattttagaacgatatattgagtagtttacagtttacacgtgtaacagcaagatgacatctttgcaagtttgcagggatctgtatgctcagtacattgagcacttggggcagtagaccagtagtataacaccagaacaatccttcaccgccattgatcatgtgtttaatagaagtgccaaactaccttgaggtactaaaattttagtgtaaaattttgatacccgcaccgcaggtacactttctgaaagaccgtaaaatatctactcaaaaggggtaccccaaactgaaaaaatatt

SEQ ID NO: 413342 - DNA, 531 bp, Oryza sativa
  unsure (1)..(531): unsure at all n locations
ctttttctcgcgaatctcctcccctcccccacggagctcgccgactgcgctgccggggctcgtgaaggggagacgacgccggaggagatcgccgccgccgccgccgccgcctcggacggccgcgcccccccgccgcgcgtgtaccacgggcttgggggattgattggtagcgatggcggcgccgccggctagggctcgggccgactacgattatctcatcaagctgctcctcattggcgacagcggtgtaggaaaaagttgtctcctcctacggttctcagatggctctttcacgactagtttcattaccacaattggtattgacttcaagataaggaccgttgagttggatggtaaacggattaaattgcaaatctgggatactgctggccaagaacgctttcgaactattaccactgcttactacaggggagcaatgggcattntactcgtttatgatgtcaccgatgaatcttcattcaacaacataagaaatnggatcagaaacatcgaacaacatgcctctgatat

SEQ ID NO: 413343 - DNA, 521 bp, Oryza sativa
atccatccctctaccagtcaagaaacaaggaagatggcaccaacaaataaactagctggccaatggcttcgttgtcctctttccggcttgccgtggcggtggcagcactgttggttgttggctcatgtgccactgagctcaccttcaaggtcgctgagggctctagcgccagtagtctagagcttgtcaccaacgtcgccatctctgaggtggagatcaaggagaagggtggcaaggactgggtggcgctcaaggagtcatcatctaacacctggacgatcaaaagtgaggcgccgctcaagggccccttctctgtccgcttccttgtcaagaatggcggctaccgcgtcgtcgatgatgtcatccccgaaagcttcactgctggctctgaatataagagtggcatccaactctaagtaagaggcatgcatactcttgtgttgggtcacatgagaattatgaacctctaaataattatctcttaaaagagatcacgccacgtttgagcgagcgaataatta

SEQ ID NO: 413344 - DNA, 490 bp, Oryza sativa
cgcccacgcccaccggcgagcctcagccaagccatgcgatcgcggcaatggcgacgtcgtcgacgctgagccagacgcagcggtacgcggcgggggcgctcctggcgctcgcgctccgccaggcgcagatccaccagtccgtcctgctcggatcccacggcctcgacgacgccccggccgccgctgccgcagtcccctctctcgccgaccccgtcgacgcccgccacctctggacccacgactcccacggcctcctccgccccgtcctcaggtttctcgagatcgaccacaaggcatggccgggcgtggagacgacggccgccacctccgagcccaagcaccacatcggagcctttctccggaaggtgttcgaggacgaggacgacggcgaggcggcggcggcggagaggtcggagcaggagctcgcgctcgccaaggccgtcgaggcgatggcgatggggctggagaacgacgtcgtcgcggccgacga

SEQ ID NO: 413345 - DNA, 490 bp, Oryza sativa
ccggccaccaactttgacccgtcctcctcctccgcatcccccatcccctcctccccggcggcggcggcggcgcggaggcggcggcacgggagcggctagtggtttcgtcggcggaggcggaggcggggccaagatgttcgggcgcgcgccgaagaagagcgacaacaccaagtactacgagatcctgggggtccccaagaccgcctcccaggacgacctcaagaaggcgtaccgcaaggccgccatcaagaaccaccccgacaagggcggcgaccccgagaagttcaaggagcttgcacaagcttatgaggtattgagtgacccggagaaacgtgaaatctatgaccaatatggtgaagatgccctcaaggaaggaatgggtggaggcggatcccatgttgatccatttgacatcttttcatcattctttggaccttcttttggtggtggtggcagcagcacgggcagaaggcaaaggaggggagaggat

SEQ ID NO: 413346 - DNA, 525 bp, Oryza sativa
ctttcgatcgagcagggctcgtcgtcggaggtggggctggtgccggacgccatctgcggcggcggcggcggcggaatcatcgagctcgacttcgcgcagtccaaggcggcctacctgccatacgccccgtactcctcctcttcagcggcgatgaagggacggcaaggccagcgcgtgaggctgtacgtccgcggcaccatcctcggctacaagaggtcgaagtcgaaccagtacgagaacacgtcgctgctgcagatcgagggggtgaacaccaaggaggaggttgggtggtacgccgggaagcgcatcgcctacgtctacaaggccaagacgaagagcaacgactccaccatccgctgcatctggggcaaggtcacccgcccgcacggcaactccggcgtcgtccgcgccaagttccggtccaacctcccgcccaccttcatgggcaagaaggtccgcgtcttcatgtaccccagcagcatctaaaagcaaccaaggtttcttgcctatgctgcgaaactgata

SEQ ID NO: 413347 - DNA, 458 bp, Oryza sativa
ggttgattcaatcaatgatattgtaaggtatcgggttggtgggagtgtgttaggtgatccacacttgtcttcgattagttcttatcagctgtatgtggaggtagtttgcgaagagctcgagtggcttccattttacagtggtgatgtgccagctgcaacaattgaaggtagagaggatgtgcataaaggagaaataatatcaagagtgctaaatgtgtgctcttattggatgactagttttataaagtacagctcatggcttgagaacccttcaaatgtaaaggcagccagatttctgtccaaggggcattccatgttgagtgattgcatgaatgaactggacttaacaaagtatgatatgccaaaagaccaaacctttccagaagccaaagaacacttggttgctaggacagagctagcctcttttgacaagtcacttgaaagtgttgaggaagctt

SEQ ID NO: 413348 - DNA, 488 bp, Oryza sativa
gttaacgcaatggcagccagaaaaggatgcacacggtcacagctcgcattggcctgggtccatcatcagggaagcgatgtatgccccatacctgggacaacaaaaatcgagaatttaaaccaaaacattggagcactatctgtgaagctcacacctgaggaaatggctgaactcgagtcttacgcaagcacagatgatgttcgaggcgaccggtatcctcaggcgatggccaacactacttggcaaaattctgagacccctcccttgtcatcttggaaagctcagtaattgttttcatctgttcaaatacaaagtcctggtccaaaatagctgaatggcagaccgcacacaagattttgtagaacgtattcatcagtcgctggacgctgcttgctcctgttatacatcacgtatatttggaatgagatgtcctgtctgtctgtattgggttatgttctatgctttcgtcatgtttgtgcctacaacct

SEQ ID NO: 413349 - DNA, 507 bp, Oryza sativa
tgtttttttcttgcaaggccggttcatttttgggcgagatgtgagatctttgggggtcactatattcctcattcttgcaccagtattagtcttctgtatatttgtggctagacatctgatcaatgacttccctgatcactggggagtttcagttatggtcgtagtggtcgtcttcacaatatatgatttgacattgctgcttcttacctctggtagagatcctggtatagtaccacgtaatactcacccacctgagcctgaatcgattgatggaggcagtgatatgggaaatggacagactccacaacaactacgtttaccacgcacgaaggatgttttcgttaatggagtaattgtgaaggtcaaatactgtgatacctgcatgctgtaccggccacctcgatgctctcactgttctatatgtaataactgtgtggagcgttttgatcatcactgccctcgggttgggcaatgcattggaaggcgaaattaccgattcttctacat

SEQ ID NO: 413350 - DNA, 505 bp, Oryza sativa
ggatctagaaggtgcaggatcttcttctccttgaggtgactccactgtctcttgggctcgagacagcgggaggtgtgatgacagtgctcatcccaaggaacaccaccattcctaccaagaaggagcaggtcttctccacctactccgataaccagcctggtgtgttgattcaggtctatgagggtgagaggacacggaccagggacaacaatctccttggcaaatttgagctgtctggaatccctcctgcccctaggggagtccctcagatcactgtctgctttgacattgatgccaacggtatcctgaatgtgtctgccgaagacaagacaactggccagaagaacaagataaccatcacaaatgacaagggaaggctgagcaaagaggagatagagaagatggttcaagacgccgagaagtacaagtccgaggatgaagagcacaaaaagaaagttgacgccaagaattccctggagaactatgcttacaacatgagggacac

SEQ ID NO: 413351 - DNA, 541 bp, Oryza sativa
  unsure (1)..(541): unsure at all n locations
ggctgatggaaagactcaacaagccttgaaggttgcgaaggcagtgaagtctgggtgaatcaagagaaagtcaaagaagatccgcacttcggtgacatttcacagaccaaagaccctgaagaaggcgagagaccctaagtacccaagagtcagtgcacctggcaggaacaagcttgatcagtaccaaatcctcaagtacccccttacgaccgaatctgccatgaagaagattgaagacaacaacacccttgtcttcatcgtcgacctcaaggcagacaagaagaagatcaaggcagctgtcaagaagatgtatgacatccaggcaaagaaagttaacactctgatcaggcctgacggcaagaagaaggcttacgtgaagctcactccagactatgatgctcttgatgtggccaacaaaattggcatcatttaagttagggcgctttttttcatcatgttgaacgtaagattntggttggctagttcttaatgttgaacagaaccttataacttgcaaaagacatcttgagtttgttgagcg

SEQ ID NO: 413352 - DNA, 503 bp, Oryza sativa
gaaccccccctcgacacgccgtcgccgccgaggggagagagagagaggccgccggccgccgctaccactgacccccccccctcgccggagcgccccgtcgccggtcgggtttgatcgatggcgtccaagaggatcctgaaggagttgaaggacctgcagaaggaccctcccacctcatgcagcgcaggtcctgtgggtgaggacatgttccattggcaagctactattatgggaccctcagacagcccatttgctggtggggtattcttggtgaacattcatttcccaccggattatccttttaaaccaccgaaggtctctttccgcaccaaggttttccacccgaacattaatagcaatggcagcatttgcctcgacatcctcaaggaacagtggagtcctgcacttaccatatcaaaggtcctcctgtcaatttgttcactgctgacggacccgaaccccgatgatccgttggtgcccgagattgctcacatgtacaagac

SEQ ID NO: 413353 - DNA, 484 bp, Oryza sativa
  unsure (1)..(484): unsure at all n locations
gcgtctccggcgatctcccggccatggcgactggccgggccctctcctccctcgtccgcgccgcctccaggctccgcggggcctcgcccgccccgcgcccgcgcgggccgctccaccgaccgtcgccatcggggtacctcttcaaccgcgccgccgcgtacgccacggccgccgcggcgaaggaggcggcgcctcccgcgcccgcgacggggaaggccacgggtggaggtaagatcaccgacgagttcaccggcgccggcgccgtcgggcaggtgtgccaggtcatcggcgccgtcgtcgacgtgcggtttgacgaggggttgcctcccatcctcacggcgctcgaggtgctcgaccacaacatccgcctcgtgctcgaggtggcgcagcaccttggcgagaacatggtgcgcacaatcgctatggacgggactgaggggcttgtccgcggtcagcgcgtnctcaacaccggctccccaatcac

SEQ ID NO: 413354 - DNA, 430 bp, Oryza sativa
cttcgcgctctcccccatcctcccgtaggttagggtaggctagggtttcgaggagctcgcggaaatggtggccttcaggttccatcagtaccaggtggtggggcgcgcgctgccgacccccggcgatgagcaccccaagatctaccggatgaagctctgggccaccaatgaggtccgcgccaagagcaagttctggtacttcctgaggaagctgaagaaggtgaagaagagcaacggccagatgctcgccatcaacgagatcttcgagcgcaacccaaccacgatcaagaactatggcatctggctgcgttaccagagcagaaccggttaccacaacatgtacaaggagtaccgtgacactacattgaatggtgccgtggaacagatgtacaccgagatggcttctcgccaccgtgtgagattcccttgc

SEQ ID NO: 413355 - DNA, 478 bp, Oryza sativa
  unsure (1)..(478): unsure at all n locations
ggtggtcggaggagccatggaggtgttctactagctcntgttcgggggcctcggggccgtggtggccgggctggagctcggcaagagcgccaaggaccgggtcaccacctcccaggccttcaactccttcaagaacaactacgtcctcgtctactccctcatgatgtccggggactggctgcaagggccgtacgtgtactacctctacagccagtacggcttcgacaagggcgacatcggccgcctcttcatcgccggcttcggatcctccatgctcttcggcaccatcgtcggatcactcgccgacaagcangggaggaagagggcgtgcatcacctactgcatcagctacatcctcagctgcatcaccaagcactcccccgagtacaagatcctcatgatcggccgcgtgctcggaggaatcgccacctcgctgctcttctcggcgttcgagtcatggctcgtcgcggagcacaac

SEQ ID NO: 413356 - DNA, 484 bp, Oryza sativa
  unsure (1)..(484): unsure at all n locations
gagccctcctcctccgccgccgccgccgccgcctgcgcctcgccgccggcgcagagtcgcaggaacgatgagccgacgcaacagccgcaccatctatgtgggcaatctccccggagacattcgcgagagggaagtggaggatctcttctataagtatggccgtattgtggatattgacttgaaaattcctccaaggcctcctggttatgcttttgttgagggaaaggaataggcaaatctctaaaatggataagctggcaagcacaggtttataaacaggagttaggtatgggttgtgtgatttgaacgatcaagtaacggatacaagacatagaccccctccagtttgaagaccctcgtgatgcacaagatgcaatttatggccgtcatggatatgactntgatggccacaggttgcgggtggagttagctcatggtggcagaggcccttcttttgatcgatcaagtagctatagcagtgctg

SEQ ID NO: 413357 - DNA, 490 bp, Oryza sativa
  unsure (1)..(490): unsure at all n locations
tgaaattggagtgaaatttgatgatattggggcactggaggatgttaagaggacgctggatgagcttgttactcttccaatgaggagacctgaacttttctcccatgggaatttgttaaggccctgcaaaggtgttttgctctttgggcctcctggaacaggaaaaacactcctggcaaaggcacttgcaacagaagctggagcaaatttcatcagcataactggttctacactcacatcaaagtggtttggagatgctgagaagttgacaaaggcccttttctcctttgctagccgattagctcccgttatcatatttgtggatgaggttgacagcttattaggtgcaagaggtggtgcatttgagcatgaagcaacaagaaggatgcggaacgaatttatggcagcttgggatggtctaaagtccaaagagagccagcgaatccttattcttggtgcgacaaatcgtccattngatctagatgatgct

SEQ ID NO: 413358 - DNA, 512 bp, Oryza sativa
  unsure (1)..(512): unsure at all n locations
gccggagttatctatgttatgacccatgactctatgggtcttggagaagatggtccaacccatcagcccattgagcacttggtgagcttccgtgcgatgcccaacattctgatgcttcgtcctgctgatggtaacgagactgctggggcatacaaaatcgcggtcctcaacaggaagaggccatccgtccttgctctctccaggcaaaagcttgctcagctgcctggtacctcgattgagggtgttgagaagggtgggtacatcgtctctgacaactcaactggcaacaagcctgacttcattgtgatgagcactggctctgaactagagattgtcgccaaggctgctgatgagttgaggaaggaggggaagactgtccgtgtcgtgtcatttgtttgctgggagcttttcgatgaacagtcggctgagtacaaggagagtgttctccctgaggctgntactgcaagagtcagcctttgngcagggtctactcttggatggcagaagtacgt

SEQ ID NO: 413359 - DNA, 490 bp, Oryza sativa
gaggtggagtcttctgacaccatcgacaacgtcggggccaagatccaggacaaagagggcatccccccagaccagcagcgtctcatcttcgccggcaagcagctggaggatggcaggacccttgctgactacaacatccagaaggagtccaccctccaccttgtcctccgcctccgtggtggcatgcagatctttgtcaagacactgaccggcaagaccatcaccctcgaggtggagtcttctgataccatcgacaatgtcaaggccaagatccaggacaaggagggcattcccccggaccagcagcgcctcatctttgctggcaagcagctggaggatggcaggacccttgctgactacaacatccagaaggagtccaccctccaccttgtgctccgccttcgtggtggtatgcagatctttgtcaagaccctcacaggcaagaccatcaccctggaggttgagagctcggacaccatcgacaacgtca

SEQ ID NO: 413360 - DNA, 356 bp, Oryza sativa
gatttgccctccttcgcggggcccgcagccatgaggcatgccacaaaggcgatttaccggctgatgcgctccgactatgtcaactgcagaaaaggttgtgaggggggtacgctggccggcgagcaagacgttcttcataacatggaataatctgatgtgattgccttacacctgacagtgcatgttaatgacatccgctggtggcgctatactgctggtcaactgctaggcgctctctaggtgatggaggacattgctggagaacgcgtgatatacactggcgactactatcatgaggagaatcgacccctgaaagctgcggaacgccactagccatacaatgatcatgccaacat

SEQ ID NO: 413361 - DNA, 516 bp, Oryza sativa
  unsure (1)..(516): unsure at all n locations
aatggcggctctgcttgtggtcgtgttggttgccatgtcggccatggtggcgacggccaactttaaccaggagttcgacatcacctggggcgatggccgtggcaagatcctcgaggatggccagctgctgacgctcacgctggacaggacgtccggctcagggttccagtccaagcacgagtacctctacggcaagatcgacatgcagctcaagctcgtccccggcaactccgccggcaccgtcaccgcctactacttgtcgtcgcaggggccgacgcatgatgagatcgacttcgagttcctggggaatgtgaccggggagccgtacacgctgcacaccaacgtgttcacgcaggggcagggccagcgcgagatgcagttccgcctctggtacgaccccaccaaggacttccacacctactccatcctctggaaccccaagcacatcatattcatggtggacgacatgccgatcagggacttcaggaacctggnaggggaaggggatcgcgtccc

SEQ ID NO: 413362 - DNA, 497 bp, Oryza sativa
gtcgcttgtgagacctgcaccaagacaaacatggtcatggtctttggtgagatcaccaccaaggctaacgttgactatgagaagattgtcagggagacatgccgtaacatcggttttgtgtcagctgatgtcggtctcgatgctgaccactgcaaggtgcttgtgaacatcgagcagcagtcccctgacattgcacagggtgtgcacggccacttcaccaagcgccctgaggagattggtgctggtgaccagggacacatgtttggatatgcaactgatgagacccctgagttgatgcccctcagccatgtccttgctaccaagcttggcgctcgtcttacggaggttcgcaagaatgggacctgcgcatggctcaggcctgacgggaagacccaagtgactgttgagtaccgcaatgagagcggtgccagggtccctgtccgtgtccacaccgtcctcatctctacccagcatgatgagacagtcaccaacgatga

SEQ ID NO: 413363 - DNA, 490 bp, Oryza sativa
  unsure (1)..(490): unsure at all n locations
gtcgtggtggtggtggtgagatctagcttggttggttggttgcagctggagatcgatcgggatggggaggggtcgggtggagctgaagaggatcgagaacaagatcaaccggcaggtgacgttcgccaagcgcaggaatggcctgctcaagaaggcgtacgagctctccgtcctctgcgacgccgaggtcgccctcatcatcttctccaaccgcggcaagctctacgagttctgcagcacccagagcatgactaaaacgcttgagaagtatcagaaatgcagttacgcaggacccgaaacagctgtccaaaatagagaaagtgagcaattgaaagctagccgcaatgaatacctcaaactgaaggcaagggttgaaaatttacaacggactcaaagaaatttgctgggtgaagatcttgattcattaggcataaaagagctcgagagcctagagaagcagcttgattcatccntgaagcacgtcagaact

SEQ ID NO: 413364 - DNA, 500 bp, Oryza sativa
gccacatcttattgtcacttccatctcattctgctaattgtcatcactagcttctagctagcttaattaattaattagccatggcggaggagaagcaccaccaccacctgttccaccacaagaaggacgacgagccggccaccggagtagactcctacggcgagggcgtctacacgtcggagacggtgaccaccgaggtggtcgccggcggccaggacgagtacgagaggtacaagaaggaggagaagcagcacaagcacaagcagcaccttcgcgaggccggcgccctcgccgccggcgccttcgccctgtatgagaagcacgaggcgaagaaggacccggagaacgcgcacaggcacaagatcacggaggagatcgcggccacggcggcggtcggcgccggcggctacgccttccacgagcaccacgagaagaagaaggaccacaagagcgccgaggagtccaccggcgagaagaagcaccacctcttcggctgatcg

SEQ ID NO: 413365 - DNA, 406 bp, Oryza sativa
gtttgttccgattccgctggcggcggggatccctacggctctcgtcggcgtcaccgtcgccgtagccaacaagatcatccgccgcgatgccttgtatctattgcgactactgcgacacctacctgacccatgactctccatctgttcgtatacagcacaatgctgggtacaaacataaggcaaatgttcgaacctactatcaacaatttgaggagcagcaaactcagagcttgattgatcaaagaattaaagaacatcttggacaagctgcatctatacaagttggtgctcctttgaatcaacatcttctctcatttccaggaggagtgcctcgacctcgtcttacaattctgacaacacctggcatgccacttggtgtttctcaagtacctggtgcacctttgat

SEQ ID NO: 413366 - DNA, 431 bp, Oryza sativa
gtagatacaagcctagagagtactatggagcagaggaaatttttgttgtgcctaattcttggcttacttgcgacttcaggacctgccaagaccgtcaatgctgactcgccctttgatttttattatctcatcctcatgtggcctggagcatactgcactgacagcgagtatggttgttgcgtgcccaagtatggttacccgtcagaagatttcttcgtcaagagcttcatgacctttgactcgtcagagaacacagctgttgtcaggtgcaactccgacaatcctttcgacattaacaagctagactcaatcgagaacaacctgaaccactactggagcaacatcaagtgtcctcgcaccgacggcgtgaactcatggaagagcgagtggaacagctatggcgtctgctccggcctcaagagttggactac

SEQ ID NO: 413367 - DNA, 418 bp, Oryza sativa
gttcatgagttcgatggctcaaccttcagagagtgctgctccctctcatggaggaacccttatgtccttaggctcgccttctccgccggcatcggtggcctcctcttcggctacgacaccggtgtgatttcaggagctctgctttacatccgtgacgatttcccttcagttgacaagaacacatggcttcaggagatgatcgtgagcatggcggtggccggcgcgatcatcggggcggcgatcggcgggtgggcgaacgaccggtacggccgccggacgtcgatcctggtggccgacgcgctcttcttcgccggcgcggcggtgatggcgtcggcgacggggccggcgcagctggtggtggggcgggtgttcgtcgggctcggcgtcgggacggcgtccatgacgtcgccgctgtaca

SEQ ID NO: 413368 - DNA, 523 bp, Oryza sativa
gccgagtccttggaagctaaggagctcaagaagcactgcgaggatatagctattcgcaatcttgattacattttcacagtggcagctccatcagttatgaatgcttctcctgaaactcttgcaaacttagagagattgctggatgaaaaatcgtcagagccatggagtcatcgtcgccttcccacagtgacagctacttatcctgctgtcattgatagtgatgaagagggagatgaagcaggaggatttcttaggctcagggacagtcagaagtctgcatcgaagtcatatggaatatcaagttatgggaacttccttgagaaagatagcaatgctggacaagctgcctctaaacagatcagggcacttcgcaagaaactgcagcagattgagatgctcgaggctaaacaactggatggtcatcagcttgataatcagcagctagcaaagcttgagtcaagggctgcccttgagggtgaacttgcagaactcggcattcccacagatttaagaactccagtct

SEQ ID NO: 413369 - DNA, 478 bp, Oryza sativa
ctgttactggacactcttggcgaggagtcttacaaggacagcaccttgatcatgcaacttcttcgtgacaatctgactctctggacctctgacaatgcggaggatggtggtgacgagatcaaggaagcagcgaagcctgaaggagagggccactaatctgtcctgaagtctatttctgagtccatttactcagctacctgctgtattactggatcataagatgtactaggatcaattgctatgtggaatcataagattagggctgcgtatgtcaaaatgtgtcgagctgaagtacccagtggacacagtttatgtgcactacattgcttccgtgacttatttactagttaattagcaactttcaaccacttcctgtatttgcagcacattattagtatcgctgtattagcgttttccatgggctggttatgattgagaatacaggccaggcattgcatgtcctttatttgtaagctcg

SEQ ID NO: 413370 - DNA, 471 bp, Oryza sativa
ggagagattgggttcagcacctacttctcgatggctaggggcaatgccactgtccctgccatggagatgaccaagtggtttgacaccaactaccactttatcgtccctgaacttggtcccaacaccaagttctcctactcttcccacaaggctgtgaatgaatacaaggaggctaaggcgctcggcgttgacaccgtgccagtacttgttggaccagtttcatacttgttgctctccaaacctgccaagggtgtagagaagtcgttcgctcttctttcccttctgagcagcatccttcctgtctacaaggaggttattgctgagttgaaggcagctggtgctacttggattcagtttgatgaacccacacttgttcttgaccttgactctcaccaattggctgcattctctgctgcatacacagaacttgagtccgcactttctggattgaatgtgcttattgagacatac

SEQ ID NO: 413371 - DNA, 546 bp, Oryza sativa
cttataacgtcgccatgggagccctcgtgggcggggcgttccagaatgacacttgggtcgactctcgggacaatgctgttcagacagagtcaagcacttacaacagcggcaccctcgttggtcttctttctggtctggtcacaacttcctctgtggcgcagtcgttcacctagagctctctcagagtttgggcaatggctttgaccaaccgggaggatatacatgtagccatgtacaatgagagatttttggcgtgaccaaaggcaatgtgccatcagcgaaacgccttcacggtgttcttcgttgttcatcttttgggtgatgggtggttagcagtagtagttcttgtgccatagtgctattgtttatacaaatactgctgcgtagttgcatccggtttgctggtgtactatctgatactacgagtgttgtatttgtaggacggattccatttgttgattctaaaatgatctctggtagcttgtattgatgatctgtaaaatccctcccaagatgaacattgcactgaacatgtgagatcacatg

SEQ ID NO: 413372 - DNA, 454 bp, Oryza sativa
ctcatctgaccgcagtttagctccctcttagacagaggccagagggagaaagagagagagagaggagaaggctgagactgaacattcaagatggccggaggtgtcatcgtggcgaacgacggtgatggctccgccgtggaccacggcggacggctgacgttctcggtggtcatcacctgcctcgtggcggcctccggcggcctcatcttcggctacgacgtcggcatctcaggcggcgtctcgacgatggagccgttcctgcggcggttcttccccggcgtggtgaggaggatggcggaggcgaggcccgggaacgagtactgcgtctacgacagccaggcgctgacggcgttcacgtcgtcgctgtacgtcgccgggctggtggcgtcgctcgtggccagccgcgtcaccagggcgatggggcggcaggccgtcatggtcatgggcggcgcgc

SEQ ID NO: 413373 - DNA, 434 bp, Oryza sativa
gcatggtgcttgtgaacatcgagcagcagtcccctgacattgcacagggtgtgcagggccacttcaccaagcgccctgaggagattggtgctggtgaccagggacacatgtttggatatgcaactgatgagacccctgagttgatgcccctcagccatgtccttgctaccaagcttggcgctcgtcttacggaggttcgcaagaatgggacctgcgcatggctcaggcctgacgggaagacccaagtgactgttgagtaccgcaatgagagcggtgccagggtccctgtccgtgtccacaccgtcctcatctctacccagcatgatgagacagtcaccaacgatgagattgctgctgacctgaaggagcatgtcatcaagcctgtcattcccgagcagtaccttgatgagaagacaatcttccatcttaaccca

SEQ ID NO: 413374 - DNA, 406 bp, Oryza sativa
gtgtaaggagtaaacaagcaaggcaaagaggttatggatgactttaaggacaaggtcaatgctgctgtcttcccaggtctgcaagggggaccacataatcataccattactggcttagctgttgcgcttaagcaggcaactactccggagtacagagcttatcaagagcaagttatgagtaactgtgcaaaatttgcacagagcttgacagcaaaaggctacgaacttgtctctggtgggactgacaaccatttagtgttggtaaatctcaagagcaagggcatagatggttcaagagtggagaaggttttagaaaacgtgcacattgcagcaaacaagaacacagttcctggtgatgtttcagctatggtaccaggaggcatcaggatgggaaccccagcactga

SEQ ID NO: 413375 - DNA, 439 bp, Oryza sativa
gagaatcaaccagacactgcacacatcatcatctggggccccgagaccgggtgatcgggggttagcttagctagctaaattaagctgcgtgcagcatggggctcctcgaccagctctgggacgacacggtggccgggccgcggccggactccggcctcggcaagctccgcaagtacgcctccttctccccttcctcctcctcctcgacgatggcggcgtcgccgtcgcccatctcggcggcggcggcggcggccgacgcgccggccgtgacgcgcagcatcaccatcctccgcccgccggcgctgtccgtgacgtcgccgcgcggcagcgagtcgggcccctccacgccgtcgtcgccggccagcgtcccggactcccccttcggctcagcaccgacgctcaagggatcggagggctggaagaagctgcgccgtggggc

SEQ ID NO: 413376 - DNA, 483 bp, Oryza sativa
gaaggaaacaccttagggaatgcagaaagatgtgggggcatgctagagagctaccgggtgagggaattggcagggtagcaagccatatttctccttccacaactcttcatgacattggaacacaagagtatatacagcgcttgctccatgtgctctcgcactatggggttcgacgtggcaactcaaccatcttcttagatcaccatcttggtggagacggttgaagtcacctatcatttctaggctcctggttaccacactttgagctttgggattactgctttctttggcgtgatggcggagcagagaggaaatatgttgatgaaaaagtatgagatggggaaattactcgggcaaggaacctttgccaaggtttaccatgcccgtaacaccgagacttctgagagtgttgctatcaagatgattgataaagagaaggttttgaaaggcgggctcatggatcagatcaaacgtgagaattct

SEQ ID NO: 413377 - DNA, 479 bp, Oryza sativa
cgactttgactctgccatctatgaaggacagaagtgagcttcctactcctcggacggaaggtgaaattttgtcatcttcaaatttgaaggccttctcgttcaatgatctaaggaatgcgacaaagaacttccgaccggacagtcttcttggtgaaggaggatttggacatgtctacaaaggttggattgatgaacacacgcttgctccttcaaaaccaggaagtggtatggttgttgccgtcaagaagcttaaaccagaaggtttccaaggacacaaggaatggctgacagaggttaactaccttggccaacttcaccacaaaaatcttgttaagctgattggctattgctctgatggcgacaaccgacttctggtgtatgagttcatgccaaagggaagtttggagaatcatctgttcagaagaggtgctgatcctttgtcatgggcaataaggctcaaggtagctataggtgctgct

SEQ ID NO: 413378 - DNA, 467 bp, Oryza sativa
ttcaaaccccagcgcgatccgaggtagaaggggaggaagaagaagaagaagaggaggcgatcgagagatggagagcgccatgttcgggctggagacgccgctgatgacggcgctgcagcacctgctcgacattcccgacggcgagggcggcgccgccgggaagcagggcgcgaccggtggcccgacgcgtgcgtacgtgcgcgacgcccgcgccatggcggcgacccccgccgacgtgaaggatctgcccggggcgtacgcgttcgtggtggacatgcctgggctcaagtcctccgacatcaaagtgcatgtggaggaagagaggctgctggtgatcagcggggagcggcggcgcggcggcggggaggagaaggaggagtcgtgcaagtacctgcggatggagcggcggatgggcaagttcatgcgcaagttcgtgctccccgacaacgccgacgtcgacaagatct

SEQ ID NO: 413379 - DNA, 528 bp, Oryza sativa
ccgatcctgagttttgatcaggtggtccaggagggggagaagcgaggggtcagcgggcccagcttgcccgcggatatgattgaggccgcaaagagcgtcgggattcagaagctactgctgctgagatacttggacatgcaggcatcggcttggccgttgggtccagccattaggtcctgctcacttctccggaacaggatgctagttgacccttcatttctctttaaaatcgggactgagatagtcattgacacatgttgcgcgacattcgcggaggtacagaagagaggggaggagttttggtcggagttcgagttgtatgcggcggatatgttggtaggcgtagttgttaatgtagctttagttgggatgttggcgccatatgctcgatttggtgggggatctgcatctccaggtcttcttgggcgtgttaggcatgcttatgactctctcccaaacagcgtgtttgaagctgaaaagccaggatatagtttttccattcaacaacggataggaaccatacttttt

SEQ ID NO: 413380 - DNA, 493 bp, Oryza sativa
ggtaacaggggagggaggtagcatctggggaccggcaaggctgcaacacagtgatggtgaggttggaaggaatgagaaagacctgtgggggcatgtgtgattgaatcattagagatatactaaaaattagagggagtataaggcacaaccacttttaatccaaagaccaagaaataattactatcatctcctagtttggatcaccctaataaatataatgtatgcatacaatagaattagagatcttgagagcagaggatttaaaaaagtaataatttaatggagaagaggtcctaattaattatttgcatgcatccataccttatattatggaacatctaaccaaagtagttgtgccttatattatggaatggagggagtatatgcactgtacttcattttgtctaacaatggttggttgtctgctggtgttaactggagcggaattaatacaattgccatttgtcttcacttgttttcactatgtccacac

SEQ ID NO: 413381 - DNA, 574 bp, Oryza sativa
  unsure (1)..(574): unsure at all n locations
gagcttgtcaggactcagacccttgtaaagagtgctattgtgcaagttgatgctgcccccttcaagcagtggtacctcactcactatggagtggatattggtagaaagaagaaggctcctgcagccaagaaggatgctgaggggcaggatgctgaagctaccacagaggaagcgaagaaaagcaaccatgttgtcaggaagcttgagaagcgccaacagggacgcacacttgacgcccacatcgaagaacagtttggcagtgggaggttgctggcctgcatttcttcccgccctgggcagtgtggccgagcagatggctatatccttgagggcaaggagctggaattctacatgaagaagctccagaggaagaagggcaagggtgcctcagcttagagcaagtctttctttgttgctggttctacactgaaagaactaccctttttgttccctgagagctcctatgtatgtttgcagacgcatangctgttttttatgattaaaacaacttagcatgatgacatgagaatgggtatgtacttctgatgntattagttaaaatattactttctgc

SEQ ID NO: 413382 - DNA, 563 bp, Oryza sativa
  unsure (1)..(563): unsure at all n locations
atagtcaataaactttaccgcaaattatgaaatgtacaggcactgcactgtaccatacgtagtttttgtgcagcatataaccataggctgtcacgtacggccttttataccacatactagtccttgaacgcttaataataattaaaagtgcgtgcatcacatcagaaaagtttcaacacgctagcacacaaacacggaattactagtctcactcttgtaggagaagatcaatctaatggtgcgacttgatctgtgtcgtcacatccgtttttattggttgtcgcatcggccttcaggagttcagggtagccatgtcggcatgaaggcagtcacgcatgagttgttcatctgctctggagtaaacccgatctgcaaggtgggctcggcggcagcttccagggaatggaagaatccgttgccaccgtgcggtggcacctgctggacggcatgaggcgactgccgctcgtagccgagtagggtggcgccgtgctcccacacttgtccatgcaactggttgctctcctncagttttcttctgaggcacttatttgcttcacacaaca

SEQ ID NO: 413383 - DNA, 372 bp, Oryza sativa
acgcgcgcagcatgcattttatttaggcacggtccacaattcatacatgtataggggatacgtctcgttggcagacactcacggtatagtagggtagttgggtgtacagggatatagtcatatttgcgcgtcttttcatgccgttcgttgacttcgttcacagggtcagggtcgggtaggcgatatcgagtgtgaccccacacaggccggggccaccgacgtcgcggagaatccggatgtagccgcgctcgccccatgactggccccatgagttcttgatggtccaatacttggcgccggaagacgcgttggtgccgtacccgacgacggtgacggcgtgcgctaggcgcgtgccgcacgggcccgtgtaaa

SEQ ID NO: 413384 - DNA, 498 bp, Oryza sativa
gatcaaatcgccacgagggctatgtgtgttttcatttttcaacattccacgctgggagaagcacaaagtattcaacaattcaagctccaaacggacaaaagtagcagcctattcacccaaggttgccacgtatcgacactgacatcagtaatccactcatctttataggtgccccacaaggagaattaaaaagcattgagatagatactgatgttcgataatatcactgagagttggttgggggagcttgtttggcagtctcaaatgaatccagtatgggcctaacaacagctggaagaaaaagaccgaagccggcgatgaggcaggaggcggcgacgaccggctcctgcaccacgaagaccctcagcttccccatcgcccccatcgctcctcgtcgccgatccaaccacgcccgctttccctcaaccccgttttcacggtttaggctgctcccatttcgctcgccgctactacggggatcgcttttgctttcttttc

SEQ ID NO: 413385 - DNA, 438 bp, Oryza sativa
gaagactggtgaatctggaataatatgcctcaaatcatataagataataacatggaagacaacctctcccactaggcaaatgtgcaaagctagcatgttattatcccttcgcaagttccatgccaacaagagtaaattttctcagccattcgaaggtattgagctaagtactagcacattagctttactaataaccacccctcagagcaaggacaagatggaggacagagccaccttcgatgttatagtccttcgcagtcttgtcgtcggcaagctgcttaccagcatagataagcctttgctgcacgggaggaatgccttctttctcctcaacacgctccttgatcctatcgatcgtgtcggtgggctcaatgtcaatttcaatctcttttccagtgagggtcttaaccttgatcatagtgccacccctgagcctga

SEQ ID NO: 413386 - DNA, 457 bp, Oryza sativa
gcctcgccgctgtgccggttgtgatgctgctgctggtgcagaacacgagcgggaggagacgacatctgatgcgccgcccaccgggatgcgcacgacggcgcgctgccagtctgacggtggtacagggcatggggtaccgtcctggacggcggcggcggtgtcgttgtcgtcgtccttgggaacaggaacgcccggatcttgagcggctggaggcggtcccggctggccgcgtcgtactcctccagcaggttggcgaggtcgtcgtcgccggtgacggagacgagcgcgtccaggtcctccgtcgggagctggcaccgcaggcacaccgtctcccacccgcacatgtccctcagcttccgttgcaactcgtggaaagggagggagcggtcgacggagacgacgcggttgtcgccgccgacgtagcgcaacgcgccgtcggcgtggcgagggaggatcc

SEQ ID NO: 413387 - DNA, 424 bp, Oryza sativa
gaataaccaaaacataggaggtttcatttcttcttctcaaagtagtgtagcatctttccttctttcaccattacataagcttaagcaataacagataacaaatcctcctcctcctctaggtaaaatattcaaacacaatacccttataagtacttattattaggaaagtagcgtgcatgggcataaatggcagcggggggcaggttaagaatcacaatgctgagcagcgaggaaacaaaacaccataatgggacagagcaaaagcctccgaaagggagcttttaggcagaaggcttctcccacttgaggggcttcaccacctcccaggtgaagtctgggtcgtcccttccgaagtgaccgtaagccgccgtcttgaggtagcgtccgttgccgcctttcttgaggtcaaggttgatgatgatca

SEQ ID NO: 413388 - DNA, 484 bp, Oryza sativa
cccgcaaatacttattcatatgttttgacaacatttctcccgacgcatgctcattggggcagacgcagctgaccacctagagcttttagttcaccattattatttagaccaagcatacgtcccaagatcagaacacatgcttacaagcgaaaatactaatagcctggctggctgcttcacagaataaccaaacgacaacctcaacagataaaaatgccacggaatgaaaacaaagcagcgaatcgtcaccagaagtcccatcttactcatcaaacactccatcattctcctccaacgcatcctttccccaggggagaagattgcccagtttaccttccttaacaggagcagggttcaccatattctcagcctcgaagcagtgcagaacagatttgggcgacccaacagcaacaggtacgtcttcagtagcgtcgaagctctggtagatgaggaggccaccacagggcagctcctgctctaccat

SEQ ID NO: 413389 - DNA, 489 bp, Oryza sativa
gatgcaaattatttctttgatggacatatgagttcagatcaggcaggttgcaccttcaatctcaaaaatggaaaccaatcctacactagacctttcggttgatctgaaccaaaaactcccagacaaaaattctaccatttcagttggtatgaaccatctaaacaaagccaccctgaagaaattcaccactgtttagacggtaagggttccctctgccggctcagcaacaggagccttgggcttcggcttctcgacaacaatggcctgtgtggtaaggaccattccagccaccgaggcggcattctggagcgcgcatctcgtcaccttagctgggtcaataacacccgcctcaatcaagttctcatacttgtcgttcatcgcattgtacccgacttcccactcgccgtccttgatcttgttaactaccacttccccttccactccagcattgtgggcaatcagtgaagcgggagctaccaacgctttttg

SEQ ID NO: 413390 - DNA, 424 bp, Oryza sativa
acgacaaaccacgaacttggatattaaagatgccacaaagaagggtcacataaacaacacaggtcacagcagcgaaagctacaagcaaaccctgcataatcgaaaagcaaatgtttttcaaaaccagacacacaaactgatagatagaagcccacacggacagatcataggatagcagcagtaatcaagcattgccaaggcaccaggcaagaaccctgaacctttttagtactcgtcacccttatcacccttgtcaccattgtcgaactcggagccgacctcctcgtagtccttctccagcgcggggaggtcctcgcgggcctcggagaactccccctcctccatgcccttgccgacgtaccagtggacgaaggcgcgcttggagtacatgaggtcgaacttgatgtcgatgcgggagaacacc

SEQ ID NO: 413391 - DNA, 445 bp, Oryza sativa
tttttggttttttttttttttttttttttttttttttttttttttttttttttcctcgaagacccaacaacaaagttttgcataaagaaacatcccatggggggccagaaacaaaattaagctagaaaagcacggatcccccgcacaatttacaggatcattacatgggccataacacaggcactaaggcatggataccacaagggggtatggatccgggggactgggtaaaagaattggataagccgaagaccgggcccaggacgcccatgttctgggggccggggacaacgccgacccccaagatggggccgacggggccaaaggccagcgggtcggcgagggtaaacccggggggggcgccggtctgcaggccggagtcccgcccctccagctaaagccccgccggggacttccggatccccgacggggccagcccgaacct

SEQ ID NO: 413392 - DNA, 402 bp, Oryza sativa
aaaatcgcatcttcacgggtttattgacctataattctatattatcaaaaccaaggcttttatggagatgcatattcaggctacaaccagcaataaggggcccaaaatttttggctataccggcaaggaacaacccatagggggcttgccccagccccccagtaatttacaggtgctttgatagcgcccaggaccttgttctttgggggcatgtaaaaggtttcataaacaagagggaaaggggtgtccaggccgaatacttttgggacgggcgcttctaacctttggaagcaaccctcggtgatggatgcggaaatttctgcaccaaaccctccggggattggagccccatggctaacaagaagttttcctgtcttgctgacagaggcctctactgtttct

SEQ ID NO: 413393 - DNA, 530 bp, Oryza sativa
ggcgcagcaggcgcggccgaactcaatggcggagcgcgcgcggctggcgcgggcgccgcagccggagccggcgctcaagtgcccgcgctgcgactccaccaacaccaagttctgctactacaacaactactccctctcccagccccgccacttctgcaagacctgccgccgctactggacgcgcggcggctcgctccgcaacgtccccgtcggcggcgggtgccgccggaacaagcgctcgggcaagtcctcctccgccgccgccgccggcgcgtcgtcctcctcctccaagccgtcctcgtcggcggccaggcagctgcccggcggtggcgcgtccccgatgccgtccgccgcggcgtccacgcagccaggaggcgccgccgccggcgcgatcatcccgccgtcgggcctcagctccatgtctcaccacctcccgttcttgggggcgatgcacccgccggggcccaacctagggctaaccttctccgccggattccagcctctcggcggcatgcaccaccacgtggaca

SEQ ID NO: 413394 - DNA, 526 bp, Oryza sativa
aacagcaacggaacattacattaacacggattagagacaggtgaattacaatgtaattgtatctagccatgcacagtgccaaagaggcagcaccgctagaataagacgcaaacgaatccgactaacaaaatacgagtcaccaaacacactgacaatattctgagtatttttgacagatccaccaataagacgaatacagcaccatcatgtcacagagagaaacatattgttccacaaaatacaccctactcagattgttcttataagcaaaagattaaacccactactaacactacgacgcatgcttcatttgtcaaaggagtcgccgaggggaatttaagccctctcaccacgaatcctcctagccagctgaatgtccttaggcatgatggtcacacgcttggcatgaatagcgcacaggttggtgtcctcgaagagaccaacaaggtatgcctccgcagcctcctggagggcaaggacagcatggctctggaaacgcaaatcggttcttgagtcctgtgcaatt

SEQ ID NO: 413395 - DNA, 469 bp, Oryza sativa
gggggagcgggatgatttctcagggagtactaggcccaaacaaagctcggagatgaagccgtgctttacggttcacatcatgtacaactcattggggaactttttattccggctccctggcttagcttaccccactttattttaattatttcttcttattattattctaaggttctaacctgtcctgcaggggcaaggagccccagggctcttcagttcttgcagctactcttgcccccggcttcgattcatcaccagccaggtacttcggttttaagacgcacgggactctcaaggggatcagttcaggtttcccatgcaaatgtacttgagctccaggtactcgtccatgccgtattttgatccttttttcccaaggccagattggttgacgcccccaaacggggcaacctctgtagagatgatcccctcgttcacaccgactaggccatattcaagagcttccgaa

SEQ ID NO: 413396 - DNA, 453 bp, Oryza sativa
agaaacctcatgaaaggggaggcagttatcatagaatcatacacactaacccataacttaatcactactgaacaccgagagtatccaactctctcatagaggttcacatcacactacgaccacagcagttagcctgcctgcctgctaaatacaatagctacttaccatgtcgggtacaacacaatgactgaaactaatacaacaaccggcctgcacgccgggtctgctgctgcacggcagcaggttgcgggtgaagcggttctccgcctcttcaccaattcctaacgattctaaaacatgtcaaccgggagcctcccgtggtcattctcggctcctcttgctgctgcagccagggcacttgtactgcttgatgtactctgccttcgcaggggtgatccgaacgcacttgccatggaaccacttctcgcagacgtcgcagcagatccagaacta

SEQ ID NO: 413397 - DNA, 451 bp, Oryza sativa
aggattcacatccatctcgtaccctttgtataaatatatatagccggagcttccatatatttcattcacatatgcctcacccaacaacatatagtcgtagcagataccactcttacatcaagtcagagagagatcaggtgaaacaaaaacaaaagcagagcacggccggtaaaatcaaaagacgatgaacaaactgggaacacacgaaacaaggtgggagacatcatcgaatcagagatgaacaattaaacaaggctatatatgacgatgacggcttagttgccaccagactcctcgcagcccgggggcttgtaggcgatgaagctgatgagctgcacctgcctgacgttgtcgaagccgatgatacggacgaatgcatcagggtacgccttcttggcctcctcgagctccttgagcacctgggtggcgtcagtgcacccgaacatgggca

SEQ ID NO: 413398 - DNA, 532 bp, Oryza sativa
caaattcaaaaaccacgatttataaagtgccggagatgaagtacacaaattaacattacatcgagttttaataaaacatcatgcgaaaagccagcaaaaacaaaaggcagcatacagctaatgaagctctactggagtagctcgcaaaaggtccgacttattttcagtagcactctactccatttcttccgaaagagtgaccatcttctactgggtgttgtacatgtgacggatcaggtcaacaacgcgagagctgtatccccattcgttgtcataccaagacacaagcttaacaaagttgtcattgagagcaataccggcctttgcatcaaagatgcttgacctgttgtcaccctggaagtctgtggaaacaaggtcctcctcaacgtaacccagaatacccttgagtttcccctcagactcctccttgatagctgccttaatctgatcataggatgctggcttctcaagcctgacagtcaaatcaacgacagagacatccacggttggaacacggaaagccataccagtc

SEQ ID NO: 413399 - DNA, 477 bp, Oryza sativa
gggagaacagtagagtagatgaatgtagtagtaaaagacatactagtggtagctagtggtcgtccttaagaagcgttttaaccacagcttaatcaaagacttaatcaaggtgatcgtgatgagtaactacaccgagctagggtaggtagacattcgggtccgggacgtccgtccagcagctcccggcgttccagtacgccgccggcggcacgtcgccgagctcgaagatccccgcgtccagcgacgtgaacggcgtcatgtcggcaacggtggcggcagtgggcgccgtcgtctgtccggcgagtagaacggaggcaatcccgtcctcggtcttcgcctgcgctgcgaagctgaacaccgggagaggcggcggcggaggaggggcgaacagtgacgcgagcgctgccgcttggtcggcgaaaatcggcgccggaggtggcacgtctgtcgggaaggggttcgtcgtcgtcgtcgtcg

SEQ ID NO: 413400 - DNA, 500 bp, Oryza sativa
  unsure (1)..(500): unsure at all n locations
aatcctcaaaaagggttacttatgcagtgaaaagggttttatgctctttcatacagtgtgacagtgtgtgtacatataatttggaaaaacaaagtgaagatggatttacagcagcgtttctcagatacagcggacttatagctacaagctgatcacacaagtgaactttgctgctgatgatgatatggatcatgttgttatagcttacgcccaccacgggttgtcgccggtcctgaagtcggtctccacccacggcacgaagagaaccttgccgtcgtcgacgtcggcgtgcaccaatgccagcgacaggggagcaggtccacggacgaccctgccctggttgttgtactgcgagccgtggcaggggcagatgaacttgttctcggcggcgttccacggcacgacgcacccaaggtgcgtgcacacggcgttgatcccgtacgtggccagcgtcttgtcggcctccacgacgaggtacntcgggtcacccttgagcccct

SEQ ID NO: 413401 - DNA, 388 bp, Oryza sativa
catcccaaacaagcgatatatatttcataaggaacataaatctgcttctacaatatactccatcagtaacatgagccccacccacagggtttattagagacaatgccagccccatgctgggacaggcttatttaagctgttcttcctcttaatttttttaataatggccctccttttatggccataatttatggccattttcgaatacgtccataagattatacctatttttttccccagttttgaaatgtccaaacatttatgggtttacaaccacgcggggttcttgatcggcgtgacaacggccttgacctgcaggtagttcttaaggctggggatgcccttctccctcccgattccgttttgtttgtatccgccgaacgggatc

SEQ ID NO: 413402 - DNA, 468 bp, Oryza sativa
gtcccacaggaaactgtttcataaaactaacatatcatacggactcgatggtccattaaaccagacacaagtagacatcagcaccacaaatacttgacgaacagaggctcgggatgaccaggcacatcggcagctccaccaaactggctgattactgaccaccacggaggcggagcaccaggtggagggtggactccttctggatgttgtagtcggcgagggtgcgtccatcctccagctgcttgccagcgaagatcagacgctgctggtctgggggaatcccctccttgtcctggatcttggccttcacattatcaatggtgtcggagctctcaacctccaaagtgatggtcttcccagtcaaggtcttcacgaagatctgcataccaccacggagacgaagcaccaggtggagggtagactccttctggatgttgtagtcggcaagggtgcggccatcctcgagct

SEQ ID NO: 413403 - DNA, 442 bp, Oryza sativa
agcaaatcgatccatgcgaccatgcgtgcaaatcagttggagcacaaatttacatgttacacccacaccctacacccatgcataataatacatcgtatatacgtacgtacatacatacccctctcgatcacacgcaccatcgatcgtacaaagttgcgtacatacatacgtacacacatatacgcatacgcacgtacatacatacataattaaaaactcgtaattaattaaatacgtagttgatggcatctctaatggaacttgaggctggtgaggatgttgttgtggacgggatcagcgaggtgatcaagcaggttctgcacggggccaaccccggtgaagagcgcctggacggagaagccgaggaaggcgagcatggcgagcctgccattcttgatctccttgagcttgagctccttcatctccgcctcgctcttggtcc

SEQ ID NO: 413404 - DNA, 404 bp, Oryza sativa
  unsure (1)..(404): unsure at all n locations
gcatagaaacagtaatatgctaatcataattgggaacaatgaaacgacagtcctaaaaagagcagagcgacagaacctctgcacacatagaccagttttacatgcaagtatcttgaggacataacttgctgctccaaaattcaaatttatgcagccaactcgccagcttctagtttatagtagaagatatcgtacaaccagaacgatagtcatcaagggctgaatagactatatgcaaaacatgcatatcggatatggaggtaagacagcatactgaaatcttacaaggaagacacaaaggagttgatttatttcttctcatcttctggcttggctgatttgncttccttcttctcttgctcgccctgcccatgcaatgatgccagcaaatctttcacagaggg

SEQ ID NO: 413405 - DNA, 431 bp, Oryza sativa
attgcaaaaacatcatcttcttcttcatcttcttagggtacacaacaccaactcgatcatcatctcgtcgcactaaacccatcttccccaacccaaagacaacgaactcgctggccacaaatccatccaaccacaattaaccactgctaagctacggtcccccacttcacttgccggggacgaagttggtggcgtacgcccaggcgttgttgttgacggggtcggcgaggtggtcggcgaggttctcgagggggcccttgccggtgacgatggcctggacgaagaagccgaacatggagaacatggcgaggcggccgttcttgatctccttcaccttgagctccgcgaacgcctcggggtcatcggcgaggccgagcgggtcgaaggcgccgccggggtagagcgggtcgacgacctcgccgagcggcccg

SEQ ID NO: 413406 - DNA, 334 bp, Oryza sativa
aaaattgaacaaacgcgcatattataagtgacgaagcggtctcacataaaacagggcacacaggttacaacaacgagggttgtaagcccattaagccccaaacatcagatcaccacaagcaaatgtctcgaagacacacgcacacggcaacaggataactccacactggcagatcatgggatagcagcagttatcaatcaggccttgacacacagaacatcaagcccccagacgacgacgactcctctagtacttcgtaccatcatcgccatcctcattctcgttggactcaacgccaacctccttgtagtccttcttcaacgcggtgagatcc

SEQ ID NO: 413407 - DNA, 466 bp, Oryza sativa
aaacaaaaagaatctcccattattttattcaaatgatacatgaaaggataatatttaccagacaggaaccgaggttttcaaagtacgaaacatggctgctgatgaacagaagcagtttattccgttattcggaacacggaattacagctagaagagacgaagttattcttaccaccctctcaaaaaataaacagtacaagtttgccatcagatgtatggcaaatcgcctagcagcaagccatcaacccttagttcttcacagtggtgacatgcctcagaagcatctgaatcacttaaggggagatacttgcagcctgctgcttgaggtgggcgatttttttcggtggctcctgctcaagacgcttgacatttgcaccagagtcaccgttactctctgaaccttcctctgaaattcagcctccatctgggcacgggaattaagttatttccttttaagcctcctttt

SEQ ID NO: 413408 - DNA, 412 bp, Oryza sativa
cttcgaaacatttgtttacaattaccaaacacccagctttaaatttacgtatgtattacaaactgctcccagattgatttaaggataaaagagaagagtagaagatgttcagagaaatttcacagtcccctcacaggcctaattataagggcaaaggtaactgttttatttatcgaacaaacagctatgggggggtatgatacttctcagaaaaaaaaactaatggccagaaatctcagaaacaattatgatgttgggaacactgaagttaggctcatggttcaggttgcaacttctcacattctttttttatcgactgaaaaaggatagatgaaaggtccctctcaccaaagcttggaaacacaaccactaccaactttccagcattttctggtctttttgcaactttaat

SEQ ID NO: 413409 - DNA, 354 bp, Oryza sativa
acacacgaacagggcgtgcagtggcttactacgaaacagagaacaaaaaagaattttacccaccacagctacattacactttttttttaccacccccagtgccaatctttatttatttttacagacgccagccagtcaccttcctcatttccggccattttgctccgccggggatcgacgacgacgacgacgacgacgatgggatattcttactatcacatggagcactcgggggggaccccctgggggaagcgcttgggatcggggcaatagttgtagatcatgtacttgctctgcacccaccgaattcgttgttgccgggtgaggtcgagctcctggttgtaccatccaccg

SEQ ID NO: 413410 - DNA, 478 bp, Oryza sativa
gacaaattaaagagtacacatccattcttttgcgtgattattcaatagttttcaactctttgtaccaccacataaataaggaggatacaagtacaacagtatgcttgtctatagtatgaatttggtgtgtatctggactggacactaatcttctacccttcacaagtacatttccttttcgtcaacatcagtggatgaatgctcgagcgctgtctccttctcaatcttatcgaggaaacggagcatgatttccagactcttctcatcaagccttggaacagtgtggccctttggatgacgtatgatgaatggatccacatatgattctataagcttttcgccatgggttttcagaaagtcagtgtcaccgaggaagtgaaccgaggggcatttgatgttattggcgtacgccttctcggcaaccgtcggcgactgaaacttggcgcctcctatgattatgaggtactgatcttaggaa

SEQ ID NO: 413411 - DNA, 464 bp, Oryza sativa
gcggagggtggccgcgtcacgggggagatcgtgcggcgcttcgctgagatggagggctcggcgctgctccggtggctgctccagttccaggggttcagggagcgcctcctggcggacgatctcttcctcgctaagcttgccatggagtgcggcgtcggcgtcatcgcaaagactgctgcggagtatgagaagagaagggagaattttgtcaaagagattgatatcgtgattgccgatgtggtcatggcaatagttgctgatttcatgcttgtctatcttcctgctccaactgtatctctgcaaccaccacttgcaacaaatgctgggcatattgctaattttttccacaattgcccggataatgctttccaaattgctttggctggaagatcatactcaattctgcagaggctaggggctattctgagaaatggtgcaaagcttttcactgtggggactagtgc

SEQ ID NO: 413412 - DNA, 235 bp, Oryza sativa
attgcaaaagaatgtttcaattcaccgcaacatttgatccgtacatagtaaaacattgggaatacactaaacgaaacatttttgatggaacattttacagaggcgatttattgcaacggcctgcgtggtggggacacgtggcaggagcggcgcaggacacgtggtgagggtggcccccgggggggggggggtttttttctaccccctaaaacttccaccctttcccctaccatcc

SEQ ID NO: 413413 - DNA, 348 bp, Oryza sativa
agagaaccaactgaacacatggcaaagcctgaagattcagttattaatcgtatacggatacagagcagttgctgcaacagggagaaattaggccggagtgacaaaatgggagagaaaaaaaacagagaggaagagcctagtgagcgtcttcctcctcgcagtgcttggtgtacttggccgggcaccagcagggcgtccagctccgacgggctgctcggcttcaccttgatcatccacccgtcctcgtacgggcttgagttaatcaggccggaagtctcagagagcttgtcgttaacctcgacgacctcaccggagatggggagttgaagtcgctggtggccttcacac

SEQ ID NO: 413414 - DNA, 404 bp, Oryza sativa
gtatatgtcacctagagggatgaataggtatttccaaaaatttcttaaacttacaaacagcttagaactaactggatagtccggtaccactgcagacaatctgactatagagcagtcggatagtccgactgcatcagaacaatccaatcagagcatcgccagagaaaaactataagtgacctggaaaatagaaatagaaatgaaaaaataatggtggcggtggcaggatgtagcgtgggttgatcgtttagaagcacgaaagctccttgaggcagccggtggcagtgcccttggcattcttgcagacggccatggccttgttgtttttgccagagtactcgaccttgatgtcattcaaggtgacgccggtgcacggcagcttgtcggagcagaggaggctaaca

SEQ ID NO: 413415 - DNA, 433 bp, Oryza sativa
tttttgtttttttttaacagattaacagtatcagactattcagacaaatgatagcgtccacaatacacgagatgaatcgatgtagaaacatcaatgcctgatccaaaccgaacattctatatttctatcagaatttcagaatcatatctttctgtcatttctgtcaaatagcaacctgtaggcccaatgctctcttcacttcatttcattctcaccgccagtggtcacagggatggattccttgccctgattttcatcttcagacagatcagccgcctctttcgctttgccccacagcaccatgtacaagccacccacaatcaggacagaaccaagcacactttcgaggtgcaacgcctcattgagaatgatcgagctcatcagcgcgacgaagatgagcatcagcgggctgaacacggagatgaacaggggg

SEQ ID NO: 413416 - DNA, 391 bp, Oryza sativa
gaagtgattatttaaatacttaatagtaatagactctttgatggagtattacaacatgcagcagtggcattaatacgccagtacattaattaagttacacatatgcaggctccattttggtttcttttaatttatcgtattacagaatttctgtagccttgcagatgatcacttggatatcatgtactagtaattaacaataggatgcatacaaaagatggcccaacgacaacagaagatgcgtgcatctgacattgtctggccttatttgttggtagtactccaattaattaacaagagatgatgcattcttgtgccttagtttcttcacatgcttggctttacgttgagcctattcgcaatctttaaccccaacgacttattacactgg

SEQ ID NO: 413417 - DNA, 399 bp, Oryza sativa
gggaaatggcccatcatcttttctaatctttataaaagggaatcataaactcgtcgttcgagattaaaaaggcaactggcctttcctgtcagctaaggatgttttacccaaggaacatgagtcctcaaatgtcaattcccagtcaataataacctgaagttcaaccgggtaaccgggttactggagctcatgggggaccaggcgttactgattgaagcctccgtcgaacgttgaggcaacactttgtagcagtttttggcattttcaacgctcccttataccttttattgccgccaaagaagcccctcatttgaacaaagacccctcctggaatgcccatatcgtttgacaggtcattatttttcaagcccctccacttttccggcagagggttttggg

SEQ ID NO: 413418 - DNA, 341 bp, Oryza sativa
gggagggggaaaacctttaaaaacccttggagcatttggtgggggaaacagatgttcacaaggggaaacagggctcccgaaacgggaaaaacaaaaacccgggggaagggccccagggaacaaaactggggggcaaaggggtcacattattatgagggggcccagtttggaacaaggcctaaaaggttttactggggatttgggggcctggagttgggaaaaaaaacccttgaaccccattccaggaggtttttggggggggcgcccttgggcgggaacccctaaatgaagcacaggggggccttttcccccaggggcatcccgaacggctccggagggtc

SEQ ID NO: 413419 - DNA, 420 bp, Oryza sativa
ggccaataaaaaaaaactagatatgtagcaattctgatatcgtttgccctgaagatggcatcagtgtacatgatcttattcctggtagattcatgctactacataacagtattatatctacattcatgcactccaatatccatggtttattggcttaattcagcgtgatcagccagtgccatggcttcactcagcagctcttgccatagttgagctcttcaggttgggcagcatcttggatgttgagccagtggcaatcctggaacgcgcacctgcccgaggcttgcagcgtctcgccgacgtctcggggctccaggaagtatggcgtccacgacggcgtgccgtcctcgaacgagttgtgcgtgagccgccggatgttggacccgtcgatgtcgacggtgaagatctcgccgtatggct

SEQ ID NO: 413420 - DNA, 474 bp, Oryza sativa
gaacagataaacacacgctcaaaaagcaatcaacaaaatagagtacggtatatcagtacttgcacaacgatttctttgaaagggacatgatattcatggttcaccaatgtgatcgagtctagcacagcagaggacacgaaattgataggtcccggtatcctcagaactggaacatggcatacaagcaggttgtaaaacagagggcttccgaattttcgccctcaagcctcactggagatatggtacattcaggaggaatctgcagcggccggtggtggtgccggctgtgcttcggcgcgcttgactgatgcgcatttgatcagatggttgtagctccctttctccttgaaaagttgggagaaatggtgcttgcagtataggataccttccaaagctgcataattggatggcgaaatggcacagccaccgtgagaacatttgaagcaggacttgtggtaggcctgtccttcaact

SEQ ID NO: 413421 - DNA, 248 bp, Oryza sativa
ttttggggttttttttttgtttttgttattgcaaaagaatgtttcaattcaccgcaacatttgatccgtacatagtaaaacattgggaatacactaaacgaaacatttttgatggaacattttacagaggcgatttattgcaacggcctgggtgggggagacacgtggcaggtgcggcgcaggacctgactgtgagggtaacatgcgatgggggcacagcttactattaaacccaaaccagcaaagtt

SEQ ID NO: 413422 - DNA, 399 bp, Oryza sativa
atcatatattcgattatatatatatatataatagcagacaggttacatccattagaactcagaatcaccggaattgaacatcaaaagtacaacacaagcagcagcagcatcagccagcagcaaacgacatgattacccacgcttttggatgaagaacaagaagtacgagaagaagaagacgatggtcgaacaccttgatcgagctcaacaatggcgatcgatcaccaatcacctacttggtgaactcgatggcccaggcgttggcgtagatgtaggtggccttgaagccggtgaatccggcggcgcgggcgagctccctgaactccctctcgtacctctccttgccgccggggttgtgggcgagcatgatcatgtcgacgtggaacaccccctgctccc

SEQ ID NO: 413423 - DNA, 431 bp, Oryza sativa
acgacaaaccacgaacttggatattaaagatgccacaaagaaggttcacataaacaacacaggtcacagcagcgaaagctacaagcaaaccctgcataatcgaaaagcaaatgtttttcaaaaccagacacacaaactgatagatagaagcccacacggacagatcataggatagcagcagtaatcaagcattgccaaggcaccaggcaagaaccctgaacctttttagtactcggcaccctcatcacccttgtcaccatcgtcgaactcggagccgacctcctcgtagtccttctccagcgcggggagggcctcgcgggcctcggagaacttccccttcttcatgcccttgccgacgtaccaatggacgaaggcgcgcttggagtacatgaggtcgaacttgatgtcgatgcgggagaacaccttgacga

SEQ ID NO: 413424 - DNA, 441 bp, Oryza sativa
aaagaaaggtgcattttatttcttattaaattggaaatatacaaagtcatgacaaatcttggacaaattatcagatataggacatcagggacgatgtgtacaaattgtccaaatcatgctcacctccccaagttatacatatcagatacctggcttccaaaataatagtttcactcctctttgaagagctcgcggccaattatcattcttcttatctcactagtaccggctccaatctcaaacagttttgcatctctcagcaatcggccagttgggtactcatttatgtatccgttgccaccaagacactgtattgcctgaagtgcaacctgggttgccctttcagcagcaaagagaatcacaccagcacaatccttgcggtcaactttaccattgtcacagtccctagcaaccgagtaaacaaatgaccttgatgactgc

SEQ ID NO: 413425 - DNA, 456 bp, Oryza sativa
gcagttgtgctgagtactataattcagtacttgcaaagccaaaagtagcacggacacagtcacgcccaaagctgatgacactcgacagacatactgtactgtgcctggagactcaagtagccaaagcccacacactgtcaaaactaaaaaccaccactagctcatatcactacattacagatcagtttacattgcagagtgcaccagcagcagcagcagctaacaccaggtcgagagaacgggggatggtcagagcagccttgggctggtgtaagggccattgaggatgctgatggcgatggcgtggtagccggcctccgtcaggtggacgccgtcccagttggcgtacgccgacgggtccgtgcacacgctggagccccgcacgccgcagctcgccttcgggttgaagttgtacggccctccgccgccgcagcacgtcctcagcgccccgtgcct

SEQ ID NO: 413426 - DNA, 454 bp, Oryza sativa
atacacaagctgagaagctttcagtgtgacagcaatccgcggataaaatgaggagaatgataacgatcaccaagaagatagccaagcaaaaattacatcaatcaaggaaaaaacaatttggggataaatggactccaggaaaaggtaactgcagttcgagagggccgaactgatcaataaacatcatgcagcatacattaattcccaccagaatttattcagcaggtagcttttctttgagatacttcagaattgctttcgttcctcgctccagcagagtccgccgtatgctcctgaggggatttccatcaagtttcaagacttgcaggttaggctcaagcaaacccagctcaggtgggagtgttgttatattgttgtccgacagatcaagctcaatcaaagaagttaaatctttgataccctctggcacagatgtaagataattctgactcag

SEQ ID NO: 413427 - DNA, 417 bp, Oryza sativa
aacgcaaaagccacggcttttggaagcccagcaagaactttatataaaggggatcactaataacaatgatgataaaaccccatgtggaaaggaggaccatgatccacaggatgggacaagtaccgtaggtacggccattattgggggattacacaagagcccccaaacgcactcacccaaaagaccaagaaaaaggggctaatttaaatggcaaatgagcaatgtagtagtagtggtagcatgcaaccaaatcgaaatggaatgagaattttttttggcgggattttcttttttttctctttcctttttttttttacttctcccagcacaaatgcaattcaccagatcgttcgatcaatggagcaacccgagcgacacggtaagctggggaggaccattaccaggatgtcctggcgt

SEQ ID NO: 413428 - DNA, 405 bp, Oryza sativa
caagaggaacagatcaaaacttcattacagatctagacagatagtatatgatatatctgatccctgtgctgaatgctgactaaagatgggcaactcttcgggaggcttttgaaatgcaaccaatttacaaatttacatcaattttctgtacagtgttgcagatgtgctgcttgagaggggtggcacacagatattcttcagactatgacaataattggacgatttggatggatggaatcttttttgggagctttttactcacggcaatccgaacagtcctaacaactgcagcagggcctgtgagccgaactttcacaatggggcccttgatcatgagaaactggaggccaccacctcccgtgccagcaaggtatggcctgatttcattgagaaccttctaaacat

SEQ ID NO: 413429 - DNA, 373 bp, Oryza sativa
gggaagcccactttcacttaattcactgcacttttcctggcccttcattaccccctaattaccaagccccctggacacccccccaacacaaaacaggtttaccggcccaaattatctgcaagaaccggttaatctcttcaaccgggggggcaacaaagcgggggccccaactggagggccccctcaccccttcctaaataacagccctaattaaataaatcccctatggaaaaaaaaagggggggcccctttgaccccttggaaacgagaactcccaagctcaccccttccgggggggcttttccggccgccgccgccgccgaaaccggtggaaaaagcggggctgacagagacccccccccatgctgaccca

SEQ ID NO: 413430 - DNA, 407 bp, Oryza sativa
gacagcaactcaataatctttcgatatttcaccgagggtaatgtatggtaggaaaatcgccagacataacagagccggccagactcaactcaaactcaaccctatgatggtaaactgtttgcgattaacgcctccgcctatgacaatgtttggagataaacgcttccaccaaaaaacgaatgtcggggagtgttctcccctacaagaattattattgttttcaatgttaaaaaggcaaaattcaccagatcccgttagtgcaggaccaggaataaacacttgttcgtcatcattttctgccagtttaggcaccgcccgagccgtacttctttccaaagaagaggatctgcagctggtcatagcctgagagcacaccagcaccagcaatggcacgtaggatgttggca

SEQ ID NO: 413431 - DNA, 467 bp, Oryza sativa
gataacataataattatgcagcattcattgataaaagcagtatcacagtaccatgatccaaaacttgacaggaaatagaaacatccagacgcagcacaatccaaggatgacaaccggttcttaactattgtaaaacaaagtgcatcagacaagtccgagctagcaaagactctctttactccgccatcctaagcctctacgttctcgacaggtgcatcaatcataagagccttagtcggcttggccaagaggtcggtgtactcctggaatggagacttgacgaacttggtgtccctccagaagtcaggagtaaggaatccataagtcttcatcaggcagtcaaaggtggccttgacgaagttgccaagggtcttggtggatccacgggacgaggtgaagacatcctcaatgccggcgaactgcagcaccttcttgggcacgcgggcggggacaatacccgaacccct

SEQ ID NO: 413432 - DNA, 450 bp, Oryza sativa
  unsure (1)..(450): unsure at all n locations
gggatgaaagcagaggtagattatattaagaagcctggcacgcatgaggagatggagcaggagtacatgatgagatcaccatgatgatagatgatccatccaagctagctagggatccatccaacattgatcgacacacgcacacactgacaacgacgacgacggttttatttaggcgtcagagcaaaaggcaaggcctgcctacatataagctgggtactaatgcaagcaaattaaggcctcgatcaaagctctgatcgacagtagcagcatccatacgataaatcctcatgcagccgggcgacgacgacgatagattcagttgcaggagcagcaggagcagccgctgcagctggtgccacacttgcaggtgttgcagccgcagccgccgtttttgccgctcttcaccggcatttccatttctccagagctcgccttgntggatggagc

SEQ ID NO: 413433 - DNA, 426 bp, Oryza sativa
agtctaaacaagtttgatggtaaattcaacggtgtaataacacgacaattttgatctcctatcgcagaggcagtaggcaatttcccaccaacaacacaacacatgacatcttcagagattattattcatttcccaccaacaacacatgacatcttcagagattattattctggacagaccgtcttgcggcaaaagttagaagacgtcaggattgaagtgcccggggatggagttgttctgctgagcctgcttcagatgcatcgtcagcgcatagttgtttatctctagggtcctcagttgctcctggtactgcacaacaagttgcttcaaactctgaacctcctggctcctctcgtcgaactccttttggcgctcatgttgaatggcgaccgctcgcttgaggacagcgttctctcgcagcacgac

SEQ ID NO: 413434 - DNA, 385 bp, Oryza sativa
cactgagaatagcacgggtacatcacatcacacaaattcatacgttgatacacgcatagtcgccgaagcgaccagctgcttaattaatcgataacacacgggtttaattcagcaataatcagcacacacacaaaccacactcatatgggtggtttttattgtggactaattaaggtaggtgactcgccggcggcgagtgttcggttgcttcgtgacttcacttgccgcacttgcagtcggtgcaggagcagctggtgccgcacttgcagccgccgttctcctcgccggcggcgacctcctcgaagtggctcttctcggcttcaactatgacgacgccatagctggtacctttcttcacgcactggcttttgtcagcacagtcgca

SEQ ID NO: 413435 - DNA, 361 bp, Oryza sativa
  unsure (1)..(361): unsure at all n locations
gagcacactaagattcattcattcattcatttgatcaaagcaaacgagacgagctttcttcttgcgatcaaaaacacagatgggcaaccacacagttaacacaaactagatagttccacacaaaactaacgatgataacgatcggatgatgatgatggtagctcgattagatagatagataacttggccatgagggccccaccgctcagttcctccagttcccgtcggagttgccgccgccgcggctgccgtagccgccgccgtagccgccgccaccacggccgccaccgtagccaccgccaccgccgtagccgccttcacggcgctggccgtagccaccgncgncgccaccaccaccgta

SEQ ID NO: 413436 - DNA, 458 bp, Oryza sativa
gatattaatttcatggtatatttgatcatcgatcgatacattttctatagatttgtgtccaccatggccacctccttgggcctgagcacctcgccgccttcgccgccgcctctgccgccgacgtcgacgacgcgggacacctcggcgttgtagacgtagaggcggcagacgaggaagaagaagacgaggttgacgcagttgaggacggcgaagaaggcgtagtagtggtcgagccgcgacgcgttgaggttgttctggatccacccgccgccgccgccatggcggcgcgtgacgtgcgccaccgtcgacagcagcaggctgctgaggaagttgccgacgccgaggctggtcatggcgtacgacgtgcccaggctcttcatcccctcgggcgcctggtcgtagaagaactcgatcttgccacctccaggacgcgtcggcgacgcccatgagcacgaact

SEQ ID NO: 413437 - DNA, 463 bp, Oryza sativa
agaataaccaaaacataggaggtttcatttcttcttctcaaagtagtgtagcatctttccttctttcaccattacataagcttaagcaataacagataacaaatcctcctcctcctctaggtaaaatattcaaacacaatacccttataagtacttattattaggaaagtagcgtgcatgggcataaatggcagcggggggcaggttaagaatcacaatgctgagcagcgaggaaacaaaacaccataatgggacagagcaaaagcctccgaaagggagcttttaggcagaaggcttctcccacttgaggggcttcaccacctcccaggtgaagtctgggtcgtcccttccgaagtgaccgtaagccgccgtcttgaggtagcgtccgttgccgcctttcttgaggtcaaggttgatgatgatcatgccaggcctgaagtcgaagttctccttcacaatcttg

SEQ ID NO: 413438 - DNA, 428 bp, Oryza sativa
gacacaaatatattttattcagcgctgatgcggctgctaccccaaaattacaaaatttattacacaaaagacattgcggaaagctttgtacagtttcactacatgctctcgatcatctggatagggtaagacttttgctaccaagcgtctaagctaagtaattaagcgatacctttcttccaaaatatggcgactcccaaaaagagatctaccgggacctttagctgacagaagtgcaaattgactgctgggaatagagaccatgtatgggatgcacaaagtgctgcttgcttcttctacgttttgaaactactgtaaatccttctgtatccttctcactcttaggtaccacggtggccttctgctgtttgtcaagctctttgcgacctgacggactcttgtttatgttgctgctgctctgtgcatta

SEQ ID NO: 413439 - DNA, 371 bp, Oryza sativa
ggccagcagaaatcaaattccatatatggggcataaacaaatgagctaggagtacagtaggcgtgatcaacagtcaacactgagcattcttttacgcaagcgcacaatcccaccgcagcaaccaaaacgatacaaatggcccaagggggtccaagcagcgcaatggtgaattggacccatcccaccttccgattttactcagcaccgtcgcctggatgcctccaagaagtcgtcagattgcgagctttccggtctagctggacgttttctagagcacttgatgcttgcaacactttttcagagatatcatcagcatcatatctccagttgtattcatcctttcttgcattggaagccgaagaccccccttt

SEQ ID NO: 413440 - DNA, 317 bp, Oryza sativa
agaaacaatttaatttaacatacgcaaactgatattatcacaatgttagccggtgacaatggaaagagttatttaggtacaagcggatcattgacgggggagacaagacattgggtggaccacaacacccaccagtggcgccaacaaggggcgctatccgttttaggacgagagaaaaagtaaaacatcaccatgtgaagtgaaactgaataattctagtagacgatgatgatgatggataggctccttaggacgcccgccgcccttagggtgttgctgctcccatcttgtccactggaaggctcactcgggatcgg

SEQ ID NO: 413441 - DNA, 404 bp, Oryza sativa
ggcagaaatcaaacggattgattattggcaaatacttgacattccatgattccaaaaggcacagctcctagaaattagaaacaagaggaggaaaaaaaccgatgggggatgaggttggcaaccaaaccagaggcagcagcagggtgggggagagagcgttttatgaaacctatcatctcgatgggcagacaaaatccgtaacacagggccagcttgtgccgaggaagaagatgacgacgacggcggtccacgagagcacagctggtcgacgattagcggcggtaggaccatggtttgtgtgggtttttgttttcctactccttgtacttcatgctgccgagggtgaagccgggcatgtcgaaggaggtggcgaacttctcgacctccagcttgaggttctcgat

SEQ ID NO: 413442 - DNA, 357 bp, Oryza sativa
aatgggaacaaaacatttttattaccacaactttttaaggatggaattgagtagcaatactttcaccccaaaatacagtttagcggccatatcttaaaaaagccgcttgctttgcccccatggctggcaagctgggcaaagcagctaacacaaagaacacgagatcactttaaaccaaacgggaacgaacgaaaaaaataccggggcttttttgtctgaagatacacgaagcggtccggttccttttatttttaggctcctctcctcccccaagatgggggtctggcaatggcaatggcgaagggaacttggcttaactgatgggaaggggcccgccgatccactccttgaggccgg

SEQ ID NO: 413443 - DNA, 378 bp, Oryza sativa
ctccttggtttctatttcatttaattccgatagatagcaacaagcagtttaaacaccataaccaaagcgaactcaattcatggaaacatcacggacaaagaacacctaacactggatggatggatagagggcttttcgactcgagagagccactggacacaataacgactcgactagatgataagatgattttgccacggatagctaaggataactggccacgatgggccccaccaataagttcctccagttcccgccggggtcgccgcctgaggcgccgccacggttgccaccgtagccgccgccgccggcggcacggacgacgagagaaccgtcggcgcccccgaaaccgccctcacggagcccgtagacggcggc

SEQ ID NO: 413444 - DNA, 429 bp, Oryza sativa
acatgaaaaattactttaagtgctttattgaattattactgatcaaacaaacaatatatatacgtttacacttattattgtttttctactgagctggccttggcactctcaaggcctcagccagtatgtagcagcatcagatggcatgatctgcagtgtcgccattatcaggagcagtgatgaagcaatcacttgatcaggatgcacctgattggtgagccctcggatccaaccagcctcagaggtaagcaatgcagcatgtagattccagccttgacatcgtctagcttcaggccttcgactaggatgatattcgggattttgaaaaagaccacatgggcagtgatcaagtgatcatatgctgcaactgatagatagtcaataccaactagcttgatgtcagtgttatcgactaaccactgtgcacca

SEQ ID NO: 413445 - DNA, 415 bp, Oryza sativa
agagctcccaacgcagttcttcaattcaaaaagactgcccaaacagaccaagggtatcatcatagcagcaaagttttttaacacgcaacatcaaagagacactaatgcaataagataacttgaagcgcggatcactagcaaatttcgcgcttagtcgacctcctcgatcttggggccagcaccgctgccgcctgccgggggagcatcgtcctcgtccatgccgccggccatgtccgcgccagcgccctggtacatcttggcgatgatggggttgcagatgccctccagctccttcatcttgtcatcgaactcatcagcctcggcgagctggttgccggccagccactggatggcctgatcgatggcatcctcgatcttcttcttgtccgctgccggagcttcaggcgatcttctc

SEQ ID NO: 413446 - DNA, 411 bp, Oryza sativa
actcgtgaaatcacataaatatataatttctgaaggggcagaattcacgtctgttgatattctgtgatcgtctccatgttttttcgttatccacttagtttacatacataacaacagatgcctaacactgttacaggagaacgttaaatgctctgtttcttcaacagtatcatgctggcacaccattcaactcttgtgggatctctttgctcagcactggaaggtgccccttctcctggaggctcttcaccgtctcgtaaagcgagtcgctcacaggtatgaagtggaggccaagatcctgcagcttcttgttggacatcttgtacggctgcttccgtgggttcacctcgtcagagcaccttgtgggcacaggatactcggggaaaagcttgccccggatgtggacgacgt

SEQ ID NO: 413447 - DNA, 481 bp, Oryza sativa
aaatacttaatagtaatagactctttgatggagtattacaacatgcagcagtggcattaatacgccagtacattaattaagttacacatatgcaggctccattttggtttcttttaatttatcgtattacagaatttctgtagccttgcagatgatcacttggatatcatgtactagtaattaacaataggatgcatacaaaagatggcccaacgacaacagaagatgcgtgcatctgacattgtctggccttatttgttggtagtactccaattaattaacaagagatgatgcattcttgtgccttagtttcttgacatgcttggcttcacgttgagcctattcgcaatcttcacccccaacgactcatcacactgggagaggtagttgacccagatggcgcggagctcaggggagaccttggggtgcgcgagctcgccggcgaagcggcggatgaacctctcctgtctatccggcgccc

SEQ ID NO: 413448 - DNA, 452 bp, Oryza sativa
gatactagactcgagcataaattgatgaaaaaatatataactacatacaggcccaactgcaatctggacataccaaggacaagaattactggttcacataaaacacaagagatctgaaaacacacttcagaggaacatagcaggaaaatcctttttagcgactacagctagtaggatgcttcactggaaattgataaaacaagtgttgcatcttaactaggactatgcaacacacaatctcctctgccttagagtatggttccatggctcacttggccatcatgaccttcacaaactcctcatagtttatctgaccatcaccatcaacatcagcctcacggatcatctcatccacctcctcgtcagttagcttcttgccaagatttgtcatcacatggcggagctcagcagcggagatgaagccattttggtccttgtcaaacacccggaag

SEQ ID NO: 413449 - DNA, 534 bp, Oryza sativa
gcgggcggcggcgtgctccaagggagggggagggggaggcgcggcggccgggagcggcgtgcacgagctgctcgagtgccccgtctgcaccaactccatgtacccgccgatccaccagtgccaaaatggacacactctgtgttccacctgcaaagctagggtgcacaaccgttgccctacatgcagacaagagcttggtgatatcaggtgtttggccctggagaaagtagctgaatcgcttgagcttccctgtaagtactgctctttggggtgcccatagatcttcccatactacagcaagataaaacatgaagcgcagtgcatgtttagaccatacaattgcccttatgctggttctgagtgtgctgtggtgggtgatatcccttatcttgttgcccatctgagggaggatcacaaagctgatatgcatggtggttgcacattcaaccatagatatgtcaagtccaacccacgagaagtccgaaatgccacctggatgctgacggtctttcactgttttcggccatacttttg

SEQ ID NO: 413450 - DNA, 506 bp, Oryza sativa
ggtaaaataaaaatatatagcatattatatattgatatatcatcaacatagcccaaaacaaagctgcatactattattataggcagcaatccaccagcgcgatgcttgatcttagcttagttgccaccagactcctcgcaacctgggggcttgtaggcgataaagctaatcaactgcacctgcctgacgttgtcgaagccgatgatacggacaaaggcatcggggtaggccttcttggcctcctcgagctccttgagcacctgggtggcatcggtgcagccgaacatgggcagcttccacatggtccaatacctgccatcgtagtatccgggagacctgtggttctcacggtagacgaacccaaccttgctgaactcgagacaaggcacccacttggatcgaagcaggtactcgatctgcttcaaaagatcctccacggtgagtggtggcaggtacgatagggtctcgaacttcttgatgccctcaattggccacacctgcatgca

SEQ ID NO: 413451 - DNA, 287 bp, Oryza sativa
gaggaaatagctgcgagttcagttattctcgtccaagcaaaaatagtacagcttaagttcaggacacaggatatgcgcaaaccaaaagtactatttcaagagacatactgatcgaacattcatgaaaagtatgtaacgcttgcagggagtaacaaaattaatttggccttggtgttgcccactcaacacgaaggataaggttatcataaccataaccattgagcttgctgatagccttctcagcgtcctctctgtgaacaaagttgacgaagccgaaccccctgctt

SEQ ID NO: 413452 - DNA, 457 bp, Oryza sativa
aattaagatacacacatgcatattaatttattacacatacatgcaaacgttacacgattttacccacgtactagtatatagtactcactctatttcataatataaaattttttagcattgttcatattcatatatgttaatgaatctagaaatacattaacatctatataaatgtaaacaatgctaaaaagtcttatattataaaacggagaaagtatatgtgtacgtatgtgcatatgcttgctgtatatctaatcaaacagctgggaggggtttgcgaggaagaagttggtgacgaggtctttgatgtcggcgccgaaggtgtacccgtccctgccaccgagatagatcacctccagcatcctcgtcaggttcaccaccagccgtgccgtcgggagcagatgatcagcccgaccacccatcttcacgcactcccggttgatcgttcttcacgcgc

SEQ ID NO: 413453 - DNA, 504 bp, Oryza sativa
accctagtctgactgacggatgaacatgatatgagctgatgaatcggtagtttcagagtcttctttcctcctgcaattgcctgcagattttgcagcagatggattgtggcactggaggagtagaggttgcagctagctaagaggaaggaggccgctgtggccggcggtagccgagctccatgacgaactccttggcttgagcgcccagcgacgcctggacctgctccaccggcgagctcttcagccacagctcgagcaggccttgcaatgtggtcgagggggagattgcctcgccatggcatgtgatctccacctcatcttcacttgctaggtcaagcttattcatgatgtacctctggatcaaggaagtctgcagacttccatctttaattctcacgtaatatgttggtagctgaggcagcctgggatcttgtttctggtcaggtgaagggacaagcaaaaaccatactggtctagttattccatcatgcaaagcaccagttc

SEQ ID NO: 413454 - DNA, 413 bp, Oryza sativa
ggtggtgaggaatatattacacatgaattgttgcatggacacgatcagttacacacgaacagggcgtgcagtggcttactacgaaacagagaacaaaaaagaattttacccaccacagctacattacactttttttttaccacccccagggccaatttttatttatttttacagacgccagccagtcacctttctcattttcggccattttgctccaccggcgatcggcgacgacgacgacgacaacgatgggatattcttactatcacatggagcactcggcggggacgccctgggggaagcgcttgggatcggtgcagtagttgtagatcatgtacttgctctgcacccaccgtattcgttgttgccgcgtgaggtcgagctcctggttgtaccatccaccggcggcggcg

SEQ ID NO: 413455 - DNA, 412 bp, Oryza sativa
ggtcttcttgcattcttaaattcggtgctgtttttaaaaagagcttcttagctatgtaggaactgagaatggagcaggggattttgcagggagagtaacaccaccccctcgaagagaaactgaaggttggttccagttagcagtggttatggcattcgaatcaaagaacaccacatcaactgttatatcatcatggaagtgccggcttaccccacgatcaattttcttcagatctgaatacctcatctccctcttttttgctgcctgctgcattgcagcctttactagtcttctagcaatcccattgcggggattatgttggacaagatcaactgcttcctgattactaatatgctcccatagtccatcagatgcaaaaatgatgaactgatcagttgtctgtaattggtgc

SEQ ID NO: 413456 - DNA, 483 bp, Oryza sativa
aggatcaaaacatttctattaccacaactttttaaggatggaattgagtagcaatactttcaccccaaaatacagtttagcgacaatatcttagaaaagccgcttgctttgccgccatggctggcaagctgagcagagcagctaacacaaagaacacgagatcactataaaccaaacggcaacgaacgaagaaaatacagggtcttttttgtctgaagatacacgaagcggttcgttttcttttatttttagtctcctctcctcctcgatgatgggtgtatggcaatggcaatggcgatgggatcttggcttagttgatgggaaggggctcgccgttccactccttgaggcagtcgagcatggggtcgatgagcttgccctggctgatgccgaggaacaccttgttgcactcctcgccgggggacttgagcttttcgccggtgaggaatacgcagccgagctccttgcggacgaagcggtaga

SEQ ID NO: 413457 - DNA, 496 bp, Oryza sativa
aacaattgcaactcacgattggattaatagatcgttctttgcaatatatcccaatccaccaatcctgttattacattacaagcacgcttacacaaggtaatactgaatcaggacgaacgaacatcagtacacaaaaaacatagcattagcaatgtcaaatgtccttttttatgtctgatatctggaacagtaagctctatgccagtaaaatagtgttgcaagtagcctgattcctcgatcgtccatgtaaagaactcgttatccacgctccgttccgtccctgtattcttctcagtatggaataatcgattcgatgagctcctggagtggagccagctccttcttgtcaatcaggccaaattcagttgtaaacaggatgaagtgcttgaagcacgtgttaagatgggcctcctccttgaggctgacaatcttctgaaaatgggagtgatatatgtgggcataaacacgaaacaagcgcttgaaaattgtctttaca

SEQ ID NO: 413458 - DNA, 460 bp, Oryza sativa
agggtcaaatccaacttattcataaagcatactgctgtcccacaggaaactgtttcataaaactaacatatcatacggactcgatggtccattaaaccagacacaagtagacatcagcaccacaaatacttgacgaacagaggctcgggatgaccaggcacatcggcagctccaccaaactggctgattactgaccaccacggaggcggagcaccaggtggagggtggactccttctggatgttgtagtcggcgagggtgcgtccatcctccagctgcttgccagcgaagatcagacgctgctggtctgggggaatcccctccttgtcctggatcttggccttcacattatcaatggtgtcggagctctcaacctccaaagtgatggtcttcccagtcaaggtcttcacgaagatctgcataccaccacggagacgaagcaccaggtggagggtagactc

SEQ ID NO: 413459 - DNA, 401 bp, Oryza sativa
cccacgcacaatttacatgatcattacatcgtccatcacacaggcactcatgcattgattacacataggagttttgattcgggggactagcttaatgaatttgattagccgatgatctggtccaggacgccgatgtttttggggccgaggacgacgccgacgcccatgatggggccgacggcgccgcaggccagcgtgtcggcgagcgtgaacccggcggggtcgccggtctgcaggccggagtcgcgcgcctccagtttcagccccgccgttgacttcctgttcgccgacggcgccagcccgaacctccccgggaacagaataagcgtcgtcgtcgtcaccatgataacgttggtggctgagccgatgtagtcgcaccggatgccctgggaccttttttt

SEQ ID NO: 413460 - DNA, 378 bp, Oryza sativa
gaaagcagaggtagattatattaagaagcctggcacgcatgaggagatggagcaggagtacatgatgagatcaccatgatgatagatgatccatccaagctagctagggatccatccaacattgatcgacacacgcacacactgacaacgacgacgacggttttatttaggcgtcagagcaaaaggcaaggcctgcctacatataagctgggtactaatgcaagcaaattaaggcctcgatcaaagctctgatcgacagtagcagcatccatacgataaatcctcatgcagccgggcgacgacgacgatagattcagttgcaggagcagcaggagcagccgctgcagctggtgccacacttgcaggtgttgcagccgc

SEQ ID NO: 413461 - DNA, 391 bp, Oryza sativa
aagcagtaacgtacagttcaaaattgattggtccagtatgtatacatagcatagtacattacaatctttcgatagcagaacgagcttacatggtagcttaaaaacatggtatagttttcacctgatgacattgaagttttctggatagacatgcgtgctttcaacatctcctgaagttcaaaccttgtaaattgcattgccatgaacttgtccacaaaaccaggacattctcgagaaacctctctcattacatttccaaaactttaatcccagtacttaattacgccatcccatccacatgttgcaaccttgctagtctccaagggatgccactcacatccaatgcaaactccattgtggcacttcaacgtcttaaattttctgcagcttt

SEQ ID NO: 413462 - DNA, 475 bp, Oryza sativa
  unsure (1)..(475): unsure at all n locations
ggtataagaaacaatattatcgaaacgagataggcaaatcggcaggtataaacgagtgtattacataaggtgttacataagatcacatggactaatacatcatagttcagtactctgtaacttttaacttattccaaaaacaccactgatgacacacaacctaggtaaaaacagcagtacaactgatggacaatcgcatagaggtgcaataggttcaaatccacaacccagtcttacttgctatctgcagaggcctcgactatcttgacagcagaccaaactcgcctttccctcacgcagacttggatgcgatcattccggtcttccgggcataggcaaagatcccgcctgcctcaataaccggcccggcatcgccgataggcttcagcttgtactgcttgccggatgtgtggttgatcatgacgcanttatcaagtttcaccgtgaccacatccccggtcttgcactccttcca

SEQ ID NO: 413463 - DNA, 379 bp, Oryza sativa
gagtgagaataccagcccttgttgcttaacattcaaatatggccatctgtccattccctcttcaaaagtttaaaccatttctgggtcccaaaatattacagaagaacatagcacgaactcaacacgagcaatacaaaacttttacaaatcgatcttcttgctgcccccctatgcacaaatcttcagaaatcgctgacgccctctctcagcagttgatgccgcactgcctgacgtcagggcccctggccttgatggtgaagggatcaatcctgacccagagcaaggaaaagatggaggcgagcagcacggaccagatgacaacaatggtgggcgtccggttctgcctccccatgagccccttgaggaagggcgtgaggtg

SEQ ID NO: 413464 - DNA, 433 bp, Oryza sativa
caggacaaaatggatcgataacataataattatgcagcattcattgataaaagcagtatcacagtaccatgatccaaaacttgacaggaaatagaaacatccagacgcagcacaatccaaggatgacaaccggttcttaactattgtaaaacaaagtgcatcagacaagtccgagctagcaaagactctctttactccgccatcctaagcctctacgttctcgacaggtgcatcaatcataagagccttagtcggcttggccaagaggtcggtgtactcctggaatggagacttgacgaacttggtgtccctccagaagtcaggagtaaggaatccataagtcttcatcaggcagtcaaaggtggccttgacgaagttgccaagggtcttggtggatccacgggacgaggtgaagacatcctcaatgccggcg

SEQ ID NO: 413465 - DNA, 591 bp, Oryza sativa
agcagaaggcaaaggaaatttcccgcaaatacttattcatatgttttgacaacatttctcccgacgcatgctcattgtggcagacgcagctgaccacctagagcttttagttcaccattattatttagaccaagcatacgtcccaagatcagaacacatgcttacaagcgaaaatactaatagcctggctggctgcttcacagaataaccaaacgacaacctcaacagataaaaatgccacggaatgaaaacaaagcagcgaatcgtcaccagaagtcccatcttactcatcaaacactccatcattctcctccaacgcatcctctccccaggggagaagattgcccagtttaccttccttaacaggagcagggttcaccatattctcagcctcgaagcagtgcagaacagatttgggcgacccaacagcaacaggtacgttttcagtagcgtcgaagctctggtagatgaggaggccaccacagggcagctcctgctctaccatgttgttgcatttgtaagcatcagcattgagctccctttgccatgttccagcatgaccatgcccaccaaagagggtacagaacagag

SEQ ID NO: 413466 - DNA, 501 bp, Oryza sativa
ggcgaagatgcagatcttcgtgaagaccctgacggggaagacgatcacgctggaggtggagtcctcggacaccatcgacaacgtgaaggcgaagatccaggacaaggaggggatcccgcccgaccagcagcggctcatcttcgccggcaagcagctggaggacgggcgcaccctcgccgactacaacatccagaaggagtcgaccctccacctggtgctccgcctccgcggcggcgccaagaagcgcaagaagaagacgtacaccaagcccaagaagcagaagcacaagcacaagaaggtgaagctcgccgtgctccagttctacaaggtggacgacgccaccggcaaggtcacccgcctccgcaaggagtgccccaacgccgagtgcggcgccggcaccttcatggccaaccacttcgaccgccactactgcggtaagtgcggcctcacctacgtctacaaccagcaggcttaggcgtaggctcctgttctttggggggc

SEQ ID NO: 413467 - DNA, 406 bp, Oryza sativa
attacatgatcagggataaaaggcttagtgcaactaatgggaagttagcattgcacgggcgcacaacagatgtgattttacatgtctatgagcccgtacaaacttttacatgtatatgaacactatatataggacactctttacaagtatgcataactttgaccgttaatacacctcacttgctcatgaaaaagatgccctcatgaatgcactccatcagctatatatttgccattgacaagccagctgtatcaaaagcattcagcgggcccagagggagaacctcttcggcttcaggaggacctaacctcagttgtgttgcaaagaacggaaactcggtcacggaagatgcaacatgtgaacattccacaacgccagcatcatcacgcattgttcgcaagcatgc

SEQ ID NO: 413468 - DNA, 520 bp, Oryza sativa
gatagaggagatcaaactgtgtttatagactgaactgaaacttgattatacagtttgccacgactcctaactcaagcccctatgacgtggatacatatgtacaaaagttttgacacctgagaaaatgatctagtttccctacatggatagctagctagtagctatctcatgtcatggagtgttgccaaaaaggcgtccaacttgacattgtcacctcgagacaagaacttgatgcagatgggcgccctggcacccatgagtgtcagcatggacagcaagatcgagccgacgccgtcgccgcagatgagccccgacgccagcgccggcgagagcatccgcccgcggccggcgtccatcttctcccacaggtacgccaccaggctgccgatgcacatgccgacgggcacgcgcggcggcatgaagaaggtgatggccatgccgatggtgcttcggatgtagcgccggatgcgccactccttccggcttgtcaccttccggaacacgctgagcgccagggcga

SEQ ID NO: 413469 - DNA, 402 bp, Oryza sativa
ggggaattaaacctcgacattttattatatttgacacactggatatttaggcaataaactttaccgcaaattatgaaatgtacaggcactgcactggaccatacgtagtttttgggcagcatataaccatagggtggcacgtacgggcttttataccacatactagtccttgaacgcttaataataattaaaagggcgggcatcacattagaaaagtttcaacacgcttgcacacaaacacggaattactagtctcactcttggcggggaagattaatttaatggggcgacttgatctgggttgttaaatacggttttattgggggggggattggccttcaggagttcagggtagccatgtcggcatgaaggcagggacgcatgagttggtcatttgttttg

SEQ ID NO: 413470 - DNA, 381 bp, Oryza sativa
agagtacgtaataaacagtttacccaaagctggtaagattattttcaaacaagatccaaatcaaaacataaaaaggtagcacggaaacacaaccacggacgcagaaggtgcaaacagctagcagtagcttacacacaaaaacatacagattaaagggccacgcaagaccattaggtggctcgcagagagatccgagatacatgtagcccactccacatcccttttattattagctccaacttctgacagctgatcgatggctgcttagctcaaagaacccatcccagcatgaagttgttctctgcacctgcaggggcagtgctcctctgaatagtgtttgcttcagcaggcacaaattgatgaggatacccaatttgcaag

SEQ ID NO: 413471 - DNA, 472 bp, Oryza sativa
cgaaacaaaacagactttcatcatatataatatagttccaggcttaacggccacagaaggtagaaatctaagttgcacgatcagaatgtcatacaaagcaaatctggagtttcattgatgttcagataaaacatttcacaaggcctctcagcaacagagcctgtttcttcatcctggttcatggcctgacattcagcctctgcagcataaataaatctaccatgatcctacagcaccctgggccggattttcaaaggcagcgaagccccagtaagtcttcaatgagtatggcgggtagatggtcgctccctcagttgtgatcttggcaatctggaacttgttaatagatgatcggtcacggtacagcaggacaagcaagcacttctcaacaagcttgacagcttcctcaaatgtcatgtcctcgcgccattcagtacgaagtattgggattgccatatggttcccaaaccca

SEQ ID NO: 413472 - DNA, 443 bp, Oryza sativa
aattaactagcatatttaaatttaaaacgtaactgtttgagcaaataccacgaaatgttcaggcgctaagatacggcaataccgatacatccagcatagcaaaaatggcgaagagcacagagtcagataaagctatagagaactagggctccaggagatgggggccgaatgacaaccatggcgcttagtcgacctcctccatcttgctctcgccggcgtcgtcctccagcggcggcatgtcggcgtcagcctcagcagactcgtcctcgtcgatgctcaggccgagcttgagcatccggtggatcctggtgccgaaggtgttggggtcctcaaggctgaagccggaggtcaggagggcagtctcgaagagcagcatcaccaggtcctttacagacttgtcgttcttgtcagcatcggcacgcttgcggagctcgtccatgatg

SEQ ID NO: 413473 - DNA, 408 bp, Oryza sativa
agggcggcaataaaacattgcattgaattttgaacgataaacaccaggaaccggggtttatttgggggaagcactgcccaaaattttgcaaaaggactgaaaccttagacataggacacatccatggcaaacatgggtgccaaatgacaactacagaaaattatcaaattcgaatgcagctgacggtttttcctggtgaagatgcatattttcccctccattacttggatgggctttttccattgacagccaatgggacggcgctggccaggctggggtttttcagagcatagaacatctcaatggaacggggagtctcgcgcctttcaagggtgcttacgtacttccagaatccatatcccccagtcaagggcatcagcctctcaaagtacagcttccaggggtact

SEQ ID NO: 413474 - DNA, 459 bp, Oryza sativa
attataagtgacgaagcggtctcacataaaacagggcacacaggttacaacaacgagggttgtaagcccattaagccccaaacatcagatcaccacaagcaaatgtctcgaagacacacgcacacggcaacaggataactccacactggcagatcatgggatagcagcagttatcaatcaggccttgacacacagaacatcaagcccccagacgacgacgactcctctagtactcgtcaccatcatcgccatcctcattctcgtcggactcagcgccaacctcctcgtagtccttctccaacgcggcgagatcctcacgggcgtcatagaactgacccttgtgcatgccctcacccacgtaccagtggacgaaggcgcgcttggagtacatgaggtcgaacttgtggtcgatgcgggagaacaccttcacgacgctggtggagttggagatcatgcaca

SEQ ID NO: 413475 - DNA, 397 bp, Oryza sativa
aaaacataaccaggaatgagatgcaaaggagcaaattgagcacatatttaggttcaaatccaacttattcataaagcatactggtgccccacaggacactggtttataaaactaacatatcatacggactcgatggtccattgaaccagacacaagtagacatcagcaccacaaatacttgacgaacagaggctcgggatgaccaggcacatcggcagctccaccaaactggctgattactgaccaccacggaggcggagcaccaggtggcgggtggactccttctggatgctgcacccggcgagggtgcgttcatactgcaactgcttgcctgtgaagaccaaaccctggtggtctgggggaatactatggttgtactggatcttggcctttacat

SEQ ID NO: 413476 - DNA, 454 bp, Oryza sativa
attagcagaaggcaaagcctttttcccgcgctttattaaccaggccagatcgagttcgtgtcacatggtcttaaactcttaaatcttagtacatcaaaccagacacactgtttaaccatcagctcatcatcaccttactcatgagaagaactaatccagagatacggggtaaatcaaacgcccaatgtttcggaagctgcagaggagaagaagtagagagtactatcgctcagattctttggtgctggttcgtcactgcgtcttcttcctggcgtccttggccatgcccctcttgcggatgccgacggacatgttgaggaggagcctgtccacgatgggctccgggaacgcggtgatgaggaaccacagcaccgcgtgcggccagtagggcgtgcaccttggctcgtacccgatgtagcgcacggcggtgcgggcgtacgtcttcggcgacggc

SEQ ID NO: 413477 - DNA, 465 bp, Oryza sativa
acattaaaacaaatcacatagtactttcattatttcaaacgaacataatgatacataaacacatgaaagaaattaagggagatgttgcaaacatatccgcaagaaacacgacacaatgtgcgtttgcactactggacatgaacacagtttgcctcttaatcacttcttaattaatccttctgcagttcttcctgatctccccgtttgatcccgtcaacggtgtgatgtcccccatcttgatcatgcccgtcacaaaatccgcaaagaatgtgctctggctacttatgtaagactgaacaagagcatcagtggctccgccattgaagagctcctgatcagaatgcaggagccccttcttgacgactaggttcttgtagtagttgttctcgaacacggttggcgtctgaagatccagaggtgccaggttattgtcacctgatcctgagttacgagggcaacctgatt

SEQ ID NO: 413478 - DNA, 518 bp, Oryza sativa
aaaattaaacacgatatatgaacttggtcgtaatacaaaaagtacagcagcctggtgtctcctagatcctcaagcacaaggaacaaaagcacaaaccaaatgacacctcacagctgcgttgatctatgaatgacctagaacggggtaaaatcagctatatatgccccaagataggggaggatcaccaactgggagtaaaggagaaatatgagtatgataagtagatgatcaggactatttggaccatgcaaccgcatcaatttctgcttgagcactccgatatagctccagcctcttcgcaagattagtcctccgttccatgacggccgggtcttcatcaagaagcttagaaagttgtttaatctctcttgctcccaattcagtaaagaagtgatcgagcagtgagcgctttgccttccgcacttgacagtagacaatagatttcggaatagagttcctcagggtgaacataccatgttaatatatgccagaacagtgtccattcgtctaagatagat

SEQ ID NO: 413479 - DNA, 407 bp, Oryza sativa
  unsure (1)..(407): unsure at all n locations
cgataactgaatcatttcttcatctcatcacaggcaaatagagaacagcaacattgcttctagaagatagctcactgttttgagaacacacgtaccaaaattttaaaagtgcaaaaagatattatcaaagtccgcaagggttggattccacagtaacgtaacatcaaagcacataggcttaacgataacggcgaaaagagacagtctggttgcgcttccaggtagccctgcgggacggcctggccttgtggtgagtgcgacccttgccgggcagaccacggtactttttgccagtagaggtgagaccacggagctcacggtgcttgtgcacaggctttgcgatcccgccgatccttgggtcattgcggatagcactgtgagcaacatncacaaggatgatctcaaag

SEQ ID NO: 413480 - DNA, 411 bp, Oryza sativa
aaaacaaacaaccccaaactgtttttttcacaatgtttgccgttgacaatggaaagagtaatttaggtccaaggggatcattggcggggggaacaaaaaattggttgccccacaacccccaccagggggcccaacagggggcgctttccgtttttgggcgggggaaaaagtaaaacctcccggtgggaagggaaactgaattatttttgcaaaccatgatgatgagggatgggctccttaggaccccccccccccttagggttttggtgttcccattttggccactggaggggtcactctgaatggctttaatccttttgggtgccctggggggaatcctaataattgaccctggacttggacttggaaaattcctcctggggggcctccttttccttcttggggggggct

SEQ ID NO: 413481 - DNA, 435 bp, Oryza sativa
agaataaccaaaacataggaggtttcatttcttcgcctcaaagaagtgtagcatctttccttctttcaccattacataagcttaagcaataacagataacaaatcctcctcctgctctaggtaaaatattcaaacacaatacccttataagtacttattattaggaaagtagcgtgcatgggcataaatggcagcggggggcaggttaagaatcacaatgctgagcagcgaggaaacaaaacaccataatgggacagagcaaaagccttcgaaagggagcttttaggcagaaggcttctcccacttgaggggcttcaccacctcccaggagaagtctgggtcgccccttccgaagtgaccgtaagccgccgtctagcggtaacgtccgttgccgcctttcttgaggccaaggttgatgatgatcatgccaggcct

SEQ ID NO: 413482 - DNA, 472 bp, Oryza sativa
  unsure (1)..(472): unsure at all n locations
cggatcataattgtctgctcaatggcacatacaaactccagacattgaattgcctggcaaactccaaagggttacacggtataacttggacactttcagaactaatcaaaactgaacgacccgctagctacaacaacaattggacaatgcttgtttagtgatctgaatatggtgatccaacagatcaatgaatccctgtgttctgcagggccgcatgcttttgagcaggtaagtagcccttgctgcttattatttctctttctttcagcagttcatgctatgatggatatgctatctatcagaaaaacaatccattcttcacttactaagctactagtacacggtgactccaataattttcaagttaatttttcacttatgcttagcatcttcggcccagtcagtgccgttcaagctgtgatctgtttggtagtaaacaacatncccgacgtcgctgacaaagtgatcaact

SEQ ID NO: 413483 - DNA, 430 bp, Oryza sativa
aaatatatatagccggagcttccatatatttcattcacatatgcctcacccaacaacatatagtcgtagcagataccactcttacatcaagtcagagagagatcaggtgaaacaaaaacaaaagcagagcacggccggtaaaatcaaaagacgatgaacaaactgggaacacacgaaacaaggtgggagacatcatcgaatcagagatgaacaattaaacaaggctatatatgacgatgacggcttagttgccaccagactcctcgcagcccgggggcttgtaggcgatgaagctgatgagctgcacctgcctgacgttgtcgaagccgatgatacggacgaatgcatcagggtacgccttcttggcctcctcgagctccttgagcacctgggtggcgtcagtgcacccgaacatgggcagcttccacat

SEQ ID NO: 413484 - DNA, 393 bp, Oryza sativa
ggcccaaaaagagctttttgtttgggtaatattccaaaacaagcccgtagtacaaggggttgcagtacatgcatggaaaatctttagctagctttttttgggacacgtcccccttgggaaggggcaaaacgttcgagatgaacccccaagaagaagaaaggttgcttgcctgaccggccgggccgatcaaccatgggtgcccacacatgcatgcatggggattgaaccaccttagctagctcatttttttattccaaaatacgtccagatactactaattttggatacagaattggatcgggttcacacattgacccaccggggggcttttgtatgcatataaatgaaccatccgatcgatagctcagctcaccctggagcaatccatggaag

SEQ ID NO: 413485 - DNA, 475 bp, Oryza sativa
catcaaccaaccacacttgccctggccgtacaacacacagtgcaagtgcgtgtcatgcattattaattttacattatcatcatatatatgacgtatattacatggtcagcaagggtatagcttagctcgcggcgacctcaccgccggcgccggggaagacggtctcgatcatcctcccggcggaggacgacgacgacgacgaggacgggttgacggcgctgcagttgagccggatctccccccgggcgccggtgagcacgtcgatgttgcccatcttgatcatggcggcgacgaacttctccttccacagcgtctcgttggcggcgaaggcgtcgacaaaggggaggagcgtggcgttgcggatgagctggtcgtcggagaagtggaggcccaggttgagcggcagcagcttgtagtagttgttgtccagcgtcgccggcgtgctcacgtcgatctccgtcgtgatcggcgtgaa

SEQ ID NO: 413486 - DNA, 399 bp, Oryza sativa
attataaaatgtttaaatgacggggccgaaacttcaaaacgaacacaaaaaccgggatttgggcccgacagaacggggcctccttgtcccttgggcatcaaacaaactttctagaccaacaagagctaaaaaaaagagcctggggggggacaaaagcagactaggttaaccaacaaaccctagcaattaagcccaaaagaagcaaaaatacccaagaacctgggatgtaactctaccagcccattgggactccaaaggggggccgcttgaggctgcccccaaaacaatgaaacagggaagggacaaggccaccaaacaggattgggagcaggacattttccttccccggaacaaggacatgatagaggatccgtggcgggaatactttttctttttttc

SEQ ID NO: 413487 - DNA, 446 bp, Oryza sativa
cagcattgaaagagtggggaaatatattcaattattattagtgaagcatcttattgcctgcttttacaccccaatagcttatacatcccaacaaaaaatcgtaaattcaacaccggcaacaacaaaaccccaaaactcactttgttttgacactgacgccatctgttccagcgatgatcaccgaagtcgccatgtccaggaacagcccatgctcaacgacgccttccaaagctgagatctccttccctgctgccaacgcatccttgatcggcgtcttgaagtataaatcaacgatgtagtttgagttgtcggtaacgtagggtttgaccgcttcatccaatctcagcttcgcctcgcatccttcatcgttaaacagatcctgcaatctcacttggttgtacttccagcagaactgcacaaccttcacacacatgggtagaccactt

SEQ ID NO: 413488 - DNA, 466 bp, Oryza sativa
ggaagaagtgaattttattttgttatcactccatacagtggaaagtatattgacatttcagctcatttaatccacgagtcttgccatccctctcctgtggcttatgcataactatttttatttcgattcgtcatagccggtgaaaggtacacagatcactcagcagcttttcctttcctgcgattgctaccacctgcagaggctccggtgcctcccatctccacaaggtagtagatcattgagtcgacgtcctcgccaaatatgctataggcttccatgacctggatgtagttgaagcccattgccaggaggagctgcatgctgcgggttagcacggtgtccgggagaacgaagcactcctcgccaactctatcggcagtcccagctgaccgagaagacccactaatcgcagcagaagaagatggctctgcccctgatgttgatgactctctgaagttaagttgtt

SEQ ID NO: 413489 - DNA, 477 bp, Oryza sativa
gaaccgaactccaataggaggaggatagcttaatttgcacatagtaaaagagggatacacaactgagtactgaaattacaagtctgtgttcagataaaaacagtagtacaacaaacttgaagaggaacgtcgactccacaataattactaacaaagcaggcagcgggaaacagccgcgcccatcagaaacagcttgctctggattggcatcttgacagtgataatagctgatgcaggttacgacctgctcttgaatggaattgccctgatgaccacctggtggtagatggcagcaagggcagcgccaatgaaggggccaacccagaagatccaatggtcatcccaggcatggcccctgttgtagatgatggcagcgccaaggctcctcgctgggttgatgccggtgccggtgatggggatggtggccaggtgaaccaagaacaccgcaaacccgattggcagtggggcaaggatcgg

SEQ ID NO: 413490 - DNA, 464 bp, Oryza sativa
ggcaataataagtcttaacatccaaatttaaaccgaacagaaaatagagttttaaacgactgacatagtgcacaaagcgagcagatattaacggtcaatgcaacaactgaaatgaccgtcgacaaaacttaacgagtactaaaagagctagatatctcaaatgcagatatggaaagcaccacttgaacgaggctcatttcttcttggcggcagccttggtcaccttggcaccggttgggtccttcttctccacgttcttgatgacgccaacagccaccgtttgcctcatgtcccgcacggcaaaacgaccaagaggagggtactcagagaaggtctccacaaccatgggcttggtgggaatcatcttaaccataccagcatcaccgttcttgaggaacttgggctccttctccagctccttaccagatcgtctgtcgatcttggtcaccagctcagcaaacttt

SEQ ID NO: 413491 - DNA, 424 bp, Oryza sativa
aataattaagctttgttacttccaatttaactcaaattgatcttttacaagtactttttttttcgccgggccttttacaacacgtacacaaatttgtcggtacgtcgtgtcatcctcctccagacgagtgagtgctagctcaggcttcttcttcacagagagtgacgcatttgcttcgcagtgatatgtacacaagaaggcgttcatgcagcttagcccacacgtgtcatttccaaatctttagcgagtccttccaggtcccttgcttcatgcactgggcgtatatcttggctagcctgatgattatctctgaaaatggcggccttgctataccctgagtatcccagcattcttcgatcagcgctttgaaatctggaggatatcccctgagcttgttcttcagaggtggacgcatgccatcata

SEQ ID NO: 413492 - DNA, 451 bp, Oryza sativa; identical to SEQ ID NO: 392926

SEQ ID NO: 413493 - DNA, 474 bp, Oryza sativa
attggcaaacgaaaaataattcgtgaatacaactttaattgttttatatacgtgttcttagctatctaaaaacaagggctgaaaaataaactttgattaaaaaaccccaaaatcaactccaaatttaaggttgaaaatttaaattttagctgataaacataagcataagcaaaaaaagatgaggccctttatttctttcttctagcaaggcacatgcacacatttggttcttgtctcagacagaatgcatccattcatgtcacgagtggcatttgagtttttgacaaggggagttttgaaatccaagctgggtttaaagtgtgtacactgattaaaaagcttgaaaacagaacagcggccgaacacaaaatgagatctgaaaacgttcatggtggaatagtgttcagacattgcttgatgtgctgagtgcagactgaacttggggagaaacagaacaggtttatgagcttgagt

SEQ ID NO: 413494 - DNA, 463 bp, Oryza sativa
agcggcgtcaaaggaattttctcatgttaattacatttgttgttacatttccaaactccaatggaaatcgaaatgaccacgtcagaaagaaatacaaaaagttattagccaaaaacggcatgaagaaatgggatcaaacaaaatatggcagaacgtacaagaggtgatccagaacatgcttgcggaggtggacaaggaaagaggagaggaaaattaaaccacaatccccatgcatgcatgcacggtggctagaaaaatgcatagcatagagatctactatgtgctgtgtgtgtctctcattcgtctccgtttaatttgttgctgacgaattgaactgtggcaacgacgacgatgatggcgacggtgatctacaggccctgctctacgaggtagtcgccgagcctctcgaccaccatgttgcactgccctggggtcatcggctcatcgtagatgccgaccacca

SEQ ID NO: 413495 - DNA, 467 bp, Oryza sativa
agaaaaaaaaatcatgtacagttacataaacacatacgtacagccagtatacaaacgcaaatgaaaactaaggcacacagcacgcgttcaactctgatcaatatctgatcaacaagcgagttcatgcgtacacctcgcaacatttccactcgtgtatagtgacagccgaaactctttcgccatccaagatatatccaacgaaacccccctacctgtcctctcgacttcctccgatccgctacgggtagctagggtcgttcggattcaagtgaagaagtcgtacttgaccggcgtgccggtgggatcgatccatggctttgcgtgcaggaagttgtcgacggtgaacttggtcgcgtccgccttgctgatcaccttcttgtaccccggccacgcgacgcgccccgccgtgacggcgccgggccccttgttggcgtactcggcgtaacagagcgtcttgagcgcgaact

SEQ ID NO: 413496 - DNA, 467 bp, Oryza sativa
aaccaaaacataggaggtttcatttcttcttctcaaagtagtgtagcatctttccttctttcaccattacataagcttaagcaataacagataacaaatcctcctcctcctctaggtaaaatattcaaacacaatacccttataagtacttattattaggaaagtagcgtgcatgggcataaatggcagcggggggcaggttaagaatcacaatgctgagcagcgaggaaacaaaacaccataatgggacagagcaaaagcctccgaaagggagcttttaggcagacggcttctcccacttgaggggcttcaccacctcccaggtgaagtctgggtcgtcccttccgaagtgaccgtaagccgccgtcttgaggcagcgtccgttgccgcctttcttgaggtcaaggttgatgatgatcatgccaggcctgaagtcgaagttctccttcacaatcttgaggatctcc

SEQ ID NO: 413497 - DNA, 376 bp, Oryza sativa
caatatcatttattttggttgggagctgatgcgacaaacaaatgttgaaaaactaggcccttttgctccattaaagatttctacataggccttccaacacagagaaaaagtatgatgaagaatagactaagaagctggcctaaagcatatgccaagctagtgtaaaacaccatccgttctggtgttttgtatggaactagactgctatggttaaaaaatgaagttacagacatgacaattcacagtgggcaccgatggtacggctcagcatgagtgtacagctgcgaaagtgatttaccagttcatgctcactaaggcactgcaatttgcgagaaaatagcatactggacaagcattttgtccaatgaagcctcat

SEQ ID NO: 413498 - DNA, 418 bp, Oryza sativa
acaatcagaagttcatttatccgaatgggcatttgataacccttacacatacatacacacaccttaaagttttaagagatgcccaatttagcaccgcagtagagtctgggcatttttacaagggcttatggataggatgtatttagcaaaattaaaggattgtaattttgcaacccatggaactcgttttcatcaaaattgggtaggactggatgtcacgcaacaaaaccatttttttgagtttgtcttgggggcatatgattccaccctttcagtcctaggttttttggagggggaatcagttttttgcccattcccaccctttttctcatctctggctttgttgaatatccctgggaatccatcagcggacgctgggtcgttgacatcccattcaccaaacttgggcaagggacga

SEQ ID NO: 413499 - DNA, 380 bp, Oryza sativa
gagtaaaagacactgaaagggctcattttattcagagcattttggtcagcagcactcctaccaaccaacgcttttcaaatcagagatgaatagctggtgggtctcacaatcagatcaagccattctcatacagttcagccaactccaacatcttaaaactatagctgcctctgcaccaaaatcttaacatttatacaggaacaggcccaacaacgaaatggcagggaaatttctcctcaatttgccatcgaaggcatcagtttttcagtaccctctgtggttagcccacttaaaaaaagcatggctggctttgatttattttggtttgggctacacgatgatgctatcatggggacaaaaaaaaagaaggcctggggaaa

SEQ ID NO: 413500 - DNA, 481 bp, Oryza sativa
aagagcacatgaaaacctgctgccaaaactttgatgttacagcttacaataacaatcagaatggtctggtgcttctgcgacaaacaaatgtttcaaaactcgtcccttttgcaccattaaatatttctccctaggcctttcaaaattgtgaaaaagtattatgaaaaatagactaataagctcgcctaaagcatatgacaagctactgtaaaacaccatccgttttggtgttttggatggaactagatttctatggcttaaaaatgaagttacagacatgagaattcacagttcccaccgatggtacggcgcagcatgagtgtacagtttgtgaagtgatttaccagttcatgctcacttagtcactgcaatttgcgttaaaattgcatattgcaaaagcattttgtccaatgaagcctcatggaattatctcctgctgtttgctgtttgagccttgcttaggtttgcaagttcttcaatc

SEQ ID NO: 413501 - DNA, 391 bp, Oryza sativa
aagatggaattttatttttttacattacaggacaccaaaatggcaatcgagagatcgagcaaattattgaagcagtgttgcaacgatgtgctcgtcttggctgacatccagcactagaaagactttccataaacaaaattgggaaaaggcaggaggtatttttgtcatttcgacaagcattagctacccccgttttttataaaccaggatttaatcagaacttttctagaccttatagccggttatggtgaatcctttgccaacaatttcgcctacgcagaaccacgcataaagctcaactccaaataatgtcacaattccaagggcctctaccttgagctcctttctattcttccatacctgcttgacaccatcaaattccttccaaaat

SEQ ID NO: 413502 - DNA, 383 bp, Oryza sativa
ggggggaacagggacttttatgggaatatttgggggtaaaacaccttgaaataattcttacttaggactaatccacattgaaataggccatagggaaaatttttaagagctatatatccaagccaatttatggggggggatccttatatccaagccatattataagggggttaattaacatggccaatagctttatccagaccattttattccccattttcttgataacttggtacacataggatccgggaggggccttaggcatttgcactgggatggacaggcttgaactcctggagctccttgaaggccatccatggttcctcccagaccttagcttaatagaggttcttggggtccccttccttcacctcaatggggaa

SEQ ID NO: 413503 - DNA, 382 bp, Oryza sativa
attgcaaaaacatcatcttcttcttcatcttcttagtgtacacaacaccaactcggtcatcatctcgtcgcactaaacccatcttgcccaacccaaagacaacgaactcgctggccacaaatccatccaaccacaattaaccactgctaagctacggccccccacttcacttgccggggacgaagttggtggcgtacgcccaggcgttgttgctgacggtgtcggcgaggtggtcggcgaggttctcgagggggccctttgcggtgacgatggcctggacgaagaagccgtacatggagaacaaggccaggcggaccctcttggtcttccttaacctgagctccgggaacgccttggggtcattggggagggccagcgggtt

SEQ ID NO: 413504 - DNA, 453 bp, Oryza sativa
  unsure (1)..(453): unsure at all n locations
gcatggaacaagctgcgattaagatggacaggttcagtagttatcctaacaggttcagaagtgcggcatccagcctaataacatccaccccccagctggtacttaaacaaacacgacataaacaagactaccaaaacatccacaagttcaggccataacatagcagccaagcggttgctcagcagaagaacatggagctcctgactttgttatgcaggcgaggcagctcgggcaccggagcgctgcccgccgaggtatggccaccatggctcgacgacgtctccgacatctngtcgaacttgatgaactggctgacctgagcagcagcgagatgcgcgtagcaaatgggtgcaacgactgatatggctgtagtgctcctctggtagacataggaaagggagtggaccaactcctgaagatcgtcagcagagaagcctatctcatcatgaagga

SEQ ID NO: 413505 - DNA, 457 bp, Oryza sativa
ggagatgaatgtacaagataaatgataacatgactcgcacaagtacgattacaatagacgatcctaggtagggggtacatctcccattttttttttggtcctaccactaaccacaaacttagcatgacaaaagttggaccatgcatgccatgtataatacagcagccaccggacaaatgcataccaagagttcagaaggggcataatattcagccatgaaacaaatccaacaacattctgataggacaccaacaatcccaaacagagtagcttacatgacaagggcttgtgaaaactgaaaagaaactgccttgtagataagcgattaaaaagccagagcttagaagcacttccggtgaacaattggtggacccgactcatcatactgtccctttgagaaccacatctgttggaaggtgctaagggaggcaaggatggacccttctatccagacact

SEQ ID NO: 413506 - DNA, 351 bp, Oryza sativa
acaaaccccaaaatcaaggagaaaggggagtttatgaacatcaggcaaggcccggggttcatttattaatcacaacgccgtttgaataaactgggggcaacaaaacattgaaatgggaggaggggtttttttcatttcgacaggatttgccgacccccgggttggggtaaccaacatagactggatttgggggaaacctataccggcgggggcgctggatttttaaacaaggagggcgcctcccccgaggcgcccggaaagggtaactgcccaaaaaaaaaccccgggggtgcccccaaccttggggtccccggtgggagaccattcctccggacagcataaagggcttta

SEQ ID NO: 413507 - DNA, 414 bp, Oryza sativa
acagagcaacattgatttcatattcccattaagggcagcaaaatgttgtcaggcatttttaagcaaaggagttctactaacttaattatcaacagatgaacagcaggggaccacttactactccttaatacataacaagcattccggcagctaagatcttacaggagactatataggggcatccactaataacttacacaacagaatggatggcaaactggggattttttgcctactatttggctcactcctagcaggggataccacatttttgggtatcagggcctgggacacgggtggtgaatggatcgatcccaacccacagcaaggagaagatcgatgcaagggggatggcccaaacaacaacaatggtcggtgtacggttctgccgacccatgaaacccttaaggaagg

SEQ ID NO: 413508 - DNA, 358 bp, Oryza sativa
tttgttttgacacaaatatattttattcagcgctgatgcggctgctaccccaaaattacaaaatttattacacaaaagacattgcggaaagctttgtacagtttcactacatgctctcgatcatctggatagggtaagacttttgctaccaagacgtctaagcttaagtaattaaagcgataccttttcttccaaaatatggcgatctcccaaaaagagaatctaccgggaacctttagcttgacagaaagtgcaaatttgactgcctgggatattagagacccattgtatgggtatgcacaaaagtgcttgattgctttcttctaacgtttttgaaaaactacttgtaaaactcttc

SEQ ID NO: 413509 - DNA, 381 bp, Oryza sativa
aatcataacttcttttcctgtactcagcagtgtagcaatgctagtcaataaagctaatttcacctttgaacgggaatggggaagcaatggagtagagaattacaggagaaggtggcagctgaggagagaatcaggagctgtcacaaagctatatacaagttgggaagctgaacgagaagagagcatatgcttccctcctacaggaagcattatgacttgttggtgctgttttacaaatctgggtgattatcggaagatcgtcatgcggtagcagctgcagctttttttgggacttgggatccctgttgcagagtgcagatgaggttgcgatccccgtacacattgtccacgcgacatgttggtggccagaacttggcgccc

SEQ ID NO: 413510 - DNA, 434 bp, Oryza sativa
cacgcacgcataaatagcaccatgcttcattattttacggagtagcacgctgtactacacggtacgaacataaccataatacacacaacatcagggaacagtccccatgattctagttaccagttatttgtccccacgactctagttaccaagcaaacatgaaacagcttctccatgagcttagctctacttctgcctcttgtagatcttgtgcaggaaggatttcaatacattctgaactgctttgttcggatgtgcttcgatgtcggcaatcagcttattgtaactctcccttctcgtatttcatgaaatacggcctccagattaagttctttatacagatccttcacttttgcaacacattcaggatctggcttcccataattttcaaatagaatgtgcttttggttctcgtcagcacgctcgagagcttg

SEQ ID NO: 413511 - DNA, 387 bp, Oryza sativa
attctgggcagaaatcattaataccaaggcagaatgcccagcccaaaaccaatacaagagggccaataataattaaacaaactcaacatctagtacttgactatagcaaactgaagcccgtaccccacacgaaacacaaacttggatcactgatcgggcttcgctgaccaggccttgaccaatcttgacacgaacttaacaaagctgcagtgcagaaaaagcaccaaactaacacacgccaaacacttccaaattccaaccatggcctggtcttacacacgccccaattaagcgctgctcttgtgctcgccggtggcggcggcggcggtcttgacttcctagccggagcccttgtggtaaccgggcagtttctccatgatcttgccc

SEQ ID NO: 413512 - DNA, 362 bp, Oryza sativa
gctggaaaatttgatgatttatttcccacttatatcatcatatacaaatactaacacatgcgaaaattatcaagcagaaaagttccatacaaattcatccagacaaacaagtgtaaaaaaccttttttttcccatttcccccttgaactatccgtaaataccaccattccaccaaactcccctctgtcttctacgacaaataatcttttcaacccagtaacttataattaattacagagagattagcaaacatataatggtaagaatcagttgtcgtaggtgcggcactcgtcggtcttcgggttgtccttgcagtaggccttgagcgggtcggaggtctccttgagcttgtcgcgcgcgtg

SEQ ID NO: 413513 - DNA, 467 bp, Oryza sativa
actggacaagagcatgtttgacgcctcgcattatcgcatatagcggatgaaaaaacgtcaggccagcctgcgcgacaacgtctagttacagataagagcagaactgcaagtcaaatacactcttttctctccatagtagagtttgagcagcgagcgggcaaacataaattattcaattattaaatgatatgatcactcttgatcatctcaacactataggaacaaaacttcgctaccgcgattttactattttagttgtccacaacttcaatgagggttggttcgtagtcagcaggagcctcgaaaccatggaagttcattacggttgcagcaacattggcgagcccaggggtctgaatgtcagaccggaatttcacaccagggtgaagaccgggacctccaatagcaaccgggacccgctgaagagtatgtgaggtaagaatctggataccaccgttcttgtcgag

SEQ ID NO: 413514 - DNA, 449 bp, Oryza sativa
ccggtaagtttttgcttctacctcataaaacctgcataagaacatgtatttctttctggattatttccgtgaaaaggttaaagcaacaattctttattttctaaggacgttgcccaacgatttatactctacaacttatgaattgttttcatgtcgatggcctcctccagagtcccttgctcaacatgatcccaccatcccatgaggaagttgtcaaacaaccagcctaaaccaaggggacagcttaatgccgccttcaccagcatctgccttcttgagcaactccttcagctcatcacgattcacgtacttgacgtcggccacttcttcaggattcgggctgagctccacatcacgaaccatgaataggaggtagtccagtttcatgttcgccccatttttccatcagatggagccttgtaaagcatcctcccaagaggaatgaattg

SEQ ID NO: 413515 - DNA, 480 bp, Oryza sativa
atcacaatatcacgtccagtttgcgcgatgtatcgcaagcaaaaggagccaatgcaaccaagtcatgcattacaacccaactagacaggcctacgagcttaggtgtgttttcgtatgacaaaacttattacaacgcgcaaggtcctagtatcccggtctcttccaaaaaactactagctgctatctctaaaagcagggcaactgttagcacatgcggtttcacttcttgacctcctcgtactcagcctctggagcctgctcgcctccgccctgagatcctcctgtctctgaaccgcctgcgccaccaccaccaccagacatatgctgcccaatctttgaaacagccttgttggccgcttcgatattggccttgatcttctcgatgtcatctgaggtcatcacagagcggagatcggcgattgctgtctcaatctcagtggcaacctctgcaggaatcttgtccctgtactctcccagact

SEQ ID NO: 413516 - DNA, 349 bp, Oryza sativa
cattccgatagatagcaacaagcagttcaaacaccataaccaaagcgaactcaattcatggtaacatcacggacgaagaacacctaacactggatggatggatagagggcttctcgactcgagagagccactggacacgataacgactcgactcgatgataagatgattctgacacggatagctaaggataactggccacgatgggccccaccaatcagttcctccagttcccgccggagtcgccgccgtagccgccgccacggctgccaccgtagccgccgccgccgtcgacacggccgccgccgtagccgccgccgccaccggagccgccctcacggagcccgtagc

SEQ ID NO: 413517 - DNA, 409 bp, Oryza sativa
ggttaaatcttcacttgtatcaaaaaactttgtttaatgtaactatataggattacacatcaaaagctactagtacaacttgactaaactgtagatcccctgaagcatccggggataagagagcagcctaattaccaatttatcatgacctgattaacaaattaactcttatacatgctagtagtatctcgagcaagcacgttaatgacactgcattcatgcaagtgcaagtgtaattaagctctagtcgatcttgacggaggagtagatgagcctggtgaaccagaagcaggcgtagaagccgattgtgccggtgaggaccaagaaggcggcggaggcgatgagcatgtagccgaagtagagcacgccggagacgaccttggtgatgtcgagcttggtgaaaaagtaa

SEQ ID NO: 413518 - DNA, 414 bp, Oryza sativa
agatgcaacaggaataggtattaattttaatttaaagtacactcaaggtccacatccacataataactataagcatactacattgcagaccgaagttataagatcacaatgtgttcctagtaacaaccacaacgcaaaatttcaggctagttctttaggtcatcctctgggcagcttccttggctagaagcttttccctggctttggtcttggcttgggactttgagcccatgataccaccaccccactttttcctgacctcatcgaacttgtcgttgaagtttgacttaatggcctccaagattttgctgaactccaacttgtcttcattcttcacagtcgtcagacaaaggacagatgctgtcttcttgtgcacaattgatccaagacgagccttttcctttacaatgcaat

SEQ ID NO: 413519 - DNA, 422 bp, Oryza sativa
accaaaatgtgatatggatatgattaagcaggtgcagcaaaacgtacattaattaaacaacaacaattaaccctcgggcacgcctgtgttttgttatctcgctcaacatatacgtacgtaatactttgcttgcatagcatagggacgacgacattatattcttaattgataaactcaagaacgcatggagatggatcgagagatttataaatatggagcttgcttgattgattagatgaggtcgtcctccttgtgggtctcgatgacgacgtcggacttggggtaggcgtggcaggtgaggacccagccggcggcaacctggtcgtcgtcgaggaagctttggtcggactggtcgatcttgccggagaccaccttgccggcgcaagaagagcaggagcccgcgcggcaggagtaaggcaggt

SEQ ID NO: 413520 - DNA, 342 bp, Oryza sativa
aaccacaagtctatacctaacataatgccaaaaagggttaacataaaccaacacctgaagcacaacctgcttgaattctgaatcccagataggcaagctacaaaatttgggcctagttactcagcacagagttttatgatcattacggaaacaactagttgcaaacttctgttctcattcctcatcttcctcctaaccgtaaccgccaccgccacttgccttcttctggttcttccttttcaccctaccaggggggcctccaccgaatgggcttgtcagtgagaagtcaatgtgctttttagactcaaccctcaccatgaacgacgggatgttgacaatttg

SEQ ID NO: 413521 - DNA, 448 bp, Oryza sativa
acacaatcaggtccattgtacttctttcatcaaccaaccagataacattgttttacacaatctgaacgaacgaagcaaatattcgggtacgcggaaagaggagaacgtcgcgcgtctcaccgcagcctgcatgaaagcaatggacctcaccgccgttgctcgccggagatccacactcacttgccggggacgaagttggtggcgtaggcccatgcgttgttgttgacggggtcggcgaggtggtcggccaggttctccagtggccccttgccggtgacgatggcctggacgaagaacccgaacatggagaacatggcgaggcggccgttcttgatctccttcaccttgagctcggcgaacgcctcggggtcgtcggcgaggccgagcgggtcgaagctgccgccggggtagagcgggtcgacgacctcgcccagcgggcccgccgcga

SEQ ID NO: 413522 - DNA, 416 bp, Oryza sativa
gacgttccaaaattctagtattacacgggaccaaatcaacgagataggtttgatcaaatcgtccccagtataaaacaagcttgatcttctcaagctagtgtggtggtgtaaaattacaatcatgatcaagagagtagtacagtaattaatttaattacggttgctgcatgcagctgagctgcgtagtgatgaatctgtatatgtctaggtgaccttgacgccgttgtatctgaggatctcgccgatgagctcccccctgccggagccgacgtagcggccgacgatgtcgccgtccctgatgaagaggaaggtgggcaccttgacgacgtccatgtcgcggaggaactccatgcaactgtcgttctcgtcgccgttcatgcgggcgaagacggtggtgtcggccatggtgcgcgaca

SEQ ID NO: 413523 - DNA, 462 bp, Oryza sativa
ggttagctaggttgctatgagcctctgatgatcatgccaccatctgctcctgctccggccactgcgcgaatatgtcgccggcggcgtggccgtccttgacaagagagttcacccatgacacgtccggctccgccgccgcggcgtgcgtcgccaccggcatggcggattggccgcggaacgcgaacgacgccgacttgcggagcttgtgcagctcgtcgccctggacgccccagtccagcttgccgtccggcgagccccagtccgagagaatggacggcgcgccggtcgtcgccggcgacatgagcgaacgcgccgccggggcgcggcctccgcggtcgatgaagctctggctgcgcttggcgaacgccgaggcgcgggagctcatgatcgccttcgccatggagtggtccagcccgaacgcggtgttcgcgccgcccaccattggcgaggtcggcatgtgca

SEQ ID NO: 413524 - DNA, 393 bp, Oryza sativa
ggttcaaatatggattgcaatttgaaaatctcaacaagaatcatcatcgcccgacaacttgggaagtaacgtttctcatcagtgcaccactagaacaaagattagccagcacacaaaatctaagatatgtcgtgagtgtcctgtccttaggcagcagtaacaggttccgatccttgcttcgattcagctccagatccagctttgccgtcttcggctggctgcttggtcatcttggcgaacatattgctgtagaatttggcatccttcttgttgtactccttgaccttttccttgaggttcttgtatgtcaacttcacattcctgttatcaggatcaatttcaagtgccttcttaatatccacctctgctaactctaggtcaacaagttgcatg

SEQ ID NO: 413525 - DNA, 303 bp, Oryza sativa
cacagaaaatccacggatcccaaatgttctcattgattgatagcgatatcatagaagcagcgacacgaattaagatttaaaaccaaccccaagaaggatcgcagatccaactccaccgaatcgatccaagaactccgcctaatccaaccaaaccatgggcgatcttattttaccaacacgacacgaacttataaaaagactaacaccaccaccaccttcttcttatttagggactttgacgactcaagacgactgatactggcgaaaggcgaaggggaaccagacaaatctaggagaggtggc

SEQ ID NO: 413526 - DNA, 380 bp, Oryza sativa
acgcgcgcagcatgcattttatttaggcacgggccacaattcatacatgtataggggatacgtctcggtggcagacactcacggtatagtagggtagttgggtgtacagggatatagtcatatttgggcgttttttaatgccgttcgttgacttcgttcacagggtcagggtcgggtaggcgatatcgagggggacgccacacaggccggggccaccgacgtcggggagaatccggatgtagccgggctcgccccatgactggccccatgagttcttgatgggccaatacttggcgccggaagacgcgttggtgccgtacccgacaacggtgacggcgtgcgctaggcgcgtgccgaacgggcccgtgtaaacgccaccc

SEQ ID NO: 413527 - DNA, 267 bp, Oryza sativa
agaataaccaaaacataggaggtttcatttcttcttctcaaagtagtgtagcatctttccttctttcaccattacataagcttaagcaataacagataacaaatcctcctcctcctctaggtaaaatattcaaacacaatacccttataagtacttattattaggaaagtagcgtgcatgggcataaatggcagcggggggcaggttaagaatcacaatgctgagcagcgaggaaacaaaacaccataatgggacagagcaaaagcc

SEQ ID NO: 413528 - DNA, 445 bp, Oryza sativa
agagggatgaataggtatttccaaaaatttcttaaacttacaaacagcttagaactaactggatagtccggtaccactgcagacaatctgactatagagcagtcggatagtccgactgcatcagaacaatccaatcagagcatcgccagagaaaaactataagtgacctggaaaatagaaatagaaatgaaaaaataatggtggtggtggcaggatgtagcgtgggttgatcgtttagaagcacgaaagctccttgaggcagccggtggcagtgcccttggcattcttgcagacggccatggtcttgttgtttttgccagagtactcgaccttgatgtcattcaaggtgacgccggtgcacggcagcttgtcggagcagaggaggctaacagccttgggcgtggaggaggtgcccgttttgttcttgaaagtgatgtccttgatg

SEQ ID NO: 413529 - DNA, 404 bp, Oryza sativa
agaacgggaaaccagatcaaattggacagcattacataacagcaaaccttccaaggctttttattgggtccattacaaagggcgattttaccaccaaatatgttagcctaacaaagcaagcaaatacaaagtaatttagagctagaatcaatgactgatgcatgtcccgagttataaagaaatagcatcacttgtattaccgcaaacaagagcaacttttcacctaaatgttcataggagaactgaacccatgggtagactatgtgctcaaaggaactttgcaggttgttttattggggccataaccctggcacctgctgcaccggacttgccttttaaatggcaagccggggtctggcggtttttcctttgggctgccaaccccttgtcgggtttttattggg

SEQ ID NO: 413530 - DNA, 340 bp, Oryza sativa
tttttgttagaataaccaaaacataggaggtttcatttcttcttctcaaagtagtgtagcatctttccttctttcaccattacataagcttaagcaataacagataacaaatcctcctcctcctctaggtaaaatattcaacacaatacccttataagtacttattattaggaaagtagcgtgcatgggcataaatggcagcggggggcaggttaagaatcacaatgctgagcagcgaggaaacaaaacaccataatgggacagagcaaaagcctccgaaagggagcttttaggcagaaggcttctcccacttgaggggcttcaccacctcccaggtgaa

SEQ ID NO: 413531 - DNA, 413 bp, Oryza sativa
agaaccgaacaaaccctagcaatatataatttaaaaggcataatggtttacatgtccggacaaactgcaacttagcacactcctgacgaaactcaaaaccagacgggttcaggaatgtgttgtgacggctttgcagaagctttgactcaggctatacaagtagcaaaatgttgcacaccatactaaaagatgcaaacactacatagtagtagcctgatgaaaaacgcagacttcaaagctttaatccctgttacagacgtagtgatatgatatccgtgaccagtagggaaataatgtaacactggcccccttgaaacctttagctttattgaaccaccagaacaattcagtaccccgcacaggggccacaatttaccacctttgggcaaatcttgttttatttgaattgagca

SEQ ID NO: 413532 - DNA, 505 bp, Oryza sativa
ataattaattcacaacaccatatttcattgatcaggttcagaacctgcacagaaatacacactaccggtacagatctcaccttctctccaatactcgtacatccatccacgcggtccacacgaatacgtacatctatacggtacacgtacgtacatctactgcaccgcgtacacacacgcacactctcctgcagagacgcgcatcgtcgtcaacctagctagcttagctgaaggcgatgcgtcgccatggcagcacggcggcggcggcgctcacttgccggggacgaagttggtggcgtaggcccaggcgttgtttgtgacggggtcggcgaggtggtcggcgaggttctcgagggggcccttgccggtgacgatggcctggacgaagaagccgaacatggagaacatggcgaggcggccgttcttgatcttcttcaccttgagcttcgggaaggccttcgggtcgtcggcgaggccgagcgggtcgaaagttgccccggggtag

SEQ ID NO: 413533 - DNA, 474 bp, Oryza sativa
caagaactctccttgaaaattttgtaatttgatccgcaacgattcagatgcagatgaaacactgctgattcccactcagattacacacaatacaaatccaccgacaaactgcctcaaaaaccaccaaattgattcaaaagtaaaacgggtatgagggatcttcccaccgagactgactaaacctaaccacagacaatgggatccactggacccagattattcaaaaacagatggttatgacggcatcgtcctcgcaaccgaagggaacttgcagctatggatatcctcacttcgcgctggcgagctgggtgcggatgaccttggcggccgaaaccatgttggtaagggcgggcttgacctcgtgtacttgcgggttttgagaccgcagtcagggttcacccaaagaatgttagtgtcgagcaccgtgagcatttttgtgacccggcccgaaatttctttggggacgggatcctt

SEQ ID NO: 413534 - DNA, 470 bp, Oryza sativa
ccaagacagtaagcggcgaggcaatttatactctagatgtataatcttgaacattttcttccgaaaaggagcaatcacgcaggcaaagtctcaagcttgaatttgaagcctgacaacagcggttagatgaattgcagaaaaggaaaagaagcaaaaacaaatatggtgcgattcttcctgacgcatctctatacaggttcatttttgcaacaaagaatggcagaaatgcctgaggacttcttcaccaatgcttatttctccaggctatcatatcatattagaagaaataatgccgccatcttctcgttgtcagcctatggaagagtagctctcaattccttcctgtctgccccaaatgacttccacaccaaaacccttgacatatacattcgtaaagagctcagaaatatcaggcataggactcttctttgttttcgcaaaggcaacatcgactttcttttttgattctt

SEQ ID NO: 413535 - DNA, 439 bp, Oryza sativa
aaaaaaaaacatttatactcaacgagaacaatgtgtttcaatcaatcgtcagaaacaaagatacaaacagcacgagtaaatcacaatccacgtttgcggttaagcacacatgagctgttacatgctctcccagaatcctcttgccaggtgattcaaccattaccgaatctcaaactcccaatacaagtgactggactaagtcactaatacggtgcagctccatgactgctgctaatcgacagtcagcaatagtcccgttcttttgtctattgggcacgaggcctactgttctccgcagccctcacttggagaaagtatgggtgtgccatagctttacgtgcagtaggtctattctggtgatcatagcgaaaaaccttgtcaaggaaattgatggcctctggggatactagatgttggttggcagcattaataaactttg

SEQ ID NO: 413536 - DNA, 477 bp, Oryza sativa
ggcggcaggtgcggcggccgggccttgggcggcgccgccgccgctttcttggtcttggcacggatggcgtcgagggcctcgacgtacttctgcacccgcttctcctgcactcggcgctgctccttgacctcgccgtcggcggcgatggagtcgagcttgaccagctcattcatcagcgcctcggtgagcgccaccacgtcggcgtcaaccaccctcccgcccttgctcacgatcgcctccagcgccgacaccttggaggcgagcttgtcgacgtcgagggcgacgcgggagacggacttggcggcgcgctcggccttgcaatggcggcgctccttcgaggaggcgcttggcctgggcggtggggtcctcgaggaggagcattttggaccggtccttgacgccggcgatgtcgaggaacgccttggagtccctcttcttgtccctgtccaccaccttttggtcgtcggggtggagccc

SEQ ID NO: 413537 - DNA, 505 bp, Oryza sativa
tttgtttttttttttttttttttttttttttttttttttttttttttttttttttttaaaacacaagggaacccacatgggatcatcaattcagaaacagataataatattccaagggggtactactcaaagttttccaattggaaacggggaacaaaacgcatataatctgaataacatggaaccaggagcagcttatttcagcttatgataataacagaaaaaggggaatgaaaagcatcaaatcagagcaaaggggggagcagcaagcatcaacctaggccttttgggtggagacgtagggggggccgcacttgccgcaataggggcgaacgaaggggttggccatgaaggggcccgcgccccaatcgttggtggggcactctttcctgagcctggggaccttgccgggggggtcccccaccttggaaaactggggcccggggggcttcacctttttgggcttgggcttgaacttttgggggctgggggaccgttttttttt

SEQ ID NO: 413538 - DNA, 457 bp, Oryza sativa
gggatgaaagcagaggtagattatattaagaagcctggcacgcatgaggagatggagcaggagtacatgatgagatcaccatgatgatagatgatccatccaagctagctagggatccatccaacattgatcgacacacgcacacactgacaacgacgacgacggttttatttaggcgtcagagcaaaaggcaaggcctgcctacatataagctgggtactaatgcaagcaaattaaggcctcgatcaaagctctgatcgacagtagcagcatccatacgataaatcctcatgcagccgggcgacgacgacgatagattcagttgcaggagcagcaggagcagccgctgcagctggtgccacacttgcaggtgttgcagccgcagccgccgttctcgccgttcttcaccggcatcttcattcctccagagctcgccttgttggatggagcagcgagg

SEQ ID NO: 413539 - DNA, 436 bp, Oryza sativa
agatgaatgaagatgtacatttttcatgtttttggacagatatgcttagattctgccttttacggatacatccatgctattttgcaagccatgtaactgatttataattaatgcagcctttccggtggttccatgacgatcatcgcattactcgttatcatcattagccaggtcgaactgcttgagcagcgcgccgcagatgggcagtgggatgttcttgaggtagccgagtgggttggctaagcgcaggttgtcacagatgccgacatttctggtgagcaaaacacgggcacgatccctttcggcctcgatttcagagcagtttgcaagggggctgtggacgaggacaaccttctagatgtcctcctcatggctgtccttgagctaaaatttgtatgttcccgtcttattagtcacaccgttaattcgaacgctt

SEQ ID NO: 413540 - DNA, 481 bp, Oryza sativa
atcattcaaacgaatcaaataagcagagctttttgattacacaagataagtttcttgctgaccacaataaacggaaacttaaacctagcaggagtactaaattaaactcaacagccaacttaaaatagtttatttagctagccttgttcctcgccctcagcagcagccgcggattccctctcctcggcagcagctgccatcagctcatcaaacttctccgttttcccaagcaaaattttaatcttcgccttttgcataggacggttccttgagtcgtctttgacatcaacagttgatgtcatgatctttttttcaacagcaaggccattattttttagaattttcgcaacagtcaccacagtggcaatggccatgccgagcgcccagagctccaccttattatgctgttgcatggatcttttggcgaggttgacgttaaaaagaacggttttttggggttggatacctggatccggttttt

SEQ ID NO: 413541 - DNA, 420 bp, Oryza sativa
ataattaattcacaacaccatatttcattgatcaggttcagaacctgcacagaaatacacactaccggtacagatctcaccttctctccaatactcgtacatccatccacgcggtccacacgaatacgtacatctatacggtacacgtacgtacatctactgcaccgcgtacacacacgcacactctcctgcagagacgcgcatcgtcgtcaacctagctagcttagctgaaggcgatgcgtcgccatggcagcacggtggcggcggcgctcacttgccggggacgaaattggtggcgtaggcccaggcgttgttgttgacggggtcggcgaggtggtcggcgaggtttttgagggggcccttgccggtgacgatggcctggacgaagaagccgaacatggagaacatggcgaggcggcc

SEQ ID NO: 413542 - DNA, 469 bp, Oryza sativa
aacttaaaattaacattactcggccttattcattaccaccgctggcagtcaagtccagtccaggtacataactggttacattcctagggaagattatatacatggaagcaggcacagcttggtctgctgcacttagctaagccagtgcactagtgttgtagacaagaatagcgccgccaactagaattccagcaagagtgattgcccagagaagtaaacctgcctttcctccaacatagacatcaccagttgaagaccattcttttggggtatatattgggctgtacccatcaacatttgctccatacttggtggaaaactggtaaagaccctttcccttggctacccttccagatgcatcaacaccttccttgaacaccactccttcagcaggcccatagggctgggatggctgaatctttttggttttttggccacttgaacaaagatggccttgccattgtccctt

SEQ ID NO: 413543 - DNA, 421 bp, Oryza sativa
aatattataatctttaaagatattataggaacgcaagcattgagattagagttacgcaaacatgacgactttcattgcgtaatacaggtcgttgaaagaacaaccaacaaagcgaatgcacctcttttgggttcttttttaattgctaggcggccttgcaactacatcaaccaatataccaccactatatgctcatgctattgtctccatagagactacgctacttattaactcacacttgcttggaataaataccaactaaatgaattgacttgatctcttctcatacaagtcacagacccgaattgggtagtgaagaatgaatggccaagagaagagaacaaaatttatacattcgtgcatcaatgtacttgaggggcgttttttaatgctacattcaaactgttttccattgtttgcc

SEQ ID NO: 413544 - DNA, 464 bp, Oryza sativa
agggacaagctagttagcttcacatttcacattgatcacagcgtcatttgtcctggctactttcttctccctcgtaatccatcaacttccagtggccatcggcgcccctcaccatgcccttgtccctctgcacgctccacgacggcgggacgtggtactcctccttgagcgcgtccacattcttgttcaccagcgccacgtcccggtcgacctccagcttgaacccgccgcgcttgccctgcgccccggcgacgccgtgcatgtagcactcgaggctgtgccacaccgtctggttccccggcgacttgaggtacggcgacctcctcgtgtcgacggggagctcgacgccgacgtccgcgtaccccatcggcgggtacttgggcacgacgtccggcgagttgcaaaccccgaggaggcgaaggccggggagctcgtttaaaagctttttgaacccggattcccca

SEQ ID NO: 413545 - DNA, 351 bp, Oryza sativa
gaacataatcaaacttggataagattaagttcaaaggcagaagaacgcatgggatgcccttaggagtgataggcataccgacatagagcttttgtccttgctatccaagttaacaggttttacccaacactgcctttacattacatgctactacgaaatacatacctgaataaagaaggcataccgaaattgcattagaaggggggatgtccgaatttacccaaatactatacagttgccaattggtaccacttgctcacttgtttcacacatggagggcagttggctacagcgacatgttgtgctgctggagcccactttctgaatagcataacgcattgccgcgattcg

SEQ ID NO: 413546 - DNA, 411 bp, Oryza sativa
gcagttgtgctgagtactataattcagtacttgcaaagtcaaaagtagcacggacacagtcacgcccaaagctgatgacactcgacagacatactgtactgtgcctggagactcaagtagccaaagcccacacactgtcaaaactcaaaaccaccactagctcatatcactacattacagatcagtttacattgcagagtgcagcagcagcagcagcagctaacaccaggtcgagagaacgggggatggtcagagcagccttgggctggtgtaagggccattgaggatgctgttggcgatggcgtggtagccggcctccgtcaggtggacgccgtcccagttggcgtacgccgacgggtccgtgcacacgctggagccccgcacgccgcaagtcgccttcgggttgaagtt

SEQ ID NO: 413547 - DNA, 491 bp, Oryza sativa
ataattaattcacaacaccatatttcattgatcaggttcagaacctgcacagaaatacacactaccggtacagatctcaccttctctccaatactcgtacatccatccacgcggtccacacgaatacgtacatctatacggtacacgtacgtacatctactgcaccgcgtacacacacgcacactctcctgcagagacgcgcatcgtcgtcaacctagctagcttagctgaaggcgatgcgtcgccatggcagcacggcggcggcggcgctcacttgccggggacgaagttggtggcgtaggcccaggcgttgttgttgacggggtcggcgaggtggtcggcgaggttctcgagggggcccttgccggtgacgatggcctggacgaagaagccgaacatggagaacatggcgaggcggccgttcttgatctccttcaccttgagctccgcgaaggccctccggtcgtcggcgaggccgagcgggtcgaagc

SEQ ID NO: 413548 - DNA, 319 bp, Oryza sativa
gggatagaatttccaaaacatgggaggcattcattttttcttctgaaagaggagtaacatctttccttctttcaccatgacatacgcttaagcaattacagataacaaatcctcctcctgctctaggagaaatattcaaacacaatacccttatgaggcctcaccattaggaaagtagcgtgcatgggcataaatggcagtggggggtaggttaagagtcacaatgctgggcagcgaggaaacaaaacaccatattgggacagagcaaaagccttccgatgggagcttttagggagaagggtttctcccattgaggggc

SEQ ID NO: 413549 - DNA, 433 bp, Oryza sativa
gggatagaataaccaaaacataggaggtttcatttcttcttctcaaagtagtgtagcatctttccttctttcaccattacataagcttaagcaataacagataacaaatcctcctcctcctctaggtaaaatattcaaacacaatacccttataagtacttattattaggaaagtagcgtgcatgggcataaatggcagcggggggcaggttaagaatcacaatgctgagcagcgaggaaacaaaacaccataatgggacagagcaaaagcctccgaaagggagcttttaggcagaaggcttctcccacttgaggggcttcaccacctcccaggtgaagtctgggtcgtcccttccgaagtgaccgtaagccgcccgcttgaggtaaccgccgttggccccttttttgaggtcaaggttgatgatgatcatgc

SEQ ID NO: 413550 - DNA, 440 bp, Oryza sativa
attcaaaatccgggcctcattttattcgggaaaaagatgctcaggccagttccagggcacctgatggcaagctcacaagttcagacagtcacgcacacacatacaatacttttggacaaactgtaacaagatgcaagctcccttgagattatcttatctcactctacgatgactgccggagctttgggcgcacgaaatcggcgttggcaggcacggagatgtcgacggggggccgcagctcaacgcacaccttgattgccccatggacggggtcggacatgaagttgctgatgaggtcctggttgatgggagcatccttgtccactgtcacgaatgcttgctgggtcaggatgtagtccaagcgtggcgcccatttccttgatcccagaccagccgtcgttgagcagttgtcaaccatgaaggccacttcccgagcatgc

SEQ ID NO: 413551 - DNA, 388 bp, Oryza sativa
ggcaaatgggttcaatgttttcagcaaatgtcctgcgaatcaccaggcaaaaaaaagggagctagtacaaagcctcaatacacactggagtaaaaccagcaacggcatttgcgctccacatttcgcgatgtgcagcggtctgagataaacagtttctatgtgatggaacttaaaagtcttttttattcaaaaacacgggagcgggcaatcgctcactatctgtccctctgggtattgcttagttttagttgaggcatgagtaagcgagcgttttttcctccgacagcttctgggcagtcgcgtccatttttttccttgagaactcgtcgatcgggagaccctgaacaatcgtccattcgcccccactgcatgtttctgggaacgagtt

SEQ ID NO: 413552 - DNA, 516 bp, Oryza sativa
ggaacaattatcagaggctcctctggattatttatttataaccaaaaaacaagggccccgtacaggcagtgacaattcacaaacaaggttttgcattccggccgggctgacccacacagaagcacaatttttatgtcaaacatatatggcctacaaaaaggtcaaaaccatcccataaaggccacgcagcgtgtgaaaatggaaattacaaccatcaatgtgctaatctctctccctccctcctaattccatctaatcgatcttcacattcgaatacaggagggtgtccctggtaagtggcatattcataagcaagcaaaccccaatgagagtagagacaagaagaatgatccctgtaatccatgccaaactctttctaacaagtatttcagaagaggctattgtagcggtagtttggcttgtctctttttagccatctcgaaatgtgcagtgaagatgctggacccactaaggatggtgaagccctctttgtggtattactaaccaaccattttt

SEQ ID NO: 413553 - DNA, 398 bp, Oryza sativa
ggaaacaaggatgctacaatatattattgcagaaacggcaccaaggccgtttctattattcataggtaacatcccagcaacaagaggagacagagcaccaaccacacaccacattccactgaactcacccccaactaaatcaaactagaaaactcccaaattcaatcgaccttactttcttaaggaaaaagagcagtgcctaggaatgcaaagcatcctgaaatatctctcttctcttttcatctctgaaaccagagaatggaaacaaagcaaagaaactccaatgctctcctctttcagagtctcagcctgagatgttggcccactcacttgttcgacggctcgccctcgacggccaacgggacggtgctagccatggtgcgggacttgagggcata

SEQ ID NO: 413554 - DNA, 512 bp, Oryza sativa
aaaaatcaaaacttactacagtgttgaaggtcaggtttagcaagacaacacgtacaatcatacactctgtgcccacaaggttcctgtactacaaaagcgaaaattgaatactttaggcagaaaaagagagttggcaacaaaccaaaccaagcaacaagaacgagtcagtccatttttctgtccccagcggcctaatctagccaccgagtaactccatcttcttcactcgcagctgcaaggatctcgatacagacgtccaatacagccgatgaatttctgcaattgataagtttgcaaccctccaacaaggacccctccagcatccagctctcccaaacatcaaatgtatgacttgcaaacacaaactccatcctcctattaatctgcaatagtttaccaccagcgacgaaggaacgtaatcccatggtatccttgtttttgaaagtgactaggaactgagcagaagggtccctgtttgagcatttgacacgatatcaggatccaaccaccac

SEQ ID NO: 413555 - DNA, 382 bp, Oryza sativa
acttcaaaattcttaacttcatcatcaagaccaaacaaagcaaacgcatagactcaaaaacattcatttctcatcagaaagcaaatatgcagctggcaagtaatcccaacaaactattcagaatatctgccattgacacaggctagggtggtcacgaaccacaattagatagctgtttacttgttgtctaaataaacgggcagaaaaataggggataattttactcggcagcagcgacctcctgcccgggcatggcctcatcttctgcaggcctatcaagcttcgaaccgatgtcctccttggcatagtcaccatgcacctccatgagctttcccaggtcaaatttcggggcctttagaatcttcactttgcggacaaacac

SEQ ID NO: 413556 - DNA, 404 bp, Oryza sativa
gaccaatatagtttgctgccaattaccatataccacgaccgtcaaaacaagaagctgaagcatccagcacagtaaaacacggttcaacaacatccagggagataacaacggaagcataaaagtctaatatgacgattgatttaaccagtccatgaacccggcgagtgacgctctagttcttgatcttcttcttgggcctcagctggttgctgtgaccacacttcttcttgcggcagttgacagccctagggtgcaggcgcgcatagcatttgcggcagatcatcttgtcctggttgtacttgcgggcaagcgcctgaagcgacggctcgatgataccgccacggagcctgaggacgaggtggagggtggactccttctggatgttgtagtcagccagggtgcgt

SEQ ID NO: 413557 - DNA, 490 bp, Oryza sativa
ctcttttttttttttttagggggaataaacgcgcatattataagagacgaagcggtctcacataaaacagggcacacaggttacaacaacgagggttgtaagcccattaagccccaaacatcagatcaccacaagcaaatgtctcgaagacacacgcacacggcaacaggataactccacactggcagatcatgggatagcagcagttatcaatcaggccttgacacacagaacatcaagcccccagacgacgacgactcctctagtactcgtcaccatcattgccatccttattttcgtagggctcagtgtcaattgcaaaaaaaaaaagaaaagaaagaaagtaaaaaaagaaagaaattaatagctccatgcagacccttgtttgcatggtcaattaattagttgccaagtgaccacatgagataatgatggacaaccttagcatggcttgatgcagatacagtttcgcacgaaggtgctgaacctg

SEQ ID NO: 413558 - DNA, 419 bp, Oryza sativa
aatagttaatacatataaaaggatatcagctatggtaacacacaaaataatttaatgttagcaaacttacttatttacatggctgaggcgcacaaagaatgaaacaacttaattgggtctaaatactaacaaatttgaggaccatattgttgtttgtcctcgcgtgtcctatgcagcagccgacttgcaaattgggcatgagttcttctccttcaaccacttcttgacgcagtcggtgtggaagtcgtgattgcatttcagtattcccagcaaactgttgtctttgtattcctccagacaaattgcacatttcccatcatcttgatcattttgctgttcatcagaactgcaatagatcacttttctcacacaacctgagattttctcgtccaccaagcctgtgcagacattaccaatag

SEQ ID NO: 413559 - DNA, 281 bp, Oryza sativa
cgatcatcccttggatgcggcctggggtttacattaaattttgtcccaaaaaagcaaaacttttgccagccagaaattaattaatttggaaattttcttgttcgatcccccccccccccccaattaggggccatacatacatgccctgttgaaactgcaactgcagggtcggtgcgtggttactccaagggtcccctaggcccgggggttggccccattttaatcgggttgttgggcttatttgccggggacaaagttggtttcttttgcccaggtttttt

SEQ ID NO: 413560 - DNA, 465 bp, Oryza sativa
ggagaataaaaatgtaaaccacttcatatgattaaatgaattaaaaattggcattttaatagttaatacatataaaaggatatcagctatggtaacacacaaaataatttaatgttagcaaacttacttatttacatggctgaggcgcacaaagaatgaaacaacttaattgggtctaaatactaacaaatttgaggaccatattgttgtttgtcctcgcgtgtcctatgcagcagccgacttgcaaattgggcatgagttcttctccttcaaccacttcttgacgcagtcggtgtggaagtcgtgattgcatttcagtattcccagcaaactgttgtctttgtattcctccagacaaattgcacatttcccattatcttgatcattttgctgttcatcagaactgcaatagatcacttctttcacacaacctgagattttctcgtccaccaagcctgtgcagac

SEQ ID NO: 413561 - DNA, 362 bp, Oryza sativa
ggccacaaagaagggtcacataaacaacccaggtcacaggagggaaagctacaagcaaaccctgcataatcgaaaagcaaatgtttttaaaaaccagacccacaaactggtagatagaaccccacccggccagatcataggatagcagcagtaatcaagctttgccaaggccccaggcaagaaccctgaacctttttaggacttggcaccctaaaaacccttggaaccattggggaacttggggcccacccccccggaggcccttcccaagggggggggggccctcggggccttgggaaaactccccttttttaatgccctggccgacgtaccaggggacaaaggcccccttggggtccatg

SEQ ID NO: 413562 - DNA, 366 bp, Oryza sativa
acaggtaacatggtcgtatttgtatatcagttcatggctgcatgcagattcatttcaatgcagtacaggcatggcacagagagagccatgagttcttacatttcctcttttcataatccactaatcgcattcgcatggcagtatttaattagtcaagcgagtccacatgtggcatacgtaggtgcgatttattattaattagcgcggttaattacttcattagtacttaatcagagcgaggtggagcagccggtggcgcaggacaagacgtcgctggtgcagccgatgacgcagaacggcatcgccgtggcggcggaccacctcccaggtgaagtctgggtcgtcccttccgaagtgaccgtatgc

SEQ ID NO: 413563 - DNA, 487 bp, Oryza sativa
aaggcgaaagtatgaatatgcacacaagaattaaactgcatcgtggcagatggtacacagcaggtttccgtattaacatcacaaaatatgctcccgtacgaagggtaatttctgccgtgagttgtcatgcacgtttacgcctgaactgaccaaacagctggaatgggtattgcagaatccatccaatgactggaatctggtataggaaggcctggataggaggtccataaccactgaagagaacaaaagatccatatagcttcattattatgccagcaacaggccatcggacaaagagaagaaacagaccaaggaagaaaggaacagatcccttaatgtttgccttctttgtgaaaagctgccacatagattgccaaccaagcaacaagccgatttcagtcaagaagaaaatatttcccaacgccaacaagcccctatcaaagaaaaggataacgcccaaaaatgagaataggatgccaaagcccac

SEQ ID NO: 413564 - DNA, 486 bp, Oryza sativa
aaagttgaccaaatatacttttttccatatatcttatataaatgacatatattccaaacaatgctcacatacagctccgcagcaatattttggaaggacacatgtatgccttatgttgccatcggcctattacaacaaaataaccaaaaataataattatttgctcactcaaacatgacacgatctcttttaagagaggattatttagatgttcatatttcgcatgtgacccaacaagagtacacatgtctgttacttagagttggattccactcttgtactcagagccagctgtaaagctttcagggatgacatcgtcgacgacacggtagccgccattcttgacaaggaagcggacagagaaggggcccttgagcggcgactcacttttgagcgtccaggtgttagacgacgactccttgagcgccacccagtccttgccgcccttctccttgacctccacctcagagatggcaacattagtga

SEQ ID NO: 413565 - DNA, 444 bp, Oryza sativa
agaataaccaaaacataggaggtttcatttcttcttctcaaagtagtgtagcatctttccttctttcaccattacataagcttaagcaataacagataacaaatcctcctcctcctctaggtaaaatattcaaacacaatacccttataagtacttattattaggaaagtagcgtgcatgggcataaatggcagcggggggcaggttaagaatcacaatgctgagcagcgaggaaacaaaacaccataatgggacagagcaaaagcctccgaaagggagcttttaggcagaaggcttctcccacttgaggggcttcaccacctcccaggtgaagtctgggtcgtcccttccgaagtgaccgtaagccgccgtcttgaggtagcgtccgttgccgcctttcttgaggtcaaggttgatgatgatcatgccaggcctgaagtcgaa

SEQ ID NO: 413566 - DNA, 239 bp, Oryza sativa
cgaaacaaaagtaactaaacgaaacgcatactcatcaaaacttgcccagtaaaaatggacggatgtactttgacataacatatgttccgccataacaagccgttttgcagttcaattttcttaagataagaggctttaatgacaggctttactcaaaaataaacttaaaactagcacttctgagaaggataatagggggggattaaaaatgctcctaaaacagccagtcccacccccag

SEQ ID NO: 413567 - DNA, 495 bp, Oryza sativa
aatctccaaattcaagtatcaagtgtagtatatcatcatcatgcaagtacagtgttacatagattaatcacaatgcagtttgattaagcagtgggcatcatcacatcgcattcagaggaaggctatcttagattacagatgaatatgcagacacccagcttggtgttacatacatagactggatttgggtgaaatttagccggcgagggcgctggtgttgtagacgaggagggcgccgccgccgaggagcccggcgagggtcacggcccagatcagaagcccggtggttccaccaacgtaggtgtcaccggtgggagaccattcctccggcgagtagattgggctgtagccgtcgacgtttgcgccgtacttgtcaacgaattggtacacacccttccccgtgctcttcctgccagatgcatcaatatcgactgacatgccacctccaatcccgtagggcttgtcggtcttgatcttcttcccaccgctgcagac

SEQ ID NO: 413568 - DNA, 402 bp, Oryza sativa
aaaaaccacacgaatccccgatggattaatttcactgaaaatagcccgggtccatcacatcacacaaattcatccgttgatccacgcatagtcgccgaagcgaccagttgtttaataaatcgataccccccgggtttaattcagcaataatcagcacacacacaaaccacacttatatggggggtttttatgggggactaataaaggaaggggactcgccggcggcaagggttcggttgcttcgggacttcacttgccgcacttgcagtcggtgcaggagcagttggtgccgaacttgcagccgccgttttcctcgcggggggggacctcctggaaggggtttttttgggtttaaactatgacgcccccaaagctggacccttttttcacgccctggctttt

SEQ ID NO: 413569 - DNA, 496 bp, Oryza sativa
gatggagtaagtgtattatatgtatgtaaatattatattattgtaaatcattttgaggagctagactagcgtgccttattaacaaggagatatgtaccattacatgatgattaacatataaatctgtagctacatggaattaaggtagtggagcagaggaggaaggatgatagaagactccaattctccatggatgggaatgggatcaggtggccttgcagaactctccgcccagatcgtcgcacgcctcctcggggaacaccgtggtgggctcgtcgtaggataggtagtccctgtcgacttcctccgccgccgcacgagaaacagcaacagcagccgatgatgagagcttggcctctgggtacatctgcacgttgcacgcctcgccgccgatgaggtcgcacgcctccatcggaaacaccgagatgttagagctgtagtccaccttcgcagccttcactggcaccgccgtcgtcgccggacgaacgcgcaacgc

SEQ ID NO: 413570 - DNA, 306 bp, Oryza sativa
gaaaaaaaatgaagtttattcatatgatcatgatgagcccgtccttggagaaaactttgttacatacatgcatggctcgctttataaacaaaacaattaattaatgaagtgattgaaatcaagaaaaaaaaagaagggacaggtaaatcttacgataatgatctacatggaaattaattataagatggtcacggccggaatcaaaagctgaaatccataatcacagtttcggcgagcagctgatgatttatgacgattattaagagagatgattagttaaccacgttgcactttttcctgatctcg

SEQ ID NO: 413571 - DNA, 478 bp, Oryza sativa
atctcaagctggtattggtattatcacatcaaaggtaattaaacgctgaaagtagggaaacacacggcagtatttacacatggaagatgtttacacacaaacacacttctttgggttgtcgctagcccttgataggagccagcaggctagctgacacgtaccggtctctggtagtactaacagagacagcaagctactaggaacagagtaacaagataagatagcaacatactagataattaattacgtattagataaccacaaggaccagcaaacatggcgtgacagagagatcgaccagcctccgatcaatgggattattcagttcagcgatggctgctcctggtctcgtcgctgtacagccagtcgtagacggtgggggagttgggctgggggcggtcgaagaggttggcgccgaggcttttggtggcgaggttgctccccgggtggaacacgcttcttcacacgttgttgcccc

SEQ ID NO: 413572 - DNA, 477 bp, Oryza sativa
aacaataaaaagatagcatggaattaaagccgctgctccaatttaccatacgcagcatttgattacaggaataccaaaaaactactaccgatgacaggtattaattattaaaaagcacaggttcagattattgcgacaaaagtttttgatacccgtaagattggacgcttgatagccaaaccacactcagaaccctaaatatgcatacggaggatgtccaatcggatcttcagccaccaccagaggcagatcagtacttgtagtccttgacgtgaaggctctcagaggcaccctcgccgagcacagcatcaccctggtatgtaccaagggtagcctcagagttggccttgcacctggtgatgaaggccttctgcgccttcaccacgttctccgtcttgccgccccaggccttgagcgtgctctgctggagagcacggccgaaggagaaggacagagcccacggcttcttggtgctga

SEQ ID NO: 413573 - DNA, 462 bp, Oryza sativa
agtcaacgaaacgcatactcattaaaacttgcacagtaaaaatggacggatgtactttgacatatcatatgtttcgccattacaagccgctctgcagttcaactactttaagataagaggcactaatgacaggcattactcaaaaataaactcaaactagcacttatgagaaggataataagatgggatgaaaaatgctttcagaacaaccagtcccagtcccagcttttggataagtagcaacatccccttttgatattttaaatcttgttgaacgcaacgatgtcgcagctctggacaaattcgttgatcggctcttcagtcagatgttcttcgataaggctatccacagacaccaagtcattaacaatggtcaacatgacctgcaacttcttgaacccgtaacccacaggcacaagctttgatgctccccaggtgagacccttcatttggacactgcgg

SEQ ID NO: 413574 - DNA, 420 bp, Oryza sativa
gcagaataattcgacggaactcaatgtaatagctgtttaattcagaaacatgttaaggctcaaagtacagtaaaccatttaactgtgaaatcataaccaaagctcaataactattgagctccggaattacaccttacatattgggatagcaaccacagccctaaatacccatcgatccatccaaagctcccctagcttatgcaaatcttgttaaaatttaggccttgctggcaatgttgctggacagccagtccaggccctcgtacaatccctcacctgttgtagcacaagtgctctggatataccagtgtcgctggcgaagggagtgcagtcccaggcttatcagtgatctcagcagcattcatagcgtttggcagatcttgcttgttagcaaagacaagcagcacagcatcacgtagc

SEQ ID NO: 413575 - DNA, 402 bp, Oryza sativa
ggcgagagttgactagttgaaactccaacgatgcatacaattaatcacataatatcaatatcacacgttattaaagcatgaaagccccacatgatggagagattacaggtaacatggtcgtatttgtatatcagctcatggctgcatgcagattcatttcaatgcagtacaggcatggcacagagagagccatgagttcttacatttcctcttttcataatccactaatcgcattcgcatggcagcatttaattagtcaagcgagtccacatgtgggatacgtaggtgcgatttattattaattagcgcgggtaattacttcattagtacttaatcagagcgaggtggagcatccggtggcgcaggacaagaacttgctggtgcagccgatgacgcaaaacg

SEQ ID NO: 413576 - DNA, 384 bp, Oryza sativa
cggttcttattgtaatattttgtttaatttataaacatgttaaggtttaaagtacagtaaaccatttaactgtgaaatcataaccaaagctcaataactattgagctccggaattacaccttacatattgggatagcaaccacagccctaaatacccaaagaaccatccaaagctcccctagcttatgcaaatcttgttaaaattcaggcctcgctggcaatgttgctggacagccagaccaggcccttgtacaatccctcacctgttgtagcacaagggcactggatataccagtgtcgctggcgaagggagtgcagtccaagcttaacagtgatctcagcagtattcatagcggttggcaaaacttgcttgaaagcaaagac

SEQ ID NO: 413577 - DNA, 424 bp, Oryza sativa
agatacaacagcagaaaaggatatacctctgcttccccggttaccatatggaaagatttttacgttacagacatacaagttacagcacaagcagttttcatatgcttgaacatctaatgtcagcggtagcacattaaccaaaagtaaagtaaaaatcacattttgggagcaagccccgtatcatgcttgggaacatcagctaatatcagtcttaaatcacatctcaggaaactgaccggcaagtcatcctttcctactcgctgatcctacagcagctgcttgcagtgacagtcatggggtggccttgtcagcaagtgagtgggcagccgagctccttcgccgccgtggtgaggaaggcgagcgtcagcccggtggcgcggcggctgtgggcttcccactctatgcatcttttcacatcggcttg

SEQ ID NO: 413578 - DNA, 493 bp, Oryza sativa
gatgcttcaaaaatatagcattttcttattgctgcaatgtgtatcagaaatcattgaaaaaaaatgttgagcgagctccgtcagctagaaatactcatgaaacaacgggatctaataaaggattaaatgttgcacagccacataaagacgaaatggcactgtatttttgtacgtgctggaggtgaagcaaccaagctccgagctgcatgggaaagatttttcttggccaacctttttccaacagaatatttgaaagcacgattagtactaactttcatttacaatagcagtctcctaatgtcaccaaaattctgtgacaactctgtgaaaaacttgcctcctacttgaccatcaaatacacgatggtcagcggacaatgtcaagctcatttttgtaaccactgtagccttctcggttccatcactgtccaccacaggctcgataatcttattaccacgcccaacagcaagaattccagactgaggaggattga

SEQ ID NO: 413579 - DNA, 319 bp, Oryza sativa
ggaggttcttaaaaggcgccttaaataaggtaaacagtcgcattacagctagcagcaaacatgagttcgcgaattgatcaacataacatcaggcaaaagagctcaaaaaaggatagtctggggcagatagttctatatccttgcaaacaactcgctatagcaaaactccaggcagacgcagcagcagattttaagcgttggcagcagcctgggcggcagcatcccgcttcctttgctcctcgatgatgctgagcttgatgcccttgcccttgggcaggctcacccaaggcttgttgcccttgccaatggtgaacacatt

SEQ ID NO: 413580 - DNA, 497 bp, Oryza sativa
ggctgaatagaccactgatgacttggataaaagcacgacacacctcaagttacacaagtctgttattaataactccaaataaattaatggaggcacagacctaaataatggacaccacaccactaataactcaaaacgtaaagcacgacacatctcaagttacacaagtctgttattaataaattaaccaaggcacatacctaaacaatggacacaacaaataacttaaaacataaaggacaacacaccttaagttacaaaattaaatactgggtaataatgatccgacatccaagttaccaaccatggcaacggctgcaaggctcccggacattgaacttgactgtagagggaattttcccctcgatgtatgttcggatagccaagagcgaattatgcactcccttgataacatcctgatccaatgggaggcagacattgatgttgccgtcagaacaccgaagttgagtgcaaagagtgttcaatgtaaggcactc

SEQ ID NO: 413581 - DNA, 484 bp, Oryza sativa
gatatataattattctgtttttatttgaatacacataaacgatcaaactgtgaaacggtacaggatctgagataattaggaaactacagagcagcagctacaatattaaccatagcagctgcaggataaacacggtgctaaataggcaggctttgttcttctttcacagcctggatatctggaaggggaccatgacttcagtcatctcctccctcatgataatcttcccaacctggaaaaggtcggagatgcctagctgcgtcgacagatgccttcggcaatcctctgcagcaacaatgcctgaagaataagctccatgcacggacccagagtgatcgatgcaggcggcctccccagcgaaaaacaggttgcccaccggagcacagaatctttcatacaagtcagctggcttcccacaaggtcgcaggaataagaaccaagcgaattcggttggttccccaccttgaaaccaaatactggaccg

SEQ ID NO: 413582 - DNA, 471 bp, Oryza sativa
attacacagggcatcatacaatatttatcacctgtagtccaaaattacaccatttatcaccggtcatgcatcgatgattcggcctgaagctagttggaccaacatatttgcgtgcaagcaataacagtaacattattgatttgcatatattctgcacaaatgcagaaacataatattatcccttgtttcaaatataatgcaaaaatggctgctcaaaaagagcatcacccaagagacttttattgttattttcttcatgagatcagggtctgattgctccatctgacgatgataattaattagcgcctcaggctgtgcaggatatattcagcataaagatccatggagtacttgatggcctcctgagcagttgccggtggcaggaaattgtttacggcgacctctttgttttcattcttcttgtagtcttcaaagaagcggcggatttcagcaagtcggtgaggagagagc

SEQ ID NO: 413583 - DNA, 507 bp, Oryza sativa
gatcagaaaaagattttattagcaaagaacaggggataaattattccacatgccgacttgatgaatgatactaattatttccagtgttaaatggaattaagttggcgtaaaaaaaaattctagctgaaacaacaccagttgaactggcatgccaattggcggtacgctgccttattctatttacttttgaccgtgatacccttcggctgttcttgggataattttctatggtttaccattcaactggactttagctagcttctctccgctttcttcggcgccatccaccttaccaggaaatgacctcccactacttgtgacaagttccttgatggttgcttggatgtccttatcgtccaacagcgaatccaatgtcacatgtagccggaatctccaataatgcttcgggttagttgggtcattgattgtttcctcttttgctggtcttgtggtgacttgtctttaagtgcaagcaggtcctgtagtgggaagattgcccacattgat

SEQ ID NO: 413584 - DNA, 289 bp, Oryza sativa
acaagaaaaaaacaaggttctggattattaagacaaggcttttagataaccacagatatattgtgccccagggttcgatctatcggaaagggaaaaaattctgaaattccgatccgaaattgtgaatcctgttagagcctctagatatcaaaaccgaattaagtaacggccccagaatgggcaatcgatcaggtagccaagccatagcaggccagcgcctgatgcagatcagtacttgtagtccttgacgtgcaggctttcagcagcgccctcgccgaggacagcatct

SEQ ID NO: 413585 - DNA, 285 bp, Oryza sativa
aattcaagtatcaagtgtagtatatcatcatcatgcaagtacagtgttacatagattaatcacaatgcagtttgattaagcagtgggcatcatcacatcgcattcagaggaaggctatcttagattacagatgaatatgcagacacccagcttggtgttacatacatagactggatttgggtgaaatttagccggcgagggcgctggtgttgtagacgaggagggcgccgccgccgaggagcccggcgagggtcacggcccagatcagaagcccggtggttccac

SEQ ID NO: 413586 - DNA, 273 bp, Oryza sativa
agcactgtaagtactcgcattccacaacaaccgaagggcaacaataggactcagaacatccaagtttttaaccgaatagaaataaacgagttttaaacgactaacatagtgcacattgcgagcagatattaacggtccatgcaacgagtaccatggccgtgggcaaaacttaacgaacgctaagatatctcaaatgcagccagcataaccaccacttcaacgatgctcatttcttcttggcggcagccttggtcaccttggcaccggttgggt

SEQ ID NO: 413587 - DNA, 271 bp, Oryza sativa
cttcttcttcttcacagttcacatggaaatcagaaggaagtagcaaaaggaagagctgttctacactcgacagagtaacaaactaagagagcaacacaagtaacaagaggagagatttagtctcttttctggtgttctgcaaataaaactctcccctcttgctacccctaaaccccaacccaaggtagtagtaagtcaccccactaaaagtaaccggccatctcttacaaaaattggctgtctcctttgaatcaatcgaatcagatcatca

SEQ ID NO: 413588 - DNA, 117 bp, Oryza sativa
gggatgaaagccgaggtagattattttaagaagcctggcacgcatgaggagatggagccagggttccatggaggggacccccttgtggatggaatgacccatccaagctaggttggg

SEQ ID NO: 413589 - DNA, 287 bp, Oryza sativa
gcatatcactgcttgtctttgaaaacggcacgagtattggagcgtacactaacgagaaaattcccagcatacaggaatgcggtttattcagtttcataacagtgggtatcgaaatcagatatgctcataacagataaccaaatttcagcctaagcgctttgagctccgtgagatttccagagtttggtccattcctccattgcatcagcagctttagcgaagattgcattctgcggtcccagtttctccttgacaatgctggttagttccttaacacagtcttcaaa

SEQ ID NO: 413590 - DNA, 284 bp, Oryza sativa
ccatggaagcttcagtagctaagatacacatttcagtatggaagaaagtacacatatgaactgctcatataacaccaggaaagctgatcgaatccccagactttgattgatgtatgtaagttctttattcagatcaagcgactacatgatggcaagtgcgaccaacatgaagaaatgcactcgggacgccattctctccaagccccctaaaccatggaagcacaatttgcacaatgctggagccgttcatggctcgaacaccatgttttcggcctccctcttga

SEQ ID NO: 413591 - DNA, 263 bp, Oryza sativa
cttcttcttcttcacagttcacatggaaatcagaaggaagtagcaaaaggaagagctgttctacactcgacagagtaacaaactaagagagcaacacaagtaacaagaggagagatttagtctcttttctggtgttctgcaaataaaactctcccctcttgctacccctaaaccccaacccaaggtagtagtaagtcaccccactaaaagtaaccggccatctcttacaaaaattggctgtctcctttgaatcaatcgaatca

SEQ ID NO: 413592 - DNA, 250 bp, Oryza sativa
cattccgatagatagcaacaagcagttcaaacaccataaccaaagcgaactcaattcatggtaacatcacggacgaagaacacctaacactggatggatggatagagggcttctcgactcgagagagccactggacacgataacgactcgactcgatgataagatgattctgacacggatagctaaggataactggccacgatgggccccaccaatcagttcctccagttcccgccggagtcgccgccgt

SEQ ID NO: 413593 - DNA, 285 bp, Oryza sativa
ctcggatcaaacatctcagaaacattaacagaagtagaatgataatatcatcgattggtaccgatgcacagtgaagcaaattgtactagtatggataatagtatcaacacaacttagggactctaaaccagaacacaacacaaccatgacacgatgatatgacagacgagcggcataggtataatgaagtccaatgctgcaccacagcacacgctcagagaccaccacggaggcgcaggacaaggtgcagggtggactccttctggatgttatagtcggcaaggg

SEQ ID NO: 413594 - DNA, 259 bp, Oryza sativa
aattaagatagcaggctactacaaataaattagactccaagatacaagacaaaacttggtttggctattataataaacctccgaggagctgtcaagagaggaagataaaaacgaagggcagatagaactagtcagagagaccagccctgctcctcaagggctccttgaagtccatgatatcaccttcccacctggtcaccgcctgcttttcgcacacccaaattttttgagcaacctggttgataagcctgaagtcatg

SEQ ID NO: 413595 - DNA, 251 bp, Oryza sativa
gggaggcaattatgtcatcaaaataagctggagtactctccagcgtaaccaaggttaacatacaacaggataaacagaaagttcggcatacaacatgaggcattacactacaaaaaaacttaaactctgatcttcctgttgatttcaatgacccggggaaatgatatctcaaactctagttcttgatcttcttcttgggcctcaactggttgctggggccgcacttttttttgcggcagttgacagccctg

SEQ ID NO: 413596 - DNA, 239 bp, Oryza sativa
gggagataatggcatgatggatacatttttttaccagttttgagtttatttacacatgaaatgcaccaacgaccctccaaaaaagtggtggtggtactttacctggggcagcttattagttttttagtacacacattttaacgagcgaaaaactggttgtactacacaattttttttgatcatccgttttcctgggaatttcccttgagttctctgccatgtggaatcaacgagcttgt

SEQ ID NO: 413597 - DNA, 262 bp, Oryza sativa
aatcgggccaaaacacaatcgatgttgatcaaagagaccgtcgcaaagttgtagtactgaagaaagggtacacaacagtcacagctttctaaaacagtagtcttttggaaactcaaacacggtgtaagggaggagataagatgtatcttgggcctagatgtccatgggcgcggggtccgtgcccttgtcctcctcctgcatggagctcgactcaacctttgccgctggtgcctcctcggcagcctccatggaatcgattatt

SEQ ID NO: 413598 - DNA, 267 bp, Oryza sativa
aacatctcagaaacattaacagaagtagaatgataatatcatcgattggtaccgatgcacagtgaagcaaattgtactagtatggataatagtatcaacacaacttagggactttaaaccagaacacaacacaaccatgacacgatgatatgacagacgagcggcataggtataatgaagtccaatgctgcaccacagcacacgctcagagaccaccacggaggcgcaggacaaggtgcagggtggactccttctggatgttatagt

SEQ ID NO: 413599 - DNA, 266 bp, Oryza sativa
gggatcatcttaacaacataaatttaactcaacataggtaacaggcaaaaccatattccagagactagagtagagtcttaaacatttcaatcacatccatttcacaatgtcaaaaaggcaaggttcagggctaagttttaaaagactaaacttgaaagtaatgcagtagctagatagatgtagaacaagccaagtagctccattgatagggtggaaaagagaacaccgttccgaatcggtccggcgagcgctcagcggtacgactt

SEQ ID NO: 413600 - DNA, 281 bp, Oryza sativa
acagggcatgcaaaactatggtattacgagatcatttaagtaaatgaaatacaacgcccttggcacaccaaaaaacagaagtacggatgtgccaagatgattacaattattctgtaatgggatcatcgagccctggctgccgaatgcacacgacaattacaaaacgctcagctaaatatatctggaaggtttccgtgagcagcctcaaagatcctccggaccgttgatgtccttgttctcaagcacggctccatctgggatctccaacttccctgacttgg

SEQ ID NO: 413601 - DNA, 268 bp, Oryza sativa
agacaattcttcttgaggcctcttatttgcgccagatcacatgggcataaccccaaatgtcacgatcgcaactttattacactcttccatggtgatgtaattaggtaaagtgagagaaaatgaaaaaaaaacaaaacaaacaggggagatgattcgccggttagttgaccccgtagatccacttctcttcgttgctggtgtaagagaccagctccctgggctcaaaccagagaccaatctcagcctttgcagtctctgggccatcgct

SEQ ID NO: 413602 - DNA, 275 bp, Oryza sativa
acgtaataccatccattttttttattgccgacgaatttatcagatatgctctagatacatatcttgtgtgtatatagccggagctttgttttcacatatcctcacccaacgataattgtagtactcttacaataaaaccggtcggagagggagggaagagattattacatatgtgttaagagcagaggccattgagatggtacataaccaaattgtaaaataaaaatatatagcatattatatattgatatatcatcaacatagcccaaaacaaa

SEQ ID NO: 413603 - DNA, 278 bp, Oryza sativa
accacaactttttaaggatggaattgagtagcaatactttcaccccaaaatacagtttagcgacaatatcttagaaaagccgcttgctttgccgccatggctggcaagctgagcagagcagctaacacaaagaacacgagatcactataaaccaaacggcaacgaacgaagaaaatacagggtcttttttgtctgaagatacacgaagcggttcgttttcttttatttttagtctcctctcctcctcgatgatgggtgtatggcaatggcaatggcga

SEQ ID NO: 413604 - DNA, 277 bp, Oryza sativa
gggatgaaagcagaggtagattatattaagaagcctggcacgcatgaggagatggagcaggagtacatgatgagatcaccatgatgatagatgatccatccaagctagctagggatccatccaacattgatcgacacacgcacacactgacaacgacgacgacggttttatttaggcgtcagagcaaaaggcaaggcctgcctacatataagctgggtactaatgcaagcaaattaaggccttgatcaaagctttgatcgacagtagcagcatccat

SEQ ID NO: 413605 - DNA, 276 bp, Oryza sativa
aaaataaaaattctataggaatgaaatcttttaaaattcctatgaatttcctttgaatcaaatggggcctagtgcttacctttttaacggaccacacaatctcatcagtaacgaaagatattagcaaaaacacatagcagccaccaacaacacatactcctgctacgtgttcttagcactacgaaagatattagcaaaaacacatagcgaacgactgctccaaaccgggatgaagaaaagacatgatacattcaattctgaaatctagctacagca

SEQ ID NO: 413606 - DNA, 283 bp, Oryza sativa
acgacaaaccacgaacttggatattaaagatgccacaaagaaggttcacataaacaacacaggtcacagcagcgaaagctacaagcaaaccctgcataatcgaaaagcaaatgtttttcaaaaccagacacacaaactgatagatagaagcccacacggacagatcataggatagcagcagtaatcaagcattgccaaggcaccaggcaagaaccctgaacctctctagtactcgtcaccctcatcaccctcgtcaccatcgtcgaactcggagccgacctcc

SEQ ID NO: 413607 - DNA, 257 bp, Oryza sativa
acgacaaaccacgaacttggatattaaagatgccacaaagaaggttcacataaacaacacaggtcacagcagcgaaagctacaagcaaaccctgcataatcgaaaagcaaatgtttttcaaaaccagacacacaaactgatagatagaagcccacacggacagatcataggatagcagcagtaatcaagcattgccaaggcaccaggcaagaaccctgaacctctctagtactcgtcaccctcatcaccctcgtcac

SEQ ID NO: 413608 - DNA, 277 bp, Oryza sativa
gttaaaaacaagaactcaatgatcctatgcttcatggatctgcattataaaggacacatgctttcgaagttccgagtacttttgtgcagcacaataaatgtcactgcggttccttattaggggtaaaaggagaaaaagaagacaaaaaaacatcgctcatcagaagatgtcacccctgcttgtaatcacgtcctggctacagaacgggcatatagaaaccagaatccaaaaatttaacttgtacagaacttaacaatgaagagatcttatgaagccg

SEQ ID NO: 413609 - DNA, 281 bp, Oryza sativa
aagtgccaattaacttgttaccacatccaaaacggaaattgttatacatggacggtcctacgatacagtgacagatacagacatacagtacgtgcatcaaacgaaattattattcccctgattaactgtttgggggagaaggtcgtaagagagcacgcacgtacttagcaaaatatagatcagggattacattacattacattacatatgccctgtaattactggattacaggacactgtttgcattggcttctctgaagcctgaagcctgaaactgaaca

SEQ ID NO: 413610 - DNA, 276 bp, Oryza sativa
caaaaaggagtttaaataaaatcaattgcaaaaacaacagcctttccttgtagcctgcattaaacacttaattcccatggcttgctgagtactcctgtactcacccttgctctatataaataaccccccccagttgctgaagaagatgaagtggatcccgctgacgaggagttcttccaggagcaagtcggcttcgatgagttttaagggtttcggtctagttcccaagtcacgcctgtgatgattggtccaagtcttggcttccgctttcccttt

SEQ ID NO: 413611 - DNA, 269 bp, Oryza sativa
ataattgtcttatgtgactatatgaggatgtaaagttgagcagctgttctcatcagatatcaggaatgatttcaagataattgccttttgtgacctcaataaaattgcttacagagaacgaagattacaagtctgtggtgaggagcacataatttgcacagaaaataacagagaagggccaatacaaactgtggaatgtaaaacttttaaatgagtctaacaacaaggttgtgcatactctaacgctttgagaactgcgggcgcttgcg

SEQ ID NO: 413612 - DNA, 278 bp, Oryza sativa
agggatcacttattcattatagttcttccatgctgctctaccacagcaaaacgtttcagacaccatcaaaccagacttaaggatacacattacaggtaaatagtacacaatgaaacgggacacgaccaaggaccagaccagacaaccatagctccattggggaagacaaataggcagacttgtgaaccctagaacagcagcagctccatggctgaggacttactggccaccacggaggcggagcaccaggtggagtgtggactccttctggatgttgg

SEQ ID NO: 413613 - DNA, 272 bp, Oryza sativa
aattcacaacaccatatttcattgatcaggttcagaacctgcacagaaatacacactaccggtacagatctcaccttctctccaatactcgtacatccatccacgcggtccacacgaatacgtacatctatacggtacacgtacgtacatctactgcaccgcgtacacacacgcacactctcctgcagagacgcgcatcgtcgtcaacctagctagcttagctgaaggcgatgcgtcgccatggcagcacggcggcggcggcgctcacttgc

SEQ ID NO: 413614 - DNA, 293 bp, Oryza sativa
atgtaaatgggtgatttctattaggtaaccgttcagcaaactgtttggtttgggcagcagatgagttcagcaaaggggtcaggtgcttgggacccgagtatctgacatggcatacatggaaagaaaaggtgctgcttcttgtcttaacatgaatagtagaaggtatatatccccgaagtactggttttagaccatgtatgttaacatatgtcgtactattgatgagaaactgttcagtgaatcatgtagcctctgcaagtgatcagcttgagatcactttcttaagcttttaa

SEQ ID NO: 413615 - DNA, 221 bp, Oryza sativa
caaacccaaacattttaaattttcatccaacataatttacataagggttaaagggatatcttaaaactaaattctcgcaaaaatgcgcggggtttcacctaattaaatttttaagggcggtttccttatgctgacccgacttgatttatttattcaacaacaggtccctttttttttctttcccatttcgtttcctggggggcggggtaaaggaaaacaac

SEQ ID NO: 413616 - DNA, 314 bp, Oryza sativa
cgagtaacagatgtttccattaaaaaactttagaatacacatatgcagggtgttgaggccgatgatcaagcaatgaccatgcggcagattaatgcagaccgtaaccacaatctcaggtacttaaataacgtcatacccggtaggcgggtttacaaaacgttttttcgtaaacgttttttagcccgaaattttcgctcaaagaaacaattgtgtcttgctttagttttgacaggaattcaaaacaagaataatggaacgattatctcaaaatccaccgcttggcacaagccttctgcattccaccaggggaacac

SEQ ID NO: 413617 - DNA, 196 bp, Oryza sativa
ttggactgcctttcctttttttttttaaaaaggtaaactctgcataataatattattaagacattatagctgatgtcttttgatcacactgcgatcaaattatgcatcataggcagcacaactgcgcgtaaggaaaaagtcgaggagatatatttcttgttattacttaatacagccattcacatataatcgaacc

SEQ ID NO: 413618 - DNA, 411 bp, Oryza sativa
  unsure (1)..(411): unsure at all n locations
atacgcaaaactttgcagtaaccaaatcgattcacaggccacacatacaggtagtatacagattcgtctacacacaaggttattgcagaggcaaaacacgaggtatgtatatcaaacgctctagaaaagattcatgtgatgaaatacatcgatgaanccacgntatgttctcaagggtgagaaattaattagatgcacgtattagttttaaactttgttccattcgatactcaacgctgttaacctggttgacgaccacacttggctacagatgcccttcgagggtactagccagtattagcagtgagcctgtagtaacgttagcagccaagcagccagcaggtttcactgtcttgattggattggatcggattagtaagacgtagttctttgacgaacatgccctccttg

SEQ ID NO: 413619 - DNA, 345 bp, Oryza sativa
  unsure (1)..(345): unsure at all n locations
aacaatacgctatgcccaagacaagtcaatactacaacatctgtggcgagtacagaggtacaaaagtcaggcaccgtaagcctttcgattaaaaaccaaactgaaacacgcacgattttttaacanccccacgaaaaacaantctnngatacctagctccttttggtggtggaaccttaaagagcttnntatcttcccaaaanncatccacatcatnnntatctgtcatgactattatnagtttcgatnaccgttaaaaagggcagcgtttcacttcaggggattnatccgccnnatgtcttccttttcaatttnnaagcccggccaagaatgctttcaanngcc

SEQ ID NO: 413620 - DNA, 380 bp, Oryza sativa
aaccttcggactgactagcaattcagtcacaaaacacagtgcacatgttatcagaagttcacttatcagtacgagaattcgaacagagactggtccgagatattcttgccaagctaaaatagacgggcgccatctcaggccttggaaaacataaacatgttatgtagcatgcatatatacacacatcgccggataaatacgctagttaaaagctacggtcttcttctctcggcgtatgcgtccacctcgtcattaggaacgtgacaacaacacgtttaggccgacttcgcgaagccaaccctcatcttgccgtagtcgaacacggtatggtaggcacccatgaaaacgtcacccaggatccagagaggaccacggggagg

SEQ ID NO: 413621 - DNA, 352 bp, Oryza sativa
  unsure (1)..(352): unsure at all n locations
ggggaaccaatttgggtaattatgatgggaaaaaaaaaaagatgaccgctctgcatgtattcaacggtcatttgtaaaggaatgccggatcaacaatagtatgccaactggtaaactttaataacgacagaggggattttcagagttgggacaatcaggtctgtgtaaaggatcaccgttaaacaacagcaaagggggttttaagggacttctagnataaggtctaaaaccgggcttttttaaaaacacacaacggggaaatttaaaagaacaggggaaagggtttgccctccgggctgttacctttgggtttggcgcaattaccggcaaaatacattcctggcaggcttta

SEQ ID NO: 413622 - DNA, 213 bp, Oryza sativa
gctatggctacttccatattttttttaatgtaatgagcctatcctctaccctctcttttctgtttatatttcaatataccgaaacccatataagactagataaatattaagaggactctttccgcctagataaaaattctattcgtgggcacgcaaaagttgttatttttattttgcattttgcccctttttagttaaaaaatttttccaatt

SEQ ID NO: 413623 - DNA, 384 bp, Oryza sativa
  unsure (1)..(384): unsure at all n locations
aaaaacaaacataattacgtaataccatccattttttttattggcgacgaatttatcagatatgctctagatacatatcttgggggtatatagcccgggagctttgtgtttcacatattcctcaacccaacggataattggaggtacttttaacaatanaacccgggtcggaggaggggaggggaaggagattattacatatgggttaaggagcagagggccatgtgagagtggtacaataaccacaattggtaaaaataaaaattatatgagcaatattatattatggagtatattcatcaacatatgcccaaaacaaaggctgcatactattattataggcagcaatccaccagcgcgatgcttgatcttagcttagttgcc

SEQ ID NO: 413624 - DNA, 69 bp, Oryza sativa
ctccataacatcatccagtaccatagtaaggctgctgctagttgcatagcccgataagtagtctcacac

SEQ ID NO: 413625 - DNA, 188 bp, Oryza sativa
accaaaggtcgtttccatatttttaaaaatgcagaaaaacattatatatatgttctagatatatatatatagccagcatccagcgaagagaagattactagattggcaaataacaaaggtatgaaaaggaggaggttcaggagaagggcttcatctactaatatgtataagggtggttggaggggtca

SEQ ID NO: 413626 - DNA, 302 bp, Oryza sativa
ggtgggaaacgaataaaatcattattgcaaaaacatcatcttcttcttcatcttcttagtgtacacaacaccaactcgatcatcatctcgtcgcactaaacccatcttccccaacccaaagacaacgaactcgctggccacaaatccatccaaccacaattaaccactgctaagctacggtcccccacttcacttgccggggacgaagttggtggcgtacgcccaggcgttgttgttgacggggtctgcgaggtggtcggcgaggttctcgagggggcccttgccggtgacgatggcctgga

SEQ ID NO: 413627 - DNA, 324 bp, Oryza sativa
cgacggaactcaatgtaatagctgtttaattcagaaacatgttaaggctcaaagtacagtaaaccatttaactgtgaaatcataaccaaagctcaataactattgagctccggaattacaccttacatattgggatagcaaccacagccctaaatacccatcgatccatccaaagctcccctagcttatgcaaatcttgttaaaatttaggccttgctggcaatgttgctggacagccagtccaggccctcgtacaatccctcacctgttgtagcacaagtgctctggatataccagtgtcgctggcgaagggagtgcagtcca

SEQ ID NO: 413628 - DNA, 276 bp, Oryza sativa
gggagaagatcagtcctactttattcatgccatgaccatgcatacatatgggctttaacagatccatgaaaaatttccttgcccgaaaccgaaacatacatatttggcaaactcactcactttggctgcaaagcgaccgtgcaaagtgcgtcctcacacccaattttattaaatcgatcggggccggcacgggggggcacacttttattttgccgaaaaccccgacatgatgcccccgtaaaacggggcctggccgaaacaatccagggtgggccc

SEQ ID NO: 413629 - DNA, 198 bp, Oryza sativa
gttggtgatgataggctcatatatgtttcgaacaatgtcctctccgcttgtcgaaatgcaaataacatcatcgggggatatgatcatgtacatacgagaaccgaggaagaaacgaatgcttaaaattaaaacccatcaacagcccaatataccatgcacgagtcgattccctcaattgggaattcctttcacctgtgg

SEQ ID NO: 413630 - DNA, 301 bp, Oryza sativa
acacgtctcacagtgtcacacactacatgccatagcattatttatgttacagaggggtgctgataattgtgttctccaatggtccatggcacgcacactcactcacacacacactgacagagaggaaagaatcatcaaactaggagcaaccgaggtaattaaaacggaaattaccaccctaatggtgctggtaattaatcatcaacggccctctgataggcgggcccacccaacgccgactagccgaggcgtcggctcacggcgagccgagccggacctccgactcgcgccgcgcggcgcg

SEQ ID NO: 413631 - DNA, 245 bp, Oryza sativa
ggggaacggagtgatgctgtgttacttgcttttgaaactatatactaatttggtttccggtcttaactgctataaaaccatacataattcaccacaccaaaaccaaagctaaaagagtcgctgttgattggggtaagccgcaaaaccctggactgtgcagggcacgaggaggagggctcgcctagatagagcgtgtgcatgtgacggatcaggtcgatcacacgggtgctgtatccccattcgtt

SEQ ID NO: 413632 - DNA, 305 bp, Oryza sativa
gaaagcagaggtagattatattaagaagcctggcacgcatgaggagatggagcaggagtacatgatgagatcaccatgatgatagatgatccatccaagctagctagggatccatccaacattgatcgacacacgcacacactgacaacgacgacgacggttttatttaggcgtcagagcaaaaggcaaggcctgcctacatataagctgggtactaatgcaagcaaattaaggcctcgatcaaagctctgatcgacagtagcagcatccatacgataaatcctcatgcagccgggcgacgacga

SEQ ID NO: 413633 - DNA, 228 bp, Oryza sativa
ccttattgtttttgggggccataaccaaacaactggacagtgagggcaccaaaatccgtcaccagatgggaggacaggcttgtccttccacctgctcaaggacatgccgggttccatgtgaaaaaacatcgagcgcgcgctgggggacgcgcacacacagcaggagatctcggacaggaacaacatcttctgggtggaacaccccagaggtccacctatcctggacca

SEQ ID NO: 413634 - DNA, 314 bp, Oryza sativa
aaccaaaacataggaggtttcatttcttcttctcaaagtagtgtagcatctttccttctttcaccattacataagcttaagcaataacagataacaaatcctcctcctcctctaggtaaaatattcaaacacaatacccttataagtacttattattaggaaagtagcgtgcatgggcataaatggcagcggggggcaggttaagaatcacaatgctgagcagcgaggaaacaaaacaccataatgggacagagcaaaagcctccgaaagggagcttttaggcagaaggcttctcccacttgaggggcttcacc

SEQ ID NO: 413635 - DNA, 224 bp, Oryza sativa
acattattacaaggtaccactcattgtttaagagcaaagacaaatacaaaactgatgcatccaacgtaccaaaaagaaagcgaacagcagcccccacagtgctaaaaaaaaagaactaggagagggagaactaccagggacagaagggcatgcatgggcccatgacgaaaaaaccaccccctccatcgggggcgggcgagaaaacaccccaacctcgaccagtg

SEQ ID NO: 413636 - DNA, 238 bp, Oryza sativa
gggataagtatgaataagaagctggcatatacttcggctagtagcattgcaacgcaaacagtatgacaaggcaccacgcattgtttaagagctaagacaaagacaaaactgatgcatccaacgtaccaaaaagaaagcgaacagcagcagtcagatagctatgaaaagagaactaggagagggataactagaagggacagaatggcatccatgggtccatgacggttagacgacctcc

SEQ ID NO: 413637 - DNA, 303 bp, Oryza sativa
ggacgaaggaattgttctcaagaatcttaagatggtaaatacacacaagagagaggtacggtatacaagacttagtttttcttaagtacaacagatcttccattcctccatgatcctatcagcttttacacccaaaccacacaaatcaccatgcacgagcccttttcctccactgccaaatcaactcacctggggcttgagtagccaagcatccatgtggtgatcagtagccgatgtcagcgtcgtcgacgacgaggttgccggtgatgagctcacggtaggcggcgacgggccagatgaacc

SEQ ID NO: 413638 - DNA, 310 bp, Oryza sativa
gaaacggagtgatgcagtgtaacggggaagtgaaacagattacaaatcggagcaccaaacatagcaacgattcaacgaatgtaccaccaccacaccaaaaccaaagctaaaagagtcgatgatgatttgggtatgcagtaaaaatctgaactgtaaagcgacgagccggtgatgatgagcgtgagatttggcattggtttctttataggaaagcgtccatctcgagcaccttgaggacctcatcctggttgttcagcttggccacctcgatgggggtcttcccgtccagattctggggcgtgacagcagc

SEQ ID NO: 413639 - DNA, 308 bp, Oryza sativa
ggcggaaagtaaatattttaacttaataacatccagagtacataacccattctcatgtcatcatgctaaagttgtttaatcataaaaaaacagctatgcgtctgcaaacataacataggagctctcagggaacaaaaaagggtagttctttcagtgtagaaccagcaacaaagaaagacttgctctaagctgaggcacccttgcccttcttcctctggagcttcttcatgtagaattccagctccttgccctcaaggatatagccatctgctcggccacactgcccagggcgggaagaaatgcaggcc

SEQ ID NO: 413640 - DNA, 299 bp, Oryza sativa
aagtatgaataagaagctggcatatacttcggctagtagcattgcaacgcaaacagtatgacaaggtaccacgcattgtttaagagctaagacaaagacaaaactgatgcatccaacgtaccaaaaagaaagcgaacagcagcagtcagatagctatgagaagagaactaggagagggataactagaagggacagaatggcatccatgggtccatgacgtttagtcgacctcctccatcttgctctcgccggcgtcgtcctccagcggcggcatgtcggcgtcagcctcggcggactcg

SEQ ID NO: 413641 - DNA, 300 bp, Oryza sativa
agcaatgtaaatactcgcattccacaacagccgaagggcaataatcaggctcagaacaagtttaaaccgaacagaaaatagagagttttaaacgacacagtgcacacagcgggcatatgataataacggtcaatgcaacgagtgccatggccgtgcacaaaacttaacgaattagtaaaagctagatatcttaaatgcagacacgcaaaccaccacttgaacgaggatcatttcttcttggcggcagccttggtcaccttggcaccggttgggtccttcttctccacgttcttgatgacg

SEQ ID NO: 413642 - DNA, 304 bp, Oryza sativa
gcggtactagaaaagttcaagaatctcaaatcaatttatgaaatcaaactacacacataatgttcttgactccccacgtacttacggaataattatattggcatacacaaaaaccggagctaatcagagtagatacacccatagacaagccatcagacccaacaatttttttgtccatgaaacagccagctaatgctaatagacaaggggttctcatgaaagatacagctaggccacatctagaagcacttcctgtggacgatagctgggccagattcttcatactcagcccttgagatccaca

SEQ ID NO: 413643 - DNA, 270 bp, Oryza sativa
aaccaaacacaaagcccatatatgcaaccagcataacaaaattacaactgcactggacggcttatattcttcacaagcaaaaaagtagactcaggtccatatcatcagcatcgttacaacttacaagtaggtagattggaaaacaaaatgcaacttattatcccaactagcattaacagagggggggggtcctgatgaacaccgtccacgttttattctcagcatagacaaagcataccggtatttccggcttgggggccatggaatacc

SEQ ID NO: 413644 - DNA, 305 bp, Oryza sativa
ggtggtaccctcatcaggcatctgattaaatttgaataaaccgaacatatgtgtccaaaatcacaagtgagaaccacaggtagcaataggtattacagtctttgaatagaagaaaatgataacagataggccggttgaaaactttgtccacgctaatgaagaaacagcaacaaaaagagagaaacaagcaggaggacggcgataacagctcctcttggcttagcattcttgggtccgaagaattagaagcatttcctgtgcacaatggatgggccagactcatcgtacttagccttggcaatcca

SEQ ID NO: 413645 - DNA, 231 bp, Oryza sativa
atatcatgcgatttcttgatggcatgtacgaccaacgtgaagaaatgcactcgggtcgccatactttccaagccccctaaaccatggaagcacaatttgcacaatgctgtagccgttcatggctcgaacaccatgtattcggccttcctcttgatcgattcgaagaggacagactacaggtagcgctcaccgaagctcgggaagaccacaactacgagctgttcttttgtt

SEQ ID NO: 413646 - DNA, 308 bp, Oryza sativa
gatacggatgtacatagaaggacttctacggtacaatttattagcgggcattgcttaattaccacacaacggcaaatcaattattcactgaagcatatatatagagaagctaccaccatgctacattatacatattgggtccgattctcaggtctccactctctccgccagcttgatacccgatgactccaagatctccaacgctggaatgtaaatttcaggttccagaggcctgatcactcctttcttttggatcttgttctggagcaacagcagagctcctattgctgctggtattccgaccgtga

SEQ ID NO: 413647 - DNA, 283 bp, Oryza sativa
cattccgatagatagcaacaagcagttcaaacaccataaccaaagcgaactcaattcatggtaacatcacggacgaagaacacctaacactggatggatggatagagggcttctcgactcgagagagccactggacacgataacgactcgactcgatgataagatgattctgacacggatagctaaggataactggccacgatgggccccaccaatcagttcctccagttcccgccggagtcgccgccgaagccgccgccacggctgccaccgtagccgccgc

SEQ ID NO: 413648 - DNA, 453 bp, Oryza sativa
gtatcttttgcttggagagagacaacaatggcggctcaggctcttctttctgggaggcagctgctggggaggccattgcaatcttcagtctccaggtcttcttcctccaggaaggcacccttcatggtcagggcagaggccactccccctgccaagcaaggtgctgacaggcagctgcggatcgcatccaagcagtccctgagctacctggatggcacgctttcgggagacttcaggttcgacccgctggggctatcggacccggaggggaccggtgggttcatcgagccacggtggctggcctacagcgaggtgttcaacggccggacagcgatgatgggcgtcgtcggcatggacgaccccgagcttcttggcaagctgggccctcgtcccgccgaacggagatcccgtggctccagacggcgtgatcccccccgcgggcacctacaccta

SEQ ID NO: 413649 - DNA, 457 bp, Oryza sativa
gtggcatatgacgcgatgcacatcatcctgcagcaatgcgtgcggtcaaagacggtgcggtgcgtcatccacacggcctccgtcaccgccgcgtcaccgctcagggaggacggcgaggggtacaaggacttcatcaacgagtcatgctggactcctcttgatctctccaaccgctatagcaacgtcatgatggatgcttatgtttcatccaagacactcacagagaagctactgctgaggtacaacgagtccgagagcagggcgttcgaggtggtcaccctgacatgcgcgctcatcggcggcgacaccgacaccacgcagctctaccactcgctaagcatcccgctgattcgtgtcgccgctcaccggccaggagctctaccacgggcggcttcaagtccctgcaagcgctgctgggtttctgtgccactggcgcacatagacgacatatgcgagg

SEQ ID NO: 413650 - DNA, 240 bp, Oryza sativa
gtagtaacagggacttttattgcaatattagtagttaatacaccttgcaatcattcttacttagtactaatacacattgaaatatgccataggtaaaatctttaatagctatatattcaagccatattattcgtgtgagatccttaatatccaaagccatattatcatgtggataaattaacattgtccaatatgctatattccaccaccatatttattcccccattcttttttgattaa

SEQ ID NO: 413651 - DNA, 441 bp, Oryza sativa
  unsure (1)..(441): unsure at all n locations
ctggagncnagaagctcgcgagtgtttagcagcaagttgtcgctggcactttgtactatttcacaattgaggtgaaggaaggggatgccaagaagctctatgaagctaaggtctgggagaaaccatggatggacttcaaggagctccaggagttcaagcctgtcgatgccagtgcaaatgcctaaggcccatctcgtatcctatgtgtatcaagttatcaagaagatggggaataatatgctgtggatatagctattggacatgttaattatccacatgataatatggctcggatataaggatctcacacaataatatggcttggatatatagctattaaagattttacctatggcatattcaaatgtgtatttagactaagtaagaatgattgcaaggtgtattaactacaaatattgcaataaaagttcctggtactac

SEQ ID NO: 413652 - DNA, 360 bp, Oryza sativa
gttgagatggggatcgactgattgatccggattgggaagaataagttgcaggggagcatgggcagcaagccgtacccgacggtgagcgatgagtccctggcggccgcgggcaaggcgaagcgcaagctccgcggcctcatcgccgagaagaactgcgccccactcatgctccgcctcgcgtggcactctgctggcaccttcgatgtgtcgtcgaggaccggcgggcccttcggcaccatgaagaaccccggcgagcagtcccacgccgacaacgccggcctcgacatcgccgtcaggcttctcgaccccatcaaggaccaacttcccatcctctcctacgccgacttctaccagcttgct

SEQ ID NO: 413653 - DNA, 458 bp, Oryza sativa
tccagagtccacccgtttgagtacttgggttgtatccattaaggggccatgaggacgtgcttacagtaaagttcagatcaactgcgcattccatacggtgcagttctagagctgtagctgtatctcaggctaatcagatacataggtctgatgctgcaacactggagagagaatgcacaatcctgaccagtcatatagttccaccaatttcaaggtatggaccacttgcactgggtcctagatggattgcatattctgggaatccagtcccagttccggatacaggccgtgttacccctcagcttcttaatctatctcccctagttccacaacctggttcaaatggcattgttgtggcatactatgcaaaagaatcaagcaagcaactggcttctggcattataacacttggtgatgttggatataagaagttgtccaagtattgttcagacttaatt

SEQ ID NO: 413654 - DNA, 172 bp, Oryza sativa
aacgacaatgcatcaatccatggtcctcacatatatatcggcagtggtagagcttgatctgctgatcagttacacgaatcagagcacaaacgtgcttgttatttatataatataatatatactctatatatcatactatatgtatatactatactatatactatactatact

SEQ ID NO: 413655 - DNA, 473 bp, Oryza sativa
  unsure (1)..(473): unsure at all n locations
tcngataagttgcgtacatgcagaaaagggaagttgagctgcagaatgacaacatgtacctgaggagcaaggttgctgagaatgagaggggacagcagccactgaacatgatgggggcagcatcaacaagtgaatacgatcatatggttaataacccatatgattccaggaactttcttcaagtgaacatcatgcagcagcctcagcattacgcccatcagctgcagccaactacccttcaactcgggcagcagccggccttcaattagttttggtgtagacaccgtacgtacacacgtacgttagatgaaatctgaaggcgtcgatacccgcggctacgtacagcgtgatcaacctgaagaaatcgatgcagtaattctatgtgttcgtcagatcatcataaccagtattgtcataggcgttgtgaaaaacaaatgtgtcagcatgcattgcagctagcgtttgtggctgct

SEQ ID NO: 413656 - DNA, 428 bp, Oryza sativa
tcggctgatcagcagcagcaacgacaacaagatgagcagctggttgaagaagagccagctgccggcgtcggagtcggtgccaaaggaggaggcgatcgggggatacatattcgtgtgcaacaacgagacgatggaggagaatctcaagaggcagctgttcggcctgccatccaggtacagggactcggtgagggccatcaggcccggcctcccgctcttcctctacaactactccacccaccagcttcacggcatcttcgaggccaccagcttcggcggatccaacatcgatcccgccgcttgggaggacagcaagtgccccggcggcgagtccaggttcccagcgcaggttcgggtggccacgcgcaagatctgtgagccgctggaggaggacgccttagggcccgtgctgcaccactacgacggcc

SEQ ID NO: 413657 - DNA, 477 bp, Oryza sativa
  unsure (1)..(477): unsure at all n locations
tcggtaggatgtcgtacctgctgccgcacctgcactccgggtggtcggtagaccaggccatcctcgccgaggaggagcgcctcgtcatcatccgcttcggccacgactgggacgagacctgcatgcagatggatgaggtgttggcagcagtggctgagaccataaagaacttcgcggtcatctacctggttgacatcactgaggttcctgacttcaacaccatgtacgagctgtatgatccatcaacagtcatgttctttttccgaaacaagcacatcatgattgatcttgggactggaaacaacaacaaaatcaactgggccctgaaggacaagcaggagttcatcgacattgtggagactgtctcaggggtgctcggaaggggcggngtctgggtgatcgctccaaaggattactccacgaaataccgttattgaggcatttgtgttttgcctgttgcagtttctagcctactct

SEQ ID NO: 413658 - DNA, 465 bp, Oryza sativa
attcactcactcagcttaagcgagcgagcgagtgaacgagtgagagagacagagatggcgagtgttgcctccttcccggagatcaacatggagaacctggagaccgaggagaggggcgcaccaatggaggtcatccgcgacgcctgcgagaactggggcttcttcgagatgctgaaccatggcatcgcgcacgagctgatggacgaggtggagcggctgagcaaggcgcactacgccaactgccgggaggagaagttcaaggagttcgcgcggccgatgctggaggccggcgagaagggccccgacgtgaagggcatcaactgggagagcaccttctttgtccgccaccgccccgtcttcaaccttggcgacctacccgacgtcgacgaccactacaggcaggtgatgaagcaatttgcgtccgagatcgagaagcttttggagagggtgctggacctgctgtgc

SEQ ID NO: 413659 - DNA, 443 bp, Oryza sativa
aataaagtataagcaacacaagggattaactcatcactcacttagctaattaaatcttcgaccatgtcggacaagtgcggcaactgcgactgtgctgacaagagccagtgcgtgaagaaaggtaccagctatggcgtcgtcatagttgaagccgagaagagccacttcgaggaggtcgccgccggcgaggagaacggcggctgcaagtgcggcaccagctgctcctgcaccgactgcaagtgcggcaagtgaagtcacgaagcaaccgaacactcgccgccggcgagtcacctaccttaattagtccacaataaaaaccacccatatgagtgtggtttgtgtgtgtgctgattattgctgaattaaacccgtgtgttatcgattaattaagcaggtgggcgcttcggaactatgcgtgtatcaacgtatgaatttgtgggatg

SEQ ID NO: 413660 - DNA, 280 bp, Oryza sativa
gacacactggatatatagtcaataaactttaccgtaaattatgaaatgtacaggcactgcactgtaccatacgtagtttttgcgcagcatataaccataggcttgttacgtacggtccttttataccacatactagttccttgaacgcttaataataattaaaagtgtcgtgcatcatattcacaaaagttttcaacactgctagcatcacaaaccacggaatttacttagtctcaactcttgtatggagaaagattcaatcctaactggtgctgacttg

SEQ ID NO: 413661 - DNA, 325 bp, Oryza sativa
ttgaataattcgcttcgcgagattggttgattcatctcgcgattgatcgagctcgagcggcggtgaggtgaggtggaggaggaggaggaggaggagatcgggatggggagagggagggaggagctgaagaggatcgagaacaagaacaacaggctggtgacgttcgagaagcggaggaatggtctgcacaagaaggcgaacgagttttacgtgctatgcgacgccgaagtctgcctaatcatctacagcaactagtggtaaagctatacgagattttagatacggccaaagcatggatccagtaactttggaaagattccaaaaa

SEQ ID NO: 413662 - DNA, 333 bp, Oryza sativa
gatcaaagcaaacgagacgagctttcttcttgcgatcaaaaacacagatgggcaaccacacagttaacacaaactagatagttccacacaaaactaacgatgataacgatcggatgatgatgatggtagctcgattagatagatagataacttggccatgagggccccaccggtcagttcctccagttcccgtcggagttgccgccgccgcggttgtcgtagccgccgccgtagccgccgacaccacggtcgtcaccgtagccaccggcaccgctgtagcccgcttcacggcgctggccgtagccaccgccgacgccatcaccaccgtagccg

SEQ ID NO: 413663 - DNA, 441 bp, Oryza sativa
atcggatgcttctcctccccctcccggttcggttcggttcggttcgggtccggttcgatttcggtttttccttcggttcgggggttggtgggaaagcatggcggcgccggatgttgagtaccgctgcttcgtcggcggcctcgcctgggccaccgacgaccgctccctcgaagccgccttctccacctacggcgagatcctcgagtccaagatcatcaacgatcgggagacggggaggtcgcgcgggttcgggttcgtgacgttctcgagcgagcaggccatgcgcgacgccatcgaggggatgaacggcaaggagctcgacggccgcaacatcaccgtcaacgaggcccagtcgcgccgctccggaggcggaggcggcggtggctacggccagcgcggcggaggcggaggctacggtggcggcggtactgtggtggtggc

SEQ ID NO: 413664 - DNA, 455 bp, Oryza sativa
  unsure (1)..(455): unsure at all n locations
tctactactgaaggattcaagcaaaaatatcagaatatgcgccttccatgtttttaaggtttttgttgccaatccgaacaagcctcgcagtatcatcgaggctttgatcgaaaatcgcagagaactgctgaagctactccaaaatcttcctacaagtaaaggcgaagatgaacttgatgaggagaggaatctaatcattcaggggattcagaagctggcctgctcatcagcatagacacttgaattaatggaatagctggtttagggaaactgcctttactgaaaatacatngacagggtgtgcctataagaattgcgtctttttggagtttgaaatgaaatagttgcaaatagatgcacaatacaaaatgagtgcaacgaattttgttctttagggacagtactaatgttgatatgtcttttttctctgctatgtgtttgcgtactgcatattc

SEQ ID NO: 413665 - DNA, 467 bp, Oryza sativa
tcgttttgtccaagaaggacactaaagcagtagtctagtctccttgccaagcaagaaccaaaaagcaattaagatcgaactcgagcaaacatgtcgtcgactaacaacagttcaggcgagccgccgccggcggtgcgcgtgctgggcggttgggcgagccccttcacgaaccgcgtggtggtggcgctgaagctgaagggcgtggagcacgagatgttgcaggagacggtggggaagaagagcgagctgctgctccggtccaacccggtgcacaagaagttccccgtgctgctccaccacagcaagcccctccccgagtctctcgtcatcgtcgagtacatcgacgaggtctggccggcctccaatggcggcgccccggccattcttcctcgcgacccccacggccgcgccgtcgagcggttctgggcacggtacgtcgatgacaagattctaccagggcttcgggt

SEQ ID NO: 413666 - DNA, 458 bp, Oryza sativa
  unsure (1)..(458): unsure at all n locations
ttcgcccgcataagttaccagccaacaaaancaaacaaaaaggaaaaattttccccagcggggaaagccgtaaaaccccagcgcggcggcgangncgaacacgagggcgcccaccgacaagaccgccggcggagctccggcggggcggaccgcgacggagctgaacgcgaaggacgngccgcggacggcggagaactcccgcgcgctctgcaccggcgagaagggcgtgggcaagagcggcaagccgctgcactacaaggggagcaccttccaccgcgtgatcccggagttcatgtgccagggcggcgacttcacccgcggcaacggcacgggaggggagtcgatctacggcgagaagttcgccgaccaggtgttcaaggtcaagcacgacagccccggcatcctgtccatggcgaacgccgggcccaacactaacgggtgccagttcttcatctgca

SEQ ID NO: 413667 - DNA, 459 bp, Oryza sativa
ataagatcatgaagctatcagaaatcagaaacgctagctagcagtttgaacaaacaatgaggtcgtccccgatcatcttcctgctcctggccgccgccgccgccatcgccgctccgtggcaggttgcgcacgccgcgggcaagtgcggcaagacgccggcggagaaggtggcgctgaagctggcgccgtgcgcgaaggcggcgcaggaccccggggcccggccgccggccgcgtgctgcgcggccgtgcgcgacatcggcacgcaccagagccacgcgtgcctgtgcgccgtgctgctgtccagcaccgtgaggcgctccggcgtcaagccggaggtggccatcaccatccccaagcgctgcaaactcgccaaccgccccgtcggctacaagtgcggcgcttacacgctgcccagcctgcaaggctgatgacgacgtacgacggcccttgttaggctct

SEQ ID NO: 413668 - DNA, 471 bp, Oryza sativa
  unsure (1)..(471): unsure at all n locations
ttcgcccgcttaagctcacagaccagnncnaccacgnacaacagcagaagtgagttagggagaagaagacaagggacgaggaggagccgagcnagccagccacggcgaggcgcgcacgcagccacgccgacgccacgcgccagcaaggggcgccggcagaggcgagcgcccccaccgacgaagcggcggccgccggccgggggcccggccacggcgcccgccacaagagcaagcagggccgcgagacacacgagaagccgccggagccggagccgaagccaaagccaaagccncancccaaacccacgccaaaaccngagcccaagccagagccggagcccaaaccagaacccgagcccgagcccaaaccggaaccaaagccagaaccaaaacccgagcccaagccngaacccaaaccaaacccagagccaaaaccggagcccaagccagagccaaaaaccgagccggagc

SEQ ID NO: 413669 - DNA, 473 bp, Oryza sativa
  unsure (1)..(473): unsure at all n locations
tatacggtaaatgaaaggagcctgatgttgaaaagcaaaaggttaccatttttagaacacgtcacatcggcattagttaaccgttatcatctcaattttacaccaaaagatgtttcttccctctggttcctttgcaagcaggaagcatctttaatgaatataaccaatcaagcttgtcaactttttaatgaagctgaggtttattttctagagtggacagatgatctggagggctttgtgctaaaaggttatggtgagtcaataaactatcggatgggactgccattgctcaaggacgttgtccagtcaatggaagaagcaatcgttgctaaagaagaaaaccaccctgatggtacatatgagaaggcaaggctccgatttgcacatgctgaaactgntgtccctttctcatgtcttcttgggctttttcttgaaggatcagattttgcgaagatacaacgggaggaatcatt

SEQ ID NO: 413670 - DNA, 365 bp, Oryza sativa
acgctgcgcgtgctgcgcaccgacaacggcggtgaattcacggcagctgaattcgcgtcgtactgcgctgatgagggcattcagcgccactacaccgcgccgtacagcccacagcagaacggcgtcgtcgagcggcgcaaccagacggttgtggggatggctcgggccctcctcaagcagagggggatgccggccatcttctggggggaggcggaggtgacggccgtctacatcctcaaccggctcgcctaccaaggcccttttatggctaggacacctttccgaggctttggcatgggccgcaagccggcggtttcccacctgtggatttttaggctgccttcgtgttcgccaaggaagcttgg

SEQ ID NO: 413671 - DNA, 455 bp, Oryza sativa
tcggttagattgcctgccagctaacgaggcactcgccgaggaaaaagagaatcccgctcgtgctcttgctggtgtcgatgtcgccggcgtggtcgctgtcgctgtacccgacgaagtgtgccttgccaggacacctcgggtagtagagaccgtggtcgagagtccccgcaacgtagcggatgatcctcttcacagcctgctggtgctccgtcgtcggtcgctgcatgaaccgactgacgtagccgacggagaaggccaagcccggccgtgtgtgggtgaggtagcgaaggctccccacaagacgtcggtactgtgtagcatccacctcctccgctgtgctgtcgcggctcagctttagtctctcctccatcggagtgagagctgggttgcaatcggtgagcccagccagctcaaccacgcgcttggcgtaggcggtctgtcgaagcgtgatcccg

SEQ ID NO: 413672 - DNA, 371 bp, Oryza sativa
ggcccggaaaccccgggccgatccactcgcccggaataggttccgaaccccaccgcccgggcgccaccgaagagcgaaaataaggagaacaacccgagaccccccggcgaagaacacgccagagaaggaaggcgcgagagcccaagaaaaggcaacagcccgagaaggaaggccaagaggaccaccccgccgggaatagaaaaacaaccccccaaagcaaaaccccgccaaaaaacgagaagaacccactgacaccccccacaccaaaacccgacagaccccgcaaaccaaaatgagcccaaccccactggaaggcacggccccagccccgagacaaaacaaccacacaaaccccaaccaacaacccaagc

SEQ ID NO: 413673 - DNA, 455 bp, Oryza sativa
cctcgcttccgcccacgcgtccggggaagcagagtagccgttagctagcgagagacgcagataagcgagcagggcggggccatggccatggctcgctgttccttgctaccgatcttggccgccgtcctcttggcggcgtcgctgtcgctgccaccgcgcgctgccgcgtacgccgccatggtggacagcctcctccccgcgtcagcgacggctctctccttcgaggaaggctacacccagctgttcggcgactccaacctcatgctccacggcgacgggaagagagtgcacatctccctcgacgagcggacaggcgccgggttcgcctcgcagggcgcgtaccaccacgggttcttcagcgccagcatcaagcttcccgccgaccacactgccggcgtcgtcgtcgctttctacatgtcgaacggggacgtgttcgagaggacgcacgacgagct

SEQ ID NO: 413674 - DNA, 446 bp, Oryza sativa
gtgaagtatgcaacgaccactgatgttggcgagctcaccgttgagtagcggaacctgctttctgtggcttacaagaacgtgattggtgctcggagggcatcgcggaggatcatctcttctattgagcagaaggaggagagccgtgggaatgaggcatatgttgcatcaattaaggagtaccgtagcaggattgaaactgagctcagcaagatctgggatggtatccttaagcttctggattcccaccttgtcccatctgccactgctgcagagtccaaggtgttctacctgaaaatgaagggtgactaccacaggtaccttgctgagtttaagtcaggagctgagaggaaggaagcagctgagaacactcttgtggcatacaagtctgcccaggatattgcactcgctgacctggctacaactcacccgataaggcttggacttgc

SEQ ID NO: 413675 - DNA, 472 bp, Oryza sativa
  unsure (1)..(472): unsure at all n locations
tgcgccgcttattttctttatcccgnnnaaaatacgncgccattcagataaacatggatgactggaacaagcatttctgatatatgcatagcaccgtcacgtaactgggctaattattgcaactaagcatgaggatccactcgagggaaaggctgctccatatgacaagtgaacttttttcgaacagcaaaacaaaaaaagatgggcaaaagtttcatcattatccctcaagggcagaagcgccagagataatctcaatgagctctgaagcgatagatgcttgacgtgtcctgttgtatgtgagggtgagatcgatcaagcatttcaccagggtttctgctggagctgtccatggcagacatacgtgctccaagctcactgcatgcattctctagagcagcattatacataacacaagaaaactggaacttcggtagattctgaagaatttctgatttagtttcacctcctt

SEQ ID NO: 413676 - DNA, 416 bp, Oryza sativa
  unsure (1)..(416): unsure at all n locations
gttgctttcccgcagatagnacaccggctatctatccatctatcttctcagctttgcgtcctcccgcgaattcaccgcagcaatggcgtccctcgtcgccgtccagccggtcgccgcgaagggcctcgccggcagctccatctccggcaggaagctcgccgtcaggccgtcgccccgggcgctctgccgcaccacccgcaggccgcgcgccgccgtggtggccaagtacggcgagaagagcgtctacttcgacctcgaggacatcggcaacaccaccgggcagtgggacctgtacggctccgacgcgccgtcgccgtacaaccctctccagagcaagttcttcgagacgttcgcggggcccttcaccaagagggggctcctgctcaagttcctgctgctcggcggcggatcgctgg

SEQ ID NO: 413677 - DNA, 456 bp, Oryza sativa
tttggtcctccacgctatcatggccatcaagatggcggtcaattgacagaaaaagttaggacgcttccttacagtgtcatcctttttgatgaggtggagaaggcagatccctcggtgttcaacgtgttccttcagctcctcgatgatggcatgttgactgatggcaaaggaaggacagtagatttcaagaacaccatcatcattatgacctcaaatctgggagctgagcacctaactgaaggagtgactggtgaaagaacaatggaagctgcacgggaccttgttatgaaacaagttcagaagtatttcaggcctgaacttctcaacaggctgagtgagattgtgatatttgagccgctttcgcacgacaatcttaaggaggtcgtcaaaattcagatgaagagtgtcgttaccagtgtggctcacaagggcgtatctctacttgcaagtgatgat

SEQ ID NO: 413678 - DNA, 460 bp, Oryza sativa
tcggtacgtccgttgtgtgactcatcagatcgagcagagccatacatggccatggagaagagccgggtcctcatcgtcggcggcaccggctacatcggccggcggatcgtggcggcgagcttggcggagggccaccccaccttcgtcctgctccggccggagatcggcctcgacatcgacaagctccagatactgctggccttcaaggcgcaaggcgcgcggctcctcgaggcgtcgctcgacgaccacgatggcctcgtcgccgcggtccggcaggtggacgtcgtcgtctccgccatgtccggcgtccacctccgcagccacaacctcatgctccagctcaagcttgtcgaggccatcaaagaagctggaaatgtcaagcgtttcctgccgtcagaatttggcatggatccatcaaggatgggggaatgctcttgaacctgggaggggtacatttgat

SEQ ID NO: 413679 - DNA, 460 bp, Oryza sativa
tcggtgttatggctcaaacttgcttgccacctggcttttgttttcatccaacagatgttgaacttgcttcatactatttgaaaaggaagattatgggaaagaagcctcttattcaagctatatcagatgttgaactgtataaatttgctccctgggatcttcctgctcaatcctgtctccagagcagagatcttgaatggttcttcttttgcccacgagacaagaaatatcctaatgggtctaggacaaatcgttccacaccaaatggttactggaaaacaagtgggaaagatagaacgattgagcttaactctcgcattgttgggtcaaagaaaacactgatttttcatgaaggcaaagcacctaaaggcaacaggactgattgggtgatgtacgaatacaaaatggaagacaatcaattggtctctgctggcttctcaaggatgattttgtcctctgc

SEQ ID NO: 413680 - DNA, 453 bp, Oryza sativa
  unsure (1)..(453): unsure at all n locations
gatanagtcacattccctcctctctcctccttgcagggcctgtctgtttctcaccatagtcaggaaggaaagaaggaaggaagaggaaaaaaaaggatcatcaaccatgtcgaattcggcgtcgggaatggccgtgtgtgacgaatgcaaactcaagttcctggaacttaaggcgaaaaggagcttccgcttcatcgtgttcaagatcaatgagaaggtccagcaggtggtggtggacaggttggggcagccgggtgagagctatgacgacttcactgcctgcttaccagcagatgagtgccgctacgcggtatttgattttgactttgtcactgatgaaaactgccagaagagcaagatattcttcatctcctgggctcctgatacatcaagggtgaggagcaagatgctgtatgctagctcaaggaacggctcaagagggagccggacggc

SEQ ID NO: 413681 - DNA, 468 bp, Oryza sativa
  unsure (1)..(468): unsure at all n locations
ttccacttcgtccgcttcnctttctgaaacacttcagcagaggagcaacaatggcggcggtagggncgctgggacttctccaggcgccatcgtccttcacggcggcagcggcgagccggccggcttctcggcgagcaccgcgagctctgttcgccgtgagagcctcggctgccgccgatgccaccaaggacgccgtcctcaaggccttccgcgagaagagagctctcaagatcatttcagggcttcagaatttcgacaggagtagtgttgcctctgttgtctcggctgcagataagggaggtgccacccatgttgatatagcgtgtgaccaagacttagtaaagcttgctctggagcttacttcccttccgatttgtgtcttctccgtagatccttcagcgttccgttctgcggtagaagctggagcaaagatgattgagattggaaactatgattctttttatgata

SEQ ID NO: 413682 - DNA, 430 bp, Oryza sativa
  unsure (1)..(430): unsure at all n locations
tcggatactcaatatgactgcgcttgaatggtnnntgggcagactcaactgatgatggaacaagtggaggaacttcgcagaaaggtacattatcaatccaaagtttctcaagcatacatacagtatcagcattgccatgggcgggtgacttcaggagtgctagctactagtgataatctaaattaaaccacgaaatgacttggctagctttgacaatgcatctatattgccagcaaggctgctagggtataccgcatgcaagttaattagggtagatcgtgtagcctttgactgtataactaaagaaatggtagcttcgttcttgcgagagatttctttcatgagagttgttacatattatactatcttcaatatatttttcttgtgccacaggagcgtcagctgggtgaaattaataggcaactcaagc

SEQ ID NO: 413683 - DNA, 418 bp, Oryza sativa
tcgcataattcaagctagcccatcagatccagagaatggcccttttgttgtacttggaaacaaaattgacgccgatggtggtaatagccggactgtttctgagaagaaagctaaagcttggcgcgcttctaagggaaacatcccttattttgagacatctgctaaagaaggcttcaacgtggaggctgcttttgagcgcatagcaaggaatgctatcaagaatgaaccggaagaggagatatatcttcctgatacaattgatgttggaggtgctggaaggcaacagcgctcgtcaggctgtgaatgctagaagatatggcaccagcgatatcgccagttgattctaccggatcggggtagatcatcatcctcacctcttccactgtgtgatatctttagtctgaaagcctctatctat

SEQ ID NO: 413684 - DNA, 454 bp, Oryza sativa
atcgaatgctcctagcgccgccgccgccgccgccatgaagttcaacatcgccaacccgaccaccgggtgccagaagaagctcgagatcgatgacgaccagaagctccgggcattttatgacaagaggatctcccaggaagtcagtggtgatgctcttggcgaagaattcaagggctatgtattcaagatcatgggaggctgtgacaagcaaggtttccccatgaagcagggtgtgcttacttctggacgtgtccgccttctcctccacaggggtaccccctgcttccgtggatatggcaggcgtgatggtgagcgcagaaggaagtcagtccgtggttgcattgtcagccaagatctctctgttatcaacttggtgattgtaaagaagggtgataatgaccttcctggcttgactgacactgagaagcccaggatgaggggacccaagagggca

SEQ ID NO: 413685 - DNA, 431 bp, Oryza sativa
tcgcatgtcgctcgccgccgccgccgccgccgccatgggtgcgtacaagtacgtgtcggagctatggaggaggaagcagtcggacgtgatgaggttcgtgcagcgcgtgcggtgctgggagtacaggcagcagccggccatcgtccgcctcacccgccccacccgccccgacaaggcccgccgcctcggctacaaggccaagcagggttatgtggtttaccgtgtccgtgtgaggcgtggtggcaggaagaggccagtgcccaagggtattgtctacggcaagcccaagcaccagggtatcacccagctcaagttccagaggaacaagagggtcagttgctgaggagagagctgggcgcaagttgggcggactcagggtgctcaactcctactgggtgaacgaggacttcactacaagtactttgagatca

SEQ ID NO: 413686 - DNA, 351 bp, Oryza sativa
tgtctgatttaaccatttccaaggtgttgctgtcaatctgttccctgctgactgatccgaaccctgatgatcctctggtccctgagatcgcccacatgtacaagacagataggcacaagtacgagaacacagcaaggacctggactcagaggtacgccatgtagcacctcagatatcgatggacatgtcgatgttgtaacaacattatcaacgggtgtgtctccctctcgccttgtgtggtgtaaggatcaaaaccggctttgcagtgcactcttggtgttgctccattgtgtcactcactcattgcagtgatttcgaatagtatcaaactggtggtttttttcggtccac

SEQ ID NO: 413687 - DNA, 344 bp, Oryza sativa
ctgttgcacggtctccgcgcacgccagcaacgcgtgcaccagccggatcccagcctcctgcgtgtcaaccaccacaaccggcacggcgggcgcattcgccgtcgcggccccttgcatcgccggcggagcagcctccaccacagacccccgcgaggccccaccgtccagagaggaagacgacgatgaggacgacgacgtgctgccgtcgccagtgcgcatccgcttggtgtccctcgccgagtcagcagccgacgggtcagccgtcgccaccaccggtaaggagatcggcctgagggcgtaggtgctactcgacgagtttgtagcggcggggagtttcaaagaag

SEQ ID NO: 413688 - DNA, 463 bp, Oryza sativa
ttccacttcgtccgggtaaggtagatcatgaagcgcgagtaccaagaagccggcgggagctgcggcggcgggagcagcgccgatatggggtcgtgcaaggacaaggtgatggcgggggcggcgggggaggaggaggacgtcgacgagctgctggcggcgctcgggtacaaggtgcggtcgtccgacatggccgacgtcgcgcagaagctggagcagctggagatggccatggggatgggcggcgtgagcgcccccggcgccgcggatgacggtttcgtgtcgcacctggccacggacaccgtgcactacaaccccttggacctcttctcctgggtcgagagcatgctttccgagcttaacgcgccgttgccccctatcccgccagcgccgccggctgcccgccatgctttcaccttgtccactgtcaccggcggcggtggtaggcgcttttttgaacttcccg

SEQ ID NO: 413689 - DNA, 432 bp, Oryza sativa
  unsure (1)..(432): unsure at all n locations
cattagcttacagntcagntctaccacgtacaacagcagaagtgagagagggagaacaagacttggcacgaggaggagcttagctagccagccatggcgaggcgctctccttgcctcgccgtcgccatgctcctgcttggggcgttggcggtggcgagcgccttcattgatgaagcggcggctgctggccgggggctcggccatggcgcccgcttcatgagcaagcagggtcgtgtgacatacgagaagctgccggagccggagccgaagccaaagccaaagcctcatcctaaacccacgccaaaacctgagcccaagccagagccggagcccaaaccagtacctgagcctgagcctaaaccggaacccaagcccgaaccaaaacctgagcctaagcctgaaccttaacccatcccagagcccaaaccggag

SEQ ID NO: 413690 - DNA, 391 bp, Oryza sativa
aatgcagtactctcagctctcacagctcactgcatcaatggccgtttcaccatggcgctctcctccccggcgatggcccgcgcggcgccgtcgacctcctccgcgctcttcggcgaggcgcggatcaccatgcgcaagaccgccgcgaagcccaagccggcggcgtcgtcggggagcccgtggtacggcgccgaccgcgtcctctacctcggcccgctctccggcgagccgccgagctacctcaccggcgagttcccgggcgactacgggtgggacaccgcggggctctccgccgacccggagacgttcgccaagaaccgggagctggagggtgatccactcccggtgggcgatgctgggcgcgctcggctgcgtctttccggagctcctc

SEQ ID NO: 413691 - DNA, 458 bp, Oryza sativa
ttcactaatacccccaccatggatcaccgcctcctcctcctcggttctcctcctcctctccccggcggcggccgccgcctcagtccccggcgaggaggagccgctgatccggcaggtggtcggcggcggcgacgacaacgagctggagctgaacgcggagcgccacttcgccagcttcgtccagaggttcgggaagtgctaccgtgacgccgacgagcacgcgtaccggctctccgggttcaaggccaacctccgccgcgcgcgccgccaccagctgctcgacccctccgcggagcacggcgtcaccaagttctccgacctcaccccggccgagttccgccgggcctacctcggcctgcgcacggcgcgccgcgccttgctgcgggggctcggacgggtccgcccacgaggcgcccgtactctacaccgacggcctccccgacgacctcgactggaga

SEQ ID NO: 413692 - DNA, 385 bp, Oryza sativa
  unsure (1)..(385): unsure at all n locations
tcgcatgctctcccttatnnnngncggcatgcacgcaagtacaagtttatgttaagcttcctttttaacaatattttgctttagtgatattcagtgcagtgcaaaaatcgtatatactgcatgtttccttggagagggtatatgctgctttatttcctataggggtatatagtgatttttttaaatacacaaacaatggaaaggtttgttttccattttcagttaatacaaagctatacattatactaactatttaagagaatatttctattatcatgtgatatattataccatgtgcccaaatatccaaatttgggtgaatatattagcttgctttagtaaggcccataaagatgaacagagctttaggggggatgaatttgat

SEQ ID NO: 413693 - DNA, 459 bp, Oryza sativa
atcgactcctcgccgatggctccgtttctgcaacccagagttgagtgaaatagtaacaaaatggctaaaaacagatcagtggacaagcaaccttgatcttcttaccggacttcggaaatttgcagatgatgaaaagcttcatgctgagtgggcatcagctaagttggctagcaaaaaacgcctagccaagcatgtgttggatgtgacaggtgttacaatcgacccaaatagcctttttgatatacaaattaaacgcattcatgagtacaagagacagctgctaaacattttgggagctgtttacagatacaagaagttaaagggaatgagtgcagaggagagacaaaaagttacgccacgcactgtcatgatagggggaaaagcattcgcgacttacaccaatgccaaaagaaatagaaaattggtaaatgatgttggtgctggggtgaacaatgatcc

SEQ ID NO: 413694 - DNA, 453 bp, Oryza sativa
  unsure (1)..(453): unsure at all n locations
atcgcatacatccgcaagcacgtcaccgtcgccatggcgtactccatcacgcccgaccggctgttcaggcggntcccctgcctcgagtcgctcaagctcaaggccaagccccgggcggccatgttcaacctcatccccgaggactggggcggctccgcctcgccgtggatccgccagctctcggcctcgttccacttcctcaaggcgctccacctccgcaggatgatcgtgtccgacgacgacctcgacgtcctcgtccgcgccaaggcgcacatgctctcctcgttcaagcttgaccgctgctctggcttctcaacatcctccctcgccctcgtcgcccgcacctgcaagaaacttgaaacgttattcctggaggatagcataattgctgagaaagaaaatgacgaatggattcgggagcttgctaccaacaatagtgtccttgagacactg

SEQ ID NO: 413695 - DNA, 450 bp, Oryza sativa
ttcgatagtcctctccacccactccctccttgagcacaccgatgtcgctgtcctgctcgacaatgaggccatctatgacatctgccgccgctccctcgacattgagcgcccaacctacaccaacctcaacaggcttgtgtcccaggtcatctcctcactgactgcctccctgaggttcgatggtgctctgaatgtggatgtcaacgagttccagaccaacctggtgccctacccgaggatccacttcatgctttcctcctacgccccggtgatctcggccgagaaggcctaccacgagcagctctccgtggcggagatcaccaacagcgccttcgagccgtcctccatgatggccaagtgcgacccgcgccacggcaagtacatggcgtgctgcctgatgtaccgcggcgacgtggtccccaggacgtgaaccccgcggtggccaccatc

SEQ ID NO: 413696 - DNA, 380 bp, Oryza sativa
tcgatattcggcagttagggcgctggagaagtcgattgatgctataagcaccgcaagagaaagcccagtcgacaagaacaagggcaacggagatggcctgcacgaagcagaccaacggtaagttcaccgggggatgggacccgaggacgcatctagtgacccaggcggataggaaaagtgatccgaccacggggggggtgaagaagccacggccatgcaagccgaggaccgtagcgctgaccgagatgcgcaggaacgagacgagtcacggacctgctgatgcggaggatcacgtacaacgcatcatccgccagaacgggcatgactagaagaccgagctgggacaccagaggcatgccgcgatcgcccttcgggaggag

SEQ ID NO: 413697 - DNA, 288 bp, Oryza sativa
  unsure (1)..(288): unsure at all n locations
gcatgangtcatctcctcctcctctcgcatggcagccatggccaccaccgcgtccagcctcctcaagacctccttcgctggcgcgcgcctccccgccgtcgtccgcaaccccaccgtctgcgtcgcgccgcgcaccggcggcgccatctgcaactccatctcgtcgtcgtagcccacttccccctacgacctgaacgccctcagggtcaggctcatcagggggccatcgtgtcccgcgagatgacccggcggtccatgacccgcatgatcacctacgccgacaccgac

SEQ ID NO: 413698 - DNA, 452 bp, Oryza sativa
ggtgaaccaagaggggttctttgggtattattgatattattattagatagcagggtagaaaaccaaccaacctaacgaacgaacgaacgaacttatgaggttcatacatatacgatgattttagaccacacatttatatgctgttaggtactaagagagtcttcttccaccactgctatagggtgattactgataaaccactctagttcttggctactcttctgtcaaaaccacaacttatgtgtttgtgataaaacagatgaaaggtttaggtagaacaaaacctgaattttttgggggttgcctggccgacaggagttttagtattcttggggcgccttcccttagggcttcatttcaggctgttttacaccggttgccaccccaagtccaaaagttgttgctttgcattattgggacaaattcagccataattgatttgaccattattt

SEQ ID NO: 413699 - DNA, 457 bp, Oryza sativa
ttcatttgcccgcgtttatttattaaccccccagggaggcagggaaaccgggtccggtttctgagccgctccccccggctctccttgcctcccttgctcctccgatcgaggctgaagcggcttcaggatatacatttttgtgggaatggggaattcttgccaaaatggaacctatgggaacaattaccagaacagcaaccggtttcagaatgaccgttttgcttctcggtacgttgatgggaatgatactgaggattgctactcgggctcgtcaagggccagcttagcgggtgctctgcggcaagggctgaacctaaagtcccctgtccttggatacaagactccaaatgtaagggagctctatactcttggccgggagcttggacagggaccagtcgggaaaacatacctctgcactgagattagcacagggtgtcaatatgcatgcaagactatc

SEQ ID NO: 413700 - DNA, 367 bp, Oryza sativa
  unsure (1)..(367): unsure at all n locations
ttcggtttagcggcacgcgcgcaccgacaccaccaccgagaataatggaggcggcggcggcagacgatgcgaacggggcggggggcaagaagatgggtcgccggggcgaccacacggatggtgacggcgctgctnaccgaccctcagcagatcagcaaggactacgactactgcaaggaccgcaaggacctgcaccgccccgagttggaggggcacttccggaaaaatccgctggggggggaatcaaccatactccgggggcttgaggagtgtctaagattcattgctaactacaagctgacagaaaccgaaataacagggctgggaccggtgcagcacaccagggaggaccggttcttcgagtacc

SEQ ID NO: 413701 - DNA, 426 bp, Oryza sativa
tcgagtcgtccccgacctaggatttcgccgccattctcctccaaggagatgccgcgctatgatgatcgttatggaagcacgcgcttgtatgttggtagactgtcttcccgcactcgttctcgtgacctagaataccatttcagcagatatggaaggtacggacagaaccatggtccttaagattttatttctctgaagcgcagattttttgcagaagtttatggattttttttctgttaaatttgtaataagctgcattttctgtgtataaatgtaaaacactattactatgataacacttgctaaacagttgatattacaacaacttggtacgttcaaatttcactgtagaaatttaattatttcccattaaaattgtaacctttcaaattgtgtgcgagtcttctgtgctgagcatagactagt

SEQ ID NO: 413702 - DNA, 431 bp, Oryza sativa
tcgcctagcaagaagctcatctcctcctcctctcgcatggcagccatggccaccaccgcgtccagcctcctcaagacctccttcgctggcgcgcgcctccccgccgccgcccgcaaccccaccgtctccgtcgcgccgcgcaccggcggcgccatctgcaactccatctcgtcgtcgtcgtccactcccccctacgacctcaacgccatcaggttcagccccatcaaggagtccatcgtgtcccgcgagatgacccggcggtacatgaccgacatgatcacctacgccgacccgacgtcgtcgtcgtcggcgccggctccgcggggctctcctgcgcgtacgagctctccaggacccctccgtcagcgtcgccgtcatcgagcagtcggtgtcccccggcggcggcgcgtggctcggcgggcagctgttct

SEQ ID NO: 413703 - DNA, 187 bp, Oryza sativa
gcaaaaacattatcttcttcttcatcttcttagtgtacacaacaccaactcgatcatcatctcgtagcactaaacccattttccccaacccaaagacaactaacttcgctggccacaaattccatctcaaccacacattaacgcgactgttacagctatcggatcccccacctttcacttgtccggg

SEQ ID NO: 413704 - DNA, 408 bp, Oryza sativa
atcgtatgcgtttgcactcctctcgatctccattcgtttttgagttcctcgtttgctccgcctctctttcactcatgggcaagattaagatcggaatcaatgggttcggccgcatcggcaggctggtggccagggtggcgctgcagagcgaggatgtcgagctcgttgccgtcaacgatcccttcatcaccaccgagtacatgacatacatgttcaagtatgacaccgtccacggccagtggaagcatcatgaggtcaaggtcaaggactccaagaccctcatctttggcacgaaagaggttgccggtgttcggctgcaggaaccctgaggaggatcccatgggctgcggctggtgctgaatacgttgttgagtctactgggtgttttcaccgacaaggacaaggcag

SEQ ID NO: 413705 - DNA, 463 bp, Oryza sativa
  unsure (1)..(463): unsure at all n locations
ttccactgnccgacttcattacttctgcccnnncnnnnctnnnnnctctcggtgatcggtttgttcgatcagatcggttctttggagagatggagcagtccttcatcatgatcaagcctgacggcgtccagagaggcctgattggagacatcatcagcaggttcgagaagaaaggattctacctgagggggatgaagttcatgaatgtgcagaggtcctttgcacagcagcactatgccgacctttccgacaaggccttcttccctgggttggcggcggacaccagctgttggccccccccttgcaatggtttggcaaggagggatttgttgttgccactggccgcaggatcattggggccaccaggccctgggaggcagcccccggcaccatccgtgctgactatgccgtggaagttggcaggaatgtcatccatgggagcgactccgtggacaacgggaag

SEQ ID NO: 413706 - DNA, 436 bp, Oryza sativa
cattaggatactatacacaagcagaacgacttcaagcagcccggggagaggtacaggtcgtgggcgccggatagacaggagaggttcatccgccgcttcgccggcgagctcgcgcaccccaaggtctcccctgagctccgcgccatctgggtcaactacctctcccagtgtgatgagtcgttgggggtgaagattgcgaataggctcaacgtgaagccaagcatgtgaagaaactaaggcacaagaatgcatcatctcttgctaattaattggagtactaccaacaaataaggccagacaatgtcagatgcacgcatcttctgttgtcgttgggccatcttttgtatgcatcctattgttaattactagtacatgatatccaagtgatcatctgcaaggctacagaaattctgtaatacgataaattaaaagaaac

SEQ ID NO: 413707 - DNA, 421 bp, Oryza sativa
ggtaccattatcaccatcgacgaggacgggtggctgcacactggagacatcggcttcgtcgacgacgacgacgagatcttcatcgtggacaggctcaaggagatcatcaagtacatggggttacaggcgccacgggcacgagctggaggcgctgctcatcactcacccggagatcaaggacgccgccgtcgtctcgatgaaggatgatcttgccggtgaagtgccagtcgccttcattgtccggacagaaggctcagatgtcaccgaggatgagatcaagaaatgcgttgcacaagaggtggtgttctacaagaggatcaacaaggtgttctttaccgattccatccccaagaacccttccggcaagatcctcacgaaggacttgagagccaggcttgccgacggcatacccgacgccgtc

SEQ ID NO: 413708 - DNA, 452 bp, Oryza sativa
cgattgattcgccctttctttttttttttttttagatcgaacaatgtcctctccgcttgtcgaaatgcaaataacatcatcgggggatatgatcatcagttcacgagaacagaggaagaaacaaaagctaaaaattaaaaccatcaacagcccgatcgagtttgcattactcgatacacacattgcagccttccttccctctctccatgtatcgatatatcaacccggccacgcacaaaacatttgttcattccctactcgagctgcgcgtaccacaccccttggatcttgacatccttgggcaccttggcgccgaggtctgtgtccgacggctgcacgctctcgaagacgccaatcacctcgccagtctctggcttgctcttggggacgctcaacgtgatgttgcccgtcgacgacgaggcggtcttgacgttctccttagcgagctcctc

SEQ ID NO: 413709 - DNA, 437 bp, Oryza sativa
  unsure (1)..(437): unsure at all n locations
atttagttttataagcctgcctggagccgacgtccttcaccgttaaggcggagggcgtggccaagaacgcgccacccgagttccagaagaccaagctcatgacccgcctgacctacaccctcgacgagatcgagggcccgctcgaggtcagctccgacggaaccatcaagttcgaggagaaggacggaatcgactacgccgccgtcaccgtgcagctgccgggaggcgagcgcgtgccgttcctcttcaccatcaagaatctggtcgccaccggcaagccggagagcttcggcgggcccttcctcgtgcccagctaccgtggttcgtccttcctcgacccaaaggngccgcggtggctctaccggctacgacaacgctgtggcgctccccgccggaggcagaggagacgaggaggagctcgctaggagaacgtcaag

SEQ ID NO: 413710 - DNA, 351 bp, Oryza sativa
attgacctaatccccccaccatggatcaccgcctcctcctcctcggtctcctcctactctccccggcggtggccgccgcctcagtccccggcgaggaggagccgctgatccggcaggtggacggcggcggcgacgacaacgagctggagctgaacgcggagcgccacttcgccagcttcgtccagaggttcgggaagtcctaccgtgacgccgacgagcacgcgtaccggctctccgtgttcaaggccaacctccgacgcgcgcgccgccaccagctgctcgacccctccgcggagcacggcgtcaccaagttctccgacctcaccccggccgagttccgccgggcctacc

SEQ ID NO: 413711 - DNA, 411 bp, Oryza sativa
aaaaattcatcaacattgctataattgatttaggcgagtacacaggctacaaacaaaagtataaagagttctccaaaagcggtaatgatacaaatagcccagccccgtatgacgattctagtaacacaatatttcaggtgaacaacaaaggtgtatcagaatttattggaacccaaattccacaatgaactgcgacacaaataatggtgaaacccaactattaagtatgctccagtgacatctttcgccaaatgcgatgcagcagcttaggcctggttcttcttgggcacttggaggcgctcccggaaatcatcttccatgagcaccaagccattacgcaaaacgatcttgggctcccaccccaaaacttcctttgcctttgtaatgtctggcttcctctgaccaggatca

SEQ ID NO: 413712 - DNA, 452 bp, Oryza sativa
tcgccttactaatccgattcaaacccgccgtttccaagcttgctctcctctcccccccaatccttccctcccgagtggcagggtgctcgacgggatggcgcagaaggaggccaatggcagcagcaacggggagcacaccacccgcccgccgccgacgccctcgccgctccggttctccaagttcttccaggcgaacctgaggatcctcgtcaccggcggagctggcttcatcggctcgcccctcgtcgacaagctcatggagaacgagaagcacgaggtcattgtcgcagacaactttttcactggttcaaaagacaacctgaagaagtgggatcggacacccaagatttgagcttatccgtcatgatgtcacccagcccctgcttggggaggttgaccaaatctaacaccttgcttgccctgcttcaccaatcttttacaagcacaaccct

SEQ ID NO: 413713 - DNA, 498 bp, Oryza sativa
gtgctatggtggttgagacattggtaaggtaccagctgcctgttgttgtaattgtcttcaacaataatggagctcatggcggtgatcggagaagccctgatgagataaccggaccgtacaaagatgatcctgccccaacctctttcgttccagctgctggttaccataaaatgatggaagcttttggaggaaaaggttatcttgttgagacaccagatgagctaaaatccgccctttcagagtcgtttcgtgccaggaagccagcggtgataaatgttatcattgatccttatgctggtgcagagagcggtagaatgcagcataagaactgaaggtgtttgtatcataccagaacgcaggtcccagttaataagcaatgtcctattgaaattaaaacggacacccatggaagaacatcttatatcactgtccctgaaataagaaagatcctgggtagtactccgtacttaatggcatgtgagatatcgaattcaagct

SEQ ID NO: 413714 - DNA, 398 bp, Oryza sativa
aaaagcaggaaaaggtatgggatcacatatatcatggcaaagttttgggcaacaacccaaattacattccaatggcactttgaggtaaaataacaaactatcaactttagagctgaaactttattccatatggatgatcagacttaaacattgtctaggtgatcatgcggaacccttgagtttcttcgcaattccagcaaagtacttcccttggtggaaggtttgttgcaattcaagctcagtggcaacccttgatccatcaccagcgaatgtgccagacccgtacgggctttcgcccttcacttgcttcattttaaaacatcccagcaccaaaggggtaccctcctggaacaaagatcatgccatggagcacttagctgagtaatttgctgtcaacg

SEQ ID NO: 413715 - DNA, 359 bp, Oryza sativa
  unsure (1)..(359): unsure at all n locations
ctcttctaatactcttcaccttnncctcctcggntcggcgccgtggttttactagggtttagtgggttgagaccgcggcgccggatggcgagtaccgctgcttcgtcggcggcctcgcctgggccaccgacgaccgctccctcgaggcccgccttctccacctacggtgagatcctcgactccaagatcatcaacgacagggagacggggaggtcacgtgggtttggcttcgtcaccttctcctccgagcagtcaatgcgcgacgccatcgagggcatgaacggcaaggagctcgacggccgcaacatcaccgacaatgaggcccagtcctgccgctccggcggcggaggcggaggcta

SEQ ID NO: 413716 - DNA, 403 bp, Oryza sativa
  unsure (1)..(403): unsure at all n locations
gngttagcatacaagcgcgcccaccacaacaaccactacgacggtgccattaacaacatgcaccgtgacgaggaggagcgctactacccgncgagccacgcgccgctccgccacgcgccgccgacgcccatcacgccgcgccccgaggtggggaggaggcagaaggcgacgattcacaagcagaacgagcacagtcagggggggagaggcacaggtcgcgggcgcccgatagacaagggaggaaaaaacgacgcttcgccggcgagctcgcgcaccccaaggtctccgctagagactgcagcacatacagggtcaactacctctcccagagtgatgagctggtgaaggcgaagaccgaggctagggatgctgtgaagccaagcatgtgaagaaactaaggcac

SEQ ID NO: 413717 - DNA, 512 bp, Oryza sativa
ttgtagaaaacaaaattggtcgtgatgtgcaaaaccaggccctttttagtccacaagttgactcttcatccctcctgtacaacatggttcctaatctgacttcgaatgtttcggatggcaacttatcaacgatcccttctggatcaacttatctgcagaatgcaatgtatggttgcttggacgactcttctggtttattgcaaaatacaggagagaacgatccagcaaccagaacatttgtgaaggtttacaagtcaggttcggttgggaggtcgttggacataacccggttctctaattatgctgaacttcgagaagaactgggtcagatgttcggcattaagggtcaattggacgaccctgatagatcaggctggcagcttgtattcgtcgacagggagaatgatgtgcttctccttggagacgacccttgggagtcctttgtgaatagtgtatggtacatcaagatactttcacctgaggatgtgcataagatgggaaagcaagggaat

SEQ ID NO: 413718 - DNA, 538 bp, Oryza sativa
aataagataccttcttcccaccgattccaatctccagaatgctgctttgatatggccgtcaagatctacatagtgtactactccatgtatggccatgttgcaaagctagcagaggagatcgagaaaggtgcttcttcagttgaaggagttgaggtcaagctatggcaggtcccagagactctttctgatgatgtgctcaccaagatgggtgctccttcaaagaaagatgttcccataatcacacccgcagagcttgccgaggctgatggtgtcatctttgggttcccaactagatttggaatgatggctgctcaattcaaagcattcatggatgctaccggtgggctgtggaggacacagcagctcgcaggcaagcccgcgggaattttctactctactggttcccagggtggtggccaagaaactactccgttgacagcaattactcagctagtgcatcatggcatgatctttgttccagtagggtacacctttggtgctgggatgtttgagatggagcaagtgaagggcggaagcc

SEQ ID NO: 413719 - DNA, 251 bp, Oryza sativa
tctataagagctactgacacggcatgcgcacgcgcgcaagctcgggtcccctatattttgcgccctcttttttttttttttttggtaaactaattaaatcattattgcaaaaacattatcttcttcttcatcttcttagcgcacacaacaccaactctatcatcatctggtcgcactaaacaccatctttccctacccaaatacaacgaactttctggccaacaaattccattccaacgcacaatctaacc

SEQ ID NO: 413720 - DNA, 402 bp, Oryza sativa
aatctaacatacgcaaactgatattatcacaatgttagccgatgacaatggaaagagtaatctaggtacaagcggatcattgacggtggagacaagacattggttgtaccacaacacccaccaggggcgccaacaaggagcgctttccgttataggacgagagaaaaagtaaaacatcacgatgggaagggaaactgaataattttagtagaccatgatgatgatggataggctccttaggacgcccgccgcccttagcgtcttgctgctcccattttggccactggaaggctcactcgtcatcgtctacatcctttttgttgcccttgtcggcatcctcattattgacctcggacttggacttgtcagattccttcttgacgtcctttcttttccttcttg

SEQ ID NO: 413721 - DNA, 541 bp, Oryza sativa
  unsure (1)..(541): unsure at all n locations
ttttaatacctctcctttcccctcctctcttcccccctctcacaagatagagagcgccagactctccccaggtgaggattcagccatgaagggggccaaatccaagggcgccgccaagcccgacgccaagttggctgtgaagagtaagggcgcggagaagcccgccgccaagggcaggaaggggaaggccggcaaggaccccaacaagcccaagagggctccctccgctttcttcgtttttatggaggagttccgtaaggagttcaaggagaagaaccccaagaataaatctgtcgctgctgtaggaaaagcagccggtgataggtggaaatccctgaccgaagcggacaaggctccctatgtagccaaggccaacaagctcaaggccgagtacaacaaggccattgctgcctacaacaagggcgagagcactgccaagaaggcacccgccaaggaggaagaggaggacgaccaggaggaatctgacaagtccaagtccgaggtcaatgatgaggatgacgacnagggcagcgaagaggat

SEQ ID NO: 413722 - DNA, 492 bp, Oryza sativa
atggcattaatggaaaacctaactacctgcatggtatgggcttaggttctgaatgaattgaatgaaggaatttcacgttcaagaagacttaatcttaagaatcctcaagatagtctgcttggtcaaatccctcgacgcacacgagatgaacttatggatcactgggcagctatccaggaattattgcagcatttttggtcatcatatccaataacaacttcagttctttataataaggttcaaagaattaaggatgcaatgacccagatatatcaaaagttgcaggatataaaggaatcagcacaacctgatgtgagacacgaaatatctcaactagtaaagcccatgacccaggctttggatgctgccttcaaccatgacttggagcagcagcaaaaatcatcgaaatccgggaataagcccaatgggttttaactttagccgagaagactagctttcgcgacggattagggattgatttactgctagagc

SEQ ID NO: 413723 - DNA, 521 bp, Oryza sativa
cttttcgttggcggaactgctggacggtgtgaaaaggtgtatcgaacagatcaacaaggccaacaggggtgatttgactcaggaagagattcaggaacgacagaacaaggctatgcaggatccagagatccagaatattcttacagatcccatcatgcgacaggtactggtcgatttgcaggagaaccctagggcttctcaggagcatcttaagaaccctggagtgatgcagaagattcagaagcttgtaagcgctggaatagttcaaatgagatagtcgaccaaagcaagaagcgctgttcgtgtctatgttcattgctccttactttttttccatgctcagtctttgtggacttaagatttacacagtttggggctaatcttcattctcaattggattatgtgagtgcagcgtgtcactggattattagtggttatggcatccgtgctacagctgcacgtgcaaacgtatgtctctatttgttagtcctaaacattttccctaccgaatgaaaatagag

SEQ ID NO: 413724 - DNA, 511 bp, Oryza sativa
gcgttttgtccgaggctccaagagttgagtcctgaaaagcttgtgaaggctggaatagtcagagagaaatcattcggaacaacaaaagatcgcatgctttacattgaacagtgtgccaactccagagctgtaactatcttcatacgtggtggcaacaaaatgatgattgaggagaccaagcgaagtcttcatgatgctctttgtgttgcaaggaatcttatccgtaataattcaattgtgtatggtggtggttcagcagaaatatcttgctcagttgctgttgaagctgctgcagatcggtacccaggagttgaacagtatgcaatcaggtcatttgctgatgcgttggatgctatttcactagccttggccgaaaacagtggtttgtctcctattgatacactgacagcagttaaaatttaacaaggtaaggagagcaatcctcactgtggcattgacttgaacgatgttgggacaaaccacatgaaggaaccaaatgtttttgaacact

SEQ ID NO: 413725 - DNA, 214 bp, Oryza sativa
tattttgtggcgccctttttttttttttttatgtcaaacgctctagaaaagatttatgtgatgaaatacatgatgaaccacgtatgttctcaaggtaaaattaattaatgcattatagttttaactttgtccatcgatctcaacctgtaactgtgacgacacactggctacagtgccctcgaggtacttagcagtattagctagtagtcttgtt

SEQ ID NO: 413726 - DNA, 511 bp, Oryza sativa
gtatggagtgtgtagtagcaccttgctctcctttgccttcagagaaaccggaagcaatggcgtctgctactctcctcaagtcatctttccttcccaagaagtctgaatggggtgccacccgccaggctgccgcccccaagccggtgactgtctccatggttgtccgcgctggtgcctacgacgatgagcttgtcaagaccgcgaaaaccattgcatcaccaggaaggggtatccttgccatggatgagtcgaacgcgacctgcggtaagaggcttgcgtcaattggccttgagaacaccgaggccaaccgccaggcttaccggaccctccttgtcaccgcaccgggcttgggacagtacatctccggtgctatcctcttcgaggagactctgtaccagtcaactgtagatggcaagaagattgtcgacatcctcactgagcagaaaatcgttccaggtatcaaggtcgacaagggtcttgtgccccttgctggctccaacaacgagtcatg

SEQ ID NO: 413727 - DNA, 435 bp, Oryza sativa
agttagaatagtagtaaacggtcagtcaattgttgcaaagcgatcagctactggcgatggctcatggaaggggcagtgctgcaggacgacgcaacgccgccgtgctggcgatggtcctcctctgcgtgctcctccacggcgagctcgccgagtcggccgtgtacaccgtcggcgaccgcggcggctggggcttcaactccggcggctggctcaggggcaagcgcttccgcgccggcgacgtgctcgtgttcaagtacagcccgtcggcgcacaacgtggtggcggtgaacgcggcggggtacaagtcgtgcagcgcgccgaggggtgccaaggtgtacaagtcgggcagcgaccgcgtcaccctggcgcgcggcaccaactacttcatctgcagcttccccggccactgccaggccggcatgaagatcgccgtca

SEQ ID NO: 413728 - DNA, 459 bp, Oryza sativa
gaacagaaactgcttgattttgaaattcacaatatatttggaagatatcagtactggcataatggttctagtttttacagtacaattagcaagcaggctccaagagattttgcacatatcagaacttgctaaagaacccgcaaatatggtcggagacctcatcaggcttctcctggttgatgaaatgggcaacaccctccatgataaccacatcttcgagatttggcacacatgcctttagaccacccttgtggatgtaatcttttacacctggaatgttgtacgtaaggtcctgatctccaacgatgaattttgtcggaacttttattggaactccagtccatggtgcagtcagctcccagttcaagtctatgcatctgtagtagttcaatcctccagtaaatccagtcttttcaaattttttcggatagtaggaaatgtcttcttttgacagccatg

SEQ ID NO: 413729 - DNA, 577 bp, Oryza sativa
atggcattcttggttgctaggtcgtcacgttgtgagcatgactgcatgagagtaggctcaagtccttgttttccatttccttcttttttttttcccttccttttctccccgccccctccctctcatctttgtttggtcattcctgtaaattttattcctcttaatacaaaggtgagcaatccttttgagtatttccaaaaaaaaaccccattacttgtagttgtaggtgttcttgactattgagacttcagaagggttagatttgaattctttgctcaattgaaatagattacaacgaatagattagttaattacaacgaatgttgaatgacctcaacatcctaggtagggaaatcggaatgtatccctattgcattgccaagttactgggttcttaagggtccaaagaattattgcttcgaagtaaccatgttgttctctgaagactggccatcccttgaactatgttcttctcatgatcctattgggtaatatgctcggtagctctaaattccatattatgcccagcttaacataacagtaacttctgcttggagagctataactattctttttt

SEQ ID NO: 413730 - DNA, 514 bp, Oryza sativa
  unsure (1)..(514): unsure at all n locations
caaatanattctgagacaatgcagcacggnggaagaaggagcaagagaataactggagccttatttaggttcgccatccgaggaaagctaccagagtagagaacttgaaaaggcttctcagcaagttgcgaagcacctctatgattcaaaggttcaaccaactacattaatcccgaaacaagtcgggaatatgtacacagcgtctctatatgctgctttggcatcagtgatgcataacaaaaatgaaactctggcaggccaaaggattgtcatgttctcatacggcagtggcttgacatcaacaatgttctctttcaagatcaatgaaggccagcatccattcatcctatcaaacattgcaggcatactggatgtctccaagaaactggagtccaggcatgtggttgcgcccgagaagttcgtggcggcgctgaagctgatggagcaccggtaccgcgccaaggatttcacgacgagccangacacgagccttgctcgcttcaggcacctacta

SEQ ID NO: 413731 - DNA, 511 bp, Oryza sativa
gcatacaatatcatttctctcgcgagtcgcgagttgcaccgattgaattaagggtcgaagatgtttgggttcgggcaccaccacaaccaggcaccggcggcgccgtcggacccgaaccagatcttcaagatcttctgccgcgccaacgagaactactgcctcaccgtccgcgacggcgccgtcgtcctcgcccccgtcaaccccaaggacgagcaccagcactggttcaaggacatgaggttcagcaccaaggtgaaggacggggagggcatgccggcgttcgccctcgtcaacaaggccaccggactcgccgtcaagcactccctcggccagtcccaccccgtgaagcttgtgccgttcaacccggagtacgaggacgcgtcggtgctgtggacggagagcaaggacgtcggcaagggcttccgctgcatccgcatggtcaacaacacccgcctcaacttggacgccttccacggcgacaaggaccacggcggcgtccgcgacggcacca

SEQ ID NO: 413732 - DNA, 228 bp, Oryza sativa
tgtttgccgccgtcgccgacgccgacgacgccgcccggacctgctcgaagaagaggacctgcacgacgacgcggagcgggaggcgctcgttctgcacggcgtgcatgctcgcctccggcgacagctttttgctgtccatcagctccgcacagcctctttcttcttcccccttcgttaaacccttgatgctcctttgagatacattgtcgatggccgcggtataagccc

SEQ ID NO: 413733 - DNA, 427 bp, Oryza sativa
  unsure (1)..(427): unsure at all n locations
acaccacaacccnccccaaaaccggccgaagtttagcaagangnacgcgcttcgggcaccacggccaccanggccaagaccagccgccccagcaccacggcggcggcggcggcggcgcgcaccagcccaccnncaagaacnncngccgcgccgacgaggggnaccgcgncgccgngcgcgaggggaacgncgnccncgccccgaccaacccgcgcgacgagcaccagcacnggnacaaggacangcgcnncagcgccaagaacaaggacgaggagggcaacccggcgancgcgcccgncaacaaggccaccggccncgccancaagcacncccncggccagggccacccggngaagcnggcgccgnncaacccggagnacccggacgaggcggcgcngnggacggagagcggcgacgngggcaagag

SEQ ID NO: 413734 - DNA, 446 bp, Oryza sativa
acgatgaatcagcttttagtcagttccttgctttaaagaggacatgagttagattgggagatggcagtccagaattacggctcagatggtacaccagacagcgatttaccaccaccagtgtaacagctgcaacaactgggtgggcttccaagtcctaacaatccagggagcaaactacacttgcaagagcaaaagatggcatgtgcttcatttggcaagaagtaaaacagactacaaaagtaaggagacgccaaatagttgtagcactggccgaggagactaggatgggcacaagaggatacagaagacaccgtgccaaatcaaatacgttcctaaaaacacattttcattcatgagaatctgaataaacatttgtctcgtgtcactggtgccaatcagtttatgaatgaaaggggatataactttgaggcagctgctcaggtgtc

SEQ ID NO: 413735 - DNA, 449 bp, Oryza sativa
  unsure (1)..(449): unsure at all n locations
cacccaanccaacccaanccgcgcgggatacattaagnnctgcgttcatgtccttccgctgctcctccctcgccaccgccgtctcctcctcctccgccaagcccctcgccggcatcccccccgccgcgccgcactccctctccctcccccgcgctcccgccgacaggcccctccgcctctccgacttctcatccagatccgcccgggccagcagcttcgtcgcccgcgccggcggtgtggacgatgcgccgctggtcgggaacaaggcgcccgacttcgatgcggaggcagtcttcgaccaggagttcatcaacgcgaagctgtccgactacatcgggaagaagtacgccattctcttcttctacccgtaggacttcaccttcgtctggccgaccgagattaccgctttcagtgacagatacgatgagttcgagaagttgaacactgag

SEQ ID NO: 413736 - DNA, 410 bp, Oryza sativa
  unsure (1)..(410): unsure at all n locations
ttgnattaggcgacaacaaatcgaaaatcgaacgggagagattctctctgattctctctcgcgggcggcggaagcaatcgtagttagcagaggccggcgagcgagccgccaccggcgatgggcgacagccagtactccttctccctcaccaccttcagcccgtcggggaagctggtgcagatcgagcacgcgctgacggcggtcgggtccggccagacctccctcgggatcaaagctgctaatggagtagttattgccaccgagaagaagttgccttctattttagtggatgaaacatctgtgcaaaagattcagtcgttgactccaaatattggtgtcgtctacagtggcatggggccagactttcgtgtttaagtgaggaaaagtcgaaagcaagcacaacagtatta

SEQ ID NO: 413737 - DNA, 592 bp, Oryza sativa
atggggtactcccacggaataatactgccagcgacatccttaatcaaatggcatcagtactttagagaattcatgcatctatggaatcaaattctgccataggaacaactttacttcagggtgaagagaatattggccaattcctctaccttgagggcattgagtattatatgtggaacacatatgatgttcatttctatgcatcattctctctgatcatgctgtttccaaaactccagctcagcattcagagagatttcgctgctgctgttttgatgcatgatcctgaaaagctcaggatgttacatgatggaaaatgggttgcgagaaaagttcttggtgctgttcctcatgatcttgggctatatgacccctggttcaaagttaatgcatatacgctctataacacagatcgatggaaggacttgaacccaaagtttgttctgcaagtttatagagatgtggttgccacaggtgacaaatcctttgctcgtgctgtttggccatctgtttatatggcaatggcatatatggagcatttgacagggataaagatggatgattgaaatgaggactttcagacagacttatg

SEQ ID NO: 413738 - DNA, 585 bp, Oryza sativa
atgggatatcgggtcggggaacttcggggtggcgcgggtgatgcgtaaccgcgagacccgcgagctcgtcgccgtcaagtgcatcgagcgcggccaccggatagatgagaatgtgtacagggagatcatcaaccaccgctcgctgcgccaccccaacatcattcgcttcaaggaggtgatactgacgccaacgcatcttatgattgtcatggagttcgcagcaggcggggagctgttcgatcgaatctgtgatcgtggacggttcagtgaggatgaggccaggtatttctttcagcagctgatctgtggagtgagctactgccatcacatgcaaatatgccatagagatttgaagttggagaatgttctcttggatggcagcccagctccacggcttaagatatgtgattttggctactccaagtcatcagtattgcattcaagacccaaatcagcagtggggacgccagcatatatcgcaccagaggtgctatcccgccgtgagtatgatggaaagcttgcagatgtatgggcctgtggtgtgactctttacgtcatgcttgtgggagcctacccatttgaaga

SEQ ID NO: 413739 - DNA, 520 bp, Oryza sativa
caattattttatcaagtctacttctgtcccgcaactcccgcagcagaaggagttgctttctgccctgcgtccataccattccagactagtgggagagagttttctagcaagaaagaggcccgtttatgaatgtacagatgcccaggtggaagctgccaaaggtttcttggcagtgcttagatcctaccttgattcgctgtgttccaacttgagatctcatacgattactaatgtgcaatccaacaatgacaaggtttccttgcttttaagagagagcttcatcggttctttcccgacccgtgagaggccctttatgaagctctttgtggacacgcaattgttctcagtacatacagacctagttctcttcttttatcagaaggactaagtctcttttaagaatttaaccatcttcagtgagctgatttgccaagtgttagatcccgatctcaactgtacatattgatcttgaaaagatgagctgccttttattacattggcagcttcaacgtgggtacca

SEQ ID NO: 413740 - DNA, 496 bp, Oryza sativa
  unsure (1)..(496): unsure at all n locations
cttttgatttccccctccctggccagccgggcgagggcaaaacaatggggacagggctcttggctctcgcgccatggctggtgctgatcctactgcagctcgccagcgcgtcccatgtagaccaccggagcctcgaggccgagcaggcaccgagctcggtgccgggctccattgtcagacccctgctcaggacaggataccacttccagcccccgatgaactggatcaacgatccgaacgggccactgtattacaagggatgggaccacctattctaccagtacaaccccaagggagctgtgtggggcaatatcgtgagagctcacttcggatcacaggacctcatcaactggatagcccttgagccggcaatcaagcccgacataccctccgaccagaacggntgaaggactggctttgccaccatacttaccgatggcacgccggcgatcctctacactgggatcgaccgccccaacatcaactaccaggtgca

SEQ ID NO: 413741 - DNA, 451 bp, Oryza sativa
  unsure (1)..(451): unsure at all n locations
ttcnatacctcccgcatctcatccctcctctcgcttagttcagatcttaatcgcaaatggcgaagattaagatcgggatcaatgggttcgggaggatcgggaggctcgtggccagggtggccctgcagagcgacgacgtcgagctcgtcgccgtcaacgaccccttcatcaccaccgactacatgacatacatgttcaagtatgacactgtgcacggccagtggaagcatcatgaggttaaggtgaaggactccaagacccttctcttcggtgagaaggaggtcaccgtgttcggctgcaggaaccctgaggagatcccatggggtgagactggcgctgagtttgttgtggagtccactggtgttttcactgacaaggacaaggccgctgctcacctgaagggtggtgctaagaaggtcgtcatctctgctcccagcaaggatgcccccca

SEQ ID NO: 413742 - DNA, 533 bp, Oryza sativa
ttacatatagctcgctaactaatcttccccttcgtctcctttattattccacttggacgaacactagctcaccggccggccatggcgtcttcttccgttctgatcaagctgctcgtcgtcgtcggctgcgccgccgcggcctccgcggcgacgctcaccgtgggtggtagctccgggtggacgcttggccagaactacgatacttgggcaagtggccaaaccttcgcggttggagacaagctcgtgttcagcttcgttggggcgcacacggtgacggaggtgaacaagaacgattacgacaactgcgccgtcgcaagcaacttgatcagctcgaccagcaccagcccagccaccctcgacctcgccgccgccggcatgcactactacatctgcaccatcagcggccactgcgccggcggcatgaagctggccatcaacgtcggcagcggctccggcttcggcttcggctccgggacgccacccagcaccaccccaggaagcagcgggacgccgccggtcacccctttttcccc

SEQ ID NO: 413743 - DNA, 552 bp, Oryza sativa
ttagttttgcgagcttgagcttggagagagacaacaatggctgctcaggctcttctctctgggaggcagctgctggggaggccattgcaatcttcagtctccaggtcttcttcctccaggaaggcacccttcatggtcagggcagaggccactccccctgccaagcaaggtgctgacaggcagctgtggttcgcatccaagcagtccctgagctacctggatggcacgcttccgggagacttcgggttcgacccgctggggctatcggacccggaggggaccggtgggttcatcgagccacggtggctggcctacggcgaggtgttcaacggccggacggcgatgatgggcgtcgtcggcatggtcgccccggagctcctcggcaagctgggcctcgtccccgccgagacggcgatcccgtggttccagaccggcgtgatcccccccgcgggcacctacacctactgggccgacccttacactctcttcgtcttcgagctcgccctcgtcggcttcgccgagcacccgcgctttcaggactggtacacgccg

SEQ ID NO: 413744 - DNA, 587 bp, Oryza sativa
  unsure (1)..(587): unsure at all n locations
atgcntttctcttattcagtttgatgcacaaatccgttcgagtcgaaacatgcttgactctttcatgccgcttgaattttgctactcagtaagtgccaacggaattgttcatccaaatgtaagtctgacagcaaaaggtggaagcatatttcctgttaacgatccaataattaccataacggacaatgcttttaatccagttgggtactgcttggctattatgaagagtgagggtgttaacttaataggagagaatttcatgtctggactgaaggtcgtctttgaccgagagagaatggtgttgggctggaaaaacttcaactgctacaacttcgacgaatcgagcagacttccggtgaaccccagcccttcagctgttccttcgaaacccggtcttggtccgagtagctacacccctgaagcagccaaaggagctttgccaaacggcacccaggtcaatgtgatgccttcagcaagctcaccgctgcaaccgcagagcgtttccgccaccattgttctcctattcctcatncgtctctgaattcttgaatctgatcagctcagcttcagccaccatagcttcagag

SEQ ID NO: 413745 - DNA, 415 bp, Oryza sativa
  unsure (1)..(415): unsure at all n locations
gaatacggtgtacgtggtgaaggcgcagaaggccttcatcaccaggtgcaaggccaactctgaggctacccttggtacataccagggtgatgctgtgctcggcgagggtgcctctgagagccttcacgtcaaggactacaagtactgatctgcctctggtggtggctgaagatccgattggacatcctccgtatgcatatttagggttctgagtgtggtttggctatcaagcgtccaatcttacgggtatcaaaaacttttgtcgcaataatctgaacctgtgctttttaataattaatacctgtcatcggtagtagttttttggtattcctgtaatcaaatgctgcgtatggtaaattggagcagcggctttaattccatgctatctttttattggtaaaaaaaaaaaaanaaa

SEQ ID NO: 413746 - DNA, 569 bp, Oryza sativa
ggattctgttttagcttcagattcgtcagaagaattagtgcaagatgatgtgaagagcacgtcatagaactcattggaagattctaccactgaggagcttcagcaggatgatgttccagatggagattcagactcagctgaagatagtaaaagtccagaaatgaagctcttcattagtggagtggttcataacaaggaggatgctggagcaaaatcatatgttcgagttccagctgaaatcaataatttggaaaaggattccttcgaactttacattcctggaaaaggttctgatcgagatctggctgatacaaaggctgcaaaacagaaagttgctgatatggctgccaaattggcatcagaacttatgccttctgatgttgcgaaggcattatggggaacgaccaagagttcttcgaagataaataaagaagtacaagagctcttaaagcttaccctcagcaaggctcgagtcaagctgactgagaatacaattttcaataggatcattactgacagtaacggctcagatccattagtggtctctatgtggagcatttagccatatg

SEQ ID NO: 413747 - DNA, 577 bp, Oryza sativa
  unsure (1)..(577): unsure at all n locations
ngatttcaatgttaatgatcactggncgcagccacaattcaaggtgctggatcttgagtttgatgtccctcttagagagcttggattccatggtgttccatataaagcttcagctttcatcattccaacttcgacttgtttggttgaactaatagagacacccttcctggtggtgaccctgagtgagatagagattgttaatttggagagggtgggctttgggacaaagaactttgacatggctatcgtgttcaaggatttcaagaaggatgttcttcgcattgattccataccatcaacatcacttgatgcaataaaggagtggcttgacacgactgacctcaagtactatgagagcaggctgaaccttaactggcgtnctattctgaaaactatcatcgatgatcctcagaaattcattgatgacggtggctgggaattcttgaatatggaagcaagtgattcagacacagaggaaacagaggaatctgatcaaggctacgagccttctgatgctgagcctgagtctgaatcagaagatgaagattctgacagcgagttcttggtggaatcagat

SEQ ID NO: 413748 - DNA, 495 bp, Oryza sativa
ttgcgtggggcgcatcaccatgcgcaagtcggcggcgaagtccaagtccgccgcgtcggggagcccgtggtacggcgccgaccgcgtgctctacctcggcccgctctccggcgagccgccgagctacctgaccggcgagttccccggcgactacgggtgggacaccgcggggctctccgccgacccggagacgttcgccaagaaccgggagctggaggtgatccactccaggtgggcgatgctcggcgcgctgggctgcgtgttcccggagctcctcgcccgcaacggcgtcaagttcggcgaggcggtgtggttcaaggcggggtcgcagatcttcagcgagggcgggctcgactacctcggcaacccgagcctgatccacgcgcagagcatcctcgccatctgggcggtccaagtggtgctcatgggcgccgtcgaggggtaccgcatcgtcggcgggccgctcggcgaggtcgtcgacccgctctaccccgg

SEQ ID NO: 413749 - DNA, 541 bp, Oryza sativa
attgagttatgtactctttcccccaaatacgcttaccaccaaaagctatagatgcagccaaatgggctggcaaagcggccgatgttttctactgcctcaagcttcttgaagcaactggaatatccactgttccagggtcaggtttcggacaaaaagaaggggtgttccacctgaggacgaccatcctgccagctgaggaggacatgcctgccatcatgaccagcttcaagaagttcaacgacactttcatggatcagtacgatggctactccaggatgtgaaatgaaaacaagatgagcactaccccaggagaagagagaaagaatctgcctcagcgtggctgatcgagcagttataattaaaaggcactgttaattaattaattaatcaatcaatcgaaaggctaattatttgctgcaacaatctgtaactcgatctactgaaggaaaaaaaaaacttcttgtccttgatatgcatgatgtatagataaaattatttctgctctttgggaattgataatacgggcgcactcaccgttaca

SEQ ID NO: 413750 - DNA, 501 bp, Oryza sativa
cgcttacatatatacacaggagtgagggagaagaagataagggaagagagagcgagagagagagatagaggggggtagcaaagcaacttagctagctttgctagccatggcgaggagctctccttgcctcgccgtcgctgtgctcctccttggagtggtggtggcggcgattggagcctttgctgatgaagaagcgtcgagcggttggggactagggcatggcgcccgtttcctcagcaggcgaggccgtgctgcgtatgagaagtcgtcggagccagaggcaaagcctgcgtcgcagcaggagccgaagtcggattcttactcgcaggcaaagcctgggccaaaagatgagcccaagccggagccagaggcaatgtctgcgtcgcagccggagtcgaaagccgcaacttactcggagtctaagcccgaatcaaaggcagagccttgatcaaaaccagagcccaaggcagagtccacgccacaaccagaacaaagtcagag

SEQ ID NO: 413751 - DNA, 482 bp, Oryza sativa
  unsure (1)..(482): unsure at all n locations
cttttcagtaattccttcgactgcccaatcacctaattgcttcctgtcaatatctgcaaactcttcgggtgggccaacatctaatatgtttgctgttgggccatatgctaacgagcctcagcttgtctcaccacctgtcttctcaacttacacgaccgagccttccactgcaccactgacccctccacctgaactagctcatgcaactactccctcctctccagatgttccatatgcgcggtttcttttgtcatctatggatctgaaaactgctggcaaagatcacaacatgccgtacttatctacagcatattctggaggttcagggctccaggcatcttatccgctttacccagaaagcccttcaagcagcctcatatcacctgcttcagcaactccaaggactggtctttcatcacctatacctgagcaagaggtgcctacttgcacatggaagacatctaggtctgnctgcgacacac

SEQ ID NO: 413752 - DNA, 441 bp, Oryza sativa
ggagataatggcatgatggatacatttttttaccagttttgagtttatttacacatgagatgcaccaacgacccttcaaaaagttgctgctgctacttcactcggggcagcttattagttatttagtacacacattttaacgagcgaagaactgctagtactacacaatctttctcgatcatccgtcttcctgggatcttccctcgagttctctgccatgtggaatcaacgagcttgcatgtcctaacccctcaagaaaagacgcactgcactgcatttgcaggttcagggttcagagatctgtggcatcagcgagctctcctatatgaccttcccgtccttgatggtcgcgttcttcaggatcaccacgattcccgaccttatgtagtacccttccttaggccgatcacttttttggacaccctcgctgtttgtgatgac

SEQ ID NO: 413753 - DNA, 352 bp, Oryza sativa
  unsure (1)..(352): unsure at all n locations
agcatancgtacgaaagatcaacaagctctcttgagaattgagatcaccctctttccatctagaacacaaaccagacaaccaaaaaacagcaagacacaatacacaatgtcgctgatccgccgcagcaacgtgttcgaccccttctccctcgacctctgggaccccttcgacggcttccccttcggctccggcagcagaagcagcggcagcatcttcccgtccttcccccgcggcacctcctccgagaccgcggccttcgccggcgcgcgcatcgactggaaggagacgccggaggcgcacgtgttcaaggcggacgtgccggggctgaagaaggaggaggtcaaggggagg

SEQ ID NO: 413754 - DNA, 566 bp, Oryza sativa
  unsure (1)..(566): unsure at all n locations
gcgttaattttttaggagcacgacgngancgcgccggggacggttttcaaggagagcatcatcatttgcctcctctccgncgatggcctcaaggtccttcacatggacaggaacgattactatggaggagaatctacatcccttaatctcactaagctctggaagagattcaaaggcaacgagaccgctcctgaacatctgggtgtcagcaaggagtacaatgttgacatggttcccaagttcatgatggccaacggtgcactggtccgtgtactcatccacacgagtgtgacaaagtatctgaatttcaaggctgtcgacggcagcttcgtgtacaacaatggcaagatccacaaagttcctgcaactgatgtcgaggccttgaaatctaatctaatgggcctttttgaaaagcgccgtgctaggaaattcttcatatacgtgcaggattacgaagaggatgatccaaagtcacacgaaggcctggatctgcacaaggtcacgacgagagaagtcatctccaagtatggccttgaggatgacacangtgactttattgggcatgc

SEQ ID NO: 413755 - DNA, 432 bp, Oryza sativa
ccccataccataccgaagtattaatagcagatccatgacccgcacaataatagcaagagtttaatccaaagaagcatccacccatataacattattagattcatatagcaaaaacctttaaatccgcacagcagcatcaactgctcaaaaggcccgatctaagaaagaactattactaaagtcactactaaagcggtagtaaaggggagcagatcgatcgcatttagggcttgaaggcgatcgtcagatcagaccgggctgaggagctgggcgagggagggcctcggttcggatctaatgccgacgacgatgatgagcgggatgaagccgtagtgcgccgccaccttggtctttttcatggcccacgtggtccactctttgacgaaccgaaccgccgccgaagccgtggactgttccttgtcggccgccggg

SEQ ID NO: 413756 - DNA, 540 bp, Oryza sativa
  unsure (1)..(540): unsure at all n locations
ctttttggtagcgatgttgntctccatgctgatgctattcacagaggtggtggccaggtcattctcacggccaggagggtcatctatgcttctcagctcacagcaaagcccaggcttcttgagcccgtctacctggtggagatccaggcccctgagaatgcccttggtggtatctatggtgttctgaaccagaagagaggacatgtgttcgaggagatgcacaggcctggtacccctctgtacaacatcaaggcttacctccctgtcatcgagtcctttgggttctcaagccagcttagggctgcgacatctggccaggccttcccccagtgtgtgttcgaccattgggacatgatgacctctgatcctcttgaagctggctcgcaggcttcaaccctggtgcaggatatccgcaagaggaagggtctcaaggagcagatgactcccctctccgatttcgaggacaagctctaaatttttggccgccgcatgtgttgtgcccgtacccttacatnngtctagtggtctactgctaagaga

SEQ ID NO: 413757 - DNA, 428 bp, Oryza sativa
gacctactgggataaaacgatttctatagcattagcaagctcattgctacaaattattaacagtaagatctcaaaatatagaacataagggagtaaacaaaactgaacaaccaaacaactacagtactgtacatgcctggtatcctacatgaggcgactgatctaggagaatgctgataagcatagatactgggcaagggaagggagcctgggcagtcagactcgcgggaagcgagaaggtcctctcctccgaaggaactcaggaatctcaatcatgctgccttctgcagaggatgggcgtcgaccattgtctccttgcgtttgttggccaccctttgtggtgcgaccttctggttcatcttgacgtttgaagccagtggcaatcaaggttatgctcacttggccattgagtgatgggtctatgacag

SEQ ID NO: 413758 - DNA, 450 bp, Oryza sativa
attatttagagtcgccttctccccttcttctcctcctcctcctcgattcggagctccacccgcagccatggctaagaactaccccgtcgtgagcgccgagtaccaggaggccgtcgagaaggccaggcagaagctgcgcgccctcatcgccgagaagagctgcgcccctctcatgctccgcctcgcgtggcactcggcggggacgttcgacgtgtcgtcgaagaccgggggcccgttcgggacgatgaagaccccggcggagctgtcgcacgccgccaacgcggggctggacatcgcggtgcggatgctcgagcccatcaaggaggagatacccaccatcttctacgccgatttctaccagcttgccggagttggggccgtcgaggtgtccggtggacctgcgcgcccctttcacccaagaagggaggacaaacctgcaccccacctgag

SEQ ID NO: 413759 - DNA, 557 bp, Oryza sativa
  unsure (1)..(557): unsure at all n locations
ttccatcntaaatttccctacattgcttcgatgggagtttatgtcttcaaaagagatgttcttttaaaccttctaaagtcaagatatgcagaactacatgactttgggtctgaaatcctcccaagagctttacatgagcacaatgtacaggcatatgtcttcgctgactactgggaagacattggaacgatcagatcgttctttgatgcaaacatggccctttgcgagcagcctcccaagtttgagttttatgatccaaaaactcccttcttcacttcacctcgatatttgccgccaacaaagtcagataaatgcaggattaaagatgcgataatttcccatggctgtttcttgcgtgaatgtaccatcgagcattcgatagttggagtccgctcacgccttaactctgcatgtgagctcaagaataccatgatgatgggtgcggatttgtacgaaactgaagatgaaatttcaagactactgtcagaaggcaaggtccccattggtgtaggggaaaacacanagataaacaactgcatcatcgacatgaacgcgag

SEQ ID NO: 413760 - DNA, 563 bp, Oryza sativa
  unsure (1)..(563): unsure at all n locations
ttctgttataaaatccggtaaattgaatgcagaattgctacgagaaatatgagatgcctaccttgatggaatcttttatgatgcagatcatagttaaggagaagggcatcttcaccaacgtgacgtctccgacagccaaggccaagctgaggctcctgttcgaggtggcgccgttgggtttcttgatagagaaagccggcgggtacagcagcgacggcaaacagtcggtgctggacaaggtgatcaacaacctcgacgagcggactcaagtggcctacggttccaagaacgagatcatccggttcgaggagactctctacggctcatcgaggctcaccgccggcgccaccgtgggcgccgccgcctaatcttttgctgcaacgcgagcccagtgtctctgcaggcctcaaaaacgctgaaactgcagtcgttttagactcccatcctgtaatgcagattgggttgtnagtgaagtgggacttgaaactgcaaagttatactcctttttgcaaggtaccccgttttttccccttttgtgtaacaagtgcatataaaggaaattc

SEQ ID NO: 413761 - DNA, 474 bp, Oryza sativa
ccgtatgatgagaccagagcgagcgcgcgcgccgccggagcaaacccttcctcctacccttcagccatggtgctctccaacgacatcgacctgctgaacccgcccgcggagctggagaagctcaagcacaagaagaagcgcctcgtccagtcccccaactccttcttcatggatgtcaagtgccagggctgcttcagcatcactactgtgttcagccactcccagacagtggtggtctgcccggcctgccaaaccgtgctttgccagcctacaggtggaaaggccaggctaacggaggggtgctccttccgccgcaagaatgattaagatctaaatatctgaaagcaaaaaaaagaaaaggcttgaacgagcttagtttctccaggatgtagtctgaaaattttgcaatgcctgtcaagtgaaccccatgtttggtaatttaatctctgggatatgtcatgactctggtacttt

SEQ ID NO: 413762 - DNA, 456 bp, Oryza sativa
  unsure (1)..(456): unsure at all n locations
caaatccattgctaagcttcgagctcccccattgatcagngagctagctagtagctggttggttaaaaggcctttttggtttgtttgagttggagcagaggagaagaatggcggctctgcttgtggtcgtgttggttgccatgtcggccatggtggcgacggccaactttaaccaggagttcgacatcacctggggcgatggccgtggcaagatcctcgaggatggccagctgctgacgctcacgctggacaggacgtccggctcagggttccagtccaagcacgagtacctctacggcaagatcgacatgcagctcaagctcgtccccggcaactccgccggcaccgtcaccgcctactacttgtcgtcgcaggggccgacgcatgatgagatcgacttcgagttcctggggaatgtgaccggngagccgtacacgctgcacaccaacgtgttca

SEQ ID NO: 413763 - DNA, 437 bp, Oryza sativa
  unsure (1)..(437): unsure at all n locations
gcatacattatgtagctagcttactctaattaaccttggttgtaatccatggcgagctgcagcaagtggctggccgggctgatgctgctggcggcggcgctggcgtgctcgctgccggcggcgagccgggcgcagctgcaggtggggttctacaacacgagctgccccaccgccgaggcgctggtccggcaggccgtcgtggccgccgtcgccaacaactccggcctcgccgccggcctcatccgcctccatttccacgactgcttcgtcagggggtgtgatgcatcagtgctgatcttctcgccgaacggcacggcggagcgcgacgcggcgccgaacaaccccagcctccggggtttcgaggtgatcgacgccgccaaggccgccgtcgaggcggcgtgcccgcgcaccgtctnctgcgccgacatcctcgcctt

SEQ ID NO: 413764 - DNA, 574 bp, Oryza sativa
gccgtgtcttgtcccctcgccgccgcagccagcgtcgagggctcggcgaccggaggaggagaggtcggaacccgccgccgccgccgccgcctccgcctgtagcgagatcgctcgatccggttcgcctcccgcgcgccagtccgccagcccagttcgatccgttgagggggaggggacgctctagtgtggggattgggggaatcgatggcggcgccgccggcgagggctcgggccgactacgattacctcatcaagctgctcctcatcggcgacagcggtgttgggaaaagttgtctcctcctacggttctctgatggttccttcaccaccagtttttattaccaccatcgggattgatttcaaaataagaacaatcgaactggatggtaaacggattaaacttcaaatctgggatacagctggtcaagaacgtttccgaactattacaactgcctactacaggggagcaatgggtattttgcttgttatgatgtcaccgacgagtcatcatttaataatataagaaactggataggaacatagagcacatgcttccgatatgtgaacaagattt

SEQ ID NO: 413765 - DNA, 561 bp, Oryza sativa
cccatactatactctccttcctcctctcctttcccctcctctctttccctctctcacaagagagagagcgccagactctccccaggattcagccatgaagggggccaaatccaagggcgccgccaagcccgacgccaagttggctgtgaagagtaagggcgcggagaagcccgccgccaagggcaggaaggggaaggccggcaaggaccccaacaagcccaagagggctccctccgctttcttcgtttttatggaggagttccgtaaggagttcaaggagaagaaccccaagaataaatctgtcgctgctgtaggaaaagcagccggtgataggtggaaatccctgaccgaagcggacaaggctccctatgtagccaaggccaacaagctcaaggccgagtacaacaaggccattgctgcctacaacaagggcgagagcactgccaagaaggcacccgccaaggaggaagaggaggacgacgaggaggaatctgacaagtccaagtccgaggtcattgatgaggatgacgaccagggcagcgaagaggatgaagacgatga

SEQ ID NO: 413766 - DNA, 591 bp, Oryza sativa
  unsure (1)..(591): unsure at all n locations
gcgatcgagtatggtcgccgncgntcgccgtcgtcctgctgctttcgccgcatccatcccggtgagcagtcacatcctccgccaccgccgcctgcgccgatccccatccatccctccagcgagcagggcgggcgccgtcgttcctcctgctgcttccgcccgcatccatcctggtcactgtgaaaatggaaggaaatgctagaggcggtgggcattctgaggcactgaagaactacaatctaggaagaactttaggtattggttcatttggaaaagtgaagattgcagagcataagcttacagggcacagagttgctataaagatcctgaaccgtcgccaaatgagaaatatggaaatggaggagaaagcaaagagagaaatcaagatattgaggttgttcattcatccccatatcattcgcctttatgaggtcatatacactcctacggatatatatgttgtgatggagtactccaagtttggagaactgtttgattacattgttgagaaaggcaggttgcaggaagatgaggctcgccgaatcttccagcagattatatctggggttgaatactgccacagaaacatgg

SEQ ID NO: 413767 - DNA, 461 bp, Oryza sativa
  unsure (1)..(461): unsure at all n locations
tgngttagtgcccatccgcccactccactccactccactcccctctcccgcacttccatccccaaccccgcccccgccgcggcgccaccttccccctctcctcttctctctctctctctctcatatgggctgccgcggcgcgccccgctactgtccatcctagcgcggagccgcagcttccccacacgtccatggccgccgccgccgccgccccccggttcttgcccgtccgcccgctctttctcctcctcctcctcctcgtcctggccggcgtcgcaagcggcaagacggtcaagagggacgtgaaagcattgaatgagatcaaatcttcgttaggatggagagttgtctactcatgggttggtgatgacccttgcgggcatggtgatctgcccccctggtctggtgtgacctggtctcagcaaggagattacagagttgtcaccgaacttngagtctat

SEQ ID NO: 413768 - DNA, 529 bp, Oryza sativa
  unsure (1)..(529): unsure at all n locations
tagagtanctagctcgggagagaaaggaagagacgagaggagagagatggccactgcttatgctcccatggcgagccagctgatgaagagcagcttggtgtgctccaagccgagggggctgtctggtgcttcgctgacaaggaggccccgcttcacagtcaaggccatccagtctgagaagccaacgtaccaggtggtgcagcccatcaatggcgaccccttcatcggcagcctggagacgccggtgacctccagcccgctggtcgcctggtacctctccaacctcccggcgtaccgcaccgccgtcagcccgctgctccgcggcatcgaggtcggcctcgcccacggctacctcctcgtcgggcccttcgcgctcaccggcccgctccgcaacacgccggtgcacggccaggccggcgccctcggcgccgccggcctcgtcgccatcctcagcgtctgcctcaccatgtacggcgtcgccttcttggcgagggcgagccgtccacggcgccgacgctgacgctcaccg

SEQ ID NO: 413769 - DNA, 328 bp, Oryza sativa
gtgggcagagagttccctggaaacataaaagttgaaatgctcactcccttcgcaggcattatcctgttcaggttcaaagggactttttaagcccaatttacaacaatgcaggccaagaggccttcaaatcgttgagaatacaggcacccctggtgccacttttattactaacaacccacagtgatgcaaagagtagaaaatttgacccgggaggaacacatttagagtttaattttattacaagccaggacagatttaacaaactgcgcttatcaacaccagctttattcaaggcacttatactgcttaccacctactaacatatgat

SEQ ID NO: 413770 - DNA, 392 bp, Oryza sativa
  unsure (1)..(392): unsure at all n locations
aattaaataatcccccaccatggancaccgcctccgccgccttggcctccacctcctctccccggcggcggccgccgcctcagtccccggcgaggaggagccgctgatccggcaggtggtcggcggcggcgacgacaacgagctggagctgaacgcggagcgccacttcgccagcttcgtccagaggttcgggaagtcctaccgtgacgccgacgagcacgcgtaccggctctccgtgttcaaggccaacctccgccgtgcgcgccggcaccagctgctcgaccccttcgcggagcacggcgtcaccaagttctccgacctcaccccggccgagttccgccgggcctaccttggcctccgcacgtcgcgccgcgcctttctgcgggggctcg

SEQ ID NO: 413771 - DNA, 300 bp, Oryza sativa
gttttaggtactatgacgggaagctgaactgctacaagctcaacactgattaaaaccccgacatagcgacccaacttgggataagaaggatttccacaatgatgagattcaagaacggtgagaagaaagatgcggagattggagctgtgcccgagagcacactggctagcactatcgacaaatacatcggcaggtaaaacgacagggtgaatatccaataggcaggagggctataaccttcacgcccagagggatatattgtcatctatgaactccataccttgacgagaataggcacga

SEQ ID NO: 413772 - DNA, 396 bp, Oryza sativa
  unsure (1)..(396): unsure at all n locations
ngattatattatgcaccgnncagaagcatatactncagggaggttccaagcggctacctttcactgtgccatccttagtattctctgctctcaagttggtccgaagattacaaggtcaagatggtgatgtaataggggaggaagttcctgcaacgcctaagaaaatatttcagatcttgcatcagaccattgaagctctctcatgtgttccttctcctgaactggctctcagattatatctgcagtgtgcagaggcggccaatgattgtgatctggaaccggttgcttatgagttctttactcaagcattcatcttatatgaagaagaaattgcggattcaaaggctcaaatcactgcaattcatcttataattggaacccttcacggatgaatta

SEQ ID NO: 413773 - DNA, 447 bp, Oryza sativa
gggaaacgaataaaatcattattgcaaaaacatcatcttcttcttcatcttcttagtgtacacaacaccaactcgatcatcatctcgtcgcactaaacccatcttccccaacccaaagacaacgaactcgctggccacaaatccatccaaccacaattaaccactgctaagctacggtcccccacttcacttgccggggacgaagttggtggcgtacgcccaggcgttgttgttgacggggtcggcgaggtggtcggcgaggttctcgagggggcccttgccggtgacgatggcctggacgaagaagccgaacatggagaacatggcgaggcggccgttcttgatctccttcaccttgagctccgcgaacgcctcggggtcatcggcgaggccgagcgggtcgaaggcgccgccggggtagagcgggtcgactacctctccgagcgg

SEQ ID NO: 413774 - DNA, 397 bp, Oryza sativa
gcgataaattctaacccaaaggcaagggagaagaggagcggacgccatggatgcttctcgcgttggccagctccgcactttcgtggaggcctgcaagaaggacccctccctcctcgccgaccccaacctcgccttcttccgcgactacctcgagagcctgggcgcccacctccccgccgccgccttcaccaaggccacccccaagcccaagccgtcctccatggatgacatcgacgatgaatacgacgacgacgacgacgacgatctcaacatgagggatgccactccggagccggacgagcttgaccaggacatcgtcgagtccgatcttgaacttgaaggagacattgtcgaatctgaccatcaggaccctccgcaaaagatgggagatccttct

SEQ ID NO: 413775 - DNA, 522 bp, Oryza sativa
  unsure (1)..(522): unsure at all n locations
gccgtctgttgctcctccctcgccaccgccgtctcctcctcctccgccaagcccctcgccggcatcccccccgccgcgccgcactccctctccctcccccgcgctcccgccgccaggcccctccgcctctccgcctcctcatccagatccgcccgggccagcagcttcgtcgcccgcgccggcggtgtggacgatgcgccgctggtcgggaacaaggcgcccgacttcgatgcggaggcagtcttcgaccaggagttcatcaacgtgaagctgtccgactacatcgggaagaagtacgtcattctcttcttctacccgttggatttcaccttcgtctgcccgaccgagattaccgctntcagtgacagatacgatgagttcgagaagttgaacactgagatcctcggtgtttcaattgacagtgtgttctcccatctggcatgggtgcagacagacaggaaatctgggtgggctggtgatctgaaatacccattgatttcagatgttactaaatcaaattcg

SEQ ID NO: 413776 - DNA, 299 bp, Oryza sativa
gagacggggagggcgcgcgggggcgttatattgacgttctctagcgatcatgccatgcgcgacgccatagaggggatgaacggcaaggagctcgacggccgcaacatcaccgtcaacgaggcccagtcgcgccgctccggaggcggaggcggcggtggctacggccagcgcggcggaggcggaggctacggtggcggcggctacggtggtggtggcggcggcggtggctacagccagcgccgtgaaggcggctacggcggtggcggtggctacggtggcggccgtggtggcggctgcta

SEQ ID NO: 413777 - DNA, 458 bp, Oryza sativa
tttagcatattgacacatacgacaccagtggtccacaaaacattagttcaaggattggacttccaaagataaggaaggaatggattgacaggagggagaagttaggtggtcctcggtacacacaaatgtattacgctaagcagggaatcataacagaggagatgttgtactgtgctacacgtgagaaccttagtcctgaatttgtccggtcagaggttgcccgtggacgagctataattccttccaacaagaggcacctggaattggaacccatgattgttggacgaaacttccttgtaaaagtgaatgcaaacattgggaattctgctgttgtgagctccatcgaggaggaagtacacaagctccagtgggctacaatgtggggagctgatactgccatggacctttcaacagggcgtcatatccatgagacccgggaatggatccttcgtaaatct

SEQ ID NO: 413778 - DNA, 465 bp, Oryza sativa
tatacttgcgcgactacctccgcctccactgctacccgctttaccgctacctccctgattggccatccaaccccccttccttcagggagatcataagcacatactgcaaagaagttcgggagctcggattcagactgtacggagcgatatccgagagcctgggcttggaacaggactacatcaagaaggttcttggtgagcaggagcagcatatggcggtgaacttctaccccaagtgcccggagccagagctgacgttcggactgccggcgcacaccgacccgaacgccctcaccatcctcctcatggaccagcaggtggccggcctgcaagttctcaaggaaggcaggtggatcgccgtgaatccacagcccaacgcgctggtgatcaacattggtgatcagctacaggcgctaagcaacggaagatacaagagcgtgtggcaccgtgctgtcgtcaactctg

SEQ ID NO: 413779 - DNA, 454 bp, Oryza sativa
gcaagtggccttttgtgtgtgtgaacttgtcctcgaacagtgctgtgagaaacagtgtctgtactactgatacatatatcgtatatatcctaaaaacatgcatacatttttgttggtgcatgctgaggagatgtagaacggtagccgctctgctatcgtcacagaataaacagttgttaaactaagatgtcagcatcaggtaattcaagcaccttgtgcgttccttttgatttgcttcctggtctaaattggtttccttcaatgtacagctccttcaaaaatggatgtttgtataatccttcaggaatcctcccaatgaagttgttattgtccaagtataaataggtcaatcttggaatatgaactagctttggtgatatcgatccaatcagcctattattagacaagtgcagtatcttgaggtttgtcaaatttgcaatctggtctggcagaa

SEQ ID NO: 413780 - DNA, 203 bp, Oryza sativa
gggaaacgaataaaatcattattgcaaaaacattattttcttcttcatcttcttagtgtacacaacaccaactcgatcatcactctcgtcgcactaaacccattcttccccaacccaaagacaaccgaatcttgctggcacacaaatccattccaaccaccaattaacccactgctacagctacggtcccccccactttcact

SEQ ID NO: 413781 - DNA, 502 bp, Oryza sativa
tatcatactcagctctcacagctcactgcatcaatggccgtggccaccatggcgctctcctccccggtgatggcccgcgcggcgccgtcgacctcctccgcgctcttcggcgaggcgcggatcaccatgcgcaagaccgccgcgaagcccaagccggcggcgtcgtcggggagcccgtggtacggcgccgaccgcgtcctctacctcggcccgctctccggcgagccgccgagctacctcaccggcgagttcccgggcgactacgggtgggacaccgcggggctctccgccgacccggagacgttcgccaagaaccgggagctggaggtgatccactcccggtgggcgatgctgggcgcgctcggctgcgtcttcccggagctcctcgcccggaacggcgtcaagttcggcgaggccgtgtggttcaaggcgggctcgcagatcttcagcgagggcgggctcgactacctcggcaacccgagcctgatccacgcgcagagca

SEQ ID NO: 413782 - DNA, 557 bp, Oryza sativa
ttccgtggtgtgctgcggcgtcgggaggaacaacgggcaggtgacgtgcctgccgtacgaggcgccgtgcagcaacagggaccagcacatcttctgggacgcgttccacccgtcggaggcggccaacatcatcgtcggccggcgatcctaccgcgccgagtcgcccaacgacgcctacccgatggacatcgccacgctcgcctccgtctgagatcgatcggatcggtagctgctcgcggctcagtatatacatacatacatacgcacgcagcctcaagattcccagcgcccacaagctaaagggtgtaactctctctttttttcccctttttttgaggtggttatattacttcggtttgtaccgggtaggcaataattgttgtcataaggattggtgtcttcctagtcgttttcaacctactgcgtgcctggaatcttgatgggtgagagaggagagaacaggcattcggttcttcggtttatagatgtgttcagtgctggagagagcacagataaatatgttcagacaagacatattttagattcggagatttttc

SEQ ID NO: 413783 - DNA, 524 bp, Oryza sativa
cataactgcagaaactgtgcttgtgatttttgagaaagcatgaacccatcttcaggagagtcttagacgcgtggagggcatagtcacagatgaaattggctgtaagattgtagagattattgctgagttggaagaagtggtatttacattggatcaatcagagaaggaatctggtgacgaggtgatcaatttgctccagagaaacaggaaaatgaatagttccagtgatagtggggagcttgaggtttttcatatggctgcactaaaggtgggaattacgtcttccagggcagcactcactgagagaagggccctgaagaagctaattgagaaggctcgttctgatgaagataagcggaaagagtatgttgtgtcatacctgtacaatctaatgaggaaatactcaaaatttttcagaagtgaggctggtgatgatactgattctaaggatcgtcttcatgctcgccgacagtattaggcatggaggacatgtatggaccctatgggtatggccgagcattcag

SEQ ID NO: 413784 - DNA, 399 bp, Oryza sativa
tatagcctatagcgtctctgggggggttctttgacaccactcctctcttttctccggctcctctcctcgctgcattgcgatcccaagagcctgtgagcctttaatgagctttgttcatcacgacctgaaaatcatggagtccgaagaccgctgccacaaggtccaggagcccaaattcgactgcctgctgtttgacctcgatgacactctgtacccactgagctcggggatcgcgtcccatgtcaagaagaacattggagattacatggttgagaagctgggtattgaggagagcaagattgagaaccttggcaatctgctgtacaagaactacggcacgacgatggccggactcagggcaataggctacagcttcgattacgatgagtaccacagttt

SEQ ID NO: 413785 - DNA, 222 bp, Oryza sativa
aataactcacgacaaaaggagctaaacattattggtatggtagtatgttcagtggtgtgcattattagcattgctcaagctgcaggtagcttcagggaagtgaaggggaggaaaaagagtagctgttccagcacaaaactactagcattacataagcacagaaaaaggtatgatcctcttcagacatcttcccacgccgaaggagaatggggtgaagatctt

SEQ ID NO: 413786 - DNA, 491 bp, Oryza sativa
cgaaaattctgaatgagggacagagtgcttctacagatgttgtcgcggtggttgccagcccaccttatgtgttccttcccgtggtcaagagtcagctgcgcccggagatccaagttgctgctcagaattgttgggtgaagaagggcggggctttcaccggtgaggtcagcgctgagatgcttgtcaaccttagtattccctgggttattcttggacactctgaaaggaggagtttgttgggtgaatcaaatgagtttgttggagacaaagcggcatatgcgctctctcagggcttgaaggtcattgcatgtgttggtgagactctcgagcagcgggaatctggatcgaccatggatgttgctgctgcacaaacaaaagcaatttctgaaaggatcaaggattggactaatgtggttgctgcctatgaacctgtgtgggccattggaactggtaaagctgctacaccagatcaagcacaagaagtgcatgat

SEQ ID NO: 413787 - DNA, 367 bp, Oryza sativa
gccaaagcaaaggtctataatttaaatgcccaaaactttaacattgttcaagtcgatttgtcgtctcaaagtaacaaatacccaagtaccaactttggcatcaaaactatgatttctggaatacattgggaacaatccaaggaatgcatcttcaagcagtttcagtcatagggtactcaaaggcaacatctttcccacaaagcctgcggtagaccgcggagaaggtctcgagcttgtattcggtattggtgcgctcctttgggtccaagaaaatcttgatgaccttggcaccatccagacggtatttgatgcgcttgccaacaatctcagctgggtagactacatccttcaagattcccatatgaac

SEQ ID NO: 413788 - DNA, 277 bp, Oryza sativa
tcaggggccaggtaagcgaagaggttcacttcgaggaagaagacccttattgagaagggcctcgagccctccgagttcgaggactccgtcgcgcaggctttctttgacctcgagaatggcaaccaggagctcaagagcgagctcaaggacctgtacatcaacaatgcagtccagatggatattgccgggaacaggaaggctgtggtgatccacgtgccgtaccgtctgcgcaaggcattcaaaaaaatccatgtcaggcttgtcagggagctccaga

SEQ ID NO: 413789 - DNA, 536 bp, Oryza sativa
gcagaacttttgggacctgacaggctatttttatgtcgatcatcctcctgtcccgcgaagaaggggccgtttaaacctctaaatccacatataaacactgagcaagctgatgcagttgcaacaatacttggctgccgaggggttgcgccatacgtgatatacggacctccaggaactgggaagaccatgacccttgtggagtctattttgcagctttatacagccaagaggagggcaaatgtcctcatatgtgctgcttctaatagtgctgctgaccatgtattggcaaagcttcttcaggctagctatctgattcgaccaagtgacatatttaggctaaatgctgccagccgtcaatatgaggatgtcgatcctgattttattcgattttgcttctttcaagatatggtgttcaagtgtcctccattgcaagcactattgcggtacaagatagttatatcaacctacatgagttcatcgatgctgcagtctgaaggcattcgtcggtggcatctcacacacatttttttggatga

SEQ ID NO: 413790 - DNA, 466 bp, Oryza sativa
aaaatggaagtacttttcttcaatatagagatacctcctgacgttaaacatgtgtatgagtatctctatctattaaagctagaagatacctattaaagaagtgcaaaagaattctttccaaggagatccttctcggaaacaatatgtaatttaccaacttcttgaaaaacaacaataaatcgtaaacaatggatagaagccatgagtgacactagtcggctgggcgaatacggagtactccgatcgataggaggctgtgactcgctagttcttttccttctccttgttcttggaagggacgcggccgtcggtcccggcgagtatgctgtacttctccttgcgcgttatggcggtgcactcgaagccgagctggccgctgagcgtcttctggatgtagttggccacctcgatgggcgacttgccgccgctgcaagtgagctccttgggcagctggttcaggaaggtg

SEQ ID NO: 413791 - DNA, 386 bp, Oryza sativa
agcacttcgactcatatgtgctggcagagtttagcctttttgtccatccccacacggatgttctgaagacctgtggtacaacaaagcttctgctctccattcctcgcatccttgagcttgctgcagagttgtcactgcctgttctatcagtgaagtactctcgtgggatgttcatcttccctggagcgcagccatcaccgcatcgcagcttcttggaggaggtttctgtgctcaacagcttctttggtggcctcaagtcaggtggcaatgcttatgtcattggtgatgcattcaagcccaagaagaagtggcatgtctactatgccacagaagagccctgagcagccatggttacactcgagatgtgcatgactgggctggatgct

SEQ ID NO: 413792 - DNA, 269 bp, Oryza sativa
tcgatggcctttggaattcgagaagaagcttcaagagatcatcgagctttggcaagcttgcagcatttccttggtccacaggacttactttttcttgctattcaagggagaagcagctgactcgatctacatggaagtggagcttcgaaggctatcattcctgagagatacatactcaagggggagcacccctagcaatgcgatagtaggcagcctgagtacttcccctgttgcgagcgcaaaaagctgcagcgggagaaggaagatgc

SEQ ID NO: 413793 - DNA, 455 bp, Oryza sativa
aaagctcctaatatcatatatatattacatgataaataagatacacaattacatacacaatacaattcttccttccgttcatcggttatacagaacattccttcacaaaatcacattagcagacagtcgatgctatactgcgaaagtcaaataccacccacctcagttttgtgcgcttatgctacaatttcagatgacttctttgcccagtgattacgcctatgatcgcaattcccttgtgaatgggccggtcttcagattttgtcacaccagagcacgagagaatgtactacacttttcacaataaaaggtactgtttacatctagtttaatgttgaaccaatctaccacgaatgctcagtaccaccatcacctgtaacgttttttttttacatgcatgaacagggttgaattcgataaacacaatgtttgcgagcttggtacggaacaatgag

SEQ ID NO: 413794 - DNA, 378 bp, Oryza sativa
  unsure (1)..(378): unsure at all n locations
cgacaccgattagctatgatgggccgaagaggcagagactaaaccaccacaggagcgcggagagtcaccacacgtccaatggagtgacactaccggatgctctggctgttgatggtcccgttctgcaacaaggtaaaccagaacaaacctctgtggttgcctggaaactttctgatgcacagtccctgatggagcctgaaaagattttgctaacaaaatgggttcggataaggggctttgtgaaggaaatggtccaagtccctctgcggatctacgttctaactacctaatgaatactagcattgctgggcttgagaaagctgatgtcctncttttggttggtacacagccaagaagtgaagctgctatggttaatgc

SEQ ID NO: 413795 - DNA, 488 bp, Oryza sativa
  unsure (1)..(488): unsure at all n locations
ccagcaagccaccggcgtcgactgcgtcgtgatgtacagcccgcgggtgttcgagcgcgccggcattaagtcgaagacgaactcgctgggggcgtccatggcggtgggcgtttgcaagaccttcttcatcccgatcgcgacgctcctcctcgaccgcgtcggacggaggccgctcctcctcgccagcggcggcggcatggccatcttcctcttcaccctggccacgtccctgctcatgatggaccggcggccggagggcgaggcgaaggcgctaggcgccataagcatcgccgcgatgctgtcgttcgtggcgtcgctcgcctcggggctgggccccgtcgcgtggggtgtacacgtcggatatctacccggtgcggctgcgtgcgcaggcggcggccatcgggacggggctgaaccggctgatgagcggtgccacaccatgtacttactctcgctgtacacgccatcaccatcgncgggagcttcta

SEQ ID NO: 413796 - DNA, 534 bp, Oryza sativa
gtgatcggatccccacagctgtgcgtttgtttctcctctcgatctccattcttccctgagttcctcgtttgctccgcctctctttcactcatgggcaagattaagatcggaatcaatgggttcggccgcatcggcaggctggtggccagggtggcgctgcagagcgaggatgtcgagctcgttgccgtcaacgatcccttcatcaccaccgagtacatgacatacatgttcaagtatgacaccgtccacggccagcggaagcatcatgaggtcaaggtcaaggactccaagaccctcatctttggcacgaaagaggttgcggtgttcggctgcaggaaccctgaggagatcccatgggctgcggctggtgctgaatacgttgttgagtctactggtgttttcaccgacaaggacaaggcagcagctcacttgaagggtggagccaagaaggtcgtcatttctgctcccagcaaagacgcccacatgttcgtttgtggtgtctacgagaaggagtacaagtctgacgctaacatt

SEQ ID NO: 413797 - DNA, 502 bp, Oryza sativa
  unsure (1)..(502): unsure at all n locations
ggcaggcaatcagcggcgaggcaccagccctccggccggcaatggcgtccacctcctgcttcctccaccagtccacggcccgcgtcgccgcgcgcgtcgcctccccgtccccggcgacacggacccacctcctcgtctgccgcgcccagaagcaggacgacgccgacgtctcccgccgcgcggcgctcgcgctgctggccggagcgacagcggcggtggggatgaaggatggcgcccgccgccgcggcctacggcgaggcggcgaacgtgttcgggaagcccaagacgaacacggagttcatcgcctacagcggcgaggggttcaagctgctgatcccgtccaagtggaaccccagcaaggagcgcgagttccccggacaggtcctncgctacgaggacaacttcgacgccaacgcaacgtctccgtcataatcaaccccaccaccaagaagaccatcaccgagttcggctccccgaggagtttctcgcccaggtcgacttc

SEQ ID NO: 413798 - DNA, 358 bp, Oryza sativa
tcgttcgctcgacggcctcgtcggggtcggagccgacgatcaccgccgccgcgccgtcgccgaacagcgcctgcccgaccatggagtcgaggtgggactcggagggcccccggaacgtcaccgccgtgatctcggagcacacggcgaggacgcgcgcgccgcggttgttctcggcgaggtccttggcgacgcggagcaccgttgccgccggagaagcacccctgctggtacatcatgaggcggttcacgttgggccttaggccgagcatcttggcgagctggtagtcggagccgggcatgtcgacgccggaggtggtgccaaagacgaggtgggctgattgtgggagcactgtttgcc

SEQ ID NO: 413799 - DNA, 351 bp, Oryza sativa
cccctgacggaggagatcctgcaggagaactttaacatgtgcgcgcacatgtgttccgccgctggacgcgcgagaggacatcgtcgtcgtcgaggcccccaagctggggaaggcggcggcgcacaaggcgatcaaggagtgggggcagccgcgctcccgcatcacccacctcgtctgtatggccacctgcggcgcagacatgccctgtgtgaactaccagctcggcgacaggctcgacctgaggcccaacgtgaaccgcctcatgatgtaccagcaggggggcttcgccggcggcacggtgcttcgcgtcgacaaggacctcgccgagaacaaccgcggcgcgcgcgtctc

SEQ ID NO: 413800 - DNA, 537 bp, Oryza sativa
ttgcgcaggaggcctttcttgatgaagaattttgaaaatgttatgcgcttattccttcagtcactggagttcttcgaagaaaatgagaggaagaaacttgccattttcacagcacttgccttttctcagaagttatcaggtcttccacctgaaactgtcttccagccactgctcaaggataatcttgtttccaaagggatagtgctttcgttcattactgagtttttcaaagaatatctgaaggagaacactttagatgatcttattgcacttttgaagaaaggcaaaatggaggacaatttgctggaatttttcccatcggcaaaaagaacctccgaggctttatctgaacatttcactaaagaaggtctgacaagtcttgttgagtacaatgaaaagaagatgctcgaggctaaacttaaggagataaagttaacactgacaacaatgatcaatgaagaggctgaaatatctgaagtcacagaagctgtcaagcaacaggtgaaagatgctaaatttcctgatatagaggtgttc

SEQ ID NO: 413801 - DNA, 371 bp, Oryza sativa
ggggccagaatcacatatggttccttcatattgaaagagacagtattacaaatgcggttacacaacaacctggaaaaaaaaaagaacaagacaaactgattgagcaaactgcaaagcttttttgcagtttcagctgactcaaaaaaaatgaaaaaggggtaaaacgccgaaaatatttgaacactaaaactttggctggtaccccgatatcactagcaacttcgcaaggggatttcaaccctttcatcattttcccatctttttttttttccatggagcaaccagtcactactggtcaaagacacatcaagttggcggcggtggctccaacaacgggcggaaatggagggagattaccaaagaaaaccccc

SEQ ID NO: 413802 - DNA, 397 bp, Oryza sativa
gacccaggtcaccgttgagtacctgaacgacttccggcgccatggtccccgtccgcgtccacaccgtcctcatctccacccagcacgacgagaccgtcaccaacgacgagatcgccgccgacctcaaggagcacgtcatcaagccggtcatccccgacaagtacctcgacgagaagaccatcttccacctcaacccctcgggccgcttcgtcatcggcgggccccacggcgacgccggcctcaccggccgcaagatcatcatcgacacctacggcggatggggcgcgccggccggcggcgccttctccggcaaggacccgaccaaggtcgaccggagcggcgcctacatcgccaggcaggccgccaagagcatcgtcgccagcggcctcgcccgccg

SEQ ID NO: 413803 - DNA, 387 bp, Oryza sativa
ccgtcatcttcccatcggaaggaaggtggttcttataacaaggcgcatactgtggccatgagagcgaacgtggaggcatgtatggcgtatcatcaggtgaatgggagtaagaagaacaggatccactactctgggccgttgatgcctcacggaggtaacatggaggagattctcaaagaacacgagcgtcaaatccagcaggcggtacgaagggcgcgcatggacaaccaggcaagaggcacgcaggcgttacggacggatcgctgattgatctagttatgcaagggagctgagctgcctctggtccatccctgaattcctgatgatggacagagatttttggttggctactatatatatattgttggcatgcattgaattgctcat

SEQ ID NO: 413804 - DNA, 484 bp, Oryza sativa
tttgtttcgccctttttttttttttttggatataacttcaaaatatctggggaaataacatcagattaaccaaggttcaaaaagtggctgctcggtggacacgctattaataaagtactttggagttccttgttcgacagctcaagctacatactggaagcgcaaacagctgcagatgatctctcacttgagagggataaaccgtgaggagtgggtagcaccaataccaggcctaccgtgcttgactggcttgtacgagatggagaactctgcgaggtagtggccaatcatctcaggcttgatctcaacctggttgaaggttttgccgttgtagacaccgacgatgcttccgatcatttcaggcacaatgatcatgttcctgaggtgggtcctcacaggctctggcttctcaccagcaggtgcattctttttcgccttgcggagcttcttgatgagctccatgggctttctttttcaagcccct

SEQ ID NO: 413805 - DNA, 475 bp, Oryza sativa
tccaagcagctcgcgcctcggccctttttagagctccagctctcccttaccccttcaacaatggcggatgtcgaggtcgaggcggaggtggccgcggccggagcgccgaagaagaggacgttccgcatgtacagctaccgcggcgtggacctcgacgcgctcctcgacatgtccaccgacgacctcgtccagctcttccccgcgcgcgcccgcagaaggttccagaggggcctgaagaggaagcccatggcgctcatcaagaagctccgcaaggcgaaaaaggatgcacctgctggtgagaagccagagcctgtgaggacccacctcaggaacatgatcattgtgcctgagatgatcggaagcatcgtcggtgtctacaacggcaagaccttcaaccaggttgagatcaagcctgagatgattggccactacctcgcagagttctccatctcgtacaagccagtcaagcacggta

SEQ ID NO: 413806 - DNA, 257 bp, Oryza sativa
cggatacaaattaaaacactagaacacagtacgtacgtacgtagtagaactcattacgcacatttttttttgttgtctacgtacatagcacagcacgtacgtataatagtacgtataatacgagactaattaatcaagatacgtaggtaattaattaacacggatcgatagcataacacatttggtggtacgtaattaattaatctgattaattaattacgcggcgaagagagaggggcacacgcgataataatata

SEQ ID NO: 413807 - DNA, 472 bp, Oryza sativa
  unsure (1)..(472): unsure at all n locations
tatacaatccaggattgtggggcatttttgaagaattttggcggtcatttcccctagncatgcatatcagatcattagaatcggcggagttgacggcttcactcacatgctcaaatggatcgcaaaatctggcattatatcttgatcgagaaactgatttggtaaattggacatagacagagctgccgttactagctcatgggacatgcagatcttcaagacttgtactgacaactaggagaaggggagcgatatggcttgatcaggtgtcactcatgccttcagaaacatacaaggtgcattgcctttgatcatcttattgctattgtcatcatagcttgatccggaatctgctatcatcttatgaagaatggagaataatattcatgtactgaccccaaagatttagtcactagtataagcatgccaggctcaatgggcaccctcttcaaatcatgtatgctatatgaca

SEQ ID NO: 413808 - DNA, 451 bp, Oryza sativa
aatccacggatcccaaatgttctcattgattgatagcgatatcatagaagcagcgacacgaattaagatttaaaaccaaccccaagaaggatcgcagatccaactccaccgaatcgatccaagaactccgcctaatccaaccaaaccatgggcgatctcatctcaccaacacgacacgaactcataaaaagactaacaccaccaccaccttcttcttatttagggacttgacgactcaagacgactgatactggcgaaaggcgaaggggaacagcacagatctaggagagctggccgcagtcggcgatgacgaccggtttggcggtgctcccgccgcgggatcccaccttttcgatggccttgacgacgtacatgcccttgacaacgcggccgaacacgacgtgctttccgtccagccagctgcagggcacggtgcaaatgaagaactggg

SEQ ID NO: 413809 - DNA, 498 bp, Oryza sativa
  unsure (1)..(498): unsure at all n locations
tcaaacaaaaagaaaaaatgttgcccatctgtgaaattcgcataaccctatcgcggcggcgatgtcgaacacgagggtgttcttcgacatgaccgtcggcggagctccggcggngcggatcgtgatggagctgtacgcgaaggacgtgccgcggacggcggagaacttccgcgcgctctgcaccggcgagaagggcgtgggcaagagcggcaagccgctgcactacaaggggagcaccttccaccgcgtgatcccggagttcatgtgccagggcggcgacttcacccgcggcaacggcacgggaggggatgtcgatctacggcgagaagttcgccgacgaggtgttcaagttcaagcacgacagccccggcatcctgtccatggcgaacgccgggcccaacactaacgggtcccagttcttcatctgcaccgtgccctgcagctggctggacgggagcacgtcgtgttcggccgcgtcgtcgaggcatggacgtcgtc

SEQ ID NO: 413810 - DNA, 514 bp, Oryza sativa
taagaagttatatgctgacaagcatgatgtgctggtccctgatatattttgggactacacaagtgcaaaggttctgacaatggagtggattgagggtgtaaagctaaaccagcaagcagctattgaaaaacaaggttcgaaggttctggatttggtgaacattggtattcagtgcagcttaaggcaactattggagtacggttactttcatgctgatcctcatcctggtaacatattggcaacacccgaagggaagcttgcctttcttgattttggtatgacgagtgagaccccagaggatgcaagagtagccatcataggccatgttgttcacatggtcaatagggactatgaagcgatggctcgtgattattatgctctcgattttttggaacctgatgtagatgtttccccaattgtccctgctcttaagagtttctttgatgatgctctgaactcgacagtaagtgagctaaacttcaaaccatagctgatggcttagcgctgttctcta

SEQ ID NO: 413811 - DNA, 242 bp, Oryza sativa
tctgttcgcggcggcgaacacggacgccatggcgaacgctgggatgttcccctccccgaacagctcgtcccagggcccggcgccgagggcgatggccatctgcggcacgacgatggagatgttgaggacgccggtgcagaggccctgcccgccgccgtggctcgccgcgagctgcgccgtgacggcgaacgggacgctgcagaggacggcgaaggggaggccgaggaagactaagagcgcca

SEQ ID NO: 413812 - DNA, 339 bp, Oryza sativa
gaggaggaaagcgaagccaagcgagagaggtttccgccgtcgccttcccctccgccttccgatcggtcgcgaggtttcaagatggcgacgtgcacacttgcaacttcatgtgtgtccttgagcaatgctagaactcaggcctccaaggtggcggcggtcaagagcccggcatctctaagcttcttcagccaaggcatgcagtttccaagcctgaaggcctcctccaagaagcttgacgtctcggcaatggctacctacaaggctaagctcatcacaccagaagggcatgagcacgagctcgaggctccggatgacacctacatccttgatgccgcccag

SEQ ID NO: 413813 - DNA, 430 bp, Oryza sativa
gcctccaaaccctagacgcggcggccatggttcttcgatccgtccctctcctcctgcgcctcctctcccccactgcctccccctccccctccccgccccattctctcgccgccgccgccgtctcccgccgcaccgtcacctacatgccgcggccgggggacggcgccccgcgcgccgtcacgctcatcccgggcgacggcatcgggcccctcgtcaccggcgccgtgcggcaggtgatggaggccatgcacgcgccggtctacttcgagtcctacgaggtccgcggcgacatgccgacggttccccccgaggtcatcgactccatccgccgcaacaaggtctgcctcatgggcggcctcgccaccccagtcggcggagggtgtctccttcctcaacgtgcagctccgcatggagcttgacctttacggcc

SEQ ID NO: 413814 - DNA, 535 bp, Oryza sativa
  unsure (1)..(535): unsure at all n locations
acctattgtgcgaacatccctgttcctctgctccagtgtttacattgctacaagtccctttgcatatctcctcttcggcgagggtaccctagatgatgttctcgctaacttcgatgcaaatcttgggattccatttagttccgtctttgatgatatagtgcgagtgagctatgctgctcacgttatgcttgtctttcccatagtcttctttgcccttaggctcaacttggatggactgctcttccccacatcaaggcacatttctcgtgacaacaagagatttgccataatcactatctcactcctcacagtaatttatcttgctgccattttcataccgagcatttgggatgcattccagtttactggtgcaactgctgctgtcctgattggtttcatcttccctgccatggttatacttanggatccttatggaatcgcatcaagcgtgacaagatcttggctgtaaccatgatcgtgcttgctgtcctctccaattctgttgctttatacagcgatgcaatgaatatcttcc

SEQ ID NO: 413815 - DNA, 525 bp, Oryza sativa
ggttcgtacgtataggatattggagccattgatcgatggccgtcgacatggatgctcgacggcggtggcgacggcaagggcaaagccccgccgcagataagcctgtcggtgctattccttgcgtgcatggtcgccggtggcgtgcagtacggctgggcgctgcagctctctctcctcaccccgtacgttcagacattgggaattcctcatgcactcacttcagttatgtggctctgtggccctattgctggcttaattgttcagccatgcgtcggcctgtacagtgacaagtgcacatccagccttggaagacgtagaccggtcatcctcactggatgcataatcatctgcatatctgtgatcgtcatcgggttctgctcggacatcggctacgctctcggcgacgcgactgaggactgcaaggcttacaggggtcctcgttaccatgcagcggcggcattcatcctcggattctggctgctcgacttctccaccacaccgtgcagggtccagctcgcgctctga

SEQ ID NO: 413816 - DNA, 447 bp, Oryza sativa
gaagataataatattgcaaattatatccaaaaccacgaattgtattacgccatagcagctggttattattgactagctagtattaccattgggttcccatctcttagccccaaccttgaaacgcatactaacgaaagacaacattcaaaaccaccatcaaagtccgatttaattgagagttgagacaactggtacacacgatggaccttgccgacgacattgagagttttttgcctcttggcagaaaattttcaagaaaaagcaccttagtaaaggtctccttccttgggagtatggatgacgcagtcggacttagggtaggagacacatgtcagcacatagccttcttcctgctgcgcatcatcaaggaatgatccatccgactggtcgacggagccagcctcgatcttaccggcacaggtagagcatgctccagcacggcatgag

SEQ ID NO: 413817 - DNA, 484 bp, Oryza sativa
cccacttgtctgcagagaaacctcacttctctatatgtttggaatggctcctgtttacggcatttgatgcagagatatcaagccaaagtgcttcaaaaaaccagctttcgcagaaaaatgaacctgcaaagaagtctcttctagacaagacatgtgacctacttcgaaactttccagaatacatggatgttgtagtcagtgttgctaggaaaactgatggtcggcactgggcagatcttttacatgcagctggacgatccacagagatgtttgaggaatgcttccaacggcgatggtataggactgctgcttgctacattctggtcattgcgaagctggaaggccctgctgaccctcagtactgtgcactccgtttgctacaagctacacttgatgaatctctctatgagcttgctggggagctggatcgcttcttgctaagatctggcagagactttgaaaatgccagtacagactctgaaaa

SEQ ID NO: 413818 - DNA, 443 bp, Oryza sativa
  unsure (1)..(443): unsure at all n locations
ttcttgatcctgatgaaattgaagaagagcagctttagagggaccgtaagaatattataaacatggatttccagaactttgtgaacaaggttaatgatcactggtcgcagccacaattcaaggggctggatcttgagtttgatgtccctcttagagagcttggattccatggtgttccatataaagcttcagctttcatcattccaacttcgacttgtttggttgaactaatagagacacccttcctgggtggtgaccctgagtgagatagagattgctaatttgagagggggggctttgggacaaagaactctgacatggctatcgtgctcaaggatttcagatggatgttcttcgcattgattccataccatcaacatcacttgatgcaaanaaggaggtggcttgacacgactgacctcaagtactatgagagcaggctg

SEQ ID NO: 413819 - DNA, 396 bp, Oryza sativa
tcctctctctccctcttccgccgccgcgcttggtgaaggaaggagaaagcaagccatcggcccccgcctccgcctccgaagggacattgttgctagttggtgatggctgagcaggctaatcaaccgactgtccttcagaagttcggtggccagttccaccttggctccagcttttctgaaggtgtacgggctcgcaacatctgcccatctgtctcatcctatgacaggcgctttaccacaaggagctacatgacccagggccttgtcaatggtggcatcaacgtcccaatgatgtcgtcctctccaatttttgctaatgctccagctgagaaaggtggcaaaaacttcatgattgatttcctcatgggtggactgtcagccgcagtttcaaagact

SEQ ID NO: 413820 - DNA, 463 bp, Oryza sativa
aagatcaaaatcaaacggactcgactgtttcctctttttagttaaacaaccaaatttgtttgtttcaggaccagtacacgcgagtcaaaccctagtacatgcgagtcaaaaatgactatcgatttcagtaggaatacatgcatataacaactattcccggtaagcaatgaacttcgcaatatcatcaagtccagcttctctgtaacatccagcaattcgatcaacaacatcgtcccaattaccatccaccgatgccaaatccattagaaatgctgcctcgtcaagaaccacctgttctggagcttttcctttcttcagatcctcacgcttgccctcctcactaaccttctctcgtataaactcaatctgctcatcctcccacccagctaattcagcagcctcctgtcatatgaaaacggtgggtatatattgatccggttttctgggaggatgggaaaagaaa

SEQ ID NO: 413821 - DNA, 448 bp, Oryza sativa
tcaagctagctagcttaatcacctagctatccgtcagtttagctagatatggctgcagttaactgcaaggtggtggtcgccgcgattgtggtggcgatggtggctgcggcgccgggggcgtcggcggcgataacgtgcgggcaggtgggatcggcgatcgcgccgtgcatctcgtacgtgacggggaggagcggcctcacgcagggatgctgcaacggagtgaaggggctgaacaacgccgcccgcaccaccgccgaccgccaggcggcctgccgctgcctcaagagcctcgccggcagcatcaagtcgctcaacctcggcaccgtcgccggcgtccccggcaagtgcggcgtcaacgtcggcttccccatcagcctctccaccgactgcaacaaggtcagctagatcaattaatcctgcttggatcgatcgatcgagcttaacacgc

SEQ ID NO: 413822 - DNA, 470 bp, Oryza sativa
gaataaaacatgttttcaattaaatggtcaatacaattatcgtttcatactgaacacatgataatgaaaaatcaaatgacaaatttttttagaaaagtacattattgattactaatagcacatacaacacatcaacacattgccacaatctctactgtcatttcacttgtcaaaatatttaacattaagactgttcgttcaatgattgtggttgtggctgctcaccttgccaagcccatacaatatcctttagtgctggtctcatctcttgtttgaccttttgatactcaagtgtatcaccatttatcttcgtaaattccactaaatgaaaatctggtgtgatctgaaatatttcagcattgatggacattacacctttccttcctggttttgatccttccatctttaacaaaccaccatttttcttcaagaattttaatcgtaaattcttcgcaacatcctcaagcttt

SEQ ID NO: 413823 - DNA, 279 bp, Oryza sativa
atgaataagaagctggcatatacttcggctagtagcattgcaacgcaaacagtatgacaaggtaccacgcattgtttaagagctaagacaaagacaaaactgatgcatccaacgtaccaaaaagaaagcgaacagcagcagtcagatagctatgagaagagaactaggagagggataactagaagggacagaatggcatccatgggtccatgacgtttagtcgacctactccatcttgctcttgccggtgtcgtcctccagcggcggaatgttggcgtc

SEQ ID NO: 413824 - DNA, 416 bp, Oryza sativa
ggtatcactccaccaagagtggtgaggagttgaccagcctcttggactacttatacccggatgaaggagggccagagtgagatctattacatcactggtgagagcaagaaggctgttgagatctcccccttcctcgagaagctgaagaagaagggctatgaggtcctgtacatggttgatgccattgatgagtacgctgttggtcagcttaaggagtttgaaggcaagaagctcgtctctgccaccaaggaaggtctgaagcttgatgagagtgaggacgagaagaagcggcaggaggaactcaaggagaagttcgagggtctgtgcaaggtgatcaaggaggtgctcggtgacaaggtggagaaggtctgttgtctctgaccgtgtggtggacttctcctgctgtctagtcactg

SEQ ID NO: 413825 - DNA, 410 bp, Oryza sativa
  unsure (1)..(410): unsure at all n locations
ccgccgccgaggcgttcaagctcgccggctttttgggtggcttcttcactctgtaccccaaggaaggtctcgccatcgtcaatggcacgtccgtggggtcggcgctcgcggccaccgtgatgttcgacgccaacatcctcgccgtcctgtccgaggtgctctcggcggtgttctgcgaggtgatgaacggcaagccggagtacaccgaccacctgacccacaagctgaagcaccaccctgggtcgatcgaggccgccgccatcatggagcacatcctcgccgggagctcgttcatgagccacgccaagaaggtgaacgagatggacccgctgctgaagccgaagcaggacaggtacgcgctccgcacgcgnncgcagtggctcggcccgcagatcgaggtcatccgcgcc

SEQ ID NO: 413826 - DNA, 423 bp, Oryza sativa
agcagaaggcaaaggaaatttcccgcaaatacttattcatatgttttgacaacatttctcccgacgcatgctcattgtggcagacgcagctgaccacctagagcttttagttcaccattattatttagaccaagcatacgtcccaagatcagaacacatgcttacaagcgaaaatactaatagcctggctggctgcttcacagaataaccaaacgacaacctcaacagataaaaatgccacggaatgaaaacaaagcagcgaatcgtcaccagaagtcccattcttactcatcaaacactccatcaattctcctccaacgcatcctctccccaggggagaagattgcccagtttaccttccttaacaggagcagggttcaccatattctcagcctcgaagcagtgcagaacagatttgggcga

SEQ ID NO: 413827 - DNA, 484 bp, Oryza sativa
  unsure (1)..(484): unsure at all n locations
tccccgccgccgccgccgttgggtgggtttgtagaaatcctttggctctttttaccccngagagtcttgtttcgtgatattcgtgaagagggggggagcttatgggggattcgtaagatcagaattggatcacgcgggggcgcgctcgggatcgggggttccaaacacagcttcttcgttgaatttaagtggatgtactaatggagtcaaagggtggcaaaaagaagtctagcagtagtcgctccttgatgtatgaagctccccttggctacagcattgaggacgttcgacctgccggaggcgtgaagaagttccagtctgctgcttactccaactgcgcgaagaagccatcctgatagccctttcggcttttccatcctagtagtttaggatttcttgcaattccattttggcacttttcttctgacctatttctctggctgctgcttcctgattatcgaccagttctctagtcttgcttcct

SEQ ID NO: 413828 - DNA, 486 bp, Oryza sativa
ccgccgccgcatcgccctcgttagaacgatggcctcgtcggcgctgcaccagaccaccagcttcctcggcaccgcccctcgccgggatgagctcgtccgccgcgtcggcgactccggtggccgcatcaccatgcgccgcaccgtcaagagcgcgccccagagcatctggtatggacctgaccgtcccaagtacctgggcccgttctcggagcagacgccatcgtacctgaccggagagttcccgggagactacgggtgggacacggcggggctatcggccgacccggagacgttcgcgaggaacagggagctggaggtgatccactcgcggtgggcgatgctgggggcgctgggctgcgtcttccggagatcctgtccagaacggggtgaagttcggggagggcttgtggttcaaggccggcgcgcagatcttctccgaggggggggtcgactacgtggggaactccaacctagtgcacgcgcaga

SEQ ID NO: 413829 - DNA, 434 bp, Oryza sativa
atcgaggggtccggcgtttgttgtgctttattgagggggaattttttttcttaccttccgagctcgtttccgccgcgggcggcgtcgcagagtgtttgagaaataatacgagtcaatgaaattccgcaaagggacaaaggtggaggtgttgcacaaggggggtgcgccattgggttcctggaggcctgctgagattgtttctggcaatggacacacctatcttgtaagctatggctcatgtccaactcagggtagtgtggctgcggaaagggtgccaaggaaggcaatgagacctttgcgcccacccttggatggtattgtatgctgggtcaaaggtgagattgcagaagtctttgacagctacacatggaaggttgcggaagtggtgagattgcttggttttagttactatctcgtcaggctccttggatcct

SEQ ID NO: 413830 - DNA, 537 bp, Oryza sativa
  unsure (1)..(537): unsure at all n locations
aggatggtagaacttcctaggatcttgcaggaggcagctcaggaggctgaggacgcgaagatggtagctttctcagtacaagagcaggtgaggaaggcaagggaagataccgagataaccaaaacagctgcagccacagtaaataccaggttaagtgctgttctgaaagaaatagatgcatccaaagcatccaagaagctagcgtttgcggcggttcaagcattgcaagaaagtgaagaggcaggagatgatgagaattctccagaggagtgacacttcctctggcgagtattacacccttagcaagaaagtgcatgaagctgaacagctggcacatgagagtgtcacagaagcactgcgacaggtggagtcggcaaaggcgtctgaatcaaatagcctagagagactatgtgaagcatccagaggatgaatgagaagaaggaagctcttgaatgagcattagagagagctgagagagcacanccagggaaactaactgctgagcaggaactgaggaatggagagctgtcatgagca

SEQ ID NO: 413831 - DNA, 384 bp, Oryza sativa
gataaaaatgcagagatatcgatttcaacatgcaagaatgggttagcttcttttatggaaaaaggcccacaaggccggcatccggtaatacaacatttttttacagttgcaaaataccgaaacttctaatgctccctagcccaatgatcatgcgaatcctcttccatctccagatctcctcatctctcgaatggcaatcgcttcaacttcaatggaaggcagccagccagccacaccgtcaacagacggttcgcccgaagcagatcgatgctatgtacagatttttcgcccatttatccttgacatgattactggggaaggcagaggtccggagagtttcttgtgtctcggctactggcttccgtttcggtatgctcaagataa

SEQ ID NO: 413832 - DNA, 489 bp, Oryza sativa
ctgctcgtccaacaacaacatcgtggtgaacgtgttcaaccagctggacgagccgctgctcttcacctggaacgggatgcagcaccgcaagaactcgtggcaggacggcctcgccgggacgcagtgccccatcgcgccgggcaccaactacacgtacaagtggcagcccaaggaccagatcggcagcttcttctacttcccgtcgctggggatgcaccgcgccgccggcggctacggcgggatcagcgtcgtcagccgcctgctcatcccggtcccgttcgacccgccggccgacgaccacatggtgctcatcggcgactggtacaccaaggaccacgccgccatggccaagatgctcgacgccggcaagagcttcggccgcccgccgggtgtggtcatcaacggcaagtccggcaaggccgccgccgacccgcccatgttcaccgtcgaggccggtagacgtaccgcttcgcgtcgcaacgtcggcat

SEQ ID NO: 413833 - DNA, 404 bp, Oryza sativa
tcgtcggcaagagcttcggccgcccgcacggggtggtcatcaactgcaagtccggctaggccgccgccgacccgcccatgttcaccgtcgaggccggcaagacgtaccggctccgcgtctgcaacgtcggcatcaaggcgtcgctcaacttccgcatccagggccacgacatgaagctggtggagatggagggctcccacacggtgcaggacatgtacgactccctcgacgtccacgtcggccactgcctctccgtcctcgtcgacgccgaccagaagcccggcgactactacgcggtggcgtccacgcggttcattcacgaggccaagtcggtgtcagccgtcatccgctacgccggctcgagcacgccgccgtcgccggccgtgccggagccgccggcggga

SEQ ID NO: 413834 - DNA, 470 bp, Oryza sativa
aactacacaatctcaacattaaaccagcagagtaaaatgcatacagacgagacgagttgcaatgcgacgacatgaccagatctcgagagcaaaagatatgtaatgtaatcaaaacttatttttctttccataacagagacgacagccccaaatacttgacttgtccactatgattttcttgacaaacttaggtaccagataacattgagaaaagaaaaagaaaaacataacataccacctataacttaccatacttttaacctaacaaaattactctccgaatgctaaatgtgcgttggagttcttatgggcggaactgaaatctcaagggcacgagcagattgattttgctcggggaaaaaacccaagaaatctcctcccaagcacccacactcacaggcccatcacaccaacatgaataactttagcaagctcttaattcacacgcagaaatccacctgccggaacat

SEQ ID NO: 413835 - DNA, 451 bp, Oryza sativa
gtataatataactccaccattacaatggtttttagagggcatatcgaaattacatccagctgacgacgacggcgctcagcttcttcctaggacgtacgtttcagtttccactcctcttttgttcttcttttcgcggggacatgcaataagcacgagcccaaattaagttgattatttcgccagattaagcaaaagatcacaaaaaatgtcaagaacaagagaagaatgtcatcgggttcagtacatatatgcatcgatcgatgaattaggccgggaggtaggacggcggcagcggcaggccgacgaccttgccgcagcggagggcgttctccggcatgttgtactcgtcccggagcgaccttcccggcgagacgacgctgatgtagagctgctcgccgaggtagtgcctttcccagatgttggacctcacgttccacatcccggcgttgtc

SEQ ID NO: 413836 - DNA, 444 bp, Oryza sativa
ggcgcttcacatattccttttacatttcagtgtaacttttgcaatatataacatgtatactagtatagcagctcaggtgctcagggacatcaaagaatacattacacatacacaaaacttcacataatccaaacgcccgaactatacaaacacaaataacaacacaccaacttaaatatgaaaaataatttagccacaagtactgcttggagttgcttcagcatcaagttctaccctagattaggcatgccaagcttaatataggagggggcttccttccttaaacagtacaaagatgctgctgccatcacctctggagattctaagctcatcatcaaggtaggttgtgagcaaccaagactcagcattgtcagtcctaattggtatctttaggggaggttgaccagagatggttctagcaactgaggatgctgcattttcaat

SEQ ID NO: 413837 - DNA, 529 bp, Oryza sativa
gttaccagggtgataccaagagtttccttgtttgcaagatgaaaatggctacttctccggagatgctaagctgtttctgtccacctccattcaaacaagtttcttgaagttgtcacaaatatgaaatttgatgaagagccaaattacgccaaactgatttctctctttgatagtttgattgaggtacctgcctcaagacctatcagaattgatggcgctcttaaggttgggcagaaacgtggaagaaaccatgaagaagatgagcaacccaagaagaaagttagattaggtagcccagcagctcaatggatttctgtttataacgccaggcgggccatgaagcaaaggtaccactataacgtggctgacaacaggcttcagcagcatatagagaagggtaatgaagatggtctatcattagttgtgtggcgtcttcagcaaatctttgggccctcataatggatgcaggaactggtttcctttctcaagttcatgagctctcaccagtttttctgcataaggactggat

SEQ ID NO: 413838 - DNA, 463 bp, Oryza sativa
gggccgggccggaacgggtcgacttacttgaccggccctccttgccgcctcccaaactccgcctcctccgggtgggttgcattcccgcatacaccctatcgcaccgacttcgcgatctccgcgccgcagccatgaagggcaaggcccgacgcctccaagaagggcgagggcaggctcaaggccgccggcggcgccgggaagcggaagaaggccgccgctagcggcaagccgaagcgcccgccgtctgctttcttcgtcttcatgtctgagttcaggcaggagtaccaggcagcgcatcctgacaacaagagtgtcgccgccgtgagcaaggctgcaggggagaagtggcgagctatgtctgagcaagagaaggcaccttatgtggacaaggctggccaaaagaagcaggactacgagaagaccaaggccaacttcgataagaaggagagcacaagctcaaaga

SEQ ID NO: 413839 - DNA, 446 bp, Oryza sativa
agcccctccggcatatataatagattatgggcttgcgaagaaatatagggaccttcagactcacaagcacatcccatacagagagaacaagaacctcactggaacagctcgggatgcaagtgtcaatacccatcttggtgttgagcaaagcagaagagatgatctagaatctcttggttatgtccttatgtacttccttagaggcagcctaccatggcaggggctgaaagcaggcactaagaagcagaagtacgacaaaataagtgagaaaaagatgcttactcctgtggaggttctttgcaaatcttacccatcagaattcatttcttacttgcactactgccgttcattgaggtttgaagacaagccagattattcttacttaaagaggctattccgtgatctctttatccgggagggatatcaatttgattatgtatttgact

SEQ ID NO: 413840 - DNA, 416 bp, Oryza sativa
acgaacaaatctccatatagtaaacgaatattaatagtcttcaacactgttttgcttccaaagaacgggaataacatttgatttcgagtctttaaccgaaccctgtttttacactaattaaccgaccaaaccctattacaaagctgctaatgaaaacgagatctaaaacgcggaagcgagaggggaatcaacaaggtgaccacgtcacgtcgtcgtcgttgatccccccagatcggtttggggctacgcaacgcaaccgggttgaaggcgggggtttacgcgcgctcgccgtggatgcggggggcgagctggatgtccttgggcatgatggggacccgcttggcgtggatggcgcaaaggttggtgtcctcgaagagcccgacgagggaggcctcgggggccttctggagggcgag

SEQ ID NO: 413841 - DNA, 529 bp, Oryza sativa
  unsure (1)..(529): unsure at all n locations
ggtgacctcgtcggggcggcggaaccctccagcctccgggctcgccgccgccgccaagctcgcatcccgcgccggccgccgagctcgccgcccaaccccaaccccaaatcaatcagatcaattcaactatccaagcctaagttgttggatctagaatccatggcgatcgtttacgcggtggtggcgcgtggcaccgtggttctcgccgagttctctgccgtctccgggaacgccggcgccgtcgcccgccgcatcctcgagaagcttccgcccgacgccgagtcgcgcctctgcttcgcgcaggaccgctacatcttccacgtcctccgctcccctccccccgccgccgccgatggcctcaccttcctctgcatggccaacgacaccttcggaagacgaattccctttctttacctcgaggacatccaaatgaggttcatcaagaactatggcagaatccgccataatgcgctcgcctatgccatgaacgatgagttctctagggtcctncatcaagcaatggagtact

SEQ ID NO: 413842 - DNA, 462 bp, Oryza sativa
tgtttggtcgctctcgatttcgaggtgccttttatccaccgttcgagaaatgtcaagtcgccgccgagaagcgaagaggagatggcccgtacgaagcagaccgcccgcaagtccaccggcggcaaggccccgaggaagcagctcgccaccaaggcggcgaggaagtctgctccgaccaccggcggcgtgaagaagccccaccgctacaggccggggacggtggcgctccgcgagatccgcaagtaccagaagagtacggagctcctgatccgcaagctccccttccagcgcctcgtccgcgagatcgcgcaggacttcaagaccgacctccgcttccagagccatgcggtgctcgccctccaggaggccgccgaggcctaccttgtcgggcttttcgaggacaccaacctctgcgccatccacgccatgcgcgttaccatcatgcccaaggacatccagctc

SEQ ID NO: 413843 - DNA, 192 bp, Oryza sativa
gtctgcatcttctaggaccatagaactgctttgttttaattggacagtctgattccccttgtccgtaccagctctgagtcggctgttcgacgcccggggaaggcccccgagggggccgttcccggtccgtcccccggccggcacgcggaggtcagctgctcctccaccagcaactagagtagcctcgcccac

SEQ ID NO: 413844 - DNA, 418 bp, Oryza sativa
atcctccccattccactgcatccgggtcggcgtcctcctcctgctcctcctcctcgcagaatgcaacgggcaattcaagctatcgggtcacatggcagtctcctcaagtctgctgttctgcgacacatcagtgctccaaaaccatctattttacctgctgtatattcacgctccatgtcagtttcatctgctcaaatagaggagagtggatttgagactgccactgtggcagatattttgaagtctaaggggaagagtgctgatggatcttggctctggtgcactactgatgactctgtctatgatgctgtcaaatctatgacgcaacacaatgttggagctctggtgggtggtaaacctggacaggataaaacaattgctggtattggtcctgagagagaataccttaagaaaaata

SEQ ID NO: 413845 - DNA, 442 bp, Oryza sativa
  unsure (1)..(442): unsure at all n locations
gttttctcattctatcctcgggttatggattaccttgataattctacaacaaaagttatggctcttgtaataattcaaagcataatgaagaacacgacttgcatatctacttctgacaagattgaagctctttttgatttaattaaaggtcttataaaagatatggatggggctcaaaatgatgagcttgatgatgaggattttaaggaggaacagaattctgtggcgcgtcttattcacatgttgcacaatgatgaccatgaagagatgttgaagatattatgcaccgttcagaagcatatacttcagggaggtcccaagcggctacctttcactgtgccatccttagtattctctgctctcaaggtggtccgaagattacaaggtcaagatggtgatgtaatangggagaaggtttcctgaacccctaaaaaaatatttc

SEQ ID NO: 413846 - DNA, 422 bp, Oryza sativa
cactactcgaatcgaatccaccacacggtaccctcctctctcctcctccgaccaccatggccatggccacgcaagcctccgccgccaagtgccacctcctcgccgcctgggcaccggcgaagccgcgctcatccaccctctccatgcccacctcgagggcacccacctccctcagagcggcggcggaggatcagcccgccgcggcggcgacggaggagaagaagccagcccccgcggggttcgtgccgccgcagctggaccccaacacgccgtccccgatcttcggcgggagcacggggggactcctccggaaggcgcaggtggaggagttctacgtcatcacatggacgtcgcccaaggagcaggtgttcgagatgcccacgggcggcgcccgccatatgcgcgagggccccaacctgctg

SEQ ID NO: 413847 - DNA, 483 bp, Oryza sativa
gtccttcgagagagagaacaataattggatgcatggcaggcattgctgaagaagggggccaagtacataatcgtacaggggctacctctaaccggttgcctgccactgaccatgacgctggcccgcccggaggaccgcgacaacatcagctgcgccgccaccgtcaaccagcagagccacgcccacaaccgccgcctccaggccagcctccgccggctccggcggcagcacccggccgccgtcatcgcctacgccgactactacgccgcccacctcgccgtcatggcggccccggcgaggtacggcttcacggagcccttcaagacttgctgcggcgccggcggcggcgcctacaacttcgagatcttctccacctgcggctcgccggaggtgaccaccgcctgcgcgcagccggccaagtacgtcaactgggacggcgtccacatgacggaggccatgtacagggtcgtcgtcggcatgttc

SEQ ID NO: 413848 - DNA, 359 bp, Oryza sativa
cgtttacctctccctctccccactctcgcgcctcctcccatggcttccttcccgaccaccgccgccgccgccgccgcgcaggcattcgccttcgccctcgcgccgaagccatcctcctccgccgccgcaccatccgcgctcttcccccgcaccgccgcggcggcggcgttcccgacgctggctgtgcgaggaagcgggaaggcgaggcagccggtggtggccgcggcggcgggggcggggacggggagcgagcagagggagacgatactgctccccgggtgcgactacaaccactggctgatcgtgatggagttccccaaggaccccgccccgacgcgggagcagatgatcgacaacta

SEQ ID NO: 413849 - DNA, 322 bp, Oryza sativa
cgttatgaggccagcgtcgtcccccgtgccggccgtcctcacggccccggctaccgctgccactgccgccatcgccgtaaagccaacgccgcctcaacgcgcgcttcaagccagcaggcgcgagttggtggtggcggcgggaggggtggcggcggcggcggtggcgctgtggccgtgcgggggagcggcgcgggcggcgtcggacgacgagtacgtgagcgagacgaaggacgtgatcgggaaggtgcggtcgacgatcaacatggacagggcggaccccggggtggcggacgccgtggcggaactccgcgagctggccaac

SEQ ID NO: 413850 - DNA, 333 bp, Oryza sativa
catgaaatccaaggacagagaagaaatcgcagagattgagaagatgcatgaacttattaagacctataacttgtttgggcagttccgttggatctcggctcagacgaacagggctcgcaatggtgagctctatcgctacatagctgatactcatggtgccttcgtgcagccagctttctacgaagcattcggtctcactgttgtggaggccatgacatgtggactccctacttttgcaacagtccatggtggacctgccgagattatagagcacgggatctcagggttccacatagattcttatcatccggatcaagctgcaaatctgatagc

SEQ ID NO: 413851 - DNA, 483 bp, Oryza sativa
ctatccttttttgaaacaagaaagataacaccaacagactagctagctcgccaatggcctcgttgtcctccttccggctctctgtggcagtggcggcattgttggtcgtccgctcgtgcgccactgaggtcaccttcaaggtcggtgagggttctagcggaaaaagtctagagctcgtcaccaacgtccccatctttgaggtggagatcaaggagaagggcggcaaggactgggtggcactcaaggagtcatcgactaacacctggtcgctcaagagtgaggcggcgctcaagggccccttttccgttcgcttccttgtcaagaacggcggctaccgggtcgtcgactactttcatccccgaaagcttttacgcccggttctgaattcaagagtggtatcaaccgcctattaattgacactgagtattcttgccttggggctgcatgataattattaacctctaaataaatttgccttgaaag

SEQ ID NO: 413852 - DNA, 463 bp, Oryza sativa
cagttgtgccgcctcttgcttcctcctcctcatcgtccgccatggcttctctcaccgatctcgtcaacctcaacctctccgacaccacggagaagatcatcgccgagtacatatggatcggtggatctggcatggatctcaggagcaaggctaggactctctccggccctgtgactgatcccagcaagctgcccaagtggaactacgatggctccagcaccggccaggcccccggcgaggacagtgaggtcatcctgtacccacaggctatcttcaaggacccattcaggaagggaaacaacatccttgtcatgtgcgattgctacacgccagccggagaaccgatccccaccaacaagaggcacaatgctgccaagatcttcagctcccctgaggttgcttctgaggagccctggtacggtattgagcaagagtacaccctcctccagaaggacatcaactg

SEQ ID NO: 413853 - DNA, 335 bp, Oryza sativa
tcggtttcggcaccgcggggcggtggcggtggaggagacgacgggcaggcgcacgacatggtgatgccggggttccggttccacccgacggaggaggagctcatcgagttctacctccggcgaaaggtggaggggaagcggttcaacatcgagctcatcgccttcgtcgacctctaccgctatgacccgtgggatcttcccgctctggcctcaattggggacaaggagtggttcttctatgtgccaagggaccgcaagtaccgaaacggcgatcggcccaaccgagtgacgccatcggggtactggaaggccacaggggcggataggatggtgaa

SEQ ID NO: 413854 - DNA, 453 bp, Oryza sativa
tttcggagttccactgccagatcaagaagaagctggagagagagcacaggagcaagcagatcaagaagaagaagacgaggaagatgcacgccaagacggactcggaggtgacgagcctggcgccatcgtcgccgccgcggtccccgacgtcgcgcggcgggcggtcggtgtactacgtgcagagcccgacgagggactcgcatgacggggagaagacggagacgtcggtgcactcgacgccggcgctgagccccatggggacgccgcggcactcggtgggcagggacttctagttcagccgcttcttcggccaccccaagcgcaagggcgacaagtccaggttcggccgcaagggcgccccggtcgggaaggggtcggaggagatctgcgtgatcgatgaggagggccttcttgacaactaggaccagcgcatgggcattcccaagcgctgta

SEQ ID NO: 413855 - DNA, 366 bp, Oryza sativa
cttacgcaacgtcgtcatccgctgcatcctccgccacacctccgtccttcaccgccaaagaccgctatgagcggtcgacctggggtggaggcgtggagccggccgccatcgccgcaacttcatggcataggggacggttgtccgtcgatttgaggagtgagaggcggcaacagcaataaagaggggagaggcctgccggcggctgtatggtggagaagcgccgccgcagcccgcattccctcctctcgccccttcctcttccacccgggcgattcgcaagccgccgctgtcaccgctttcgaccgccatcgctgccgtctcatgggctccaagaaccggcggcgggggtgattttgacctcgacct

SEQ ID NO: 413856 - DNA, 518 bp, Oryza sativa
atctatagctcgaaaggcgtcgttcttctcgcgatcgtcatccttgttctgtcaaatgtggcatcaaatgttccaacagttctactgctgggcacaagagtggcagcatcagccgcagcgatctcccctgcatcggagaagaaagcctggctgatcctggcctgggtgagcacggtggccggcaacctgaccctcctgggctcagccgcgaacctgatcgtctgcgagcaggcgaggcgcgcgcagttcttcgggtacaacctcaccttctggagccacctccgcttcggcgtgccgtcgacgatcatcgtcaccgccatcggccttctcatcgtcatgagctactgatgaacaagcctcaaatggagaagaagaagtaagtcagtagcagcaatcgaaatcacgtagcagcagtacaagattgaaggttttactactactactactactattttagctggtttcttccacaaaggtaaaagaagaatggaaggaagcagttgtggatatgatggatg

SEQ ID NO: 413857 - DNA, 465 bp, Oryza sativa
tgttcgtcgtgctcctccgggccggcttcccgttcggcaacgcgctgaccaaggagatcctggacctgccggcgtacgagaagtggttcacgtcgcgcttcacggtggccacgttcgagaacgagatgaagtggtacagcaacgagtgggcccagaacaacgaggactaccgcgtcgccgacgccatgctcaagctcgcccaaaagtacaacatcaagattaggggacacaacgtattctgggacgaccagaactcgcagatgaagtgggtgacgccgctgaacctggaccagctgaaggcggcgatgcagaagcggctcaagtcggtggtgacgcggtacgccgggaaggtgatccactgggacgtggtgaacgagaacctgcacttcaactttttcgagaccaagctggggccgaacgcgtcgccgatgatctacaaccaggtgggcgcgctggacaagaacg

SEQ ID NO: 413858 - DNA, 402 bp, Oryza sativa
cattatagtactgcgcttagtaattaagcagcaacgtaacttgatcttcgtgtgaccgatcgatccctcgcgcggcgaataataagtatgtggcggcggtgatggtggtggcgctgctgttggcggcgccggcggcgagcgcggtgacatgcgggcaggtggtgagcatgctggcgccgtgcatcatgtacgcgacggggagggtgtccgcccccaccggtggatgctgcgacggggtcaggacccttaacttcgccgccgtcaccaccggcgaccgacagaccacctgcgcctgacttaagcagcagaccagcgccatgggcggtctgaggcccgacctcgtagccggcattccctccaagtgcggcgttaacattccctacgctattagacctttcaccg

SEQ ID NO: 413859 - DNA, 393 bp, Oryza sativa
tctgaataatacacatcaaaccaccaaactaaccggtggttccagtaacagtggaagggcaggggaaaaacactttctccagattgaaatatcatcatacgctggggaaaacatgccatcttacactttaaaagtatgaatacgatgtgtatttaaccacgaatgcctctagttaactggatttaggggatgattaacagactttataatggcaaacagataacaatatgtaggataagaaaatattgctccattactattctaaataaccccccattataaaatttatctctttcaaaaaaatgtatctcaaaggatgatcagacaccggagactagaaatatcacttcatgatactaggcgaagaatggggttatgtaattctctgtgaag

SEQ ID NO: 413860 - DNA, 500 bp, Oryza sativa
tgttcggctttgacttgcgcgatggcgcccgagtgccctcgatcgagtcgctcaaggctatgaatcccaccgagtcatccgtggaggtggtcctcatagatagggtggtcgactatgatctgaggcaactgataagcaccgcgattgacgtttctcggagccgcgctgactcaagggaaatcaccactcgccttgctggcattgtgtcctcaaagatggggggttccgtagcgtctaccgaagaacatgaactgtgtccccggtggagagactctgccgggttcctgaagattagttcaggttctgttgtgcttccaattgggaagttatcaatcggtctttgccggcaccgatcgttgctgtttaagaccttagcagacactatcagtcttccatgtcgagttgtgaggggatgcaagtactgcaaaattgctggtgctgcttcatgcctggtgcacttttgtaatgacagggaatatctgattgttttgatagggaac

SEQ ID NO: 413861 - DNA, 455 bp, Oryza sativa
gtttcgtgttttggagagcccatgaggctaagcagaagggacgtcactctggctatggtaagcgtaggggtacaagggaggctaggctccccaccaagatcctgtggatgaggaggatgcgtgtgctcaggcgtttgctgcgcaagtatcgtgaggccaagaagattgacaagcacatgtatcatgacatgtacatgaaggtcaagggtaacatgttcaagaacaagcgtgttcttatggaaagtatccacaagtctaaggctgagaaggcaagagagaagacactctctgaccagtttgaggctaagcgtgccaagagcaaggcaagccgtgagaggaagattgctaggagggaggagaggttggctcaaggcccaagagagccagcagcttctgcagcggcagcttctgcttaaactggagtggcacctaataaggctaagaagtgaacaccc

SEQ ID NO: 413862 - DNA, 331 bp, Oryza sativa
tcggctattcttgagctcaatcagcaacaacatctatctccttcttgcttagttaagtccttcgccctcccaagaagaagaagatgtcttgctgcggcggcaactgcggctgcggcagcggctgccagtgcggcggcggctgcggcggatgcaagatgttccctgatgtggaggccacagccaccaccaagaccttcgtcctcgctgctccatccaacaaggcgagctctggaggaatggagatggcggtggacagcgtctagaaccgcggttgtggctgcaacacctgcatgtgtgggaccagctgcagcggttgctcttgctgcttctg

SEQ ID NO: 413863 - DNA, 410 bp, Oryza sativa
gaaattgctggaagcatggacactgtggggcagtatgaatcacacattgcattcacccttcctgggctttaccgagttgtgcatggcatagatgtttttgatcccaagttcaacattgtctctcctggagctgacatgagtgtctacttcccgtacaccgaggctgacaagaggctcactgccttccaccctgaaattgaggagcttctctacagtgaagtcgagaacgatgaacacaagtttgtattgaaggacaagaacaagccaatcatcttctccatggctcgtcttgaccgagtgaagaacatgacaggtctggttgagatgtatggtaagaatgcacatctcaaggatttggcaaaccttgtgattgtttgtggtgaccacggcaatcagtccaaggacaggga

SEQ ID NO: 413864 - DNA, 454 bp, Oryza sativa
catgaagcatttcttgagctcaatcagcaacaacatctatctccttcttgcttagttaagtccttcgccctcccaagaagaagaagatgtcttgctgcggcggcaactgcggctgcggcagcggctgccagtgcggcggcggctgcggcggatgcaagatgttccctgatgtggaggccacagccaccaccaagaccttcgtcctcgctgctccatccaacaaggcgagctctggaggaatggagatggcggtggagagcggcgagaacggcggctgcggctgcaacacctgcaagtgtggcaccagctgcagcggctgctcctgctgctcctgcaactgaatctatcgtcgtcgtcgcccggctgcatgaggatttatcgtatggatgctgctactgtcgatcagagctttgatcgaggccttaatttgcttgcattagtacccagcttatat

SEQ ID NO: 413865 - DNA, 516 bp, Oryza sativa
  unsure (1)..(516): unsure at all n locations
cttagtccatcagttggttgagaatgctgatgagtgtatggttcttgataatgaggctctctacgacatttgcttcaggactctcaagctgaccacacctagctttggggatttgaaccatttgatttctgccaccatgagtggagtcacatgctgcctaaggttccctggtcagttgaactctgacctccgtaagctggcagtgaaccttatcccctttccccgtctccacttcttcatggtcggattcgccccgctgacatcacgtggctcccagcagtaccgtgcccttactgttcctgagctcacacagcagatgtgggatgccaagaacatgatgtgcgctgctgatcctcgccatggccgttacctcaccgnctctgccatgttccgtggaaagatgagcaccaaggaggtttgatgagcagatgatcaatgtccagaacaagaactcatcctacttcgtcgagtggatccccaacaatgtgaagtccagtgtctgtgacattcaccgag

SEQ ID NO: 413866 - DNA, 459 bp, Oryza sativa
cgttttcagctatcttttgaaatccggtggccttgagagtgagaaggattacccctacactgggagggatggcacctgcaaatttgacaagtcgaagattgttacttcagttcagaacttcagtgttgtctctgtcgatgaggatcagattgctgccaaccttgtcaaacatgggccacttgcaattggcatcaatgctgcgtacatgcaaacatacattggtggtgtttcgtgcccgtacatctgtggcaggcaccttgatcacggtgttcttctcgttggctacggcgcatctggttttgctccaatccgcctaaggataaggcctactggatcatcaagaactcctggggcgagaactggggagagcatgggtactacaagatcttgaagggctccaacgtccgcaacaaatgtggcgtggattctatggtctccaccgtgttgcattcacacctt

SEQ ID NO: 413867 - DNA, 450 bp, Oryza sativa
atgacaccctagacagcatgaaggtagtccacagtaaaattgacaaactttcaatatcaaacataccttatgggtcaaacaggtttgttactcacttggttatggcttatgctgtcacgttttggacctgctatgtactgttccgagagtatgagataattacaacgatgagattgcggtttcttgcttcagagaaacggcgaccagaccagtttacagttcttgtgcggaatatacctccagatcctgatgaatcaattagtgagctcgtggagcatttcttccttgttaatcatcctgatcattatctaagacaccaggtggtttacaatgcaaataaacttgctgatctggttgagaagaagaagaaacttgcaaattggcttgattactaccagctcaagtatgaaagaaattcatcaaaaaggcccaccactaagactggctttt

SEQ ID NO: 413868 - DNA, 553 bp, Oryza sativa
tcgtatttttctgagaagtgtgtggttagtactaacatagtaattgtaatggagacaatgcgtaaattcttcccagcaatcgccgtcctcctacttcttgttgttgccactgaggcgttggcgccagcgcaatcatcagtcaggccgtgcgagacgaagagcctccgattcgaggggttttgcatggtggaagataattgcgcaaacgtgtgtcggacggaggggttcgtcgacggcaggtgcagcaccttcgtgcgaaactgtatctgcatcaagccatgctaaggttgtccatcattatctcatgtggtcacttggcaactaattaattgaccatgcaaacaagggtctgcatggagctattaatttctttctttttttactttctttcttttctttttttttttgcaagcagatgtacgattctgcatgcatggcaaattcagctagaataaaacaccagcctgcttaatgcatggcgtttttttgctaggtcgacttaataattgtacaacaaagccagcctgcatatgggttcctctctggttttact

SEQ ID NO: 413869 - DNA, 344 bp, Oryza sativa
gggcatcttcgacgccgtcctccggggatccctcgacttcgactccgacccatggcccaccatctccgacagcgccaaggacctcatccgccgcatgctccgctccccgcccagggaacgcctcaccgcccaccaggtgctttgccacccctgggtctgcgacgacggcgtcgcccccgaccgccccctcgcccccgccgtcctctcccgcctcaagcaagttctcgccatgaacaggctcaagaagatggcgctgcgtgtcatcgcccggaaccttttcgaggaggaagtcgctgggcttaaggagatgttcaaggccatggacaccgacgccagcggggcca

SEQ ID NO: 413870 - DNA, 470 bp, Oryza sativa
cgacaagtgaacttttggattatcacggaaaaaaaatactaaggacatcatcattataaatatcctacttggaaagttgaactcatatttttgagaataatttaacataacatcagcttggaagacacataaaaaggacgggaggactcaaaatcaggaagctaacgcgcgctctgtaaatgacaaccatcagcttccgccttaacgcataacactttagcattcttgttcaaacgtgcagacatgctccccaacgccatatggaatcaaaagcctcgctgtggtcgctcagctggcacattcactcgaagtgggcggccatccaattcctgtccatcaagggcagaaatagcatcatcgagctcctccttggaggccatggaaacaaaaccaaatccccgagaacgcccagattctctatcgtagacaaccgaagcgttaaccaccttttcatgctcgctgaacaattg

SEQ ID NO: 413871 - DNA, 448 bp, Oryza sativa
ggttcctgattttgagtcatggctgccaagctagctcgcctccacagtctccgcgaacgcctcggtgccaccttctcgtctcatcccaatgagttgattgcactcttctctaggtatgttaaccagggaaagggaatgctccagcgtcaccagctgcttgcggagttcgatgccttgatcgaagctgacaaagagaaatatgctccctttgaagacattctccgggctgctcaggaagccattgtgctgccgccctgggttgcactggccatcaggccaaggcctggtgtctgggactacattcgggtgaatgtaagtgagttggcagtggaagagctgagtgtttctgagtacttggcattcaaggaacagcttgttgatggacacaccaacaggaactttgttcttgaggctgaatttgagcccttttatgccttctttccgcgcc

SEQ ID NO: 413872 - DNA, 424 bp, Oryza sativa
gaagcttcctttccattaccttgtctccccaccagagatagagagaacatctggtgaatacttggtaaagaatggcgtccgcaccttcgcttgcagtgagacagtgaagtttggccatgtcacatttttctggaacggaaaccgatctggatactttgatgaaactaaggaagagtacgttgaaattcctagtgatattggaatcacattcaatgttaaacccaacatgaaggcacttgaaattgcagagaaagccagggatgccattcttagtggaaagtttgatcaggtacgtgtcaacctgccgaatggtgacatggttggtcacactggtgatattgaagccacggtagttgcttgcaaggcagctgacgaagccgttaagattattttggacgcgattgaacaagtcggtggtatttat

SEQ ID NO: 413873 - DNA, 475 bp, Oryza sativa
gacgtcgtggagccgatcctcctggaggtggaccagatctaccacctggcgtgcccggcgtcccccgtgcactacaagcacaaccccgtcaagaccatcaagaccaacgtcgtcggcaccctcaacatgctcggcctcgccaagcgcgtcggcgcccgcttcctcctcaccagcaccagcgaggtctacggcgacccgctccagcacccccaggtcgagacctactggggcaacgtcaaccccatcggggtgagaagctgctacgacgaggggaagaggacggcggagacactgaccatggactaccaccgtggcgccaacctcgaggtgaggattgctcggatcttcaacacctacggcccccgtatgtgcatcgacgatggccgggtcgtcagcaactttgtcgcccaggcactgaggaaggagcccttgacggtgtacggcgacggtaagcagacgaggagctttcagtacg

SEQ ID NO: 413874 - DNA, 550 bp, Oryza sativa
ggttaaatgcgggcttgatgttaaaataatctacagtggtggccaagaccttgacatattacctcagggcgctgggaagggtcaagcacttgcatatttgcttaagaagttaagctcctgtggaaaaccaccaaacaatactcttgtttgtggggactctggtaatgatgcagaattatttagcatccctggtgtacatggtgtcatggttagcaatgcccaagaggaattgcttcagtggtatgcagaaaatgcgaagggtaaccctaaaattattcatgcaactgagaggtgcgccgctggtattatcgaagctattggacacttcaaactaggacctagtgtttctccaagagatgtggggtttccttatgttaaggaggaccatatcaaacctacagatgctgttgtaaagttttacgttctctatgagaagtggcgcagggctgaggttccaaaatcagattcagttgtacagtactttaaaaatatcactcatgcaaatggtgttatcattcacacttctgggcttgaatggtctctccatgcc

SEQ ID NO: 413875 - DNA, 468 bp, Oryza sativa
  unsure (1)..(468): unsure at all n locations
cattatcagtcaatgcgggaattcaccaattcccattgccttatctggtttatagcgagaaggttaaaactgctagcatttatgtcagggattccacaaacatttccgactatgctcttctcctctttggtggttctctcagtgagagcaaaactggagaaggcattgagatgcttggggggtatcttcatttctctgcaccaaggcgtatcatagagttgatccagagattaagaggtgaattggacaaactcctccagaggaagatcgaggagcctgcacttgacatattttctgaaggaaaaggcgttgtggcggcagcagtagaactgctgcacagccaaaacgttcaccactagatgctatctataccggttccatatagcagnnttagaactaaaataacagctataccagggagtgcttttgtatactcccttcatttccgttgcttgtagagttgacccc

SEQ ID NO: 413876 - DNA, 511 bp, Oryza sativa
catgaatccaaatgttctgcagatgccactcatggtgctgcagaaaatgggaagccagattctgaggaaatatctgctccaatggatactgatgccaaggttgagccattgataaagaatgtgaagaaaattgatgttccagtttctggattggtttatggtgcactggggtctgaagaattggtgaaagcttctgagaatgagtatgaaatggctcttcaggacagagtaatggaagaaaccaaggagaaaaagaatgctgtcgaggcttatgtttatgacatgcgtaacaagctctatgacaagtacaacgattttgtcatgtctgagtacaaggaagggtttattgccaagcttcaggaggttgaggattggctgtacgaagatggtgaagatgagacaaaaggggtttatattgcaaagctggaagaacttaaaaaggttggtgatcctattgagatccgctacaaagagtgggctgaaagaagctcttctattaaccagctggtac

SEQ ID NO: 413877 - DNA, 363 bp, Oryza sativa
cttctggacatactctactactactagccagtaagctagctaactaactacgtggctatggcccccaccgtgatggcctcctcggccacctccgtggctccattccaagggctcaagtccaccgccggcctccccgtcagccgccgctccaccaactcgggcttcggcaacgtcagcaatggcggaaggatcaagtgcatgcaggtgtggccaattgagggcatcaagaagttcgagaccctatcgtacctgccaccactcaccggggaggatcttttgaagcagatcgagtacctgcttcgatccaagtgggtgccttgtctcgagttcagcaaggttgggttcgtctaccgggagaaccac

SEQ ID NO: 413878 - DNA, 380 bp, Oryza sativa
ctcttgtctctttctggcctgtgtcgtggcagcggccatggtgtctgcagtgacatgtgggccgaccaaggtgccgcctggccccaacatcactgcgggctacggcaaacagtggctggaagctaggggtacctggtacggcaagccaaagggtgccggccccgacgacaacggcggcgcttgtgggtacaaggacattgacaaggctcccttcctcggcatgaactcatgtggcaatgaccctatcttcaaggatggcaagggctgcggctcctgccttgaggtcaagtgttccaagccagaggcctgctccgacaagcccgtcatcatccacatcaccgacatgaacactgagcctatcgccggctaccactttgacc

SEQ ID NO: 413879 - DNA, 346 bp, Oryza sativa
gagtctcctatgtgtggattcagtgcattggcagttaaagtcctcaagctatatgatgtccctatcagtgctagagatattttgggagacctcaagctcaaagagtgtgtcaaagcccacaccaactggcctacgtttccacaaatatttatcaaaggagagtttgttggggggtctgatatcatattagatatgcatcagaagggtcagcttaaggatgtgcttggcgatattgcacaaaagcatgagcaaaaagaatcatcatgaagatgacaatagtacgccattttggtcacgtgagctttagcatcagtatgggagctggattcttccttttcaaattttc

SEQ ID NO: 413880 - DNA, 408 bp, Oryza sativa
  unsure (1)..(408): unsure at all n locations
gcacgttgccaccacaggctacgcaaaattctctcccttcctcctccaccacctccactccgacgatcctcctcctgatcctgtgccggccggcgatggcgtaccggttgctggagctcacgctggtctccgcgagcgacctcaagaaggtcactctcttctcgcgcatgcatgtctacgccgtcgcctccatctccgggagcaacgtccccatgcccatgcacggcacccacgccgaccgcaacggcggcagcaaccccgcgtggaacaccgtgctccacttncncgtccccgcccgcttcgacacccgcggnctcgccctccacgtccagctccgcgcccggcgctccttcggcggccaccgcgacgtcggggacgtgttcgtgcccctggacgaccttctcgccg

SEQ ID NO: 413881 - DNA, 403 bp, Oryza sativa
gatctatccttcaccatggcgtcggagaaggaggcggcgctggccgccgtgcccaacgacaaccccaccatatttgacaagatcatcaagaaggaaataccttccactgtggtatttgaggatgagaaggttctggctttcagagacataaatcctcaagctccgacccacattgtgatcattcccaaagtgaaggatggattaactggcctatcaaaggcagaagagaggcatgtagaaatactcggttacctcctctatgttgccaaagttgttgcaaagcaggagggacttgaagatggctaccgtattgtcatcaatgatggccccagtggatgccaatctgtttaccacatacatgtacatctccttggaggcaggcagatgaactggccgccgggct

SEQ ID NO: 413882 - DNA, 493 bp, Oryza sativa
  unsure (1)..(493): unsure at all n locations
cctccagatactgttcctcctgcagaagcagaagcagaaggagaaggagaattgaaagcaagaaattaagtgagaggagaagaagaggaggtaggatatggagaaatacgagccagttcgggagatcggggcgggcaacttcggggtagcgaagctgatgcggaacaaggagacgcgggagctggtggcgatgaagttcatcgagagagggaacaggatcgacgagaacgtgttccgggagatcgtgaatcatcgttcgctgcgtcacccgaacataataaggttcaaggaggtggttggtgacggggaggcatctggcgatcgtgatggagtacgcggcgggaggggagctgttcgagaggatatgcgaggcgtngaggttccacgaggacgaggcgcgctacttcttccagcagctggtgtgcggngtgagctactgccacgccatgcagatctgccaccgcgacctcaagctggagaatacgctgctgga

SEQ ID NO: 413883 - DNA, 438 bp, Oryza sativa
ctttccgtggccgccgccctctcggccgcgccgccgtcctcccgccgccgcagggccttcttccaccactcctgccgcccgctcccttcgtcggcggtggcggccaaggcgttgcgcgcgtcggctgcccccgccgtcgacgaggaggcccccgcgtccccgcctccatcagatcttggtaagggagtggagaacttggtgatcataggctctggcccggcggggtacactgctgcgatttacgccgctcgggcgaacctcaagcccgtcgtgttcgaaggctaccaggttggtggcgttcctggtgggcagctgatgaccaccaccgaggtggagaatttccctgggtttccggatggcgtcactgggcctgatctcatggacaaaatgcggaagcaagcggagcggtggggtgctgagcttcaccaggaggatgtt

SEQ ID NO: 413884 - DNA, 424 bp, Oryza sativa
gaaatcgatcgatccgattccggccggccatggcagctgctgctccggcgacggcggcggtgcggcgcatgaagctgggctcgcagggtctggaggtctcggcgcaggggctgggatgcatgggcatgtccgccttctacggcccgcccaagccggagcccgacatggtggcgctcatccaccacgccgtcgccgccggcgtcaccctcctcgacacctccgacatctacggcccccacaccaacgagctcctcctcggcaaggcgctgcagggcggcgtgcgtgataaggttgagctggccaccaagttcggcatcgcgttcgaagacggcaagcggggcgtccgcggggacccggcgtacctgcgcgccgcgtgcgaaggcagcctacggcggctcggcgtcgacagcatcgacccttacta

SEQ ID NO: 413885 - DNA, 511 bp, Oryza sativa
tcgagatcatccttgtctttgaccttggtggtgggacattcgatgtcagtatcttgaccattgacaacggtgtgtttgaggtgttggccaccaatggtgacactcatcttggaggtgaggactttgaccagagaatcatggagtacttcatcaagttgatcaagaagaagtacagcaaggacatcagcaaggacaaccgtgctcttggaaagctgaggagggaagctgagcgtgccaagagggccctcagcaaccagcaccaggtccgtgttgagattgagtccctctttgacgggaccgatttctcggagccgctgacccgtgccagatttgaggagttgaacaatgatctgttccgcaagaccatgggacctgtcaagaaggctatggacgatgctggccttgagaagagccagattcatgagattgttcttgtcggtggtagcaccaggattcccaggttcaggagctcctcagagcttctttggggcaggagcccaacagggtgtaa

SEQ ID NO: 413886 - DNA, 493 bp, Oryza sativa
ggttatgatgctttcaacaccttcttcagtgagactggtgctgggaagcatgttccccgtgctgtatttgttgatcttgagcctactgtgattgatgaggtgaggactggttgctaccgccagctcttccaccctgagcagctcatcaatggcaaggaggatgcagctaacaactttgcccgtggtcactacaccattggcaaggagattgttgatctgtgccttgaccgcatcaggaagcttgctgacaactgcactggtctccaaggtttccttgtgttcaacgctgttggaggtggaacgggctctggtcttggttcccttctcctggagcgcctttctgtggactatggcaagaagttcaagcttgggttcactgtgtacccatcccctcaggtcttcacctctgtgggtgagccatacaacagtgtcctctttacccactccctccttgagcacactgatgttgctgttctgcttgataaagaggcca

SEQ ID NO: 413887 - DNA, 336 bp, Oryza sativa
  unsure (1)..(336): unsure at all n locations
gcttagccgttttgcggcgacgcggcggcggccgtggtggcggcgcggaaggggatggagacgccgctgacagacgtggcagaggcgttcgaggagctggcccggaggatggaggccgacggcggngagctccgcctcgggcccttcggcgacacgtgcgcgctcgtctccgtgctcttcagctgcctcggcatggccttcaggttcgccgagatcgagtacgtcgccaaggtgaacgacctcatcggagcggcgaagtcgtacggcacgctgaacgacattctggacaaagacgtcgagaacgactgcgttaagaagcaaggcagccacttcccg

SEQ ID NO: 413888 - DNA, 421 bp, Oryza sativa
gcatttcttgagctcaatcagcaacaacatctatctccttcttgcttagttaagtccttcgccctcccaagaagaagaagatgtcttgctgcggcggcaactgcggctgcggcagcggctgccagtgcggcggcggctgcggcggatgcaagatgttccctgatgtggaggccacagccaccaccaagaccttcgtcctcgctgctccatccaacaaggcgagctctggaggaatggagatggcggtggagagcggcgagaacggcggctgcggctgcaacacctgcaagtgtggcaccagctgcagcggctgctcctgctgctcctgcaactgaatctatcgtcgtcgtcgcccggctgcatgaggatttatcgtatggatgctgctactgtcgatcagagctttgatcgaggccttaat

SEQ ID NO: 413889 - DNA, 530 bp, Oryza sativa
tcggtttactgtaaggggcattgacagttcttggagtgatggagctcctagccccggaatcaatgcgcaaaccgatgaaagcaatgccaatggcaggaggccatccctcgagaggaactattctgtgatagaaccatcggatgcgaacctcgctgatgaagttgagggagagagctctcctgagaacctgaagcggcttcttgagctcaacaagaagtcgatgagtgctctctacaaagagcttgaggaagaacgtagcgcttcggcgatcgcggctagccaagcaatggccatgatcaataagttgcatgaggaaaaggctgcaatgcagatggaggcactgcaatacctgaggatgatggaagagcaggccgatcatgaccacgaagcgattcagaatcttcacgacttgcttacggagagggagaaagaattacttgacatggatgctgagcttgagacctttaggaggctagtccaagatgaacaattcaatggcgggaaacatgatatcggtggcatattgaatg

SEQ ID NO: 413890 - DNA, 497 bp, Oryza sativa
  unsure (1)..(497): unsure at all n locations
tcgctttttcccaaatacgcttaccaccaaaagctatagatgcagccaaaagggctggcaaagcggccgatgttttctactgcctcaagcttcttgaagcaactggaatatccactgttccagggtcaggtttcggacaaaaagaaggggtgttccacctgaggacgaccatcctgccagctgaggaggacatgcctgccatcatgaccagcttcaagaagttcaacgacactttcatggatcagtacgatggctactccaggatgtgaaatgaaaacaagatgagcactaccccaggagaagagagaaagaatctgcctcagcgtggctgatcgagcagttataattaaaaggcactgntaattaattaattaatcaatcaatcgaaaggctaattatttgctgcaacaatctgtaactcgatctacttgagaaaaaaaaaaacttttttggcttgatatgcatgatggataggataaattatttctgctctttgg

SEQ ID NO: 413891 - DNA, 397 bp, Oryza sativa
tcgcaaaaccgcgggccgcatcccgcgccgccggcgcccaccggcggcaaccacccgccaccgcgagcgaacacccctatataaaccgccacgccacgccacggccaccaactccgaacacgacatggcgccctctctcctcaccaccccgtcccaggccctggccctcgcccccggcgccgccgccagccgcgtcggcggcggcggcggcgggtcggcgcgggtgagcttcccgtccggccgcgtccagcgccgaggcgcgctggggatgcgggtgcgggcgtcggtggcgatcgagaaggagacgcccgagagcgagccgccgtcgacgttcctgcgggaggacgggtccggagcggggtccgggtcggtgcgggagcggttcgaggccatgatc

SEQ ID NO: 413892 - DNA, 439 bp, Oryza sativa
tcgccttgccctagcgccgccgccgccgccgccatgaagttcaacatcgccaacccgaccaccgggtgccagaagaagctcgagatcgatgacgaccagaagctccgggcattttatgacaagaggatctcccaggaagtcagtggtgatgctcttggcgaagaattcaagggctatgtattcaagatcatgggaggctgtgacaagcaaggtttccccatgaagcagggtgtgcttacttctggacgtgtccgccttcttctccacaggggtaccccctgcttccgtggatatggcaggcgtgatggtgagcgcagaaggaagtcagtccgtggttgcattgtcagccaagatctctctgttatcaacttgggtgatgtaaagaagggtgataatgaccttcctggcttgactgacactgagaagcccaggatgaggg

SEQ ID NO: 413893 - DNA, 454 bp, Oryza sativa
cgtttgtttgggaagggaaggatgttgttgccactggccgcaggatcattggggccaccaggccctgggaggcagcccccggcaccatccgtgctgactatgccgtggaagttggcaggaatgtcatccatgggagcgactccgtggacaacgggaagaaggagatcgctctctggttccctgaaggtttagctgagtggaggagcaaccttcacccttggatctatgagtcttagagcttcgcgcctataatcgatcacctcttggtggctagttctcgttaaatatttgagttttgtttcagagttgtcatctggctgcctcctgagccaccattataattctgctgtgatacaatcacagttatatgttgcctgaacttatatggctttttaagtttctggattggatgtgatgggaaaataatactagcagtcagtttttgttataaatg

SEQ ID NO: 413894 - DNA, 474 bp, Oryza sativa
gcccttcttctctaccagcggcagcggcggctggtagggaggaggagatcgccaccagatcgccatggagacgctggcgagcgccatgcggcgggagaaccgccgcttcaagcccccctcctcctcctccgcctccgcctccgccgccctctcctcggggagggtccccctcgtcatggccttcctctcctgcctcgcgtggctctacgtcgccggccggctgtggcaggacgcgcagacgcggatgatcctgtctggtctcctcgagaagagctccggcaatcttccgaaggtgctgtcggcggaggacaagctgaggaatctaggatgcattggaattgggaggaagattgcggaggcagaaatggaccttacaaaggcgaagagcgaggggtatctgtgggggaatggaactgctactggtagttctgacaagaagaagctccttgctgttattggagtttacactggttt

SEQ ID NO: 413895 - DNA, 556 bp, Oryza sativa
cgtcttgccctacttctccctgccgtggcagaggaagcggcagtacagctccagcagcagcggcttcatcactcggagggcggcgcgtcctcacaaacgcccactccgtggagcactacacccaggccaagcttacgaagcgcggctgccacaccaagtacctggccacggtcctcgccattgggacggagtgcgacattgcgctgtcaactgtcgatgatgacgagtcctggcaaggagttttgcctgttgagtctggatcactgccagcactttaggatgctgtgactgtcgctggtcatccaattggaggagacacaatatctgtgacaagtggggtggtctccaggatagagatactttcatatgttcacggctctacagaacttctaggattgcagatagatgcaggtattaactcaggacattcaggtggcccagcttttaatgacaggggcaaattgtgtggtatagcttttcaatctctaaacatgaagatgcagagaatataggttatgtgatacccaccccagttattatgcatttcattcaagac

SEQ ID NO: 413896 - DNA, 285 bp, Oryza sativa
accgggtttatgtttgatcactggagaacacaagcaattgcggcagaccttgcaattgaaaacggggaaaggaaaccaaacgctgtgatcaaatcaaattaatgaaatacaaaaggaaaaaataggatgcatacatgcgagaagctcatggatggtaatgctccattttctcctgtacagatcatgcatatatagttgcttctggttgagatgtctgaaacactctttaccatctgtggattaatcaaatacaaatacatgggcctaccgcacgacgacgaacgc

SEQ ID NO: 413897 - DNA, 410 bp, Oryza sativa
gcatggtgctgacaggcagctgtggttcgcatccaagcagtccctgagctacctggatggcacgcttccgggagacttcgggttcgacccgctggggctatcggacccggaggggaccggtgggttcatcgagccacggtggctggcctacggcgaggtgttcaacggccggacggcgatgatgggcgtcgtcggcatggtcgccccggagctcctcggcaagctgggcctcgtccccgccgagacggcgatcccgtggttccagaccggcgtgatcccccccgcgggcacctacacctactgggccgacccttacactctcttcgtcttcgagctcgccctcgtcggcttcgccgagcaccgccgtttccaggactggtacacgccgggctccatggggaagcagtact

SEQ ID NO: 413898 - DNA, 366 bp, Oryza sativa
gcgccggtgtctccccccaaattactagccgccctcggtcggggccgtcgtcttccgggtctcggctaccgaagattcgccgtcttcgccgtcgccgccatgaatcccgagtatgactacctctgcaagcttctgctcatcggagactcgggcgttgggaagcctcgcctgcttccggggctcgcgggccacccatatctggagagctatatcacagcccacggggccgattctaaaatccgcactgttgagcaagatgggaagacaataaagctgcaaattcgggatactgctggccaagagcgatttaagaccattacaagcagctactaccgcggtgcccacgggaccaatgctgtctatgat

SEQ ID NO: 413899 - DNA, 502 bp, Oryza sativa
ttaaagttgaaaaatcgctgcagagtctaaattgtcaaaatttgttgaggatataatagtgcctccaagaatgattgacataattgtcgatggagaggttaatgacgaatacatgaaaacacttgagactctaagcagaaaaatcaagttcattgaagttgatgcaatggttaaatcgtccaaggctctaaaggatgttcaacctgaggttgagagacttaggcagaaagcagtctcaaagatttttgaatttgtcatccaaaagttctatgccttgagaaaaccgaaaacaaatattcagattctacagcagagtgttcttcttaaatacaagtacacgatagtttttcttaaggaacatgctaaggagatatatgcggaagttcgtgcagcttatattgataccatgaacaaggtgctgagtgcacattttcgtgcgtatattcaagcattagagaaactacaactggacatagcaacctttaccgacttacttgagttg

SEQ ID NO: 413900 - DNA, 459 bp, Oryza sativa
ttttgatccaggccccgcgtctccggcgatctcccggccatggcgactcgccgggccctctcctccctcgtccgcgccgcctccaggctccgcggggcctcgcccgccccgcgcccgcgcgggccgctccaccgaccgtcgccatcggggtacctcttcaaccgcgccgccgcgtacgccacggccgccgcggcgaaggaggcggcgcctcccgcgcccgcgacggggaaggccacgggtggaggtaagatcaccgacgagttcaccggcgccggcgccgtcgggcaggtgtgccaggtcatcggcgccgtcgtcgacgtgcggtttgacgaggggttgcctcccatcctcacggcgctcgaggtgctcgaccacaacatccgtcttgtgctcgaggtggcgcaacaccttggcgagaacatggtgcgcacaatcgctatggacgggactggggggctt

SEQ ID NO: 413901 - DNA, 330 bp, Oryza sativa
ggttttatggggctgggccgcggtcaacttagcataatggatcagcttgttgagaagggtgtcattagtgattcattctctctgtgctatggtggaatggatgttggtggtggtactatggtacttggtgggatgcctgctcctcctgacatggttttctctcattcaaaccctgtccgcagcccgtattacaacattgagttaaaggaaactcatgttgccggaaaggcattgcggttagacccaaagatattcaacagcaaacatggcactgtcttagatagtggaaccacatatgcttacctgcctgaacaagcatttggtgcattt

SEQ ID NO: 413902 - DNA, 416 bp, Oryza sativa
  unsure (1)..(416): unsure at all n locations
tcttttgcctgcccgacaacatcggcgactcgccggggaactacctctccctcgccaacaacaacttcacgggggagatccccaagtcgatcgcgcgcatggccaacacgctcttcgaggtgctgttcctcaacaacaagctcagcggctgcctcccctacgagctcggcctgctcgccaaggccaccgtcatcgacgccggcaccaaccagctcaccggcccgatcccggcgtcgttcgcgtgcctgcgcaaggtggagcagctcaacctggcggacaacctcctctacggcgaggtgcccaacgcgctgtgcgagctcgccttctcgtggtcgggccgccttaagaacctcacgctctccaacaactactttacgtngctcggctcctgctgctgggacctgatcaaggagggg

SEQ ID NO: 413903 - DNA, 406 bp, Oryza sativa
cgccacctcatccacagccatggcgacctcctccgccgccgccgcgctccggcttcccgcctcccagctccccctctccgcgcgcccctcctcctcctccaccctccgtttccctccccgccgccccgcgcgccggggaggcctcgcggtctccgccttcacgaagctctccgaggcgtcccccgtcgccatcccaccggagcccgcgcagccgttgccggacgaggaagccctgccccccaagcccggggtctacggggtgtacgaccccgccggcgagctgcagttcgtcgggatatcgcgcaacgtcagggccagcgtcgagggccaccgccggaaggtgcccgccgacctttgcggctccgtcaaggtttcaatagcagatgaggagacaccagatcgaact

SEQ ID NO: 413904 - DNA, 505 bp, Oryza sativa
ccacgcgtccggccgtttgtgacggagctcatgctcgccgagtacctctacctacagaacgacgactccgagaagcccatgtacctgtacatcaactccaccggcacaaccaagaatggcgagaaattgggctatgagacagaagcttttgcaatatatgatgctatgaggtatgtcaaagttgcaattttcaccttgtgtgttggcaatgcatggggagaagctgctttactcttggctgctggtgctaaaggtaaccgtgctgcgcttccatcgtcgacgataatgataaagcagccaattggtcgctttcaaggacaggcgacagatgttgacatagcaagaaaagaaatccgaaatgtgaaaatagaaatgattaagctgctgtcaaggcatatcggtaaatcaggagaagagattgctcaggacatcaaacggcccaaatatttcagtccaagtgaagctgtggattatgggatcattgacaaggtgctgtacaatgaga

SEQ ID NO: 413905 - DNA, 394 bp, Oryza sativa
gcttcttagctcctgcctccttctctgatcattcttgcaaaccaatcgagtcttgaacgaggtcaatgggcaaggaggtggacgtgtccactctcgaggccggcggcgcccgggactacatcgacccgccgtcggcgccgctcgtcgacgtcgacgagctgggcaagtggtcgctgtaccgcgcgctgatcgccgagttcgtcgccacgctgctcttcctctacgtcacggtggccacggtgatcgggtacaagcaccagacggacgccgccgtgaacggcgccgacgcggcgtgcggcggcgtgggcgtcctcggcatcgcgtgggcgttcggcggcatgatcttcatcctcgtctactgcaccgccggcgtcttcggcgggcacattaaccc

SEQ ID NO: 413906 - DNA, 517 bp, Oryza sativa
ctctacccttcaagaaacaagaaagacaacaccaacaaactagctagctcaccaatggcctcgttgtcctccttccggctcgccgtggcagtggcggcattgttggtcgtcggctcatgcgccactgaggtcaccttcaaggtcggtgagggctctagcggaaaaagtctagagctcgtcaccaacgtcgccatctctgaggtggagatcaaggagaagggcggcaaggactgggtggcgctcaaggagtcgtcgactaacacctggtcgctcaagagtgaggcggcgctcaagggccccttctccgtccgcttccttgtcaagaacggtggctaccgtgtcgtcgacgacgtcatccccgaaagctttacggccggctctgaatacaagagtggtatcaacgtctaattaatagacatgcgtactcttgcattgggttgcatgataattattaacctctaaataattttgtcttgaaaaagatcacgctacgcgtgagcatgcaacaattaatttc

SEQ ID NO: 413907 - DNA, 332 bp, Oryza sativa
caatccattaggagtcgactcggctgctacttaattctcctggtggtcgccgtggaggtggactgagatcacattaacaatggagaaggctgatgttgtgctcgtgagcaaggagattgccaagggcactattcactttgtacaagagggagatggctgcaccactgagactggtagtgcatatggcctcaagcctggtgtacatgggttgcatattcatgcactagatgacaccaccaatggttgggtgtgaactggaccacactacaatggtgccggaaaggagcatggtgcaccagatgatgagacccgccatgctggtgaacctggaa

SEQ ID NO: 413908 - DNA, 458 bp, Oryza sativa
  unsure (1)..(458): unsure at all n locations
atcaaacgctacctctgcctcgagctagttaaacaggttcctctgttccatggcatggacgatctcatcctggacaacatctgcgacaggctgaggccgctggtgttctccagcggcgagaaggtgatccgggagggcgacccggtgcagcggatggtgttcgtcctccaggggaagctccggagcacgcagccgctggccaagggcgtggtggcgacgtgtatgctcggcgccggcaacttcctcggcgacgagctgctgtcgtggtgcctccggcggccgtccctggaccggctgccggcgtcgtcggcgacgttcgagtgcgtcgagacggcgcaggcgttctgcctcgacgcccccgaccttcgcttcatcacggagcagttccggtacaagttcgccaacgagaagctcaagcggacggtgcgctactactcctncaactggcggacgtgggc

SEQ ID NO: 413909 - DNA, 365 bp, Oryza sativa
caggtatggaagaatagaaaggagctcaaggtagaggaccttggaattgtgacattatttggagttgagctttatgcgtggttctgcgtaggcgagattgttggcagaggattcaccataaccgtctataaggtctagaagagttctgattaagacctggtttataaaatacactgttagctgatgcttgtctaaatgacaaagatacctcctgccttttcacaattttgtttatggaaagtctttctagtgctggatgtcagccaagacgagcacatcgttgcaacactgcttcaataatttgctcgatctctcgattgccattttggtgtcctgtaatgtgaaatactgaaattccatctcac

SEQ ID NO: 413910 - DNA, 492 bp, Oryza sativa
tctttggaaagaggtgaaaaattattggacgaacttctggatgaggcattatcaagtgctggtaataatggtggtaaaccttgtctatctggaaaagatgttttccttttgtatgatacatatggttttccagtagagattacagctgaaatagcaggtgaacgaggtgtaattgttgacatgaagggatttgatatggaaatggaaaaccaaaggaaacaatctcaggctgctcataatgtagttaaactttctgtaggaaatgagactgagattgtcaagagtatccccgatactgaatttctggggtacgactctctttctgccactgctgttgttaaaggtcttttagttaatggaaactcagtgaatgtagtttcagaaggttctgatgtagaaatatttttagatcggacaccattttatgctgaatcaggtggtcaagtgggagataatggtttcttgcatgtctatggagaagaagatgcaaaa

SEQ ID NO: 413911 - DNA, 484 bp, Oryza sativa
ggtctgaggtaggggaaagaagagaagagaagcaagcaacaccaacagcaacacgcaaggagtggaggactcttcaaggtctggagagtggagaggaagaggaatcctcctcagtcctcaccttcagatttcagaacacaggcaatcggccctagctgcaatccaacaagatgggcatgcctctgctgctgctgctgctgatcctcgtcgctgctggcccccaggcaggcagagctgcaaagccaatcccaaatctccagctcatgaccaaggagggcggcagttcaagaatcatccaggacgacatcataaaggcaatcaacaagcatcccaatgctggctggacggctgcacggaatccatactttgcaaactatactactgcgcaattcaaacatatccttggagtgaagccaacaccgcatagtgtgctaaatgatgtccctgtcaaaacttatccaagatcgctgatgctttcaaagga

SEQ ID NO: 413912 - DNA, 323 bp, Oryza sativa
aactaacctgtaactaatagcagggacacccaggaggtgaagctggaacatggtctgcagatgttaactatcttcaagaaccatgaatcggagacgaacattcttgaagactttgacttctatgagcagcgggagaaagccttgcaggagaatagacgtcagcagcagcctgccagcccagagctgcagaaaccagcagagaataaggccctaggagaacttatggcccacatcttagacacatttggtcagactgtccagctaaaagaaactgagaatggcgaaagcaagcctgcagttgagggtgtttctttagctgaatg

SEQ ID NO: 413913 - DNA, 455 bp, Oryza sativa
catatacctaaactctgaagaaatggcatggttgggttgccagttctagttttacagtggcaatgaagcttgctcctaatagagagaaatttatggaggtcattagtggaacgggtgacataaaagctgatatcgagaaattctgcacgaccttttatccttttctcaaagagaatcatgattttctggccagtgttggacttgatgatctgaaggcttcttaatgcattcctatgcaacaattacccacagaataaacctgtcttacctgtctaatgaaatttagtgctgccgagggtatgctgttttccacctatctttggaaaactatagggcaataatgaatgtcgtgagcttagaacgattgggtaagcccatgggcagctatacacaatgtatgtgttgctttatgcaaaaaggtcaaactgtgaaaagcattcccgtgctagaggaag

SEQ ID NO: 413914 - DNA, 290 bp, Oryza sativa
accgttccctttcctttcgaccccacttttttttttttatctctaccaaaatttgtccttggcggggattcttttttgcctggtggggggcacacacgcgtcggagaagatgagggacatcttgcacatccagggcgggcagtgcgggaaccagatcgtgtccaagttctgggaggtggtgtgcgaccagcatggcatccacccgacggggaggtacgccggcacttcggacctgcagctggagcgcgtgaacgtctactacaacgaggcgttttgcggtcggttcgtgc

SEQ ID NO: 413915 - DNA, 310 bp, Oryza sativa
ctctccttcctgctatcctttgccctcctctattgccccctctcacaagagagagagcgccagactctccccaggtgaggatccagccatgacgggggccaaatccaagggcgccgtcaagcccgacgccaagtatggctgtgaagagtaagggcgcggagaagcccgccgccaagggcaggaaggggaaggccggcaaggaccccaacaagcccaagagggctccctccgctttcttcgatcttatggaggagttccgtcaggagctcaaggctaagaaccccaagcatcaaggtgacggtggtgtacg

SEQ ID NO: 413916 - DNA, 452 bp, Oryza sativa
gctgtcttcgacgagctccagcccgtagacctcgccggatctccccgatggccgtgaccttcaccgacctccacaccgtcgacgggctcaaagccctcgagcagcacctctccggcaagacctacgtctccggaaacgcgatcagcaaggacgacatcaaggtgttcgccgccgtgccatcaaagcctggagctgagttcccgaacgctgctcgctggtatgataccgtcgctgcggccctcgcttcaaggttccctggcaaggcagctggagtgaatctgcctggaggaggtgcggcatcgtctgctgcagcggctgcgccagctgctaaggatgctgatgaagatgatgatgacccggatctttttggtgatgagaaccgggaagacaagaaagcagcagatgagcgggcagcttccaaggccctttcaaagaagaaagacagcggaaat

SEQ ID NO: 413917 - DNA, 402 bp, Oryza sativa
agcccgtcagtgttgcaattgaagccggtggcagagcattccagctctactcatcgggtatcttcacgggtaaatgtggaacagcactagaccacggcgtcgctgctgttgggtacggcacagagaatggcaaggactactggatcgtgaggaactcgtggggcaagagctggggtgagtccggctacgtccgtatggagcgcaacatcaaggcgagcagtggcaagtgcggcattgccgttgagccatcctaccctctgaagaaggggaggaaccccccgaaccccggccctactccgtcgttcccaaccccgcctcccaccgtctgcgacaactactacacttgccccgatagcaccacctgctgctgcatctacgagtatggcaaatactgctacgcct

SEQ ID NO: 413918 - DNA, 470 bp, Oryza sativa
gcttaatctgcactatatccatgacaaagtcgcagatgtgctccgcgaggcggggtgcaccttcatggtcagtggcccgtggttcctcaacatgaacttcttgattacctgtgacccagccacggtcaaccattgcttcaatgccaacttcaaaaactacccgaaaggcagtgagtttgctgaaatgtttgacattctaggtgatggactccttgtggcagactctgaatcatgggagtatcagcgacgcatggcaatgtacatatttgctgcccgtacctttcggtcctttgcgatgtccaccatcgcgaggaagactggcagtgtcttgttaccctaccttgatcacatggctaagtttggctcagaggttgagctggagggtgtcttcatgaggttctcactagatgtgacatactctactgtgtttgcagctgaccttgactgcttgtcagtgtcttccccaatcc

SEQ ID NO: 413919 - DNA, 350 bp, Oryza sativa
gtgtagctgaggcaaccattgttgataagcagattcctctgagtggcccaaattctgttgttgggagagcattcgttgttcatgagcttgaagatgatttggggaagggtggccatgagcttagtctcagtactggaaatgctggtgggcgacttgcatgcggtgttgttgggctgaccccgttgtaggtcgctgcaagttgcagctgaagtgtcagtatcgcatccatgtcaccctttttgtcatcttcgagcctgaggcagtcgttcttgtatcacatggatttcgcaacatggatgcttaatagtatctgttgatcgttcgtctcacagtaataaaatttagttgag

SEQ ID NO: 413920 - DNA, 518 bp, Oryza sativa
ggttgatgttctctccagggacatcagatgaacatatttcaggcgttcagtaccttcaagccacaggaattgatggtgcaataattgtgaccactccccagcaggtctctctaatcgatgtgcggaaggaaataaatttctgcaagaaggttggtgtgccgatcttaggtgttgtggagaacatgagtggcttgcggcaggttctctcagatttcagattcgtgaagcaaggtgagggaggcgagacggatgctacagaatgggcgctgaactatatcaaggagaaagctcctgagcttttgacaatggttgcatgcagcgaggtgtttgatagcagcaagggtggcgcggagaaaatgtgcaacgaaatgggagtacctttccttggcaaggtgcccatggatccacagcttttcaaggcggctgatgaagggaggtcatgcttcgtcgatcaaaagtgcagtgctagtgcaccaactcttaaaagcatagtcaagaagctgatcgaaaatcaagat

SEQ ID NO: 413921 - DNA, 487 bp, Oryza sativa
gcgagggccgccctttttttttttgttaatgatctgcatgctttgattagtcctcctgccaaaggaactccactacccctgatcttacttggaaagtcgaagaatgcactgctatcaactttcctctttctggaccaaattgtatgggctggaaggacaggaatatacaagaacaaggagcgagcagaattcctcagcaagatagcattttattgcttcctgggttctaacacatgtactagtattattgaggtagccgagcttcagcggctatccaagtcgatgaagaaactagagaaggagcttaaacaccaggagctgttaaagaacgagcaataccagatgaaactgcagaagtgcaacgagaggcgtctcgctctcatcaaatcgagcctcgacatagttggtgctatagggctgcttcaactggctcccaagaaagtgactccgcgtgtgacaggggcgtttggatttgctagctcactca

SEQ ID NO: 413922 - DNA, 499 bp, Oryza sativa
cccgtcttcttcctccattccttcggcggttgaaccttctagaagctttcctcctcctcccatggcggcgacgatcgtgtccgtcaaggcgcgccagatcttcgacagcaggggcaaccccaccgtcgaggtcgatgtgtgctgctcagatggaacctttgcaagggctgcagttcccagaggtgcatcaaatggggtgtataaaacgctcgaattgggggggacgggggatctgatcactggaaagggggtgttcccagggctgtcgacagtgagaactgggttattgccccagctctgattggcaaggaccctacgtcacaggctgagcttgataacttcatggttcagcagcttgatggaaccaaaaatgagtgggggtggtgcaagcagaagcttggtgctaatgcaatcctggctgtgtcactggccatctgcaaagctggagctatcatcaagaagattcctctgtaccagcacattgccaaccttgctgaaa

SEQ ID NO: 413923 - DNA, 463 bp, Oryza sativa
  unsure (1)..(463): unsure at all n locations
gctcgctcagggcgacgcggcggcgcgcgagcagggcgcggcggcggcgcgagaagggcgaggcagctgcgggaggattgtattggagctattgatggcacacatattagagcctctgttcgtaagaatgtggagtcctcttttcgtggtaggaagtcccatgccactcaaaatgtaatggcggccgtagattttgatcttcggtttacttatgtcctggctggttgggaggggacatcacatgatgctgtagttttaagagatgctttggaacgtgaaaatggcattcatgtcccacaaggaaaattctatctagttgatgctggatatggagccaaacaaggattcttgcctccttttcgtgctgtccggtaccacttgaaagagtgggggaataatccggtgcacaatgaggaagttgttaaccttagacactcattncttcgtattacggttgaacgtg

SEQ ID NO: 413924 - DNA, 385 bp, Oryza sativa
cggtcgctcggtcggacgcgtgggcggacagtacgtggaggccgctcacttcgtcgtgccggagggcgcccgcgccgtggagctggtggggggcaaggagtcggcgctggtgcaggaggtgcgcaccgtgcccgggtggacgtaccgcctgtcgttcgccgtgggcgacgcgcgcgacgggtgcgcgggctccatggtcgccgaggcgtacgcggcgagggccttcatcaaggtgccgtacgagtccaagggcaccggcgggtacaagcgcgccgttctcgagttcgccgccatcgacaaccgcacccgcgtcgtgttccagagcacgttctaccacaccatgaccgacggctcgctctgcgggccggtcattgacgacgccttc

SEQ ID NO: 413925 - DNA, 396 bp, Oryza sativa
gtttcgcggatcacctgtggtcctgtgcagccgtaccgtacgcctctgctttcctctcaccccaccgcgccaccggcgagcggcccgcgagggaggaggcgctgccgccgcctctgctgatgctgatgatgctaggggcggcctcccagtggatcctggccgccgccgcggcggcggccgtggcggcgctgctgcggctggccgtgtcgacgctggagtgggcctggtggacgccgcggcggctggagcgcgccctccgggcgcagggcatccggggcaaccggtaccgtctcttcaccggcgacgtgccggagaacgtccggctcaaccgggaggcccggaagaagccgctgccgctcgggtgccacgacattatcccgcgcgtgctgccgatgt

SEQ ID NO: 413926 - DNA, 519 bp, Oryza sativa
gatgaaacctttaacaactttggagacaaactagaccgcagaactgtggtgcataactggcttggaggtggagttgcagagaaagttgttgctgctggtttgagatgcattgtgagcaaccaggataagtggtacctagatcacttggaagttacatgggatggattttatatgaatgaaccactgagaaatatcaagaacccggcacagcagaagttggttcttggtggtgaggtatgcatgtgggctgaacacatagatgcgtctgacattcagcaaaccatttggccacgtgctgcagcagctgcagagcggttgtggactccgtttgagaagctttcaaaggagtgggaaatagcagcgctcagcgcaagactggcacgcttcaggtgcttgctgaatcatagagggatcgctgctggaccggtaactggttatgggcgtttcgcgccaagagagccaagctcctgtttaaaggcataggatttccaaagcagataaatattatattataatatt

SEQ ID NO: 413927 - DNA, 477 bp, Oryza sativa
cgcgccgtcgccagcagccgccgccgctgcctctcctcctcctcccctcgccgccgatccaatccggtcactttcagtcttttttcttgagggggagatggcggtttctttcaccaacgttagctcagaggcaggcctcaaaaagctcgatgagtaccttctcactcgcagctacatctctgggtaccaagcctccaatgatgacttggctgtgtactctgcattttcaactgcgccctcttcaagctataccaatgttgctaggtggtttactcacattgatgcactcctacgtctgagtggagttactgctgatggtcaaggcgtaaaggtcgagtcgacagctgttccttcagcttcaacccctgatgttgctgatgcaaaggctcctgcagctgatgatgacgatgatgacgatgttgacctttttggtgaggagactgaagaggagaagaaggcaactgaggagcgtgctgc

SEQ ID NO: 413928 - DNA, 503 bp, Oryza sativa
gagtggaggaggaggaggagagcggcggcggcgatggcggggaaggggttgaacgcgacgggggagttcttccggcggcgggacgactggaggaggcacccgatggtggggaaccagctgcgccacgccacgccggggctcggcatcgccatcgtcgccttcgggatctacctcgtcggcgaggccgtctacaaccgtctctaccgtccctccggcgaccaccaccaccactagatcgcgtcggcggccacgcgcggagacccgcgccgcctccccgaggtgaagtggttggagcaatctttaccaagcaccaatgttgttgatcttttccagtttgagttcataaggtctgccatgaggcccatgaccatcatgtaatttgcaaccagggagacatgaatcatggacttttatatcaatgttctgggcttataatccagcatttggaaatgggagtgacacttataattctgaagttatggaattctttcatgcccttgttg

SEQ ID NO: 413929 - DNA, 589 bp, Oryza sativa
  unsure (1)..(589): unsure at all n locations
cactttagttaagctggccgcccgcctgacggtcccgaattacttgctggactccacccacgcgtccggtcttgctggccgagcaggctgaaaggtatgaggagatggttgagtacatggagaaggttgcaaagactgtagatgtggaagagctcactgttgaggagcgcaacctcttgtctgttgcttacaagaatgtgattggtgcccgccgtgcctcctggcgtattgtctcatccattgaacagaaggaggagggtcgtggcaatgaggaacatgttactctgatcaaggagtaccgtggcaagattgaagctgagctgagcaagatttgcgatggtatcctgaagttgcttgactcacaccttgtgccctcatctactgctgcagaatctaaggtgttttacctcaagatgaagggtgattaccacaggtaccttgcggaatttaagactggtgccgagagaaaggaagctgctgagagcacaatggtggcttacaaggctgctcangatattgctctggcggatcttgctcccacccatcccattaggcttggactggcacttaacttctctgtgttctacta

SEQ ID NO: 413930 - DNA, 501 bp, Oryza sativa
ttttctttggggcattcgtgaggaaacctcttctgcaaagtgcatccgattggaaagtgccaactactttcatatatggccaacaagattggatgaattaccaaggtgcacagcaagcacggaaagaaatgaaagtcccctgtgagatcatcagagttccacagggaggacattttgtgttcatagataatccttcggggttccactccgcggtcttccacgcatgccgcaagtttctatctggagatggagaggaaggcctctctcttcctgaaggcctaacatcggcctgagatggcgtctcgtacgacaatctcatcatagcaacccagcacgattgatggaaaatactgtgaccgttgtcgccgtcttgtttgtgtttacacgagttgcgtcaacatgtatcatgtagatatatatacacatgtgtacaattgtacaagtagtgagaaacacacgcattgctatgaaatacgaaagtcaatttccatgttacattag

SEQ ID NO: 413931 - DNA, 408 bp, Oryza sativa
ccctctctggccgtccgaggacgccgcccgcgccggcatcctctccatctggaaggaggccgacttcatcaaggtgagcgacgacgaggtcgccttcctcacccagggcgacgccaacgacgagaagaacgtgctctcgctctggttcgacggcctcaagctcctcatcgtcaccgacggcgagaagggatgcaggtacttcaccaaggacttcaagggctccgtccccggcttctccgtcaacaccgtcgacaccaccggcgccggcgacgccttcgtcggctccctcctcgtcaacgtcgccaaggacgactccatcttccacaacgaggagaagctgagggaggcgctcaagttctcgaacgcgtgcggagccatctgcaccaccaagaagggtgccatcccggc

SEQ ID NO: 413932 - DNA, 403 bp, Oryza sativa
attctgtgtgtgtgtcttggttgcaaaaaccaagacatacacacagaatcaaataataacaaaggtttcctagcctcaaaggatacatatatatagtttccctacaatacaatggagcctgtcaatgatttccaggaaggcatttcaacagagcatgcctttgaggcagagcctgtgccatcattgtcggaaacaataacgccacgatcaatggtggtgagcttcatccttagtgtaactctcagcatcgtcgccatgaaggtcaccttgagctctggcttcattccgtcgttcagcatcccagccggcctcctcggtttttgtgtatcccgtgcgtcgatccgcattcttgactacttcgcagtggcacaactaccattcacacgccatgagaacaccatta

SEQ ID NO: 413933 - DNA, 512 bp, Oryza sativa
ctccctctctctcttcttcttcttccttccctctcaacccgacgacccacgcgaagcgaactctcgcgcgagacgagagtagtaaaccctagaaacctagaggagatccccaccaccaccatgacggtggatcagaggacgacggcgaaggcgatcatgccgccggtggagatgccgcccgtccagcccggaagaaaatgtggaggcgaggaaagtactggaaaccttgattccgtccaaccgataggaaaaagcgaccacggagatcacgcgatggacctacttcagttgcagagaccatcaagcggtgggccgagctcaacaatcagcaggagcttgatccacagggtccaaagaaggcaaggaaggcacctgcaaagggttcaaagaagggctgcatgaaggggaaaggaggaccagagaatacacgttgtgacttccgtggtgtgaggcaacgtacctggggcaagtgggttgctgaaaattcggagcccgatcggcaaagtagactc

SEQ ID NO: 413934 - DNA, 451 bp, Oryza sativa
  unsure (1)..(451): unsure at all n locations
ctccccttctcctccgcctcgcctcgcagtgtggaagaaaggaaggaaggctaaaaccctagcgagcgcgcgagcgagcgagggctctctgcttccttgcgatgacggcgccggcggacaaggggaagaaggccaagaccgacgccgacggcggcgccgccgaggagaacgagcagatcgacggcgccctcgtcctctccatcgagaagctccaggagatccaggacgagctcgagaaggtcaatgaggaagctagtgacaaggttttggaggtcgagcagaaatacagtgagattcgcagacctgtctatctccgaaggagtgacattatccaaacaantcccgacttctggctgaagcgtttctgagtcatcctctacttagtgagcttttgaccgaagaggatcaaaagatgttcaagtacctggagtctgtcgatgtggatgattct

SEQ ID NO: 413935 - DNA, 326 bp, Oryza sativa
ctgatcttaggattgagatatgctattaggcatggtttcaagaaaatcatagtatatggcgactctcaactagtctgttatcaggtgaaaggtacatggcaaacgaagaaccagaacatgatggaactgtgcaaggaagtgagaaagctcaaagaaaacttcgtctcatttgagatcaaccacattcgacgggaatggaatgccgaggcagatcgccaagcaaacatagctattactctttccagtggtgtggtctctgaggagcgtggcgatggctagccttctccggctataacccttctagataatgggagtaactagtatat

SEQ ID NO: 413936 - DNA, 324 bp, Oryza sativa
caaaccctaacgtcgtcatgggagccctcgtgggcgggccgttccagaatgacactttcgtcgactctcgggacaatgctgttcagacagagtcaagcacttacaacagcggcaccctcgttggtcttctttctggtctggtcacaacttcctctgtggcgcagtcgttcacctagagctctctcagagtttgggcaatggctttgaccaaccgggaggatatacatgtagccatgtacaatgagagatttttggcgtgaccaaaggcaatgtgccatcagcgaaacgccctcacggggttctttcgtggtcatcctttgggtg

SEQ ID NO: 413937 - DNA, 430 bp, Oryza sativa
cttggcttggaaaatgtcaacgttgttacacaacgcggttttgttcctgttgatgagcggatgcaagttatggacgcagatggcaatgcggttccaaatttgtattgtattggagatgccaatggcaaactcatgctggctcatgctgccagtgcacaaggaatctcagttgttgagcgaatctctgggaaagacaacatcctaaatcatctaagcatcccggctgcctgtttcactcatccggagattagtatggttgggctaacagagccacaagcgagagaaaaggctgataaggaaggatttgagataagtgttgttaagaccagcttcaaggcaaacacgaaagctctggctgagaatgaaagagatggacttgctaagatgatttaccggcctgacactggagaaattcttggagttcacatat

SEQ ID NO: 413938 - DNA, 455 bp, Oryza sativa
cttcacctgctgctgctgcgaccgccgtgaccatcaccacctcgtcgccggcgagaaacctgcagagggcgagggcgagtgcggcggagcaggggatggaggagcatggcaaggcggctgtcggctgggcggccagggacgactccggcgtcctctccccgtacaacttctccaggagggctcagaaggacgatgacgtcaccatcaaggtgctctactgcggcatctgccacaccgacctgcacgtcgtcaagaacgattggggcaacgccatgtaccccgtcgtccccggccacgagatcgtcggcgtcgtcaccggcgtcggcgccggcgtgaccaagttcaaggccggcgacacggtgggcgtgggcttcttcgtcgggtcgtgccggacctgcgacagctgcggcaaggggtacgagaactactgcgccaagatggtaaccacctgcaac

SEQ ID NO: 413939 - DNA, 234 bp, Oryza sativa
acgaattaattacctacgtatatcgattaattagtgtcggattatacgtactattatacgtacgtgctgtgctatgtacgtagacaacaaaaaaaaatgtgcgtgatgagttctactacgtacgtacgtactgtgttctagtgttttaatttgtatccgaaccaaggagttgtttaattaactgcatgcacatgcactggacttgaaaaaaaaaaaaaaaaaaaaaaaaaaaca

SEQ ID NO: 413940 - DNA, 370 bp, Oryza sativa
  unsure (1)..(370): unsure at all n locations
tcgtgctgcgacgggaggctcctatgcgagccatgcagatgcatgctacaaggttacaatggaactagtcctaatcaagaaaagtaccaatactgaagattcataggatcatatcatatactattgctgggaaactaaagccagaaatggcggacatgaggcgccattcggtagatgttccactgtcaagaacattggtgcagctgaagagagtgaggtcgctgcgggatccagcaacaaactctttgagcaagtatgcatctccttctgcaatatgatctgggagaccgcttttagcaatggggttgcaatgganctangcaggtcagcacatcatcagttgatcgaagaaatggagatttggaagctg

SEQ ID NO: 413941 - DNA, 428 bp, Oryza sativa
aagtttaatggagcggtgatgatcgaggtggtgctcaacgaccggctggggaagaaggtgcgcgtcaagtgcaacgaggacgacaccatcggcgacttgaagaagctggtggcggcgcagacggggacgcgcgccgagaagatccgcatccagaagtggtacaacatctacaaggaccacatcaccctcgtcgactacgagatccacgacgggatgggcctcgagctctactacgactagccgacctgcctgcctgcctgccttcgagtatggccgatcgaatcgatctttaattatgatgaataattccgtcagggtttgtgtgtcttaaaacatcttctggatatgatttggcttggggtttgtgcgaacgatgttttatactaatagaacgcttctgtgagccaaatcaacgtgatttgggggtg

SEQ ID NO: 413942 - DNA, 278 bp, Oryza sativa
ttggcacatgctgctctagcttgctacaggctttagtggtgagtatagtgatcagatgcgactagctagcttggttgattatatcgtcagagactgctccggcctgcgtctccgaccagcaccccgtggtggtgtccgcggagatgctgagggacgtggtcatggacgccgtcagtgtgtccatggcctagtccggctggttcgtcaaggctgccggcggagcccacgccaatgcgggctccatctacaccatgaagcttaacccttccgccggtgtg

SEQ ID NO: 413943 - DNA, 463 bp, Oryza sativa
gccagtaagctagctaactaactacgtggctatggcccccaccgtgatggcctcctcggccacctccgtggctccattccaagggctcaagtccaccgccggcctccccgtcagccgccgctccaccaactcgggcttcggcaacgtcagcaatggcggaaggatcaagtgcatgcaggtgtggccaattgagggcatcaagaagttcgagaccctatcgtacctgccaccactcaccgtggaggatcttttgaagcagatcgagtacctgcttcgatccaagtgggtgccttgtctcgagttcagcaaggttgggttcgtctaccgtgagaaccacaggtctcccggatactacgatggcaggtattggaccatgtggaagctgcccatgttcggctgcaccgatgccacccaagtgcttaaggagctcgaggaggccaagaaggcctaccccgatgccttt

SEQ ID NO: 413944 - DNA, 410 bp, Oryza sativa
aaattctatttttaaagcttcttgacagatccaacgttccatcaacagtagctgaaagcactgatggggacttggacaatgatatgcttggcactgtaaagtcaatagattggaacgatgagctgaatgatgaccctggtgccaccgaggacatcccaaatattgataatgatggttgcgagcaggcatctgaagcaaagcaggatgcagctaatcgtgttgaagaaaatgaatgggataaactcttacgtgtcagatgggagcagtatcaaactgaggaggaagcatctcttggtcgaggtaagcgtttaaggaagggctgttttttaccgggaaaccattgcaaccatttcttatgaagcctttagcgaggactttgatgaggaggatgaaccaaagcgagaatacac

SEQ ID NO: 413945 - DNA, 401 bp, Oryza sativa
tgctgagaaaggcgtcttcgtactcgcctctctccgcgcctccgcgcttttcctcctcctctcccctctctcccttctccgccgccgtcgcagcatcaacccaatccgccgccatgagggagtgcatctcgatccacatcggccaggccggtatccaggtcgggaacgcgtgctgggagctctactgcctcgagcatggcatccaggctgatggtcagatgcccagtgacaggactgttggtggaggtgatgatgctttcaacaccttcttcagtgagactggtgctgggaagcatgttccccgtgcctgatttgtcgatcttgagcctactgtgattgatgaggcgaggactggttgctaccgccagctcttccaccctgagcagctcatcaatggcaag

SEQ ID NO: 413946 - DNA, 512 bp, Oryza sativa
  unsure (1)..(512): unsure at all n locations
tctgtggctcgggaacgtcaagctgctgaggctcgagaaaggcaggctgctgctgctgctgctgctgcagcagctgcagcaaaagaaaaacagagtaaaccggacgatcttgagtccttctttggtatgggagctcgagccaatagtgcgccgaagcaaagggctccaacagcggattcgatgttcaattctcaaactcaaaatagaggggcagcatcttctgcttcagcatctatgcggaaggcatcatcaacaacaaatattgcagatgacctatctgcaatatttggaggagctcccacatcatctgaagaatttcaagaaattgaaggagagagtgaagaaagaagacgtgctaggttcgaacggcatcaaaggacccgtgaacgagcggcaaaagccctggctgaaaagaatgaacgggatatgcaggttcaaagagagcaggctgaaagacatagaatttcagaaacaatggactntgagattaagcgatgggctgctggaaaaag

SEQ ID NO: 413947 - DNA, 406 bp, Oryza sativa
ctcggccgtaacgacacgagcacatcaacgcgaagaagaaaagaaaagaaatcctcccgcttcgctataaaaatcgcccggttcccccgtcgtccgcttcaatctatgcgggcatcatctctcttcgcggaatcggtgttcactacatctgctgctgctggacgccgtcgttgtcctcgtctcgccgccgttcccgttaccctcttcttctccaccggtcgcggttcgccggcgatggccgaggaggcgcagcagccacgcggcgcgaaggtgggcggcatccacgacgcgccggccgggcgcgagaacgacctcaccaccgtcgagcttcgccggttcgccgtcgtcgagcacaacagctaggccgaagatttaagaacaccccgccccccttctttttttcccc

SEQ ID NO: 413948 - DNA, 410 bp, Oryza sativa
gctgggccatgctcgccaccctcggcgccctctccgtcgagtggctcaccggcgtcacctggcaagacgccggcaaggtggagctggtggatgggtcgtcgtacctggggcagccgctgccgttctcgatctcgacgctgatctggatcgaggtgctcgtcatcggctacatcgagttccagcgcaacgcggagctggacccggagaagaggctgtacccgggggggtcctacttcgacccgctcgggttggcgtcggacccggagaagaaggagcggctgcagctggcggagatcaagcacgcccgcctcgccatggtcgccttcctcggcttcgccgtgcaggccgccgccaccggcaaggggcccctcaacaactgggccacccaccttagcgacccgctccacacc

SEQ ID NO: 413949 - DNA, 514 bp, Oryza sativa
caggcggcagcgacgagccatggccacacacgcagcgctcgcggcgtcccgcattccggccaccgcccggctgcacagcaaggcggcgtccaagcagagggtggacttcgccgacttctccggactgaggccgggatcgtgctccatcagccacgccgcgagggaggcgtccttctccgatgtccttggctcgcagctcgtcgccagggctaccggagagaacgccgtgagggcgccggctgaggcgaagctcaaggttgccatcaacggcttcggccgcattggccgcaacttcctccggtgctggcacgaacgcgagaactccccgctcgaggtcgtcgtcgtcaacgacagcggaggcgtcaggaacgcatcacaccttctcaagtacgactcgatgctcggcaccttaaggtcgacgtcaagatcgtcgacgaccagaccatcagcgtcgacggcaagctgatcaaggtcgtcttcaacagggaccccctcaagctgccatgggctgagc

SEQ ID NO: 413950 - DNA, 473 bp, Oryza sativa
ctacgcggggaaggttaggggggtaaagcctcgggagttgctccttagccgctgctgctcctcccgtgccgccgccggatcgcgccagcgcgtgtcttcctcgcgcggcgatcatggcggagcacactgagagggcattgctgaagcatgctaaggttgttgtctgtgctaagaaaaccaccaaggggaagaagcctggcaagggcgggaataggttctggaagaacattggccttgggttcaagacacccagggaagccatcgaaggaacctacattgacaagaaatgcccattcactggtactgtatcaattaggggtcgcatcatagctggaacatgtcatagtgctaagatgaacaggaccattattgttcggaggaattatctgcactttgtcaagaagtaccagaggtacgaggagaggcactccaatattcctgctcacatttcaccgtgcttccgtgttaaggag

SEQ ID NO: 413951 - DNA, 523 bp, Oryza sativa
tactttcttgcgccacaagccgaagccgccggaatcctcgacgagacgccccgccgccgccgccgccgccggcgacgccccccctcaccccccgcaggcatcggagaaatataatataaatacagttaaggggttgaagcaacttcacaatgagtagcatagggactggttatgatctttccgtcaccaccttctccccagatggccgtgtcttccaggttgagtatgctggcaaggccgtcgacaacagcgggactgttgttggcatcaaatgcaaagatgggatttgtccttggtgtggagatgctggtaacatcaaagatgattttgaaggggtcgaatcggagactccactctgtgcaccgacactctggcttggctgttgctggtttagctgcggatggtaggcagatagtctctagggcaaagtcagaggcagccagttatgaaaaggtgtatggagaacccatgcctgtaaaggaattggctgatcgtgtagctagctatgtacatttatgtaccc

SEQ ID NO: 413952 - DNA, 488 bp, Oryza sativa
tcggcttgcgctgccacttacctcgctctcgcatattctactagcgcccaggggccaggtaagcgaagatgtacaccgcgaggaagaagatccagaaggagaagggcctcgagccctccgagttcgaggactccgtcgcgcaggctttctttgacctcgagaatggcaaccaggagctcaagagcgagctcaaggacctgtacatcaacaatgcagtccagatggatattgccgggaacaggaaggctgtggtgattcacgtgccgtaccgtctgcgcaaggcattcaagaaaatccatgtcaggcttgtcagggagctcgagaagaagttcagcggcaaggatgtggtgattgttgcaacatggaggattgtgaggcctcccaagaagggctcggctgttcaacgccctcgcacaagaccttttaccgctgttcatgattgtatcttggaggatgtagtctaaccagctgagattgttgcaagcgca

SEQ ID NO: 413953 - DNA, 527 bp, Oryza sativa
ggctcttgggggcggtaaaactgctgatgtactattatggaaagacaagaagacatccgctgtagtgattggtggtgcaactgtcatatggatcttgtttgaagtgcttgattaccatctcttgactctgctttcccatgtgatgattggtgccttggccatcttgttcctgtggtcaaaagctaccacatttatcaagaagagtccaccagatattcctgtagtacagatacctgaagatgtcgccgtgaacgtgtcacgagcattacgcagtgacataaacagagcacttcacctgtttcgggagatcgcgttggggcatgacctaaagaagtttctgggcgtgattgttgctctctgggttctctcagaagtaggaagctgctgcgacttcctcaccttgatatatgatgccgtcctgatgctccacacggtgccgatcttgtatgacaggtaccaggatacggtcgaccactttgctggacgggctcactctgaggcctgcacgcactatgaggtgctggatg

SEQ ID NO: 413954 - DNA, 471 bp, Oryza sativa
gcacaagcagctctagctagctacaggcatcagtggtcagtagagtgatcagttgcaactagctagctagttagattatatcttcagtgatggctccggcctgcgtctccgacgagcacgccgtcgcggtgtcggcggagcggctgtggaaggcgttcatggacgcgtccactttgcccaaggcctgcgccggcttggtcgacgacattgcggtcgaggggaacggtggtccgggcaccatctacaccatgaagcttaaccctgccgcgggtgtgggaagcacatacaagacccgggtggcggtgtgcgacgccgcaagtcatgtcctaaagtcggatgtgctcgaggcagaaagcaaggtggggaagctcaagtcacactcgacggagacgaagcttgaggccaccggcgatggctcctgtgtggccaagctcaaggtggagtacgagctcgaggacggcagctcactgt

SEQ ID NO: 413955 - DNA, 423 bp, Oryza sativa
ggcgtccgttccttcgcttgcagtgagacagtgaagtttggccatgtcacatttttctggaacggaaaccgatctggatactttgatgaaactaaggaagagtacgttgaaattcctagtgatattggaatcacattcaatgttaaacccaacatgaaggcacttgaaattgcagagaaagccagggatgccattcttagtggaaagtttgatcaggtacgtgtcaacctgccgaatggtgacatggttggtcacactggtgatattgaagccacggtagttgcttgcaaggcagctgacgaagccgttaagattattttggacgcgattgaacaagtcggtggtatttatcttgtcaccgctgatcatggaaatgctgaggatatggtgaaaagaaacaaatttggccagccactttttgac

SEQ ID NO: 413956 - DNA, 342 bp, Oryza sativa
ctttttgtttttctcatatatatgcaggatatatgaatctgcccgcttcaacagaggggcgaatgaaaccaaccgtcattactgcgagacggcaggagactattattcagagaagccacatagactggactacagtaaatatccagacactgatgagcagaagcggccggcgaagaccgacctaagacattctgtaagtgaagaacctgatgcggaagaggtggagaaccttttccaaagcattgagaaatacacgcttgccagtcatctagtttggggcctctggggaataataacggatcatggcaatgatattgacttcgactacaaggagtatgcaag

SEQ ID NO: 413957 - DNA, 481 bp, Oryza sativa
cttgaaggaacttgttcgtagatcgattgcagcaacagaggtttgtgttgattttcaattctcagtgaacctcagtagatattactgatcactcaatgacactcctgcattgactgtttacattggttatcttggatgccacaggagttgaagcgtttcccaacacttcagacagatatagctgctgcagcaaatgaaagcctggaaagatttcgtgaggatggtcgaaagacagttattcgtcttgttgagatggaggccagctacctaactgtagaatttttcagaaaactccctacagaaccagataagggggctaataataacactccagccaatgacagatatcaggacaaccatttaagaagaatcggtaacaattcaacattctattttgtttctttaatggcaattgattgagtcaactgttctaagacctcaacacagaggtcacacgaagtacttaacaaactgacttaat

SEQ ID NO: 413958 - DNA, 417 bp, Oryza sativa
ggaagagaagaggaggggtctctgcttcatctttcttcctgagctggcttctttactacagccatggctaaagagtatcctgcctcccccaaagctcagcagctgcaagaatccaagaagcagcggctcacctacatcctcgtggtgagcgcgctctgcgtcgccttctacgtcctcggtgcgtggcagaacaccacagtgcccaagccggcggcgagctcggcgatcaccaaggttggctgcgacccggcggcggcggggcagtcctccgccgtgccgtcgttcgggtcggcctcgcaggagtcactcgacttcgaggcgcaccaccagctcagccttgacgacacggacgccgaggcgggcggtgcagccgttccccggcgtgcccgctcaacttcagcgagtacacgccgtgcg

SEQ ID NO: 413959 - DNA, 484 bp, Oryza sativa
gtcatgggccaaagcgttctcttccgtcagccttcttccgcatccgtcgtactacctaaccgtgccacatctctcaccgtccgtgccgcttcttcctacgccgatgagcttgtcaagacagcgaaaacaattgcatctccgggacgtggaatcttggcgatggacgagtcgaacgcgacttgcgggaagcgtttggactcgatagggctagagaacactgaggcaaaccgtcaagcgtacaggactttgcttgtctctgcaccaggtctcggacagtacatctccggggcaatcttgttcgagcagactctctatcagtccacgaccgaaggcaagaaaatggtcgacgtcctcgtcgagcaaaacatcgtccccggtatcaaagttgacaagggtttggtgccacttgttggctctaacaatgagtcatggtgtcaaggactcgatggtctatcctctcgcactgctgcttactaccaacagg

SEQ ID NO: 413960 - DNA, 296 bp, Oryza sativa
aggacctactgtgccgagattgcccacaacgtatctacgaagaagcgcaaggagatcgttgagcgtgctgcgcagctcgacatcgtggtcaccaacaagcttgcaaggctccgtagccaggaggacgagtaggctgttttatcagtataatgttttggtctggtttgattgtaggaaactgtcgcgcctccaagtattctcctttcaatcgatgtggtactgtgaaagataactattatgtcaacctttttgctaccagcagctactctaatgtggccaaattactatcgcaaaaa

SEQ ID NO: 413961 - DNA, 198 bp, Oryza sativa
acggccttcgacttcttcctctcctcgatctccctattcggcgtagcctcctgcctcgttcgctccgcccgcaaccatgttggcctactgcggtaagatcaaggacgagctcatcaagaacaggtgtcttacattggcacttcctggccaagggtataccttgcctgccggagtgatgttcacctggcacccatttgg

SEQ ID NO: 413962 - DNA, 513 bp, Oryza sativa
gtgtttcattatcaattgccacactcaactgatgtttacatccacagaagtggaaggacagcgcggaaatcaatggcaggttgcagcattgcattaatctctcctgcagacaaggacaagttttactcactttgcaagtcactgtcaaaggagaacctccagcagttttctgttgaccatgcttacatgcctgcagtaatgaataggctcacccttgctcggcagattgacaagattacacgtaaaaatttcccaggaaaatgccaacaaatcatggctttagaggaatgctgagtccatgggattattattggagaacaagggacagtgaggaggaaaccgtacaggggcataagccaaggaaaggcaccttctgcgaaccctccaaaggcttcacaggatttgggtgagcttttgcaaccccccttggagcctaaaattttttttcggcgctatttatatgggggtgggggttttacccgttctttaaaagtaactggaagagtttttcca

SEQ ID NO: 413963 - DNA, 450 bp, Oryza sativa
acgcaacctgtatggttgccgccactctctccctgatggtctcatgagggctaccgatgttatgatcgctggcaaggctgccgtggtctgcggttatggtgatgttggcaagggctgtgctgctgctctcaagcaggctggtgcccgtgtcattgttactgagattgaccccatctgtgccctccaggcccttatggagggtctccaggtcctcaccttggaggatgttgtctcggaggctgacatctttgtgaccaccactggcaacaaggacatcataatggttgaccacatgaggaagatgaagaacaatgccattgtttgcaacattggtcactttgacaatgagattgacatgctcggccttgagacctaccctggtgtcaagcgcatcaccatcaagccttaaaccgaccgctgggtcttccctgagaccacactggcatcatt

SEQ ID NO: 413964 - DNA, 493 bp, Oryza sativa
accgaatttgaccgtacttcttctcctgcattcaccctccggcgacggcggcgcagatctccggttggaaggtagggtgttcatcttgacacaaaatcatgcctgaatgaaactgtgccgatgcgaagatatgatatggattagctctccttccaattgatttatcgttctgtcaatattgatccgaatacgaaaattgtaagtgctgtcattttgaaggttttggaaccggaattttgcattgccatagcagtggctgcctttataaatgaagctcttggccttggcttcaaatactggatgtgtgttttggctaatcctaatccctaggtgcttgagagttgcgtgtgcaatttctgacccttttgcggtggtgtatatcaacagagaaatctctagctttttcaagggtgaagcgaattcatggacgagcacctcgcttccatctatggcacggagaaagaccgcgtgaactgcccttttactttagatc

SEQ ID NO: 413965 - DNA, 524 bp, Oryza sativa
gcggagcgacgagatggctgcgccgccggcgagggctcgggcggactacgactacctcatcaagctcctcctcatcggggacagcggtgttggcaagagttgccttctcctgcggttttctgatggttccttcactacaagctttattaccacaattggtattgacttcaaaattagaacaatagagctggacgggaagcgtattaagctacaaatttgggacacagctggccaagaacgtttccggacaattaccactgcgtactaccgtggagccatgggtatcctgcttgtttatgatgtcaccgacgagtcatctttcaacaacattcggaactggattcggaatattgagcaacatgcctctgataatgtcaacaaaattttggttggcaacaaggctgatatggatgagagtaaaagggctgtccctactgcgaaaggccaagcactggctgatgagtatggcatcaaatttttcgaaactagtgcgaagacaaacctcaacgtggagcaggtttttt

SEQ ID NO: 413966 - DNA, 337 bp, Oryza sativa
tttgtggtttggcatttcctccccctttttaccttgtcctggtcggttcggctccgtggatcgtctagggtttagtgggttgagatggcagagccggatgtctagtaccgctgcttcgttggctgtctttcctgggccaccgacgaccgctttctcgagggcgtctttttcaccttcggcgagatcctcgactccaagatcattatcgacagggagacggggaggttacgtgggtttggccttttcactttctactccgagcagtcgatgcgcgacgccattgagggtttgaacggcaaggagctcgacggccgtaacatatacgtcaatgaggcct

SEQ ID NO: 413967 - DNA, 458 bp, Oryza sativa
tcggctcgacggctcgagcttaaaaccctagagccgctcctcctcctcctcctcgcctaccccgaaacccaaatcccccccaaggcggacgcgcccgcaaagggtcgagcgcgctcatggctcgcgtgtacgtggggaacctggatccgcgcgtgacggcgcgggagatcgaggacgagttccgcgtgtttggggttctgaggagcgtatgggttgctagaaaaccaccaggttttgcctttattgactttgatgaccgcagggatgcagaagatgcaattcgtgatttagatggcaagaatggatggagggtcgagctgtcaaccaaagctggcagtggccgtggccgagatcgttcccgtggttctgacatgaagtgctatgaatgtggcgaacctggtcattttgcacgtgaacgccgcttacggattggttctggaggccttggcagtggaaga

SEQ ID NO: 413968 - DNA, 473 bp, Oryza sativa
ctggagagttatctcagcagaacatcaaagatcgttactacggagttaacgatccagttgctttgaagcttttgagtaaggctggtgagatgccatccctgacacccccagatgatgagagtataaggacactctacattggtggccttgatagtcgagtcactgagcaggatttgagggatcaattttatgcccatggtgagattgagaccataagaatggttctgcagcgtgcttgtgcatttgtgacttacactacaagagaaggtgctgagaaagctgcagaggagctcgctaacaagttagtcatcaagggtgtgcgtctgaagctcatgtggggcaagcctcatgcaccaaaaccggaggatgatgaagctgggaggcacgggcatgttgcacaaggaggaatgctccctagggctgtaatatcttagcagcagagtggtgaccagcctcaacctcctgggatggag

SEQ ID NO: 413969 - DNA, 439 bp, Oryza sativa
cgttcacactccctattctcaatcaccattcacataaaagaggctactcctgaaggagaagaattgataaaatgtgggaagcttaatttggttgacctggctggatcagagaatatctcccgttctggagctagggagggacgagctagagaggctggtgaaataaacaaaagcttgcttactttaggtcgcgttattacagccttggtcgagcaccttggacatgttccttacagggacagtaagcttacaaggttgctccgtgattcactaggagggaggaccaaaacttgcattattgctactgtttcacccttcgtgcattgtctagaggaaacattgagcactttagattatgctcaccgagcaaagagcatcaaatacaggcctcgggtaaaccagaaaatgatgaaatcaacattaatcaaagaactttatg

SEQ ID NO: 413970 - DNA, 367 bp, Oryza sativa
gcgggtgatgtgtccatgattgggcagtttggtgtcgggttctactccgcctaccttgttgctgagagggttgttgtgaccaccaagcacaacgacgacgagcagtatgtgtggtagtcacaggccggtgggtccttcactgttacacgtgatacctgtggtgagcagcttggacggggtactaagatcaccctctacctgaaggatgatcagctggcataccttgaggaacgttggctcaaggatctggtgaagaagcattctgagttcatcagctaccctatctccttatggactgagaagacaaccgagaaggagatttctgatgatgacgacgaggaagagaagaaggatgctgaggagggaa

SEQ ID NO: 413971 - DNA, 484 bp, Oryza sativa
aaaggctgttgtgcaggtctttgaaggcacttcaggaatagacaacaaatataccactgtgcagttcacaggagaggtcctgaaaactcctgtctcacttgatatgcttgggcgcatttttaatggatctggaaaacccattgataatggcccacctattttgccagaggcctacttggatatctctggaagttcaattaatcccagtgaaagaacctatccagaagagatgatccaaacagggatatcaaccattgatgtcatgaactccattgctcgaggccaaaagattcccctcttttctgctgctgggcttcctcataatgaaattgctgcccaaatttgtcgtcaggctggccttgtgaaaagcttggagaaaggcaagcatgcatagggtgggtgaagatgacaactttgctatcgtgtttgctgcttgggagtgaatatggaaacagcccaattcttcaaacgggattttgaagag

SEQ ID NO: 413972 - DNA, 351 bp, Oryza sativa
gtcacgcgcttcgtgctcgccgccttccaccttcgtgctaccccccgccatggcttcctccctcgccggatccgccctctccttcgccacccccgtcaaggcagtcaagactaattcgatatctttcaccagcgcaaggaagggaaatgcatttctccgcctgcagccagtgcctatgagatttgctgtttgctgtgccgcaaaaaaggagacagtggagaaggtttgtgacattgttaagaagcaactcgctgttcctgagggcactgaagtttctggtgcatccaagttctcagatcttggtgctgattcactggacacggctgagattgtgatgggtctcgaggagga

SEQ ID NO: 413973 - DNA, 482 bp, Oryza sativa
caactctatcacagagccatacatagtagcacatcatcttcttcttgcacattcctcagcagtgtccctctacagagagaagtaccaggccactcaaggaggacaaattgggctcacattgctcggttggtggtacgagcccggcacgcaagatcctgaagatgtagcagcagctgcaaggatgaatgatttccacattggatggtacatgcatcctttggtgtacggtgactaccctccggtaatgaggaagaatgttgggtccaggctaccatctttcacagctgaagaatcaaagagagtacttgaatcctatgattttgtcggatttaaccactatgtcgccatttttgtgagagccgaccttagcaaacttgatcagagcctgagagattacatgggcgatgcagctgtcaaatatgaccttccattcctgaaatcaaataatgagttcccacttcggttgacgagtgacttcatga

SEQ ID NO: 413974 - DNA, 502 bp, Oryza sativa
aagccatgcaaatcttgatgagaagcacaatgcgtttgttaaattctcagagaaacacagaagattgttgaacgcatttatccgccaaaaccctgggctattggagaagtcattctctctgatgttgaaaatccctcgcttgattgaatttgacaacaagcgtgcatatttccggtctaaaattaagcaccagcatgatcatcatcatagccctgttagaatttctgtgcgccgggcatatattttggaggattcatataaccagcttaggatgcgttcaccacaggatttgaagggtagactgactgttcatttccaaggtgaagaaggcattgatgctggtggactaacaagggaatggtatcagctgctatcacgagtgatttttgataagggtgcccttctattcacaactgttgggaaatgacttgacattttaaccaaaccctaacttggtgtattagactgaacacctctcatatttaaaatttgttgggcgagt

SEQ ID NO: 413975 - DNA, 482 bp, Oryza sativa
ccggcaattcttgagctcaatcagcaacaacatctatctccttcttgcttagttaagtccttcgccctcccaagaagaagaagatgtcttgctgcggcggcaactgcggctgcggcagcggctgccagtgcggcggcggctgcggcggatgcaagatgttccctgatgtggaggccacagccaccaccaagaccttcgtcctcgctgctccatccaacaaggcgagctctggaggaatggagatggcggtggagagcggcgagaacggcggctgcggctgcaacacctgcaagcgtggcaccagctgcagcggctgctcctgctgctcctgcaactgaatctatcgtcgtcgtcgcccggctgcatgaggatttatcgtatggatgctgctactgtcgatcagagctttgatcgaggccttaatttgcttgcattagtacccagcttatatgtaggcaggccttgccttttgctctgacgcc

SEQ ID NO: 413976 - DNA, 377 bp, Oryza sativa
ggatcgggaggctcgtggccagggtggccctccagagcgaggatgtcgagctcgtcgccgtcaacgaccccttcatcaccaccgactacatgacctacatgttcaagtacgataccgtgcacggccaatggaagcacagcgacatcaagatcaaggactccaagactctgctcttgggcgagaagccggtcaccgttttcggcatcaggaaccctgacgagattccgtgggctgaggctggtgctgagtatgtcgtggagtccaccggtgtcttcactgacaaggagaaggctgctgctcacttgaagggggtgccagaaggttgtcatctctgccccgagcaaagatgctccgatggttgtctgccgcgtcaacga

SEQ ID NO: 413977 - DNA, 503 bp, Oryza sativa
gagttctacgtgacaggagagagttatgctggccactatgttcctcaattagcacaagctataaagaggcaccatgaagccactggagacaaatcgatcaatctaaagggctatatggtaggaaatgctctgttcgatgatttccacgatcaccttggcatatttcaattcatgtggaccaatggcttgatttctgatcaaacatacaggctactgaatgttttctgtgactacgagtcctttgtgcatacatcttcacagtgcaataagattcttgacattgctagtgacaaaactgggaaaatatcgattcgtatagtattttcacacctactggccaggcttttttggcctcctcagggaccaaggcatggaaaggaaaagggtacattctgttggaaaaatgggagagcggtatgatccattcactgaaaagcattcaactgtatactttaatctggctgaggtgcaaaaggcactttatgttagtccgatcataacaa

SEQ ID NO: 413978 - DNA, 431 bp, Oryza sativa
gggttggcttctccttccccttttttacctttttctcctcggttcggttccgtggttcgtctagggtttagtgggttgagatggcggcgccggatgtcgagtaccgctgcttcgtcggcggcctcgcctgggccaccgacgaccgctccctcgaggccgccttctccacctacggcgagatcctcgactccaagatcatcaacgacagggagacggggaggtcacgtgggtttggcttcgtcaccttctcctccgagcagtcgatgcgcgacgccatcgagggcatgaacggcaaggagcttgacggtcgcaacatcaccgtcaatgaggcccagtcccgccgctccggcggcggaggcgggggctacggcggcggcggtggcggctaccgcggcggtcgtggaggcggtggttccgaagaggtggcggcg

SEQ ID NO: 413979 - DNA, 416 bp, Oryza sativa
cgcggagtggaggagggattaatcggaagcatatcaatcggcggccatgacgatcggcggcgcgtcctccagcgtcgtagtgccacgcaacttccggttgctggaggagctggagcgtggcgagaagggcatcggcgacggcaccgtcagctacggcatggacgacgacggcgacgacatcttcatgcgctcctggaccggcacaatcattggaccactcaactctgtgcacgaggggcgcatctaccagctgaagctcttctgcgacaaggactaccccgacaagccgcccaccgtgcgcttccactccaggatcaacatgccctgcgtcaaccctgacaccggactggtcgaaagcaagaagttccatatgctggcaaactggcagagggagtacaccatggagaatattctga

SEQ ID NO: 413980 - DNA, 426 bp, Oryza sativa
ccgttggtggccaaagctctctgggttacctttttggaggcaatgaggcccctaagccagctgctaaaccagcacctgcagctgcacctgcaccagcgccagcaccagcaccagctgcggctgtggctgctcctgctgagaaaccatcacctgcaaaggctgatgccaccaagcagattccagctgggattcagggcagccggagcaataacaactaccatagagctgatggccagaacactggaaactttcttacggatcgcccttcgaccaaggtccatgctgcccctggtggtggatcttccctgggctacctctttggtggaaactgaaggagtgaccctggtgcactgtagcaccggatgaagaaggaagcctaccggtattcttgtttatcaaaactgggaaccgccatgggtttattaa

SEQ ID NO: 413981 - DNA, 458 bp, Oryza sativa
tggtccttcaagtacgcgtgggtgctcgacaagctcaaggccgagcgtgagagaggtatcaccatcgatattgccctgtggaagttcgagaccaccaagtactactgcactgtcatcgatgcccctggtcaccgtgacttcatcaagaacatgatcacgggtacctcccaggctgactgtgccgtgctcatcattgactccaccactggtggttttgaggctggtatctccaaggatggccagacccgtgagcacgctcttcttgctttcactcttggagtgaagcagatgatctgctgctgcaacaagatggatgccaccactcccaagtactccaaggcccgttatgatgaaatcgtgaaggaagtctcatcctacctgaagaaggtcggctacaatcctgacaagattcccttcgttcccatctctgggtttgagggtgacaacatgattgagag

SEQ ID NO: 413982 - DNA, 475 bp, Oryza sativa
ttgcgttgagctgcctagctatcgagatcttcgtacgtaaatacgtctccctcgtctccggcgagccaccggcttgggcgtacgtgagagatggcgccgccgtcagccatgaacacgtttagggcggaaggcaaaggccatcaccaatggcttcccaataactacttccgcaaaggccagggggggtactccggttttcacaacgtcaccgccatggtcggcgccggcgtcctcagccttcccttcgccatgtccgagctcggttggggtcctggggtggcggcgatgatcatgtcgtgggtgatcacgctgtacacgctgtggcagatggtggagatgcacgagtgcgtgccggggcggcggttcgaccggtaccacgagctcgggcagcacgcgttcggggacaagctggggctggggatcgtggtgccgtagcagctcatcgtttaggtcggcgtctgcaatcgtctacatg

SEQ ID NO: 413983 - DNA, 522 bp, Oryza sativa
ctgatatcttgggttcttcgatgtggttcaacactgtccttgtgatgactcactgctcttcatctcctcctgaaggaccagatggttatcctctggaatatgactcctatgcccgttattgcaagaatgtggtgcagcgtcatatccaggtggctgcttctaacacacagatggagaaccctgtagttcttgttgacaatcatccaatgtgccgacggaacaccaaaggtgaaagagttctacctaatgggaaggtatgggtatcagaacttttactgctatgtggggcgaccaagttgttggcagaagcaaattccttgcttaagttccaagatagcttccttctgtcacaagcaaataccagactgccttcactgcctcatcttctttcatcactccttaaacctaatccatcatcaagatcagaagatgttggcattgacatgacccgagtgtcagatgatgaggatgaatctgatcagcttccgccatttcggttctgaggaatctgaatatgaaaaa

SEQ ID NO: 413984 - DNA, 420 bp, Oryza sativa
cgaataatttctccccaatctcgcgaggctctcgtcgtcgaatcgaatcctctcgcgtcctcaagatgcagatctttgtgaagacattgaccggcaagactatcaccctcgaggtggagtcctctgacaccatcgataatgccaaggctaagatccaagataaggagggcatccccccggaccagcagcgtctcatcttcgctggcaagcagctggaggatggcaggacccttgttgactacaacatccagaaggagtcgacccttcaccttgtcctccgcctccgtggtggcatgcagatctttgtcaagactctgaccggcaagactatcacccttgaggtggagtcttctgacaccatcgacaacgtcaaggccaagatccaagacaaagagggcattcccccagacccagagcgtt

SEQ ID NO: 413985 - DNA, 494 bp, Oryza sativa
  unsure (1)..(494): unsure at all n locations
cttctctctctctctctctctctacaacttctcagctaagctaagccaagctagagccatctagctacttttgctgctttctctctcctcctgcaacacacgacctagctgagagctgagctgagttgcgccggccatggcagcatcgcataggagcaggagcacggcggcgcagctcgacgtcgacgaccaggcggcggccgatcagctgatgacgatgatgcggcggccagcggcggtactacaggatgaggccgccgccgaggaggaggcctccgcggcggcagcggacctgcagctggagctccggcgagggccgtggaccgtcgacgaggacctcaccctcgtcaactacatcgccgaccacggcgagggacgctggaactccctcgcccgcgccgtcgggttgaagaggaccgggaagagctcangctgcggtggctgaactacctccggcccgacgtgaagcgcggcaacttcactcgcgacgagca

SEQ ID NO: 413986 - DNA, 319 bp, Oryza sativa
  unsure (1)..(319): unsure at all n locations
gggacacgaaacaggggaatccggagcaaagtgcgacgcgagcgcgcgaggaagcagcagccatggcgctctccctctccacctccttcctcccgacccaagccgccgcggcggccacgaggaccaccctccgctccctcgtcccctcccagaggatgcggtgctcgatgcggaagaaggggctgcacccggagatctacgaggacgcgaaggtgtactgcaacggggagctggtgctggtgacggggggaaccaagccggagtacacggtggacgtgtgggccgggaaccacccctactacgttggngacacgtcggc

SEQ ID NO: 413987 - DNA, 338 bp, Oryza sativa
ggtgttcagttctcctcctccttcttctccatcgccggcgagagagagagagttagctagctaggatgggttctacagccgccgacatggccgcggcggccgacgaggaggcgtgcatgtacgcgctgcagctggcgtcgtcgtcgatcctgccgatgacgctcaagaacgccatcgagctgggcctgctcgagacgctgcagtccgccgccgtcgccggaggaggggggaaggcggcgctgctgacgccggcggaggtggccgacaagctgccgtccaaggcgaacccggcggcggccgacatgggggaccgcatgctccggctggttgccttctac

SEQ ID NO: 413988 - DNA, 473 bp, Oryza sativa
gcgcataagtggcgctgcagcggttcgatgtgtaccgccgcaacgcggagttcatcgacgccgtcaacctgcgcggcgacctcacttaccagctcgccgagaacgagttcgcagacctcaccgaggaggagttcctggccacgtacaccgggtactacgccggcgatggccccgtggacgactccgttatcacgacgggtgccggagacgtcgacgccagcttctcctaccgcgtggacgttccggacagtgtcgactggagggcccaaggcgccgttgtgcctcccaagtcccaaacgtcaacatgcagtagctgctgggcgttcgtgacagcggcgaccatcgagagcctgaacatgatcaagacggggagcttggtctctctgtcggagcagcagctggtggactgcgacagctatgacggcggctgcaacttaaggtcgtaccggcgggcgtacaaaggggttgtcgag

SEQ ID NO: 413989 - DNA, 462 bp, Oryza sativa
atgttctgttcttccccacatcaaggcacatttctcgtgacagcaagagatttgccataatcactatctcactcctcacagtaatttatcttgctgccattttcataccgagcatttgggatgcattccagtttactggtgcaactgctgctgtcctgattggtttcatcttccctgccatggttatacttagggatccttatggaatcgcatccaagcgtgacaagatcttggctgcaaccatgatcgtgcttgctgtcctctccaattctgttgcttatacagcgatgcaatgaatatcttccgtaaggaagaggaggcatgaatgtcagactccaaaggaatgtcatcaaatatcagtgatgaaggaagcgtggcttcatgttatgagacacagatgctgtgaagggaaattattttctggaatccagcgaacgaagatttcttggtcagcggtcgagg

SEQ ID NO: 413990 - DNA, 318 bp, Oryza sativa
ggttggcttgtcctccccctctttaccttttcctcctgggttcggttccgtggttcgtctagggtttagtgggttgcgatggcggcgccggatgtcgagtaccgctgcttcgtcggcggtctcgcctgggccaccgacgaccgctccctcgaggccgccttctccacctacggcgagatcctcgactccaagatcatcaacgacagggagacggggaggtcacgtgggtttggctttgtgaccttctactccgagcagtcgatgcgcgacgccatcgagggcctgaacggccaggagctcgatggacgcaacatcacc

SEQ ID NO: 413991 - DNA, 518 bp, Oryza sativa
aatccggcggcggcgatggcggcggcggctacggcgaggtccggattccggcgcatgttctccatctcggccttctccccgcccaagccgcccaccccgcccccgaaggccgacccctcccccaacctcttcatctcaggcttaagcaagcgtacaacaacagatgggcttaaagaagcttttgcaaagtttggggaagtcatacatgctcgagttgtcacagatcgtgtcactggattctctaaggggtttggcttcgtaaggtatgctacagttgaggatgcagctaaaggaatagaaggaatggatggaaagtttctcgatggatgggttatttttgctgaatatgctagacccagaacaccaccgcagcaaccagaaatgaactcacagccacaacaatcatggggccctccatccagttcctggggtgcacagtagatgaagatacaatcttggggccctctatctggccgtggggctcacagcggatcgacaagttattgattctatattta

SEQ ID NO: 413992 - DNA, 513 bp, Oryza sativa
cgcttcgcttcctcccctctctaagccggggaagctaagccatggcgtccgtcaccgcccgcaccccggtcgcagccctccgctcgtcggcgtcgctcaagtctaccttcctagggcaatcctccacccgcctcgcccgcgcaccgactacgaggcgtaatgttcgggcggaggccaagggagagtggctccccggcctcccttctcccacctacctcaacggcagcttgccaggcgataacgggttcgacccgttgggtctggcggaggacccggagaacctgcggtggttcgtgcaggcggagctggtgaacgggcggtgggcgatgctgggggtggccgggatgctgctgcctgaggtgctgacgaagatcgggttgatcgacgcgccgcagtggtacgacgccggcaaggccacctacttcgcgtcgtcgtcgacgctgttcgtcatcgagttcatcctgttccactacgtggagatccggcggtggcaggacatcaagaaccctggct

SEQ ID NO: 413993 - DNA, 366 bp, Oryza sativa
accaattctataccctaacgacaaccctactctctctctccaacaatcaaagattcgatggccgtgctggtggcgaggcaggggcgggagctgcagcggtacacgagcgccgggggccgcatcgtggtgggttgcatcccgtaccgggtgcgcagcggcggcgagatggaggtgctggtgatcacgtcgcacaaggggcacggcatgatgttccccaagggcgggtgggagctcgacgagtccatggacgaggccgcccgccgcgaggcgctcgaggaggccggcgttcgcggcgacaccgagacgttcctcggctgctggtactacaagagccgccgctacgacaccacctacgagggcttcatg

SEQ ID NO: 413994 - DNA, 424 bp, Oryza sativa
gagtatttgtagtaaagaggaaaggggggagtgagtctcccgagcaacggctctccactactagcccacagctcccaagaatctctgccatttcttgagttggtcgatccatcggggagggagagaggtcgaggaggcggcggaaggggagaggatggggtctggatctttcctcaagctgctggccaacaacttcgacgtcctcgccgggccattagtttcacttgcttatccattatatgcctctgtgagagcaatagaaacaaaatctcctgttgatgatcagcaatggctcacttactgggtgctgtactcgtttatcactttgtttgagcttacttttgctccagtaattgaatggcttcctttttggtcctatgcaaagttgttcttcaactgctggttggtcttaccttgcttccat

SEQ ID NO: 413995 - DNA, 473 bp, Oryza sativa
gtcgtcgtcgtcgtcgtctctctgcacgcgagaaaacgggagaggcggccggcgcggcgcgcggccactagtcatcccgccagggcgcgcgccatgtctctgcacgctcgcgtcgcgctcttcgccgccgcgctcgccgccgtcctcgccgtctccaccgccggcttcatctcaaatgaggcggtgggcgcgtcgtcggcggcgagcggcggcgcggggcggagcttgctgcaggcgaagaaggattgcccggtgaacttcgaggaggcgaactacacggtgatcacgagcaggtgcaaggggctcgatgtacccgccggccgctgtgctgccaggcgctcaaggacctggcgtgccccttcaccgcctacatcaacgacgcccagaccacctgcgccgccttcatgttcagctacatcaacctctacggcaggtacccgccgggcctttttgccaacacctgcaggagggcg

SEQ ID NO: 413996 - DNA, 333 bp, Oryza sativa
tctaattattgatcccagcgttaccatgatgactgtggaggaaaaaccagatgtgacttacaatgatgttggtggatgcaaggagcactttgagaagatgcgtgaggtggttgagcttgctatgctttacccagaaaagtttgtcaaacttggtatcgatcctcctaagggagtactgtgttatggccctcctggaactgggaaaacacttcttgctagggcagtggccaaccgcacgggtgcttgctttattcgagtcataggaagtgagctcgttcagaagtatgttggtgagggggcccgcatgggtcgggaactttttcaaatggcacg

SEQ ID NO: 413997 - DNA, 495 bp, Oryza sativa
  unsure (1)..(495): unsure at all n locations
cgcgatcgcacagccggagaccgaatcggataagctcgccggagtaatcgccgccgatgccaccgccgccgtcgtcgctcctcttggccgcggtcgttctcgcttcggcggcggcggcactcgctgaccctcctccccctccgtccccgacgccgtggccggagcggttccacgcggtgcttttcacgaacctgacccagacgagcggcggcgggaagctgcagatgaccgacctctactacgactggcctggggggcgcaacctcaacctcgtcgccggccagctctccggcgacccggtctacgacgtcgagtggaccaacggcacctcctactacttcgactccgcctcctgccgcaccttgctgttccccgtcggcatcctgccccccgactggctcgccgccggcgctcgctacctcngacgagaggccgttgacggcttcgactgccacgtctggaccaaggtcgacttcatctggtactacgaggacg

SEQ ID NO: 413998 - DNA, 352 bp, Oryza sativa
ggattaattaactagcatatttaaatttaaaacgtaactgtttgagcaaataccacgaaatgttcaggcgctaagatacggcaataccgatacatccagcatagcaaaaatggcgaagagcacagagtcagataaagctatagagaactagggctccaggagatgggggccgaatgacaaccatggcgcttagtcgacctcctccatcttgctctcgccggcgtcgtcctccagcggcggcatgtcggcgtcagccttagcagactcgtcctcgtcgatgctcaggccgagcttgagcatccggtggatcctggtgccgaaggtgttggggtcctcaaggctgaagccggag

SEQ ID NO: 413999 - DNA, 153 bp, Oryza sativa
aaggcaaagctgcgagcgccagatcatcttattactacagcttcttggcgatatgctacaggagcttcttcctcccttgcaaaaagaaacccaaaccttatttacaacgcaacacacacacccgtggcacagaagcgcctcgatcgaatcgaa

SEQ ID NO: 414000 - DNA, 415 bp, Oryza sativa
  unsure (1)..(415): unsure at all n locations
atgagaaatgctaaaatgacttatattgtgaaacggagaaagtacattttatttttattacacgatataattcaaaatatctactgtgtatatgattttccatgcatctgattaaagatatggngatgtgttcggaaaggccacacttggttgtttttattcttgccgcctttgcggcacttgttgccgtttgtgctgnccgccaaagtcgccagaacccgcaggttcttgttcctcttatttagaacaccgttttggcttttggcctttcacttttgcaagcctggccaaccgttggaccgttgtgtttgcccccgatttttttttttttaagaanaaaaaaacaagggttaaccgtcaaatgttcaaaagaatctcaattttcagttcctttggctgcaaagcgccgccacca

SEQ ID NO: 414001 - DNA, 361 bp, Oryza sativa
gatgaaaaccacttcgagacaatttactcaggtagcaaatatttctcagccacaaatccaaacacttggtccttcctatcagaagatcagaatgaacaggttttcaaattcatctcccaactcgacgataatttacacgtacatttaacacattcttccacccttctcaaactcctcccttcttcttcccgggtaagattaaaattaacttgaggccagccagcgtcgccggcggcgagatgtttacaggctgggcgtcctctcggcggcgccggagatgacggtgagcaggttgttgccgaaggggtcgctgaggtgcttggagaggttctcgacggggccctcgccggtgacgtaggcc

SEQ ID NO: 414002 - DNA, 80 bp, Oryza sativa
gggaagggtcacccatcatgcattcaggagtacccattggttggtgggtcctgaatttttgctaggataatgcaatataa

SEQ ID NO: 414003 - DNA, 359 bp, Oryza sativa
agcgctctcaaagtagcatatattattcaatcttgatgaaagagggacacaagccatcatctatagtgatggtgcctcttacaaacttcaacacacgggtaacaagcatacactcaagagtcaagaggtggctaggttttgtgtgtacaatggaacacgcaggcatgtacacaaccaagtatactccaccccaaactatagtctttgcaatggttttggcagttgctcagaaaccatgaatcttgatgtgttccttcttcacaatgccggcctgaacaagaaaatttgatacgttcttcctctgatcaccctgaagttgaatgacctggccaagctctgggtcctggacaacagtacca

SEQ ID NO: 414004 - DNA, 396 bp, Oryza sativa
  unsure (1)..(396): unsure at all n locations
agatgaatagatagacccaccagaagttcagagaaccaactgaacacatggcaaagcctgaagattcagttattaatcgtatacggatacagagcagttgttgcaacagggagaaattaggtcggagtgacaaaatggngagagaaaaaaaacagagagggaagaggcctagntgagcgttcttccttccttcgcagttgccttgggtggtacttggcccgggttccaggcaggggcgttccagcttcccgacggggctgtcttcggcttccacctttgattcaatccaccccgtccttcgtacgggctttgagtttaatcagggcccgggtgtcttcaaaagagctttgttcgttaacctcgacgaacctcaccggagatggggggagtttgatg

SEQ ID NO: 414005 - DNA, 110 bp, Oryza sativa
aaaaaccagaaattttatcccgaaaacccaggggacccaacattttgggcgccctgggcctactatcacaacttttaaggaaattctgaaaagaacaggggaaccacaaa

SEQ ID NO: 414006 - DNA, 437 bp, Oryza sativa
tgtttcgccatgttctggatctgcgaccggagcggcgacacgcgcggcgcctggcgggtggagttccgcaccgacgacaccttccccttgttgatgacgtacaccgtgcagaagtccggcgcgcccttggagatggtggtcgggatgtcggccttgaacctgaacccgcccctcgccgttggcgccgacgacgaggcttctcgatggggcggcgaccgccgccagaacctcggttgattgggaccttggcccacgttcgttggttcgttcgagccatgcaacgttccttgcaccttggatgtcctttgccgcggtgccagaagccagcgtgaaaggtgccggttagagatccccttcattgtgcggggtccgttcggcctgctttggaagccggaggcgttccttcaattcccacctgccaccattatcgacaggat

SEQ ID NO: 414007 - DNA, 143 bp, Oryza sativa
caggcaaatgcatgcacagttttacagaagcaaagcaacgggttcccaaaggtccacacttacagtacgttcaacgtacaactgatccaagcaaatgaaacaggttctgatgattgcatctgatgcgaagaaactaaaacggt

SEQ ID NO: 414008 - DNA, 396 bp, Oryza sativa
  unsure (1)..(396): unsure at all n locations
acgtattgaattgatcatggaaaagcatgaaagtacttgggttggagaaataattatttaagtggtccaccggtacacatgtttactcatctttcgatcccgcgatcctaacattttatttcttattacacatttatancttactccgccctaagaatagagttaacatccgaatangaaaggatcacttttttagtaccttaaactctttttgaccgtcactttaagctttccaagcattggtacgttaccgttgnncacgtatgcaattgtacgttacgcaccaaaacgtttttatttcatttatttatttactctgttcattatttcaagtcgatcaccgatgaggccgagccagcgtgtgcatgcaactcaacagtagaggttgccccccgg

SEQ ID NO: 414009 - DNA, 112 bp, Oryza sativa
aattccgatagatagcaacaagcagtttcaaacaccataaccaaagcgaactcaattcatggtaacactcacggaccgaagaaacaccctaacacttggattggcatggtat

SEQ ID NO: 414010 - DNA, 413 bp, Oryza sativa
agactcaaaaacattcatttctcatcagaaagcaaatatgcagctggcaagtaatcccaacaaactattcagaatatctgccattgacacaggctaggatgttcacgatccacaactagatagctgcttacttgttgtctaaataaacgggcagccaaaataaggggataaatcttttactttcggcagcgagtcgaccttcctgtcccggcccatgggccctcattcttcctgcagggccttatcaagccttcggtacccgatggtccctccttggcattaagtcacccatgcaccctcccatgagccttccccaggttcaaaattttcgggggccttttagaattcttcacttttgcggacaaacacatttctgaagggggaaaatactggatgtcgccttcttaatttcc

SEQ ID NO: 414011 - DNA, 399 bp, Oryza sativa
aatagtaaaaatacaagttcgtgaatggcgataatacttaaagctacctccaaatagcgtgtagcattgcgtagcaaaccaagcatataacttaggacaaacattcagttgcagcttcacatcatcgctgcttatcataactgcaataacagccgcagatggagcataaactaagtatattttcgtagttctagcttatatataatatcagaatcaccaactgtgaaccatccacaggatggtcgggggactactgatcagaatctactcctttgaggtgtggatggcagacacggtggagaccatagaatccacgccacatttgttgcggacgttggagcccctgcagatcttgtagtacccatgctttccccaggtctcgcccaagagttcttgatg

SEQ ID NO: 414012 - DNA, 328 bp, Oryza sativa
ggcaattgggccttataccgagaataaagtaaggtttgcagcagtgaaacaaatatcacgggaaaaaaatattggccggatcatatggaaagcctcgagatggtacaggtagaacacaccaaaccactagtaggttggatgtgcgaataattggtcctcaatatggggctgggttggccctagttgaaatcaggctttttagggtaagggcagccagaacgctggatgataacatttgcgggatataaaccagcctttacagagtcctcaatgcttttttgttgaaccaattgggagaggaagcctccaacaaaggcattaccagcgc

SEQ ID NO: 414013 - DNA, 523 bp, Oryza sativa
cgtgcggtaaactctagccagatctcgctcgctcgccgctcgccgccgccgccgcgttccaccgagcggagagtagagggaatggcgtccgagggcgtgctcctggggatgggcaaccccctcctcgacatctccgccgtcgtcgacgacgccttcctcaccaagtatgacgtcaagctgaacaatgcaattctcgctgaggaaaagcacttgcctatgtatgatgagttggccagcaagggcaatgttgaatatattgccggaggagccacccagaactctatcagggttgctcaatggatgcttcaaactcctggtgcaacaagttacatgggttgcattggaaaggataagtttggtgaggagatgaagaagaatgcccaagctgctggtgttactgctcattactacgaggatgaggctgctcccacgggcccatgtgctgtttgtgttgttgggggtgaaagatcactggttgaaaacttatcagcagcaaactgctcaaatctgagcatttgaagaa

SEQ ID NO: 414014 - DNA, 513 bp, Oryza sativa
attcataccaacgtacgaagaattttgagaggctggctttcctatatcttattactggttacatggacaaggtgggtttcatgtgcaaaattgctggacagaacaataacctgatgggtcaattccacaatgctctgtatcttggtgatgcgttgaagagagttgagatcctagagaatgctggacagctacctcttgcttatattactgctaccacccatgggctcacagaaattgctgataggcttgccgctgagctgggtgaaaatattccttctcttcctgaaggaaaagctcgctctcttttgatcccccctgctcctcttacagccagtggtgattggccattgcttagggtgatgcatggtatctttgagggtggactggatgcttctgggaaggctgaacttgaggaagacgatgaagctgctggtgctgactggggtgatgaggaccttgatatggtgatgcaagcgaagcgatggcaaaaggtggcgaccgttttgatgctga

SEQ ID NO: 414015 - DNA, 456 bp, Oryza sativa
ttgctgtacgcgtgggcggcggcggagggtggcggcggcggaggtggggcggtgtacgacccgagctacgtgccggactcggtgaagacgttcgtggcgcacatgtacaggcacgtcagggacaagaacgtgtacgagatccaccagatgtacgagggcgggttccagcggctctccgaccgcctcttccgcgacgcgccgtggccggcggcggaggccgtctcgccctactgcgacggcgaccacgtcttcctcctcctctaccgggagctctggtaccgccacgcctacgcgcgggcctcctcgtcgtcgtcgtcgtccgcgccgctcaccgccggccagcgcgccgagtcgtgggcgaactactgcgacctcttcagcgtcgtcctccacggcgttgtcaacatgcagctccccaaccagtggctctgggacatggtcgacgagttcgtctac

SEQ ID NO: 414016 - DNA, 391 bp, Oryza sativa
ggacggaattttttggctttccactaaaatatgcagagtcagctctagaaagagcaatatgacttttacataactatgtagctaaactgtacagtcaatgtcaatcacactgcaaaatgtagaattttttttacgcatcaattatactcttggggggaaaaaaggctgcactggtggttcaacaaaggggcattggagaaacctgaagaccatcctatatcttcccggggttcttcagtctaaaggattcgtcaagcctggtgcagggacaaggaaactgcataatctaatattcattggccttcttccgcaacttatttagcttattctcaatctcgatgtctaggaaagggcgcgctgctcctgaattgctgactgccgttcttcctgg

SEQ ID NO: 414017 - DNA, 301 bp, Oryza sativa
cttcttgatagattttctagggttgtaaagtcctatgcaaatgcagtcttaagttcatttgaagaccctgaaaagatcctagaccaggctgttttggaaatgaatgatgatttgacaaagatgcggcaagccactgcacaggtcttggcttctcaaaagcggcttgagaacaaatacaaatccgctgaacaagcttctgatgattggtatcggagggctcaacttgctcttcagaagggtgatgaggatcttgctcgtgaagcccttaagcggcgtaaatcatatgctgacaatgcaagct

SEQ ID NO: 414018 - DNA, 344 bp, Oryza sativa
gtgttatttaagattggggttatcgaatcccttggggagagatgtgttatacttcttctaggcggtgttatgatcttcacattttacaaggcacaaggactatccgcaggttattacccggttgtggaagacaaacttgagcttgcaacatctctccttgcaaaggcaaaagaaaaggcgagctgccctcctgttgccatgtgacgttattattgctgataagcttgctcctgatgctaacagccaggttgttccagcatctgttttttcccgatggttggaagggtccggatattggaccagattcaatcgcgctatgtagctctacccctgagaacaacaca

SEQ ID NO: 414019 - DNA, 512 bp, Oryza sativa
  unsure (1)..(512): unsure at all n locations
ggatgccgtcgcctacaactccatgatgtcaggctacattgacggtgggcgcaacaatgaggcgttaagcctcgtttggacgatgttggaggcaggcgtcaggcctagcggcttcaccttctccattattttgtcagctgttcgggttgctcgtcatggggtgcaggtccacgcagctgctgtccgccactgttttgcacatcagaattctgtagtcggcaatgcactcatcaatatgtatcggcgtgtcggcctcttggaatatgcagtgcaggtgttttggagtatgaatggacatgatattgtttcttggaattccgtcatgtcagtgtacagggatgatggccagagacgtcaggtttttgagtgtttccggatgattaggagccatggattatnttttgacgagtgcagtttgtccacagtgctcagtgcatgcatagatgctgaggattcgtctaagggtgaccagttgttgacccactgtgtcaaattggggctccttagaaatt

SEQ ID NO: 414020 - DNA, 344 bp, Oryza sativa
aacaaacataattacgtaataccatccattttttttattggcgacgaatttatcagatatgctctagatacatatcttggggggatatagccggggctttgttttcacatatcctcacccaacgataattggggtactcttacaataaaaccggtcggagagggagggaagagattattacatatgggttaagagcagaggccattgagatgggacataaccaaatgggaaaataaaaatatttagcaaattatttatggggatattaacaaaatagcccaaaaaaaaggggggtactattattatagggagcaattcaccagcgggaagcttgatcttaggtt

SEQ ID NO: 414021 - DNA, 422 bp, Oryza sativa
gttactggacatactctactactactagccagtaagctagctaactaactacgtggctatggcccccaccgtgatggcctcctcggccacctccgtggctccattccaagggctcaagtccaccgccggcctccccgtcagccgccgctccaccaactcgggcttcggcaacgtcagcaatggcggaaggatcaagtgcatgcaggtgtggccaattgagggcatcaagaagttcgagaccctatcgtacctgccaccactcaccgtggaggatcttttgaagcagatcgagtacctgcttcgatccaagtgggtgccttgtctcgagttcagcaaggttgggttcgtctaccgtgagaaccacaggtctcccggatactacgatggcaggtattggaccatgtggaagctgcccatgttcg

SEQ ID NO: 414022 - DNA, 534 bp, Oryza sativa
tcgattagttggagcagggagaagcattaagatatcttcataggtggcttcagaatcaccccaaatatgggggtatcgcccctccacagccaactgattcaccttatggtcctgatgttattagattgtttaatgaggctgcccaaatgtcacctgaggatgctgatgtccatatagttctaggagtcttgtacaacctatcaagagaatatgataaagctatagctgctttcaagacagcgctgcagctgaaaccacaagactattctctctggaataagctaggtgcgacccaagcaaacagcatccagagtgctgatgcaatattggcctatcaacaggctctggacttaaagcccaattatgtgcgtgcatgggctaatatggggattagctatgccaaccagggattgtatgaagactctattcgatactatgtacgggcggttgctatgaatccaaagctgacaatgcctggcagtacttgcggattcttttagaacgcttacgagctgaatgaacgctgcatggatt

SEQ ID NO: 414023 - DNA, 442 bp, Oryza sativa
tctgcttattaacacaaagattagaagaaagcaggcaacaatggcgtcagctccggccgcctcttccgcagtgcttctcgtcgtggtcctggtggcgagcctcgccgccggcggagccaacgcggtgaccttcaccatcaccaaccgttgctcgttcacggtgtggccggcggcgacgccggtgggcggcggcacgcagctgaacccggggcagacgtggaccattaacgtgcccgccgggaccagctccggcagggtgtggggccggaccgggtgcagcttcgacggtgccggccgcggcaggtgcgccaccggcgactgcggcggcgcgctgtcgtgcaggctgtccgggcagccgccgctgacgctggcggagttcactctggggacgcccggtggtaaccgggacttctacaacctgtcggtgatcgaccggtacaac

SEQ ID NO: 414024 - DNA, 450 bp, Oryza sativa
tttgttttcctgcactctccttgctagtggtgtgactgtgaaggtggcggagcctgcatggaagggctgacgagcgagcagatggtggcgttccaggaggcgttcttgctcttcgacaagaacggcgatggatgcatcaccttggaagagctggctgcggtgactcgttctcttggccttgagccgaccgatcaggagctcaacgacatgatgagggaagttgatacagatggcaatgggatcatagattttcaggagttcctgagcctcattgccaggaagatgaaggatggggatggcgacgaagagctgaaagaagctttcgaggtcctagacaaggatcagaatggttttatctccccaactgagctgaggacagtgatgaccaatcttggggagaagatgacagacgaggaggttgagcagatgataagggaggcggattccgtt

SEQ ID NO: 414025 - DNA, 466 bp, Oryza sativa
tcggttctctgggaggagatgaggaggggagggctccgtccaagctttggtctgtacaccatggttgtcgaggcgaatgcacggtccgggaggttggatgttgccacacagttgtttggtgatatggagaagtccggcttcttccctacgccagcgacatacgcttgtctggttgagatgcatgcttctgcagggcaggtggatgctgctatgcggttgtaccactcgatggcaaatgctggacaacggccggggcttagcacatttacagcattgctgatgatgttggcgaataagaggatgctggatttggctgcaaaggtattgctggagatgaaggcatcagggttcccgatagaggtgaccgccagcgacctcctgatgatttacatcaaggaagggtcgacggagcttgcactccggtggcttcggttcatgggctccggtggcataaggaccaacaatt

SEQ ID NO: 414026 - DNA, 540 bp, Oryza sativa
tgttgattcaagggaacatcaaaggcactgatatttaccgaaatcttcatcagtacaaggacgctcaaagagttcctgggttcttaatcctgacagttgaggctcctataaactttgcaaacaccaactacctaaatgaaaggattaaaagatggatagaagaagaaagttctgcaggaaccaaacaaagtgaactccatttcgtaattttggatctgtcagctgtccctgcaattgatacaagtggcatatcgttcctcatcgacttgaagaaatcaacagagaagcatggactagagcttatacttgtgaatccaactggagaggtcatggagaagatacaacgagcgaatgatgctcatggtcatttcaaatcagatagtctgtacttaaccactggggaagcagtggcttcactctctacattttccaagatgacagcgccttagagctgattctaaggctgtcattttcattattattctaactgcgctgctaagtttgcaatgcaagattttccaccctgttctcttaacaata

SEQ ID NO: 414027 - DNA, 369 bp, Oryza sativa
acgacaaaccacgaacttggatattaaagatgccacaaagaaggttcacataaacaacacaggtcacagcagcgaaagctacaagcaaaccctgcataatcgaaaagcaaatgtttttcaaaaccagacacacaaactgatagatagaagcccacacggacagatcataggatagcagcagtaatcaagcattgccaaggcaccaggcaagaaccctgaacctctttagtactcgtcacccttattacccttgtcaccatcgtcgaactcggagccgaccttctcgtagtccttttccagcgcggcgagggcctcgcgggccttggagaactcccccttcttcatgcccttggcgacgtaccagtggac

SEQ ID NO: 414028 - DNA, 458 bp, Oryza sativa
gttcacctatgtcgctgtcctgctcgacaatgaggccatctatgacatctgccgccgctccctcgacattgagcgcccaacctacaccaacctcaacaggcttgtgtcccaggtcatctcctcactgactgcctccctgaggttcgatggtgctctgaatgtggatgtcaacgagttccagaccaacctggtgccctacccgaggatccacttcatgctttcctcctacgccccggtgatctcggccgagaaggcctaccacgagcagctctccgtggcggagatcaccaacagcgccttcgagccgtcctccatgatggccaagtgcgacccgcgccacggcaagtacatggcgtgctgcctgatgtaccgcggcgacgtggtccccaaggacgtgaacgccgcggtggccaccatcaagacgaagcgcaccatccagttcgtggactggtgcccca

SEQ ID NO: 414029 - DNA, 460 bp, Oryza sativa
cattattgtagcaatggcatcctcctcccttctactcgcctgtgttgtggtggcggctatggtgtccgccgtctcctgcgggccacccaaggtgccaccgggccccaacatcacgacaagctacggcgacaagtggctggaagccaaggccacctggtatggtgcgcccaagggtgctggccccaaggacaacggcggcgcctgcgggtacaaggatgtcgacaaggctcccttcctcggcatgaactcctgcggcaacgaccccatcttcaaggacggcaagggctgcggctcatgcttcgagatcaagtgctccaagccggaggcctgcttcgacaagcccgcccttattcacgtcaccgacatgaacgacgagcccatcgctgcctaccactttgacctctcccggcctgccttcggcgccatggctaaggatggcaaggacgaaaagctccgtaag

SEQ ID NO: 414030 - DNA, 558 bp, Oryza sativa
tcggcgaaggtaggctcaagcgttgattctgctcgtttagctagcccgcctctgacgctgcattatggagggagtaggcttgtagctagcccgcctctgcacgctatatttcaaggaatcagagatccatacagacagagacgttcagccatcagacctgcagaggcaatccatccatggcatctatcgttcctgtactcctgcgcctgctgctcctgctgctcccgcttcccctgatccgagaccacctctggccgagccaccgccggccaacgccgcaggacgatgcgggtgagctccacccgatcttcctggtgcccggggcgagctgcagcgacctggaggcgcggctcaccgaggcgtaccggccgtcgacggcgcactgcggcgcgatgaaggggaagggatggtttgggctgtgggagaacaacacggagctgctggtccacgactacgcggactgctcacttgagcagatgacccttgtctacgaccccggcgccaacaagtaccggaacctgccccgcgtcgagacccgggtgcccaacttcggttccg

SEQ ID NO: 414031 - DNA, 504 bp, Oryza sativa
ttcgagttaccaaccttcctaagctttggaagacatggtctatcctcttcttttgcttgagccacacaaatccagtttcctcaacatagccacactccattatgtccttcaagggaagaaggccatttgggaggcctgcttccttgagcaagagccttgtgcattgttgacagatctcatcatcatagtagacctcggccttggccttgatttcatcagcaataacaagagccatcttctatgtatctcttctttttttcagctctgaggcagtttttggaggcttggctttgtatggtattatggctggcgttgttcatagtgaaacttggctacctttatataggaaatgccttgtcaaattgtgccttaacatgcataggattttccatcttgccattgtcaattaaggatggacaatatatcatgctcatataaaagctgtaggggcctctggctgagagtacttttgcaatgatgcaaaaatatcatcccataaactgt

SEQ ID NO: 414032 - DNA, 298 bp, Oryza sativa
gccattcctaaataagctttgcatataacttagcttcgattcgagataactttgttctaacaggtccatgcacataaaattaggtgcagtgatacatgggccagtaaaactcacatccaaggacaacattactcctctctggcaaatctaatttccatgttatgtgacaaaaaagaaaagaaaaaaatttcctatggggtgcacagattcttcaggtcttcctccttggcataggtgtttgggatgagccttgaagcatagggatacagatccttgtatgaatttctggatgggacct

SEQ ID NO: 414033 - DNA, 536 bp, Oryza sativa
tggctgctccaaccccgaccgctccctcatcctcgccttccgcaccatcgccaacatggccgacaggttaggtcttgtggctacaatcaaggaccgagccaatgaaatatataagaaggtggaagatctcaagtctatcaggggaagaaatcaagatgccatattagctgcctgtttgtatattgcttgtagacaagaggatcggcctagaactgtaaaagaaatatgttcggtcgctaatggagcaacaaagaaagagataggccgagcaaaggaatttatcgtgaagcaactggaagttgaaatgggtcaatctatggagatgggaaccatccatgctggagatttcctgaggcgtttctgttcaactcttgggatgaacaatcaagctgttaaagcagcccaggaagcagttcagcgttcagaggaacttgatataaggaggagtcctattttcattgcggctgctgtcatttacatgataacccaactctcagatgataagaagcctctgaaagacatatccttggctactg

SEQ ID NO: 414034 - DNA, 340 bp, Oryza sativa
ggtgaacaaacgcgcatattataagtgacgaagcggtctcacataaaacagggcacacaggttacaacaacgagggttgtaagcccattaagccccaaacatcagatcaccacaagcaaatgtctcgaagacacacgcacacgggaacaggataactccacactggcagatcatgggatagcagcagttatcaatcaggccttgacacacagaacatcaagcccccagacgacgacgactcctctagtacttgttaccatcatcgccatcctcattctcgtcggactcagcgccaacctcctcgtagtccttctccaacgcggggagatcctcacgggcc

SEQ ID NO: 414035 - DNA, 497 bp, Oryza sativa
gataggcgtcttcgtactcgcctctctccgcgcctccgcgcttttcctcctcctctcccctctctcccttctccgccgccgtcgcagcatcaacccaatccgccgccatgagggagtgcatctcgatccacatcggccaggccggtatccaggtcgggaacgcgtgctgggagctctactgcctcgagcatggcatccaggctgatggtcagatgcccagtgacaggactgttggtggaggtgatgatgctttcaacaccttcttcagtgagactggtgctgggaagcatgttccccgtgctgtatttgttgatcttgagcctactgtgattgatgaggtgaggactggttgctaccgccagctcttccaccctgagcagctcatcaatggcaaggaggatgcagttaacaactttgcccgtggtcactacaccattgggaaggagattggtgatctgtgccttgaccgcatcaggaagcttgctgacaactgcact

SEQ ID NO: 414036 - DNA, 418 bp, Oryza sativa
gggacaaaaattaaacacgatatatgaacttggtcgtaatacaaaaagtacagcagcctggtgtctcctagatcctcaagcacaaggaacaaaagcacaaaccaaatgacacctcacagctgcgttgatctatgaatgacctagaacggggtaaaatcagctatatatgccccaagataggggaggatcaccaactgggagtaaaggagaaatatgagtttgataagtagatgatcaggactatttggaccatgcaaccgcatcaatttctgcttgagcactccgatatagctccagcctcttcgcaagattagtcctccgttccatgacggccgggtctttatcaagaagcttagaaagttggttaatctcttttgctcccaattcagtaaagaagtgatcgagcagtgagcgcttt

SEQ ID NO: 414037 - DNA, 537 bp, Oryza sativa
gttcatgcaccttcccaggaagagattcactgatttcgctcttgtgaggaaggagatagctgatgaaactgacagagaaactggtcgttcaaagcaaatatcatcggtccctattcatttaagcatatattctccaaatgttgtgaacctgactcttatcgatcttcctgggcttactaaagttgctgttgagggtcagcctgacagtattgttcaggacattgaaaacatggttcgctcgttcatagaaaagcccaattgtatcattctggctgtttctccagccaatcaggatcttgcaacttctgatgcaattaagatttcacgggaagttgaccccaaaggtgaaaggacgtttggtgtgcttacaaaaattgatctaatggacaagggcaccgatgctgttgatatattggaaggcagatcataccggctccaacaacaatggattggtgtcgtcaatcgatctcagcaggatatcaacaagaatgtggacatgattgctgctaggcgcagagagcgtgaatatttttcact

SEQ ID NO: 414038 - DNA, 519 bp, Oryza sativa
  unsure (1)..(519): unsure at all n locations
ctttagcacacccaagagagagtagtggtagttccagagcggtctgcttgcgaagttgcgatgcctgccatggccaagcccgcctcccgcgctgccaagcccgcgtcggcgccgaagaagcagaaggcaaagccctccgccgccgccggtggctcctcccacccgccttatttcgagatgatcaaggaggcgatcacggtgcttaaggagaggaccggctcgagcgcgcacgccatcgccaagtacatggaggagaagcacggggcgtcgctgccggccaactacaagaagatgctctccatccagctgcgcgggttcgcttccaagggcaagctcgtcaaggttaaggcctcctacaagctctccgacgctgccaaggactcgcccaaggccaagcctgccgtcctcgcccccaggcagcagcgccgaagccagcgaaggacgccgtcaaacccaagaaggacgccgtcggtgncaaacccaagaaggccccccccgctggcaccaagcgcaaggcgc

SEQ ID NO: 414039 - DNA, 495 bp, Oryza sativa
aaaagagagtgaaattttgctattggtagattcctcccctgaccacggagcagcgaaccactcccaaaacgccaccaaaaccctcctctccccacctccgccgccgccgacatggccgtcgtccaccgcctcctccgccgcggcctctccgccgcctctcccctcccctctcttcaggagctcgggaggcgtccggcgagctcgtcggcggcggcggcgggggacgcggcggctgagctgcggggcgcgcgggaggacgtcaagcagctgctcaagtccacctcctgccatcccatcctggttcggttagggtggcatgatgctggtacttatgacaagaacattactgaatggccaaagtgtggtggtgccaatggtagcttgagattcgaaattgagttaaaacatgcggctaatgcaggtcttgtgaatgctttgaagctgatccagcccatcaaagacaagcatgcaggtgtcacttatgcagatctgttt

SEQ ID NO: 414040 - DNA, 371 bp, Oryza sativa
aagggcaaatgaatttggatcacaactcaacaaactccaccttgggacaaattcctttttggagcatgaaacaatccttcaccctgaacccaaaaagacaaaaacactttcggggccaaatagccttttggactaaaccactataccaactaagcttgggcaaagctcaaacttagcaataggaacaggctttggcatcatttcagcgggattatcatggggacttatcttggataccttcagcttaccttgggggactacattgggaacataaggggacttgaaatcaatgggctttggcctctcatgaaacatctgatctttaggggggcatatagcactttgactggcacaaaacaaggtaatgcaag

SEQ ID NO: 414041 - DNA, 200 bp, Oryza sativa
atatggagggaaaaattatattattggaaatcattttgaggagctagactagcgggccttattaacaaggggatatggaccattacatggatgattaacatattaaatcctggtagctcccatggaaattaaaggtgaggggcagcagcaggaggcaaggcatgataagacagacctcccaattctcccatgggatggga

SEQ ID NO: 414042 - DNA, 546 bp, Oryza sativa
gtaagctctatcgggaaagaaataggaggaagaaggattaaggaaggaaagcaaagcaagcattaattaaaggaaattaggaaggatgtcagactgggggccggtggtgatcgcggtggtgctgttcgtgctgctctcgccggggctgctcatccagctccccgggaggcaccacttcgtcgagttcggcaacctgcacaccagcgccatgtccatcgtcgtccactccatcatctacttcgccctcatcaccctctttgtcatcgtcatcggagtacacatcaccaccgattaatttttacttcttctttagtttcttcatttctgcagttcgtctgccctgccctctgtaatctctatcttcttctttcttgctcatcctgtcttctcccctcctccatatatatcctacctcatattaattctactatctacatggtgcttccttgatgttcagcacatcaaaccatgcataaaccaagactgtttaaattattactgttttctactagtattatatatgcatgggcagttggcactgctatc

SEQ ID NO: 414043 - DNA, 431 bp, Oryza sativa
tcggtcagccacacctctctccatcctctcgttctctctctgtctcctcttctctctcccccgacggagaggagagaaggcgaggagccgggggagatgggatcggactcgccgcccaagaaatggggcctcagggagcagcgcgaagcctacctccgggggttctccctcgccgacgacgatggagatgggcgcgtgacggggaaagacgcgctcaagttcttcgccatgtcgaatctctcccgccccgagctgaagcaggtctgggcaatcgctgattccaagcgtgagggttatctcggattctcggagtatatgaccgcagtgcagctggttactcttgcacaagctgggaatgagattagtcaggacacccttgcacatgcagatttggagacgctgctacctccgacaatggaaggtctggacac

SEQ ID NO: 414044 - DNA, 529 bp, Oryza sativa
tttggctatgattattggtatcaacctcgtcacaagacaatgatcagttcatcatggggagcacctgcagctttcaggactggttttgatcttcagcatgtgcaggatggtctctatggaagacatctgcacgtgtatgactggcctggtggtgagctcaagcagacactagatttaggcagtacaggtcttcttccacttgaggtgaggtttttacatgatccatcaaaggatactgggtatgtgggctgtgctctgacaagcaacatggtcagatttttcaagactgcagatggatcatggagccatgaggttgctatatctataaaaccattgaaagtgcgcaactggattctgcctgaaatgccaggactgataactgattttgttatctcctctggatgatcgctatctctacttggtcaactggctacatggtgatatcaggcagtacaacatccacgaccctgcgaagcctgtgttggctggacaagtatgggcaggaggcctttttcaaaagggcagtgag

SEQ ID NO: 414045 - DNA, 481 bp, Oryza sativa
gtttaattcacctgaacagaagaagggtgctgggaaagacaagaaggcaatgaggagagctgagaaggagcgtctaaaggaaggtgaggctgctgatgaggagatgaagaagctaaagaaggaagcaaagaagaaaggtgcatccaaggaaagtacctcctctaaaagtggtgctgggaagaagaaggctgctgctggctctgatgaggatcattcaaattcaccaactcgcagccatgatggtgacaatgtggctgcagatgaggatgatgatgatgatgtccagtggcagactgacacttcgttggaggctgcaaaacagcgcatgcaggaacaactgagcgctgcaactgctgagatggtaatgctgtccactgaagaacctgagaagaagaagaagcatgaggcctcacacaaggagggtgccttcaacggaagtacataacatgtggttgaagaggctaaaagcggccttatgatg

SEQ ID NO: 414046 - DNA, 328 bp, Oryza sativa
cgaatgactagagctttgttttattaatttcgtccctgagcagtccaataaagaattcatcaatgcaaatggtaaatgaagattatagcaagcacggtaacagcgactccgatcgatcttttcattttctgagctagctaatgtcaccccagcggacgttgtggttggcggcgaggtagtgcgctccgacgggtccccggctgccgtacgggtagagctcgggtgccaccttgttggcctctaggtcggcgaggacgggggtgaagatggcccaggcggagtcgagctcgtcgctgtggttgaagaggcggtgctcgcccttgatggc

SEQ ID NO: 414047 - DNA, 492 bp, Oryza sativa
gattaatactgatcccaacagttctttgtcttctccctccttgctccaaatggccggcaccggcttacgattccggcagggcgccatcttcttctcaggagctcatgctgctgctcatccaagaacaaggactcctcaccaccattgctcacctcagaggacgcacgatgcgagaggaaggtgccgcctcacggctaagtccgcaaatggacgcccacagatcagtgcctccttcagagatgtggcgatagatggggcacagtctgaagatggggcgccagagcagggaggatccaccgtcagcatcaccgtcgtcggcgcctccggcgatctcgccaagaagaagatctttcccgcgcttttcgccctgtactacgaggactgccttccggagcattttacagtttttggttatgctcgtagcaagatgagcgatgaagagctcaggaacatgattagcttgactctgacatgccggattgatcagaggga

SEQ ID NO: 414048 - DNA, 471 bp, Oryza sativa
  unsure (1)..(471): unsure at all n locations
tcggtcagctccagccacacgagcctagttcaggtagatacaatggcgtccaccgcctctttcatgctcgccgtcttgctggcggtggccgtcgcggcggcgccggcgagggcggtgcgatgcccgccgagcgacaagcaggcgctgatgagagtgaagcagtcgctgggaaacccggcgacgctgtcgacgtggtccctggcgtcggcggactgctgcgagtgggaccacgtccggtgcgacgaggccgggcgcgtgaacaacgtcttcatcgacggcgccaacgacgtccgcggccagatcccgtccgccgtggcggggctgacggcgctcatgtcgctgtcgctgttccgcctcccgggcctctccggccccatcccggcgtgcctcaccgngctctgcaaccttcagttcctcaccatctcccacaccaaacgtttccggcgtaatcccggactcgcttgcgcggat

SEQ ID NO: 414049 - DNA, 468 bp, Oryza sativa
tcgtttgattctatcaggagggatgtgctagcgaattcttgttagcaacaaatggacatattgctcggcacatccccaccgagaataccaagatgacgttctctggtacacaggacaagtgcaatgcttgtgacaagaccgggcatttcattgatctccttaccgcggacagtatttcctaccacaagtcttgcttcagatgcagccactgcaaaggcacactttcgatgtgcagctattcgtccatggatggggttctttactgcaagacccattttgagcagctattcaaggaaacaggcaccttgaagaagaacttaccctcaggtacaaaggcacacagtgaacaggctaagattcccagcaagctgtcctctgtgttctggggaacccaagacatgtgtactgtctgcaagaagactgtgtatccattggagaagatgaccatggagggtgagtgttaccaca

SEQ ID NO: 414050 - DNA, 426 bp, Oryza sativa
agagaaaatgtgaatcacttgtcatctgttgcttctaataatttgtgtggttttattgtaacttggacaacaaaacgtgtagttttgtgaagtttactcttgtatagcctaaacaaagaagcacatctcaaactcatttcatctgtgacactcaatttcgatgttcaatgaaaaaaaagaaggcaatgcgtgcgactcttttcatccctgtttcatttctcggaggaacttcttgaaccaatgggctgaattcttggggtgtctcttcatcccatcatcgtaatccacaaagtttagcccaaaccggagtgtgtagccatccgcccactcaaagttgtcaagcagagaccatgcaaagtcccccttcacgtttgctccatccctcatagcatttcgcagggcgagaaggtgcttgtgataatattc

SEQ ID NO: 414051 - DNA, 525 bp, Oryza sativa
tcgaacaatttgatcaatgagctattattgaaaggcattcatgtctaatcttcactgtttagtttcaagttcagtggctagatgcaacttgtggaaaccattagctccatcccttggcactggaagataaatacaacggatttcttagccctaatatcataaatgactataaggactatgctgaaatctgcttcaaagagtttggtgaccgagtgaaacattggatcaccttcaatgagccttggatcttctgctctaaggcctatgcatctggcacctatgccccgggccggtgttcaccctgggagatgggaaaatgcagcgttggagattcaggaagggagccttacactgcatgccatcaccaactacttgcccacgcagaaactgttcggttgtacagagagaaatatcagttcactgaagaagttgtcaggcagtcgcagttcatccatgataatgatttacatcgaagatccgcaaaggccttacaaaaggggaagattggaataattgtgaactcac

SEQ ID NO: 414052 - DNA, 340 bp, Oryza sativa
gatctttttgcgaccacattcgcgactgggttcggggcactcctgagggaacattggtctccatgggtgtgtactctgatggctcgaatcgcgtgcctgctggcctgagctactcgctcccagtaacatgcagtggtggcgaatggaccattgttcacggtttcccgatctaccaggtgttaaggaagaagattgacgcgactgcccagctgctgtcggaggagaagacgctcgcttacttatgcctcaactaaaactaagcaattcccacagggacacgatagtgagcgattgcccgctcccgtgtttttgaataaaagagactttttagtttcatctt

SEQ ID NO: 414053 - DNA, 565 bp, Oryza sativa
ggtatttcttatttccctacaattgctccgacgcttgttggcccagcaggtgcattacctgctcagcatactcgacaatatgcaataaacctccctgaaggaagcagcactgttggacatgacaataatcggaaatggggaagacagggtcttgatcttaattctggccctggaagtgtggatgtagaagtgaaggacgatagagtaactttaccagttagacaaaattttattgcgccaccacatgcctttgtggacgagcatacgagaatgtatcaaatgcctccaggtgttggaataaagaggaaggaaccagagggcagttgggatgccgaacgatcttcatacaaacaattgtcatggcaatgagcttttgctggtatcatttctcagcgacttcggcatccaatgagcttaggcagctgcatgtggtacttgggttcgtggactgcaccctcgctggaatatacaattcatacatggttactttccttgtgatgatgtgaatgtgagaggcacgacgcttgaagaaattgctgaaatgtcatatttatactttcctgga

SEQ ID NO: 414054 - DNA, 489 bp, Oryza sativa
gtttcagtggtgttgaaagctcaaggtggtcaacttataattcccgttgctctgctgcatgttgctgcctttgcacttgggtattggttatcaaaagtttcctcttttggggaatcaacttctaggactatctctattgaatgcgggatgcagagttctgcacttggatttttacttgcccaaaagcacttcacgaatccactcgtagctgttccatctgctgtcagtgttgtatgcatggcgcttggagggagtgctcttgcagttttttggaggaacagagggcttccagcaaatgacaaagacgatttcaaggaatgaaacaccaacaccctccagtttctagtcattacctagcgttgttttttagttcagtggagttatcacagcattttttttgttacccatattttagcaagttgattatcagtaggacttgcctacttggtaggtctgttgaattgcactcttatcttcaaataagctgca

SEQ ID NO: 414055 - DNA, 429 bp, Oryza sativa
gcaaacttccaggcaattcttgagtcaagatcacaagatacatgatcaaaggacagctacaaggcagcacatagccaaaccaagaaacattaaaaagcaggggagtgaggagactaaaggaatgaacaaaaaggatcacttggatgttctgcttccgtcaagcttgagatttcacacaagctaccctatcttccatcagcagaggtgaatgattctgcaaatcctggaggcctcgtcggtatgcttgtctgagtattatccaagctagcaaggaatgaagacgtcgcgccatcaaaatggctgctatcctcaaaggcctgccatttcttcaatgcttgcggcagtgtcatgtctagatcgataccatagctgtcatctgaatctggatcagacggttttcaaacattcgaaagaattgagagcacattt

SEQ ID NO: 414056 - DNA, 538 bp, Oryza sativa
tcggttaatggcggtgcagctgcaagtgagacatacagtcaagcgagcagtggtccaagggatattcatgttgttgaaactggaaatatggtaatttcaattcaagtcctccgcaatgtgaccaacaacttcagtgatgagaatgtccttggccgtggtggctttggcactgtgtacaagggtgagcttcatgatggcacaaaaattgctgtgaagcgaatggaggctggtgtgatgggtaacaaggggctaaatgagtttaaatcagagattgctgtgctgaccaaggttcgccatcggaacctggtgtcactgcttggctactgtctcgatggcaatgagaggattctagtgtatgagtacatgccacaggggacactgagtcaacacctgtttgagtggaaagaacacaatctgcggccgttggaatggaagaagagacttagcattgcgcttgatgttgcaaggggtgttgagtatcttcacagccttgctcagcagacctttatccacagagacttgaaacccatcaacatac

SEQ ID NO: 414057 - DNA, 545 bp, Oryza sativa
tcggtggagacgagcgacctgagagagagagagagagaaggcaagggaaggaggagaagaagggggacgaagcggacgaggcgcgcgcgcgccatctttgctttgcttcctctctcttccctctcctctcctctcctccggtcgtcggcctccccggccggccggcgcctgcccgtgcttgaggcgcggcggcggatacggggggtgacgacatggccgacgggggagagaagtgccgggacgcggccggcgagggcggcggcggcggcgacctgtacgccgtgctcgggctcaagaaggagtgctccgacgccgacctcaagctcgcgtaccggaagctcgccatgagatggcatccggacaaatgctcatcctccagcagtgcaaagcacatggaggaagccaaggagaagttccaggagatccagggcgcctattccgtcctctcagactcaaacaagcggtttctctacgacgtgggggtatatgatgatgacgacaatgacgatgacaacctgcaggggatgggggacttcattggtgag

SEQ ID NO: 414058 - DNA, 422 bp, Oryza sativa
cacagacaataatttggcatgttttcaactaggaaaactcgtcttgctcgatcccccaacaaaaaaggcataagcatctgccaccgattttacacactcagaaacctcacctgacgcctaataacatgtaaacggtgtccatacgttaaatttatttaaacgcaacagcatccgaaagcacctaatatgtccatagttccccactgcttatcatcatcatctagtcttagccaccaccagaaccgtacttcttaccaaagacgaccacctgcagcttgtcatatccagcaagcacaccagcaccagcaacagcacgcagaatgttagcaccagcgcccttgaagagtgacttcgcaccctccttcgcaacaatctgcttgaacgcatccaaggagctgttgtacttgacagcctcaccagat

SEQ ID NO: 414059 - DNA, 477 bp, Oryza sativa
tcgaatgatcaagagtggtaggctctctcacccatacaaaggtattgcggactgctttggccgcacaattaaggatgaaggtgtgattgcactgtggagagggaacactgctaatgtcatccgttactttcctacccaggccttgaactttgccttcaaagaccatttcaagcgcatgttcaactttaagaaggacaaggatggttactggaagtggtttgctggaaacctggcttctggaggagctgctggtgcttgctctctcttctttgtgtattctctggattatgctcgtactcgtctggctaatgatgccaaggctgcaaagaagggtggtgggaggcaattcaatggacttgttgatgtttaccgcaagacccttgcgtctgatggtattgctggtctgtaccgtggattcaacatcttctgtgttggtatcattgtctatcgtgggctgtactttggaatgtatgattc

SEQ ID NO: 414060 - DNA, 551 bp, Oryza sativa
tttatattttggtgttaaggattataaattgacttactacaccccggagtacgaaaccaaggacactgatatcttggcagcattccgagtaactcctcagccgggggttccgcccgaagaagcaggggctgcagtagctgccgaatcttctactggtacatggacaactgtttggactgatggacttaccagtcttgatcgttacaaaggccgatgctatcacatcgagcccgttgttggggaggataatcaatatatcgcttatgtagcttatccattagacctatttgaagagggttctgttactaacatgtttacttccattgtgggtaacgtatttggttttcaagccctacgcgctctacgtctggaggatctgcgaatttcccctacttatttaaaaactttccaaggtccgccttatggtattcaaggttgaagggataagttgaacaaatacgggtcgcctttaatgggaagtactattaaaccaaattgggatatttgaaaaaatatggtagagcatgtatgagtgtctagcggtggacttg

SEQ ID NO: 414061 - DNA, 364 bp, Oryza sativa
gtatggtgcatcccttctgcgctcatagctggttcttgcctggcttttacatctgctgcgctggacgttggcggcaacactaccagagtggacaatggcaaagagtactatccctacacagtcgagaataagcccgctcattgactgaagttctgtacgtgtagcccaagtcctgcaaaaccgtcagctcggtgaattttgaagctgatgcttactttcatgtctgttttgttgatgtactagctcctttgcaaatccttggcattgttgtgctcgagagagacctatacaacagtctcggaataaatatttttgcttgctttatcgtgatcatcgatcacaataaacgccttcacgatgcttg

SEQ ID NO: 414062 - DNA, 545 bp, Oryza sativa
ggttctgctgaggactgaggtaggggaaagaagagaagagaagcaagcaacaccaacagcaacacgcaaggagtggaggactcttcaaggtctggagagtggagaggaagaggaatcctcctcagtcctcaccttcagatttcagaacacaggcaatcggccctagctgcaatccaacaagatgggcatgcctctgctgctgctgctgctgatcctcgtcgctgctggcccccaggcaggcagagctgcaaagccaatcccaaatctccagctcatgaccaaggagggcggcagttcaagaatcatccaggacgacatcataaaggcaatcaacaagcatcccaatgctggctggacggctgcacggaatccatactttgcaaactatactactgcgcaattcaaacatatccttggagtgaagccaacaccgcatagtgtgctaaatgatgtccctgtcaaaacttatccaagatcgctgatgctttcaaaggagtttgatgccaggtcttgatggtcacagtgtaacacaattgggaccatac

SEQ ID NO: 414063 - DNA, 160 bp, Oryza sativa
aattattcacaaaacttacataataattattcttcccaaccgaggttggtgcaggaccccaaacatctgaatgaataagctctaaaggagcactagaacgacttaaagacttagaataaggaagttgatgactctttcccttttctgacaagcattaaca

SEQ ID NO: 414064 - DNA, 499 bp, Oryza sativa
gtctgctcgccatcgccattcccctcgctgccctcctcctcccgacaagcgccggcatgctccagccttcgattgcccagaccaagaaacgggaggatggtgggggtgcggaggatgtgaaaggcgcaagatgttgctgctctcatgggagctcagatggctggatacatcgacggcacaaaggaggagccgccgggcaccatcatcaccaagaaggacgacaaggatgtgcgggtcaccaatcccgcgcataccgagtgggtggcgcaagagcagcaggttctcagctacctgttgctctccctctcacgtgatgtcctcatccaggtggtctcaattcccactgctgttggggtttgggatgccataagtgggatggttgcatctcactcccgtgcgcgtgtgaggaacacacgcatggctttgacggccacgaagaagggcaatctgaaagctgccgagtacgtggccaagatgcggggtcttgctgatgacatgg

SEQ ID NO: 414065 - DNA, 333 bp, Oryza sativa
gggcttcacctcaaacacttatatattttcaggggaccaaaaattatataacactaccatgtagtagaaagctggagcaggagggacaaagattacagcaattcggttcaagtacacgtaggtgattgcagaattgcagtcaagttaaagcgaaacaggaaaatctggaaaaaaaataatcctcttttttctttctttatggacaggctggatcacacggtgtaagactgctggatggtctcaatgtcgaggcctttgagctttacaaccgattctacatgccccttgagcgtatggagcttccttagcctggcaaatttcgcccttcttttt

SEQ ID NO: 414066 - DNA, 462 bp, Oryza sativa
tcgaacaaaggagagggagctcaagtgggcacatgctcagaggaccctccatggactgcagccgcctgatgccaagatgttctcggagaaggctggctacaatgagctcaatcagatggctgaagaggcgaagaggagggcggagattgccaggcttagggagctccatacgctcaaggggcatgtagaatcggttgtgaagctcaaaggcctcgacattgagaccatccagcagtcttacaccgtgtgatccagcctgtccataaagaaagaaaaaagaggattattttttttccagattttcctgtttcgctttaacttgactgcaattctgcaatcacctacgtgtacttgaaccgaattgctgtaatctttgtcccttctgctccagctttctactacatggtagtgttatataatttttggtcacctgaaaatatataagtgtttgaggtgaagcac

SEQ ID NO: 414067 - DNA, 517 bp, Oryza sativa
tcggatagttttcatagcccctattactactttccttgttcggctagtcagcgtgcattacagtagaaaggcgacctctgttctgtttggaatgtggctatctttatggccattcttgtttgagaagatcaacaagaccaatgtggttttctctggtgaaagtgtacttccaaaaaagcgtgtcttgttatttgccaaccacaggactgaggttgactggatgtatttgtgggatcttgcattgaggaaaggctatttaggatatatcaagtacatccttaagagcagcttgatgaaattgcctgtttttagctgggcatttcacatttttgagtttatcccagtagaacggaaatgggagattgatgaagcaattatccagaacaaactgtcagcatttaaggaccccagagaccccctctggttggccgttttccctgagggcactgattatactgagaagaaatgcatcaagagtcaagaatatgcttcggagcatggtctgcctatacttaaa

SEQ ID NO: 414068 - DNA, 500 bp, Oryza sativa
gtttcccaggccgacgccgccctcaaggccgggaaatggcaaagaaccaagtacgttggagtttctctggttgggaagacacttgcggtcatgggctttggcaaggttggttcagaggtagccaggcgggcgaaagggctcggtatgcatgtgattgctcatgatccgtacgcccctgccgatagggctcgtgccattggagctgaactggtctctttcgatgaggccattggcagagccgacttcatctcccttcacatgcctctcaccccagcaacatccaaggtcttcaacgacgaatcctttgctaagatgaagaatggagttcggatcatcaatgtggccaggggtggagtgatcgacgaagatgctcttgtcagagcccttgactctggcaaagttgctcaggcagcccttgatgtcttcactgaggagcccccagccaaggacagcaagctagtcctccatgagaatgttactggtacaccccatcttggagc

SEQ ID NO: 414069 - DNA, 424 bp, Oryza sativa
gtttttgtctgggccggcatccatgcgatcccaagaaaggtatggctggacccgagcgggaagcagcttctgcagtggccaatcgaggagctggagacgctcaggggcaaatcggtcagcgtctttgacaaggcggagaagcccggggaacatttacaagtcacgggcctcggaacctaccaagctgacgtggaggtgagcttggaggtgtccggtctggaaaaggccgaggcgttggacccggcgctcggtaacgacgccgagaggctgtgcggctcgaacggctcggacctgaggggcggggtggtgtacaggcttggggagctggtctccgcccgcctggaggagaaaaccgacgtcttcttacgcgtctgtaaaccagacgggcacggtgccaagcccgtcgtacttatgtgcaccgacc

SEQ ID NO: 414070 - DNA, 463 bp, Oryza sativa
  unsure (1)..(463): unsure at all n locations
gttattgtcaacaaataatcggctatcaaattgagctcgttgtctccgaaccccacgccatggccggcggcggcgacggcgacggcgaccgcgaccgcggctcgcccgaggcggagctccggcgcgggttcaagacgctcgccgtgacgcggcccgacccgtccgccgcggtctacgaggtccgcctcaaccgccccgcccggctcaacgccctcagcccggacgccttcgcggagatcccgcgcgccatggcgctcctcgaccgcgccccctccgcgcgcgccgtcgtgctctccgccgccggcccgcacttctgcgccggcatcgagctcggctcccccgggagccccgccacggtcccctccggcgaccccgcgcccgcggccgaggggctccgncgcgccatcctgaagatgcaagcggccctcacggccatcgagcggtgccggaagccggtggtcgc

SEQ ID NO: 414071 - DNA, 491 bp, Oryza sativa
ctttcttgccccttcctctggccacgtgcgagttcgagattccaagtcccggtggtcggatttctcaaccccggcactggcctcgcacaggctgcgatccgctcgccaacaaggttcatgaaatcaggcgatgactacctgccacaatgcgaagacagacggtcagccgcctacacaataggctcctacactgccaccatcactgaatgcacatctggtcctcccttattttcgttggcttgtgtagagaagaaaaggtggaattgtggaaggtaatcgcggggagttttggttcattttttgaagatttctctaattggtacgtactaattaaaccaattggagttttggtctcgttactcactgtaaaaacatgatggtaaaaaaacagtttaatcctattggtactctcttatcccattgaacatttttgtcgtggggcattgactgttttcaaaaaggaaaaacagtggatgactctttcaggaaat

SEQ ID NO: 414072 - DNA, 567 bp, Oryza sativa
cttgcctcgacgactttctctctccttttctccgttcatctcgagcagaggagaggaatggattcctcctccacctccgggaggaagggaggaggactcctcctctcgccgccgccggcggcggtagttgtggcggtggcggtgctcctgtcggcggcagaggcggcgacggaggagccgtgctacccgcggctgttcagctttggggactcgctgacggacacgggcaacttcgccttcatctacggcaacgactcccgcgagccggcgctccgcccgccctacggcgagaccttcttccaccgcgccaccggaagattctccgacggccgcctcgtcgtcgatttcatcgcggacgccctggggctgccgttcgtgcggccggacttgagcgggcggaccgcgggggactctgcatgcggggccaactttgcggtggggcggtgccacggagctcagcccgtcttttttccggcgagaggggtgcccatggctgacatcgtgcccctcgcctgaagatgagtgcttcccgatctgttgaaactgtctgccccgcgacctgcccgt

SEQ ID NO: 414073 - DNA, 386 bp, Oryza sativa
tttttggactcagccagccagacaagttactttggaaagcaaaattgctctgtactgtacatgtaggacaggttaatctccaaatacaaggtaggagtatatatcaaaggcaaattgataaaagctgaagaatccgatctctcattcctcctcttagcctaacaaatgaaacatactaccaagtcttatcgtgtcatctggtatcagcgattctgcgcagaggggaagccttcacggggagattttttggagacaaccatcattttgaaagccaggtaataatcaaaaagatggtgcaggccgcgatcactgctgaaaggatgatagtgtcctttgatttcttcctcttgatggcaccaagtagtcctttaataacagggaacttt

SEQ ID NO: 414074 - DNA, 428 bp, Oryza sativa
gttaggtagttggaagaccataacatcaagaactctccttgaaaattttgtaatttgatccgcaacgattcagatgcagatgaaacactgctgattcccactcagattacacacaatacaaatacaccgacaaactgcctcaaaaaccaccaaattgattcaaaagtaaaacgggtatgagggatcttcccaccgagactgactaaacctaaccacagacaattggatccactggacccagattattcaaaaacagatggctatgacggcatcgtcctcgcaaccgaagggaacttgcagctatggatatcctcacttcgcgctggcgagctggttgcggatgagcttggcggccgaaaccatgttggtaagggcgggcttgacctcgttgtacttgcgggtcttgagaccgcagtcagggttcaccc

SEQ ID NO: 414075 - DNA, 512 bp, Oryza sativa
tcgcttctcctcctctcttccatcgccgctgctcgcttcctccccctctcccacgaaagatggcgtctcacattgttgggtacccccgcatgggccccaagagggagctcaagtttgccctggagtctttctgggatgggaagagcagcgctgaggatttggagaaggttgcgaccgacctcagggccagcatctggaagcaaatggctgacgctgggatcaagtacatccccagcaacaccttctcgtactatgatcaggttcttgacacggctgccatgcttggtgctgtcccagagcgctactcatggactggtggagagattgggttcagcacctacttctcgatggctaggggcaatgccactgtccctgccatggagatgaccaagtggtttgacaccaactaccactttatcgtccctgaacttggtcccaacaccaagttctcctactctttccacaaggctgtgaatgaatacaaggaggctaaggcgctcggcgttgacacc

SEQ ID NO: 414076 - DNA, 543 bp, Oryza sativa
  unsure (1)..(543): unsure at all n locations
tttacgtgtccgggattggttggggaccaccncgcccgccgggagggggcggggtttctttaacttcctcctctcttcctaccacgagnnnagngaatttgggactgatggtggaccagcagcaaaggccttgaagccaaaattcaatctatttacgcagcaagtgtccaagagcttaggaatggcagtgccacatattgatataaagactgtcattgctgctaccatgtttcttaaaggctttggtggtcttctgttcatcatcagcagctcatttggagcattcctactgctcctgtacttagcagttataacacctgttgtgtacgacttctacaactatgaaatggagtcttcacaatttgctcagcttttcgtcaagttctcacagaatttggcactttttggtgccctgctttttttcttgggaatgaagaactctattcctagaagacattccaagaggagggccgggaagaccaagacaaactgaaaccagccactgtagtaggggaagctatttgcgctccttatggttgcata

SEQ ID NO: 414077 - DNA, 445 bp, Oryza sativa
aggaaatccatcacatcttttaatattaattaatcggtcgctctgcataaatccaagctattggaaggttcaacttaaagagaaattgttgttacaatttagcaaactggcgcaaaagaaaaacaaaagactagtgttttacatagcgggataatctacgcgtcatattccgcactagcaaacttgttctcagggtagaacactgcaacaactggatttccaccgaacttccttccatgcattgccgtctttgctttggtggcgccgtccacatctgcatactccaagaaaacctttccaactccggcaactggtaatccactaggatcagggcgagggatgacaaccttaatcagattaccatatttgcctgcttccaatctcatgtcctccataatgtcttcatactcctcggcatcttttaattcatcagccgaaaccacct

SEQ ID NO: 414078 - DNA, 371 bp, Oryza sativa
tttttgttttttttattttttggcgtttcatatcagaccttttttctatctaattttatccacttagtctagctatctagtttatctaccggctcgaactcgaatttgatcgctttccatatttcacaagctggggctagttcaggactccatttgcaagctgatcggataatttcattaccttcacgagcaagatcgcgccctttgttaccagcttgtacacagggttctaaagccaccccattaggtgctgcaccaggtgcattacccccagggtggcctaaaggtcctccccccaattggaaaacaaaaatatcttccaagatttcgggcagagctgggatatgcccaacctgaataccccctggagg

SEQ ID NO: 414079 - DNA, 554 bp, Oryza sativa
  unsure (1)..(554): unsure at all n locations
ttacatangcttcttgccttcaacagttgctaaaagtagtgatgtttgaaaggaaagacaattaaaataggccctcatttctccgcagcttgctgattgggaagaatatattgattgtagatgataataaagtcaatctcagggttgctgcagctgcgctcaagaaatatggtgccaaagttcattgtgttgaaagcggcaaagatgcagtctccttacttcaacaaccacactgctttgatgcatgctttatggatgttcagatgccagagatggatgggtttgaggcaactagacaaataaggcaaatggaggtaaaagcaaacgaggaaaggaaggcgttggatttaatggagggttcaacattcgtcgagtcccatttgcctgttctggcaatgaccgcggatgtcattcaggcgacatatgaagaatgtataaaatcgggaatggatggttatgtgtccaaacctttcgacgaggagcagttataccaagctgtctccagattagtggtgggaacgaaggaatcagcggtatgatgatgggctggctag

SEQ ID NO: 414080 - DNA, 441 bp, Oryza sativa
ggtagcaaaatgggactttcatgacagaagaaacacaacgggatataccgataacagaactgataaagacatacttaggtatcctacatactaggttctgttaagtccccaattcacaatttctatggagtatcaagaggaaaattgagacatgtactttgtaaagtatgcaaacataaggagcacaaatagcttcccctactacaggggctggtttcagtttgtcttggtcttcccggccctcctcttggaatgtcttctaggaatagagttcttcattcccaagaagaaaagcagggcaccaaaaagtgccaaattctgtgagaacttgacgaaaagctgaacaaattgtgaagactccatttcatagttgtagaagtcgtacacaacaggtgttataactgctaagttcaggagcagtaggaatgcttcaaatgagct

SEQ ID NO: 414081 - DNA, 510 bp, Oryza sativa
ttggatgcgtgggctagctccggccaccaactttgacgcgttcttctcctccgcatcccccatcccctcctccccggcggcggcggcggcgcggaggcggcggcacgggagcggctagtggtttcgtcggcggaggcggaggcggggccaagatgttcgggcgcgcgccgaagaagagcgacaacaccaagtactacgagatcctgggggtccccaagaccgcctcccaggacgacctcaagaaggcgtaccgcaaggccgccatcaagaaccaccccgacaagggcggcgaccccgagaagttcaaggagcttgcacaagcttatgaggtattgagtgacccggagaaacgtgaaatctatgaccaatatggtgaagatgccctcaaggaaggaatgggtggaggcggatcccatgttgatccatttgacatcttttcatcattctttggaccttcttttggtggtggtggcagcagcaggggcagaaggcaaaggaggggagaggatg

SEQ ID NO: 414082 - DNA, 534 bp, Oryza sativa
  unsure (1)..(534): unsure at all n locations
ngccttgaatacttaactcatgagnngnagggagggacgnatgttaccttaaacagaaactaacgtaagtgtccgatttaaagctggtgttaaggattataaattgacttactacaccccggagtacgaaaccaaggacactgatatcttggcagcattccgagtaactcctcagccgggggttccgcccgaagaagcaggggctgcagtagctgccgaatcttctactggtacatggacaactgtttggactgatggacttaccagtcttgatcgttacaaaggccgatgctatcacatcgagcccgttgttggggaggataatcaatatatcgcttatgtagcttatccattagacctatttgaagagggttctgttactaacatgtttacttccattgtgggtaacgtatttggtttcaaagccctacgcgctctacgtctggaggatctgcgaattccccctacttattcaaaaactttccaaggtcccgctcatggtatccaagttgaaagggataagttgaacaaata

SEQ ID NO: 414083 - DNA, 547 bp, Oryza sativa
  unsure (1)..(547): unsure at all n locations
ttcataagtagtccctgttttagatagngcaactcagcatcttttggatgaaaatatccagttactaagccagattgccgaaaatatcgaaattttcaagacggtggagaatatggatctctttctgcggacgaataataatatcagaacagttcttaaaagaatgagtgagacgcctggtatcatgggtcagatgcctcccttgccagtacctgtaaatgaaggcagcctgaatacacttctccaaatggacagaatggttggtgcctatggtataccatgaaactcccatatggacgcgggactgatgtaaaagatcctgtttggaaagggggagagatgtattgcatagcatcctatcggggaagttgacagagaggagcctttgcctgatttgtactaatggcatgaagacaaccaaaggatgctagagcttagactaaccaaggtgccacgggataagtaatgttttttgaggattttctttctctttttcctttgaattgttttagctgccgtgtgtctatccttgattattggggaagac

SEQ ID NO: 414084 - DNA, 540 bp, Oryza sativa
  unsure (1)..(540): unsure at all n locations
gctgtaagtcctactctagcaagcatgcgcgccgccgnccatgtcgtttccatcgccggcttgctggtgatggccatggcgccactggcctcctcgtacccatggccgacctgcaacggcagcagcaactacacggcgaacagcgcgttccaagagaacctccggatcctgaacgccaccctccccagcaacgtctccacctcgccgggcctcttcgccaccgccaccgtcggcgcggcgcccgacacggtctacgccctcgcgttctgcccgccagtcgacaaccagaacgcctccggctgccgcgcctgcgtcgccggcggcttccaggacgcgccgagactgtgcccctccaacagggccgtctacatcctctacaacttctgcgtcttcaccttctccggcgtgaacttcctcggctccgccaccaacccggcggaccaggaggcgcagctctacaacgccctcaacctcaccatccccgacgtcggcgccttcacagggccacctacgagctcctcaacgccacggtcgattacg

SEQ ID NO: 414085 - DNA, 371 bp, Oryza sativa
cattccgatagatagcaacaagcagttcaaacaccataaccaaagcgaactcaattcatggtaacatcacggacgaagaacacctaacactggatggatggatagagggcttctcgactcgagagagccactggacacgataacgactcgactcgatgataagatgattctgacacggatagctaaggataactggccacgatgggccccaccaatcagttcctccagttcccgccggagtcgccgccgtagccgccgccacggctgccaccgtagccgccgccgccgccgccacggtcgccgccgtagccgccgccgccaccgtagccgccctcacggcgcccgtagccgccgtcgccaccttcttcgta

SEQ ID NO: 414086 - DNA, 505 bp, Oryza sativa
  unsure (1)..(505): unsure at all n locations
cagatancttattaccaaaagcaagaacaccangagagcccgattctttttattcctctctctcctcctcccccccctcctcatccacatctccatccattgcaatgctgcagattcccagctaggttcagagaaggtcaccaacctcctcttctacctgcacgacaccctcagtgggaaggatccaactgctgtcccagttgctcgtgctgagaacgctgtacccaagcctgataatccggtacccttcagcacgatctatgtggtcgatgatctgctgacagaggggcctcagagagaatccaaggtggttgggaatgcgcaggggatgtacatttcgacagccaagaaagggctcacgcttgttcttgggatcgatttcgagctcactgatggcccctacaaaggcagctcgttcgtcgtgtactcgcggaacccggtcatgcaggggaatggcagggagctcgccattgttggtggccgcggtttgttcaagatggctcga

SEQ ID NO: 414087 - DNA, 361 bp, Oryza sativa
tttttgttttggagaaagtcaaggttcgataaatattgcttcacttgtacaaagtacagataaaaatacattgatacatgacacggagagagccatgcacaccacttatttggacacacagagggcaaggctgcagagaaaatcaagcaacacaagctgaactcacggccccacctgtcagcctctcactggtcgaggccggagactcttgtgaaaaacagcaacaccacgcatgcagaagaagacaaattattacacacacaaatcgacgacacggcggccggcgacgtacggcgaggtcgtcgtcgccgccggcgacgttgtgatgaggtcgatcagccgaaagaggtggtgtttcttt

SEQ ID NO: 414088 - DNA, 556 bp, Oryza sativa
ttagtggaagccggtcctgatttgatcgcctttgaaacaattcccaacaaattggaagctcaggcttacgttgaacttcttgacgaatgtaacatcagtatccctgcatggttctcatttaattcaaaagatggagttcacattgtgagtggagactcgttaattgaatgtgctactattgctaatgggtgttcgaaggttggtgcagttggaataaattgcacacctccaagatttatccatggcctgatactctccattcgaaaggtcacagataagccaattctgatatatcccaacagcggagaaagatatgatgctgagaaaaaggagtgggtggaatcaactggcgtgtcagacggtgattttgtttcctacgtaaacgaatggtgcaaagatggggctgtcctcattggcggctgctgcaggacaactccaaacaccatcaaggccataagtagatcacttaaccaacgccactcttcgctgcatttacctgtggcatagagttgcacgctcctttaggtgtgctactcatgctggtacctgaacctga

SEQ ID NO: 414089 - DNA, 478 bp, Oryza sativa
ttcatcattagcttctagctagcttaattaattaattagtcatgttggaggagaagtaccttcatcacctgttccaccacaagaaggacgacgagccggccaccggagtagactcctacggcgagggcgtctacacgtcggagacggtgaccaccgaggtggtcgccggcggccaggacgagtacgagaggtacaagaaggaggagaagcagcacaagcacaagcagcacctcggcgaggccggcgccctcgccgccggcgccttcgccctgtatgagaagcacgaggcgaagaaggacccggagaacgcgcacaggcacaagatcacggaggagatcgcggccacggcggcggtcggcgccggcggctacgccttccacgagcaccacgagaagaagaaggaccacaagagcgccgaggagtccaccggcgagaagaagcaccacctcttcggctgatcgacctcatcacaacgtcg

SEQ ID NO: 414090 - DNA, 526 bp, Oryza sativa
ttcgatctcctcccctctgatccggcgcggccatggcgtcttgcttgagcagcacggtggtttgagagacggagagcagcttggagcgggtgaggcggcagctctcgtccacctccagccgccacctccttcagggccctctcctgaagcgatccgatacactaagaaaatggaatgaacggtgggttatacttgatcctgcaactggaaagatggaatacaagattcgtagaagtgatgcagctgtgaggggaataatagtgtttgattcaacaagcactgtgacgttgtcgccaatgaactttcatggactgccgaaatatgatggatgctgtttctgtatccacacggactaactttttttaaccttacattcttttgcatgggtgatatttattttgggaccctctattttgttttattcaatgactaatgttctagatattggaaccccacagaaaaaggaatattttctttgtgcagaaactcctagtgctgcaagagcttgggtgtccactttacatgc

SEQ ID NO: 414091 - DNA, 312 bp, Oryza sativa
tggatcctttatgtgcgggcggcctttttttttttttttttttttttttttttttttttttttgaaaaaaggcacaggcaacaccattattggctccgattaaccgggacaatatgattcaactgggggcaaaatttaagggggacaccagtaaaaacaatgttgggatgcttttagaccgttcacgcacgcggcttcccaccaagggttgggaactgagcctgatcttcaatggatggtgcacatgtagaatatgggccacgttggtaaccaccaccatttccacgaccgccacgatctgcacgccccttt

SEQ ID NO: 414092 - DNA, 483 bp, Oryza sativa
  unsure (1)..(483): unsure at all n locations
tttcgatttactcgcccgggctttataccaggacgaccggcnccaggcgcggggggcggtttgataccnggacggcaagagttcactcaccgccatggctgaccggacgctggtgaggtcgtcgtctgccgcgccggagaaagatgtggcggcgctgtgcgacgtggtgcggcagtgcgtgaggaggccggagggggggaagagagcgataagcatgggcgaggtggcgaggctggtgaggggcatcgccgggttgtcgccggagcaggcggcgccgagggagaagcccctgtggtgggcggagcttgagatcgcctcctccgaaaccgcctgaaattcagttgaggccccaaaattagttagtttcagagtacatatgcgtttgaaagcctgaaactgaaattcagtgcgttctctcttctttctggtatcatataccctccgtcccataaaaaactaacctagtccacatcataatacaac

SEQ ID NO: 414093 - DNA, 446 bp, Oryza sativa
agcaacgttataatatttcagtaaaccaatatcaacgcaaactgggaattgtcagtatgaggcatcagatgatcacaaagcaaaagaaaaggataccaggatacgatacgagaacctagagagaccgcagcatggacctaccagaacttttcaaaaacaggcttcatatggataagattcatcttaagttctgaactacgactacaccatactggcagatcttacagaacatggaaggcgacttggatcacataaacaagtttggccttgaagctttgaaggttgtcttcagcttcctggtagggggcctgaccttcctgtacaccagtgggaacttgatatctgacttgtggaactgcttagtgttgtcacgcttgcagagtttaaagtggacagtagcagtcttgatgatctgaatgcaagggaatctgacacggtggcgggaa

SEQ ID NO: 414094 - DNA, 564 bp, Oryza sativa
  unsure (1)..(564): unsure at all n locations
tttactcgnccgcacataactaggggacgcaanngnnnnngaancngaaggggacttaatataacngggcacaccgtcaaaaaccgccannanggancangagaagaaaagaacaccngnggngaggaaaggnggccnnccngangcngnngnnnggaacccnngggacaagaaggctaaggctatgtcagactttggggatgacgaatataaacgcatggtctgtgtggaggcagctgctatagaaaagccgattactttgaagcctggngaggagtggactggaaagttggaactgtctgctgtcccatctagctattacagtggtcagctggatcctgatcgtgttcttcaggattcaagtgtcccggaggactcaatcagctagtccttagtggatatttgtccaggtagactattatatcatatgcataagggacattggcaacaaggagtgtcaaaacgtttattccattctattcaaatctttgttgttttttggcatgcatatctgaactgagggaattcaaaaatgaattaccgtttgatatctacaaaacgtaa

SEQ ID NO: 414095 - DNA, 423 bp, Oryza sativa
aaagagcaaaggatttagcactgtaagtactcgcattccacaacaaccgaagggcaacaataggactcagaacatccaagtttttaaccgaatagaaataaacgagttttaaacgactaacatagtgcacattgcgagcagatattaacggtccatgcaacgagtaccatggccgtgggcaaaacttaacgaacgctaagatatctcaaatgcagccagcataaccaccacttcaacgatgctcatttcttcttggcggcagccttggtcaccttggcaccggttgggtccttcttctccacgttcttgatgacgccaacagccaccgtttgcctcatgtcacgcacgggaaaacgaccaagaggagggtacttaaagaagggttcccaaccatgggcttgggggaattattttaccatacca

SEQ ID NO: 414096 - DNA, 528 bp, Oryza sativa
  unsure (1)..(528): unsure at all n locations
ccagcncaccnaccnagcggcaggattagtttagagcttgccttcttttctagccatcgcctngctgnccatcgccctctacatcatcggcgtcgncgcctccttcgccgacctctgcgccaaggagttcgccgagagagcccacgaccggccgccgctcgtcggaacagttttccggcagctcaagaacttcgacagaatgttcgatgaacatgtcaactatgcaaccgcgcatcgcaccagcaggattgtgtatcccggtcactgcgaggtctttacttctgatccggccgtcgttgagcatgtcctcaagaacagcttcagtaaatacagcaagggggacttcctcactacagccatgaaggatctctttggagatggaatttttgcaacagatggggatatgtggcgtcatcagaggaagctagcgagctacgaattctcaccaaagtgttacgtgacttcagcagtgacacaatcagaaggaatgctgcanaactggcagagaagatctcatgtgcagcagct

SEQ ID NO: 414097 - DNA, 393 bp, Oryza sativa
ggagatgagcaccacgacgcacttgatgctcttgcacaccgtctggatcaccgtcggcccgggctccgggatcgtcaggttcaggttgtcgccgaacccctccgcgtacggcggctcgccgaccaccacgatcgcgtagtcgtacttgtcgccggtgaccacgctgctgtccgggttctccgagtacaccaccgtcgtgctgggatcaacggtggccttgatcgccgacaggatcgtcgtgccagcagtgatgttgttgccgggctgtccttgccaggtgatggtccatcctccacactgtctgcccaaatcatcagcatggcttcccgcgacgagaattttaccggttttctttgggaggtgaagcacccggaagtaggaggatttttcgtt

SEQ ID NO: 414098 - DNA, 530 bp, Oryza sativa
  unsure (1)..(530): unsure at all n locations
gaccggttcggaatttttggtttgactcacgcgccttaggtgatcaccaccaccaggaggaacccggggcggggcttgttttaagncgtcttttcttaccatgccccaagaggaagaccagggagcctaaggaggagaatgtcactcttggacccactgtccgtgaaggagagtatgtgttcggagttgcccacatcttcgcatccttcaatgacactttcattcatgtcactgacttgtctggaagggaaactcttgttcgcattactggtggcatgaaggccaaagctgaccgcgatgagtcatcaccatatgcagctatgcttgcttctcaagatgttgcacagcgttgcaaggagcttggtattactgctctgcacatcaagctttgtgccactggaggcaacaagacaaagacacccggtcctggggctcaatctgcttttagggcttttgctcgctctggcatgaagaatggtcgcattgagggtgtgacccccgttcccacggacagcaccccgaaaaaggga

SEQ ID NO: 414099 - DNA, 541 bp, Oryza sativa
tccgtaccaccgcagcacgccgcctccccgcccagcgacttctgttactccggcgaagatgtgcgcctccaggttccaccagtaccaggtggtggggaggggcctgccgacgccgaccgacgagcaccccaagatctaccgcatgaagctctgggctaccaacgaggtccgcgccaagtccaagttctggtacttcctccgcaagctgaagaaggtgaagaagagcaacgggcagatccttgccatcaacgagatttttgagaagaacccaacaactatcaagaactatggcatctggctgcgttaccagagtaggactggctaccacaacatgtacaaggagtaccgtgataccaccctcaatggtgccgttgagcagatgtacactgagatggcttcccgccaccgtgtcagattcccttgcattcagatcatcaagactgctactgtccactttaaactctgcaagcgtgacaacactaagcagttccacaagtcagatatcaagttcccactggtgtacaggaaggtcaggccccct

SEQ ID NO: 414100 - DNA, 521 bp, Oryza sativa
  unsure (1)..(521): unsure at all n locations
cccttgataccatccgcaaggagaagacgcacancaacagggttgttataggccacgttgacttcggcacgccgaccaccacgggccatctgatctacaagctcggaggtatcgacaagcgtgtgattgagaggctcgagaaggaagccgctgagatgaacaagaggtccttcaagtacgcgtgggtgctcgacaagctcaaggccgagcgtgagagaggtatcaccatcgatattgccctgtggaagttcgagaccaccaagtactactgcacggtcatcgatgcccctggtcaccgtgacttcatcaagaacatgatcacgggtacctcccaggctgactgtgccgtgctcatcattgactccaccactggtggttttgaggctggtatctccaaggatggccagacccgtgagcacgctcttcttgctttcactcttggagtgaagcaaatgatctgctgctgcaacaagatggatgccaccactcccaagaactccaaggcccgttacgatgaaatc

SEQ ID NO: 414101 - DNA, 394 bp, Oryza sativa
atggcaggacgcttacctggctctggattgatactcaaaatgttccttaggcaccaaaactatttttagttatggacaatataagctatagctttccaggcacatacaaagaggtttttgcttccaaagaaatgaagcttaaatacggccgtggggaaatagctgcatcctctttttttaagcaccctattacaagcttattaaattgtacaagcaccttacttttaccgggcaaattgccccattgcttctttggtggtttgatacgactacttgggacagattattattacttgcctaataggacggatgttagaaatgcatatgttccaataaaataacaaaaggatgcagtggtttgtttggggttgatggtgaaatttcccgagggttt

SEQ ID NO: 414102 - DNA, 287 bp, Oryza sativa
cgctccctcgagggcggcttcttcacctacggcgagatccttgactgcaagatcatcaacgacagggagacggggaggtcacgtgggtttggcttcgtcaccttctactccgagcagtcgatgcgcgacgccatcgagggcatgaacggcaaggagctcgacggccgcagcatcaccgtcaatgaggaccagtcccgccgattcggcggcggaggcggaggctacggcggcggcggtggcggcttctgcggacgtcgtggaggcggttgatgcggaggaggtggcgg

SEQ ID NO: 414103 - DNA, 544 bp, Oryza sativa
atataactagcaatcctgagattagccacagggaggcattcattgctgctgcaaagaactgggctcatcttccccggctccattttggcctcagcgtcgccgacggcggcggcggcggcggcagcaactaatcgcggcggcgcggcctgccggccggccaccgatcgccggcgtgcacgccggcgcgcggcggcggccggtcgagaatgcgcgcgcaggagggacgacgacgatatattattatcgcgtgtgcccctctctcttcgccgcgtaattaattaatcagttaattaattacgtacgacctactgtgttatgctatcgatccgtgttaattaattacctacgtatcttgattaattagtctcgtattatacgtactattatacgtacgtgctgtgctatgtacgtagacaacaaaaaaaaatgtgcgtgatgagttctactacgtacgtacgtactgtgttctagtgttttaatttgtatccgaaccaaggagttgtttaaataactgcatgcacatgcactggacttgaatctggag

SEQ ID NO: 414104 - DNA, 392 bp, Oryza sativa
gcgtattgaatacgtttgtttctttatttgttttttttggtctggccccttatctttctttcatagaaaggaatgaatggctcggctagatagaataaccgagccagaacagaaaaaaacagttgaacaggtataaataagaaaatcttagttaagaggggtcatgtaaagaacaggctccaaatcacgatcgattcccttttcaaatcctgctgcagcagcccgggctcttcctgcatgccacaaatggcccacaaaaaagaagaatcctagaacaaaatgggaagtcgctaaccaacttctaggagaaacataattaactgcattgatctcggtagctacgccccccacagaatttaaagagcctaaaggagcatgggtcatatattttg

SEQ ID NO: 414105 - DNA, 549 bp, Oryza sativa
  unsure (1)..(549): unsure at all n locations
ctttttgtgtgtcctcctggaacaggcaagactctgcttgcctaagttacagcaggagagtctggtgtgcccttcctgtctatttctggatcagatttcatggaaatgtttgttggggttggaccatccagggtacggaacttattccaagaagctcggcaatgtgctcccagtattatatttattgatgagatcgatgcgattggtcgtgcaagaggccgtggagggttttctggttcaaatgatgagcgtgaaagtactttgaaccagctgcttgtagagatggatgggtttggtacaacttctggtgttgttgttcttgctggtacaaataggcctgatattttagataaagccttgctaaggcctggaagatttgatcgccaaataacaatagacaagccagatataaagggccgtgatcaaatattccgcatatatcttaaaaaacttaaacttgacaatgagccatcattttattcgcanaggctagcggctttgacacctggatttgcaggagctgacattgccaatgtttgtaatgaagct

SEQ ID NO: 414106 - DNA, 177 bp, Oryza sativa
attgaatacgcttgtttctttatttgttattttcgaattctccccttatctttccttcataaaaaggattgaatggggtggatagatttcatagccgagccatcccagaggaaaaccgtgaatccacactttaaaagagagggttatttaagaggctaaactgtccagagctggctc

SEQ ID NO: 414107 - DNA, 555 bp, Oryza sativa
  unsure (1)..(555): unsure at all n locations
tttcgttctactcgtccgggttttgtactgatgaggctctngcacaggagactgaggaattctttaaggntgaggagagtgttcctattgctgagaaacagggtgagcaggatgatgctccaactggagagaaggataacaaggagggtgctgcaaatgaggaagaagagaaggaagaggataaggagatgactcttgaggagtttgagaaattaagggaggaaaagcggaaagctcttcttgctttcaaggctgaagagaggaaggttgaggtcgataaggacctgcagtctatgcagccactttctaccaagaaaggaaatgatgaaattttcattaagctgggttctgacaaggataagaagaaggaaaatgctgagcgcgatgagcgtgccaagaagtctgtgagcatcaatgagttcctgaagcctgcggaaggagaaaggtactatggcggccgtggtcgtggaagggggcgtggagatccgggcggtcgtggatatgggggtggttaccaacgtggcccatattctacatctgcaccattcattgaag

SEQ ID NO: 414108 - DNA, 525 bp, Oryza sativa
  unsure (1)..(525): unsure at all n locations
caattacatcggtgccgattncggcttcggcattaacaaggatcaccattaccatttggggtacttcttgtacgccattgctgtgcttgccaagattgatccctcctgggggaggaagtacatgccccaggcctactccatggttgcagatttcatgacattgtcgcggaaacacggcgcaagctacacaagattgaggatgtttgatctctggaagctccattcctgggccggaggtttgacagaattcgcggatgggcgcaaccaggagagcactagcgaggccgtgaatgcgtactactccgctgcgcttctcggattgagctatggggatactcaccttgtctccatcggcgcgacattgaccgcattggagatgcttgcagcacagacatggaggcatgtccgtgaaggtgacaccatctacgaagacgatttcaccggcaacaaccgtgtcgtgtgcgtcctgtgggcgaacaagagggacagtggcctttggttcgctccaccggagtggaggaatgc

SEQ ID NO: 414109 - DNA, 548 bp, Oryza sativa
  unsure (1)..(548): unsure at all n locations
gctttctttattagcctatgngnctcgngagaaacggcctggattccatcaccataaaaaggctgttgctatgaatgcacttgttcgtgtatcagctgtccttactaatggacaatacttgttgaatcttgactgtgatcactacatcaacaatagcaaagctctccgagaggctatgtgcttccttatggatccaaacctaggaaggcgtgtctgttatgtccaattccctcagaggtttgacggtatcgatagaaatgatcgatatgcaaacaggaacaccgtgtttttcgatattaatttgagaggtctcgatggtctccaaggaccagtttatgtgggaaccggttgtgtgttcaacagaacagctctttatggttatgaaccccccattaagcagaagaggccaggttacttctcttcgctttgtgggggacgaaagaagacaaaaaagtcgaaggagaagagcacggaaaagaaaaagtcacacaaacatgtggacagttctgtgccagtttttaatcttgaagatatagaggaagggattg

SEQ ID NO: 414110 - DNA, 413 bp, Oryza sativa
  unsure (1)..(413): unsure at all n locations
tttgttgcacttagctactctaggntggggagtagggccctttgtagaagttctagatacttttccgcactttgnatctggagtacttcatctaatttcctccgcagtcttaggcttcggtggcatttatcacgcgcttctgggaccggagactcttgaagaatcttttccattctttggttatgtgtggaaagatagaaataaaatgactacaattttgggtattcacctaattttgttaggtataggtgcttttcttctagtactcaaagctctttattttggcggtatatatgatacctgggctcctgggggaggagatgtaagaaaaattaccaatttgacccttagccccggtgttatatttggttatttactaaaatccccttttgggggagagggttggattgtta

SEQ ID NO: 414111 - DNA, 334 bp, Oryza sativa
gcgtattgaatacgtttgtttctttatttgttttttttgctctgcccccttatctttctttcatagaaaggaatgaatggctcggctagatagaataaccgagccagaacagaaaaaaacagtagaacaggtataaataagaaaatcttagttaagaggggtcatgtaaagaacaggctccaaatcacgatcgattcccttttcaaatcctgctgcagcagcccgggctcttcctgcatgccacaaatgggcccacaaaaaagaagaatcctagaacaaaatgggaagtcgctaaccaacttttaggagaaacataattaactgcattgatctc

SEQ ID NO: 414112 - DNA, 544 bp, Oryza sativa
tcgttgagctacgctcgagccggccggaagccatggccacttcttagcagcgtcagatcgagcacttccacctccccgtgcgggggctcaccctccacgtcgcgcaagccggcaaaggggagctcgggacggtggtgttcctgcacgggttcccggagatatggtactcgtggcgccaccagatgctcgccgtcgccgccgcagggtaccgcgccgtcgcgccggactggcgtgggtacgggctctccgaccagccgccggagccggaggcggcggtgtacgacgacctcatcgaggatctcctcgccatcctcgacgccctcgccgtgcccaaggcattccttgttggaaaggattttggggcaatgccagcttacgactttgctctccgtcacccaaaccgcacatgtggtgtgatgtgtctgggcatccccttaggcactgctggtttggcctttgacacattgccagaaggattctacattttacgttgggcgcaaccaggaagagcagaagctgactttggcagtatgatgtaaagaga

SEQ ID NO: 414113 - DNA, 518 bp, Oryza sativa
  unsure (1)..(518): unsure at all n locations
tttgacttacgcngccttaatcatgcctccttattataannctatcattagaggattcttcactgncatggtttcatactctacctggaatggagtaaaaatgcacgcgaaccatcacctaatcactgattttctcaagaacaagctccgcttcaggggttttgtgatttctgactggcaaggcattgaccggatcacttctcctccgcataagaactattcttactcaatcgaggctggaattggtgccggcattgacatgatcatggttccttatacctacacagaattcattgatgacctgacagagcaagttaacaacaaaattatccccatgagcagaattgacgatgctgtctacaggattctccgagtcaagttcaccatgggtctatttgagagcccttttgctgactctagcctcgccgatgaacttggaaagcatgagcaccgtgagctcgcgcgcgaagcggtcaggaagtccttggtgctgctgaagaacggaaaatccttctact

SEQ ID NO: 414114 - DNA, 437 bp, Oryza sativa
gaaccaattgcgttccatgtaaaatatcaacataccatgacttttgactactttttattgaaacaacaaagtgtaaaagatgtgtgtgtagcatcctgatgtttgaatcacacggaaactctgaaactgaacagcccactctataataatctgtatccttcggcatatcacccacacaacctgatcttcagcaacaacgcatcatctcgggcaatctctgctgcgatcatttcagcccccatcaatggcaatactggcggtaccagcagcacctggagaacccgacgacgccatcatcggcggtgccgcggctgtgcagccaccagagaaggttggtcagggaattgccatcgtcgtgccccgtcagcgccctcgtcttctgcaatgccgattccttattgtagatcccctccagggcgtacacgaagccctttcac

SEQ ID NO: 414115 - DNA, 561 bp, Oryza sativa
ttccatattcaagttgtcttcgaacaccgctgcctgtggttaccttactgaagaagttgcttcaaatgcgtccaaggttgttgaaggaaaaaaggaacctgccatgtttcgtctgtttggtgtggatttgatgaaatgtaccagcatatctactaccactgatgacaagtcaagtgtgggagcaggagaagcttcagccaaaggtactggttctcacgaagactctggtcagctgtcagcattctcaaaagtgacaaaagagcatattgctgcggatgaaagcccccaagagatccaaagccatcagaattacaccgctagaactcgcataaaggttcaaatgcatggaaatgctgtgggcagagctgtggatctagctaatctagacggatatgagcaactgatgaatgagctggaagagatgttcaatataaaggacctcaaacaaaaatggaaggtggctttcactgatgatgagggtgacacaatggaagttggagatgatccttggctggaaatttgccagatggtcagaaagattgtgctctatcccattgaaga

SEQ ID NO: 414116 - DNA, 568 bp, Oryza sativa
  unsure (1)..(568): unsure at all n locations
ccctggctggatatccagcccctcgnctgcgataatggaactggtattgtcaaggctgggctctgtctacacgatgcgcccagggctgtcttccccagcattgtcggccgccctcgccacactggtgtcatggtcggaatgggccagaaggacgcctacgtcggcgacgaggcgcagtccaagaggggtatcttgaccctcaagtaccccatcgagcatggtatcgtcagcaactgggatgatatggagaagatctggcatcacaccttctacaacgagctccgtgtggccccggaggagcaccccgtcctcctcaccgaggctcctctcaaccccaaggccaatcgtgagaagatgacccagatcatgtttgagaccttcaacacccctgctatgtacgtcgccatccaggccgtcctctctctgtatgccagtggtcgtaccacaggtattgtgttggactctggtgatggtgtcagccacactgtccccatctatgaaggatatgctctcccccatgctatccttcgtctcgaccttgctgggcgtgatcccactgattacctca

SEQ ID NO: 414117 - DNA, 356 bp, Oryza sativa
ccagcaaagaaggtctactaacttaattatcaacagaggaacagcagggtcccacttactactccttaatacataacaggcattccggcagctaagatcttacaggagactatatagagtcatccactaataacttacacaacagaagggatagcaaactggggattctttgcctactatcttgctcactcctagcagttgatcccacatttttgggtatcagggcctgggacacggggggggaatggatcgatacgaacccacagcaaggagaagatcgatgcaagggggatggcccaaacaacaacaatggtcggggtacggttctgccgacccatgagacccttaaggaaggg

SEQ ID NO: 414118 - DNA, 543 bp, Oryza sativa
  unsure (1)..(543): unsure at all n locations
tgagtaggaggaggaagaacaggaggaagatggggcgggtcaatgtgcagctgaagcggatcgagaacaagatcaaccggcaggtgaccttctccaagcgcaggtcggggctgctcaagaaggcgaatgagatctccgtgctctgcgacgccgaggtcgcgctcatcatcttctccaccaagggcaagctctacgagtacgccaccgactcatgtatggacaaaatccttgaacgttatgagcgctactcctatgcagaaaaggtccttatttcagctgaatctgacactcagggcaactggtgccacgaatataggaaactgaaggctaaggttgagacaatacagaaatgtcaaaagcacctcatgggagaggatcttgaatctttgaatctcaaagagctgcagcagctggagcagcagctggaaaattcgttgaaacatatcagatccagaaagagccaactaatgctcgagtccattaacgagcttcaacggaaggaaaagtcactgcaggaggagaatnaggtcctacagaaagaac

SEQ ID NO: 414119 - DNA, 322 bp, Oryza sativa
aagaattgggaaaaacgtcacataaatacatcattaaactgaaaactgaattacacaggggggacgttaagcagtaaaatagtatacccatcttggcgacatgctgagagcgacaaacacacagatgcactgatagtagagtgcgtgaaaccagggcatccctgattgcgttgcatgaaaggaggatgcgcagcgcgcggcttggggcttaagatccgggtgttgaatgggatcgacatgatgatcacctggtggtagatggtagccagggcagggccaacgatgggaccaacccattacaaccaatgggcattgcaggtat

SEQ ID NO: 414120 - DNA, 554 bp, Oryza sativa
  unsure (1)..(554): unsure at all n locations
ttttactcgnccggattgactattttgcactatctntgcaatnctttgggctgtctatcttcatgcttcttttgcttgcataggccaagacatccttggaatctgcctgatgataactgtgcttcaaatggcacgcttaccaaatatcagggttgcatcagctcttcttagtgctgcatttgtgtatgatgttttctgggtgttcatttcacctcttatattccatgaaagtgtcatgattgcagttgctcgtggtgataactctggggaagcaattccgatgctcttaagaatacctcgtttctttgatccatggggtggctatgacatgataggctttggtgacattattttccctggattgctagttgcattcagctacagatttgatagagcaagcaaaaggggcctcttcaatgggtattttctatggctgacggtgggatatgcctgtggccttttccttacctatcttgcgctcttcctgatggacgggcatggtcaacctgcgctgctgtaccttgttccatgtacattagggcttattgttatac

SEQ ID NO: 414121 - DNA, 555 bp, Oryza sativa
  unsure (1)..(555): unsure at all n locations
ttcttttacttcnccgcatttatactcaccaagaagccggcggcggggcgggattttttccctaagctgcacaatcctctccctccagcggctaaatgcggaagggcaaggtctggctcgaccccaatgaggcaacgagatctcatggccaactccgcagaacatcgaagttggtcaaggatgggttcattatcaagaagccccaaagattcactccaggtcccgtgcacggagagcccatgaggccaagcagaagggacgtcactctggctatggtaagcgtaggggtaccagggaggctaggctccccaccaagatcctgtggatgaggaggatgcgtgtgctcaggcgtttgctgcgcaagtatcgtgaggccaagaagattgacaagcacatgtatcatgacatgtacatgaaggtcaagggtaacatgttcaagaacaagcgtgttctcatggaaagtatccacaagtctaaggctgagaaggcaagagagaagacactctctgaccagtttgaggctaagcgtgccaagagcaaggccagtcgtgagag

SEQ ID NO: 414122 - DNA, 537 bp, Oryza sativa
  unsure (1)..(537): unsure at all n locations
tcttcactcgnccgacatacttgcttctctngcacacaaggnagacgagggctattggttacgtcctcgtgctccttatgccatgccagggccacgtcatcccgttcatggagctctcccaccgcctcgccgacgagggcttcgaggtcaccttcgtcaacacggaggtggaccacgcgctggtggtggccgcgctgccgccgggcggcgccgcggagctccggcagcgggggatccacctcaccgccatccccgacggcctcgccgaagacgaggaccgcaaggacctcaacaagctcatcgacgcctactcgcgccacatgccgggccactttgagcggctcatcggggagatcgaggccggcggcgggaggcccaaggtgcggtggctcgtcggagacgtcaacatggggtggtcgttcgccgtcgccaggaggctcggcatccgcgtcgtctacttctcgccggcgtccacggcgtgcatcgccttcatgcgcaagatccccaagctgatcgaggacggcgtcctcaacgaga

SEQ ID NO: 414123 - DNA, 384 bp, Oryza sativa
aagaattaagatctccatcacataaaaacatacagtgactgagtactggattacacgattgagttgttcagggttcagataggaaaaacatcttggggactagagatagagggaatcgacagatgcgcagcagtagcgcgcgggaaacaggacatcacgattgcgttgcatgtcgtcggctgcgcagcggcggcgcggggcttaagacctgctcttgaatgggatcgccctgatgatcacctggtggtagatggcagccagggcagtgccaacgaagggaccaacccagaagatccaatggtcattccaggcatggtccttgttgtagatgatggcagcgccaaggcttctggctgtgttgatgccagtaccggtgatggggat

SEQ ID NO: 414124 - DNA, 571 bp, Oryza sativa
  unsure (1)..(571): unsure at all n locations
gcaggaccggttcggaattttcggtttgatttacgcgnccgggtggacgtgcggctgggggcgaacaggnactcggagaggtattcgatagggacggcggcgcatggcgccggggacgacaaggactacaaggagccgccgccggcgccgctgttcgagccaggggagctcaagtcgtggtctttctaccgggccgggatcgccgagttcgtcgccaccttcctcttcctctacatcaccatcctcaccgtcatgggggtctccaagtcctcctccaagtgcgccaccgtcggcatccagggcatcgcctggtccttcggaggcatgatcttcgcgctcgtctactgcaccgccggcatctccggaggacacatcaacccagcagttacttttgggctgttcttggccaggaagctgtccctgacccgggccatcttctacatagtgatgcaatgcctaggggccatctgcggagctggagttgtgaagggctttcagcagggtctgtacatgggcaatggcggtggggccaatgtagttgccagtggctacaccaagggtgacgggcttg

SEQ ID NO: 414125 - DNA, 349 bp, Oryza sativa
  unsure (1)..(349): unsure at all n locations
cggaccggccggaatttctgtttgactcacgcgcccttggtacccaaacctgaagagcgncagggaanggancgacttgatgggnnacggaaagctcaacatgcacaggannccncnncagaacaacaaagncacngaggagggcngggggaagcacgacaccanccgcanngaggancnngnccacgagaacangacngncggnccacacttcaaggaggccaacaacnnccngnggcccnncaagcngaaggcaccacncggnggccncaagaagaagaggaaccacnangncgagggnggngangccggcaaccgngaggaccacancaacgagcncaaccggagg

SEQ ID NO: 414126 - DNA, 568 bp, Oryza sativa
  unsure (1)..(568): unsure at all n locations
tttgattctacgcgcccgtacttggatatctagctagctnctttctttcttcctcttttcctgtgtggcacgcgccttcaatttacctcttcggtgagtagacgcatcgagatcggggggaaatgtcggtccagtttacatcggagcatgtttgctatgtcaactgcaactattgcaacactatccttgtggtgaatgtgccaaacaattgttcctacaacattgtgactgttagatgtgggcattgcacaatggtgctctccatggatcttgctccttttcaccaagcacgcactgttcaagatcaccaggtacagaacagaggatttcaaggtaataactttggaagctatgacatagcttccagaaatcagaggacatcgacagccatgtacccaatgccaaccagtcagcagcaagtgtcacctatacgtccccctgagaaaagacagcgtgtcccatctgcatacaacagattcatcaaggaggagatacagaggattaaaaccagcaatcctgagattagccacagggaggcattcagtgctgctgcaaagaactgggctca

SEQ ID NO: 414127 - DNA, 425 bp, Oryza sativa
aacaagatagatataaatacagtatatggtaaattgttttgattttgcatcaatgcggatacagtaatgcaggtaagtatggagttctgcttgtacaaacaggaagtacagtattaatttggacgcatatcagtcgatcggttgcagtgtcactcacttaggaggtcaataaatttcctgaaattcttgtgcgacgagccaccctcactgacgcaggcgcgcgccgtgtccctgagcagccgcgccctttccctgatctcgccgtcgccgacgacctgctccaccttgctcctcacctcgtccctcgtcacgacgccgtcctcctcgccggccgccacggcgagcccggtgcgccacacggcggtgatgtagcttcggtcgaggaactggtcgcagaagtacggccagcacaggaacggcacgcc

SEQ ID NO: 414128 - DNA, 545 bp, Oryza sativa
  unsure (1)..(545): unsure at all n locations
ttgactccgagagagatagcgnagcttcaattcgctactgttccttgcgcgtgctcctccaagctactagcagtctcccgcctccgtttacccggtccggctccggcatggacgacgccacgtcgtcgtcgtcgcgggcgccgcggcccaagacggaggagctggacgcggcgctccacgccatggggttcgagatcgagcgggtctcccccgcggaggtcaccggccgcctcctcgtcacccccacctgctgccagccgttcaaggtgctgcacggcggcgtgtcggcgctgatagcggaggggttggcgagcatgggggcgcacatggcgtcgggctacagccgcgtcgccggcgtgcagctcagcatcaaccacttccgcagcgccgccctcggcgacaccgtnctcgtncgcgccgncccgctccacgtcggccgctccacccaggtgtgggcggtgaagctgtggaaattggatccatccacgaaggagaagggggctcagatctctgaatccagggtgacttttctctgaatctgccgt

SEQ ID NO: 414129 - DNA, 535 bp, Oryza sativa
  unsure (1)..(535): unsure at all n locations
cttaattacntcgtcttcctctcctcttccttcttcttccaccatggctgcaaccgcttcgtcctcctccaccgccaccgcctcgccgctcctcctcccctcggcccgccgcccgctcccttcctccaaaccgtggcttcccgacggcagggcgttcaggggcagcagggcgctgagttcagcggcgcggcgatgcttctgctgctgctgcaggtgcgaggccgccggtgaggcgggaacggcgccgccgccgcagcagcgcggagtggatgacggcggcgtggtctgtaccagcgccacccggtcccggaggaggagcgttcttggagtcgccgtgggggtatcgtcggcgctggcgctcggcctggccgcgttcgatgatgccctcgccgccgggctgcctcccgaggagaagcccaagctctgcgacgccgcctgcgagaaggacctcgaaaatgtgcccatggtgactacagagtctggtcttcagtacaaggatatcaaagtgggtgaaggcccaagtccacccattggc

SEQ ID NO: 414130 - DNA, 379 bp, Oryza sativa
aaatacttaatagtaatagactctttgatggagtattacaacatgcagcagtggcattaatacgccagtacattaattaagttacacatatgcaggctccatttgggtttctttcaatttatcgtattacagaatttctgtagccttgcagatgatcacttggatatcatgtactagtaattaacaataggatgcctacaaaagatggcccaactacaacagaagatgcgtgcttgtgacattgtatggccttatttgttggtagccctccaattaatcaacacgagatgatgcattgttgtgccttagtttcttcacatgcttgggttcacgttgagcctatttggaattttcacccccatcctcttattacactggg

SEQ ID NO: 414131 - DNA, 570 bp, Oryza sativa
  unsure (1)..(570): unsure at all n locations
tttcgtcttactcgtccgggcaactgcgtcaacccctacaccttcgncacccgcgacgcctttgtctggtacgtcaagttccactggaagcccacctgcggcgtcagctgcttgatggacgacgaggccacgctcgtcggcggcaagaaccacagccacgccacccaggacctctacgactccatcgccgccggcaacttccccgagtggaagctgttcgtccaggtgatcgacccggaggaggaggagaggttcgacttcgacccgctggatgacaccaagacatggccggaggacgaggtgccgctccggcccgtggggcgcctcgttctcaaccgcaacgtcgacaacttcttcaacgagaacgagcagctggcgttcgggccggggctggtggtgccggggatctactactccgacgacaagatgctgcagtgcagggtgttcgcgtacgccgacacgcagcgctacaggctggggccaaactacctgatgctgncggtgaacgcgcccaagtgcgcccaccacaacaaccactacgacggcgccatgaacttcatgcaccgggac

SEQ ID NO: 414132 - DNA, 549 bp, Oryza sativa
ggcgactcccgccgcttcccctctcctgctgccgctccccctttcttttccggccttcaccttcccgcctcgccgcgccgtcccctgcgcccgccgcctcgtcttgcggcctccccgcgccggacgccctcgcctccgggacccgcctcccgcggcacccccaccggcggcggaggaggtcggcgaggaggaagaggacgacgatgcccccccgctcaggctcctcgaaccgccccaggaggacgaccccttcccgcccgagatggagccggccgaccccgacttctaccggatagggtacgcgcggatgatgcgggcgtacggggttgagttcttggaaggccccgatgggatggccgtctatgcctcccgggacgtcgacccactccgcagagctagagtgattatggagattccattggagctgatgctgactataactcaaaaacgcccttggatgtttttccccgacattattccactaggccatcccatatttgacatcattgaatcaacagatcctgagaccagatgtgatctaaggttagc

SEQ ID NO: 414133 - DNA, 562 bp, Oryza sativa
  unsure (1)..(562): unsure at all n locations
tttcgatttacgtgtccgaaaatanattactaaccgaaaaaanannccccaacggggaaggtttcattaccctagcgcgtcgtttatgtccaacacgagggtgttcttcgacatgaccgtcggcggagctccggcggggcggatcgtgatggagctgtacgcgaaggacgtgccgcggacggcggagaacttccgcgcgctctgcaccggcgagaagggcgtgggcaagagcggcaagccgctgcactacaaggggagcaccttccaccgcgtgatcccggagttcatgtgccagggcggcgacttcacccgcggcaacggcacgggaggggagtcgatctacggcgagaagttcgccgacgaggtgttcaagttcaagcacgacagccccggcatcctgtccatggcgaacgccgggcccaacactaacgggtcccagttcttcatctgcaccgtgccctgcagctggctggacgggaagcacgtcgtgttcggccgcgtcgtcgagggcatggacgtcgtcaaggccatcgagaaggtgggatcccgcggcgggagcacc

SEQ ID NO: 414134 - DNA, 310 bp, Oryza sativa
cggattgggggaaaagaaaaattcttcacttccatttaattccaacaccatgggatcccataagagtaagacagataaattacatacccaacaccccaactaggccatgacagatctgggatcaaaccccaaccaaggaaccccatcaaatttttacatgggcagactagacacaggaaccccccctagaactcccagggtttcacagccttttgagcaaaacacgcctaggcccttttgccacggatgcggggggcaagctggatgtccttgggcatgatggggacccccttggcggggatggcccaaa

SEQ ID NO: 414135 - DNA, 362 bp, Oryza sativa
cattccgatagatagcaacaagcagttcaaacaccataaccaaagcgaactcaattcatggtaacatcacggacgaagaacacctaacactggatggatggatagagggcttctcgactcgagagagccactggacacgataacgactcgactcgatgataagatgattctgacacggatagctaaggataactggccacgatgggccccaccaatcagttcctccagttcccgccggagtcgccgccgtagccgccgccacggttgccaccgtagccgccgccgccgccgccacggtcgccgtcgtagccgtcggcgccaccgtagccgtcctcacggtgcccgtagccgccgccgtcacc

SEQ ID NO: 414136 - DNA, 373 bp, Oryza sativa
  unsure (1)..(373): unsure at all n locations
ggtanctcctccccctctttaccttttcctcctggggtctttttcgaggntcgtctagggtttcgtgcgcttgagatggcggcgccggatgtcgagtaccgctgcttcgtcggcggcctcgcctgggccaccgacgaccgctccctcgaggccgccttctccacctacggcgagatcctcgactccaagatcatcaacgacagggagacggggaggtcacgtgggtttggcttcgtcaccttctcctccgagcagtcgatgcgcgacgccatcgagggcatgaacggcaaggagctcgacggccgcaacatcaccgtcaatgaggcccagtcccgccgctccggcggcggaggcgggggctacggcggcggcg

SEQ ID NO: 414137 - DNA, 360 bp, Oryza sativa
gggtaaaaagccaacggcataatacattaaaatcaaaattaaaatacagagggagtactttatacagcaaaacaatcgaccatcctttccaccatactcgtcctacaaacacagagatcactgctactccagtggctaatgctgggcaccgatcttactagcatttcgtgaggatttctgctcctgtcttggtaatcagtatcgggtgctcgaactgcgcggctaggctgccgtccgtcgggacggccgtccagccgtcgtcccacatgtcgcaatcaatgctttccatggatagggccggttctattgtgaatgtctggcctttaaccattttgacctggcatattattaccgctgggg

SEQ ID NO: 414138 - DNA, 575 bp, Oryza sativa
ttgtttcgactccacgcgtccttcatacctcgcgccgcgcggctgctccggccaccaaagtttctctccgatggcggtgagagtcccttccatggagctgcaccgccccccgccgtccgtatccggtgtccgaggaaaaagctgccttcaaaagcctttccttgtccaagcaaagagattagagggattggagaaggcaaacccaaggtcacgaggaaagcaaagtttggaacaagtgaagaaaagagcaccactgatccgtgggacagtgagtccacctctaccagtaccaggtcacataactcaacctccttacgttggtaaaaaggatgcttcagagatagcaagtgagatacaaatgcatgacaaagtgagcattattcacatgaaagctgcatgtgagcttgctgctcgtgttcttgaatacgctggaactttagtgaaaccctctgtaacaacagacgaaattgataaagcagtgcacaagatgatcattgatgctggagcctatccatcccctttcggatacggagggtttccaaaagcgtgtgcacatctgtgaatgaatgcatctg

SEQ ID NO: 414139 - DNA, 266 bp, Oryza sativa
aacaaaaaacccacggaccccaaaggttttcattgtttgatagcgtttccatagaaccggcgccccgatttaagttttaaacccacccccaagagggatcggagacccacctcccccgaatggacccaagaactccgcctaatccaaccaaaccttgggggatcttttttaaccaacacgacaggaacttataaaaagattaacccccccccccccttttttttttttggggcctccgcgacttaagaaaactgtttctggcaaaa

SEQ ID NO: 414140 - DNA, 536 bp, Oryza sativa
ttaagtagtgaacactctaagagcagagaccaaggctagtgatctttatttgcctccatttgtgatcgcggacgagagtggcaaatctgttgggcctgttgtagatggtgatgcagttgtgactttcaatttccgagcggatcgtatggttatgcttgccaaagcactagagtatgcagactttgacaaatttgatcgtgttcgtgtaccaaaaatccggtacgctgggatgcttcagtatgatggtgagttgaagcttccgagccattaccttgtctccccaccagagatagagagaacatctggtgaatacttggtaaagaatggcgtccgcaccttcgcttgcagtgagacagtgaagcttggccatgtcacatttttctggaacggaaaccgatctggatactttgatgaaactaaggaagagtacgctgaaattcctagtgatattggaatcacattcaatgctaaacccaacatgaaggcacttgaaattgcacagaaagccagggatgccattcttagtggaaagtttg

SEQ ID NO: 414141 - DNA, 550 bp, Oryza sativa
ttaaatccacccgagcattcgaagcttgtagaagaagccctagcctctcctcctcatcaccgatggcccgcaccaagcagacggcgaggaagtccaccggcggcaaggcgccgaggaagcagctggcgacgaaggcggcgcgcaagtcggccccggccaccggcggcgtgaagaagccccaccgcttccgccccggcaccgtcgcgctccgggagatccgcaagtaccagaagagcaccgagctgctgatccgcaagctgccgttccagcgcctggtgcgggagatcgcgcaggacttcaagaccgacctccgcttccagagctccgccgtcgccgcgctgcaggaggcggccgaggcctacctcgtcgggctcttcgaggacaccaacctctgcgccatccacgccaagcgcgtcaccatcatgcccaaggacatccagctcgcccgccgcatccgtggcgagagggcctaggcgtgatctgctcgagaggctgtgataccctggtagttctagtgtggttcctgtgtctagtctgcacatgtagagat

SEQ ID NO: 414142 - DNA, 554 bp, Oryza sativa
  unsure (1)..(554): unsure at all n locations
cttatacttagaaggctcactccgtctccccctccggccgccgtaaggagaagcagcagcagcgatgcaggccgccgccgggcgcgcgcgccgcctcctcacgtcgccggcggcctccggtatcctctccgcgccgcgccccgggtgcgcggcgctcgccgggagcggcgcccttcttccccgtctcgatggtgtcccgtcctcgccgtcgccgtcaccggcccctccgctcctggctaggagcttctccgccacgtcctcgtctcgcctaccccgtaacttgctatcgccaagtatatcttctcaatggcggaatgagaaatcggtgtgctatcacatggctgcaactcactactcaacagaagcaagtgacattgatcaacctacagaggctgtagtggagctgtatcagaaaatgttgaaatctgttgaagccgagaccatgcctncgaatgcctgggtgtggtcaatgataagtagctgttccaataaggaggacatcaaactacttattcagattttgcagaagctaagagtttttagactatcaaatc

SEQ ID NO: 414143 - DNA, 443 bp, Oryza sativa
  unsure (1)..(443): unsure at all n locations
tctctactcgtccggtactanatatgggaagcatggtgttagtgctggaattaagagtgtagtagatgatgaagctggggaatcgaatggtctccaaagcggtcccatgtgcaatgcctgtgagatggctgttgtatggatgcagaaccaacttgcacagaacaagactcaggatctcatcttgaactacattaatcagctctgtgacaagctcccaagtccaatgggagaatcatctgtggactgtggcagccttgcatccatgcctgagatttcattcaccattggaggcaaaaagtttgcactgaagccagaagagtatattctgaaggttggtgaaggagctgctgcccagtgcatcagtggattcacagccatggacatccctcctccccgtggtcctctctggatcctgggtgacgttttcatgggtgcctaccata

SEQ ID NO: 414144 - DNA, 563 bp, Oryza sativa
  unsure (1)..(563): unsure at all n locations
ttttacgtgtccgattatgngtgattccagcgtgngttcgagggtggccccgtgtttatttcagaagactccaacacgcaccggcatttgtgtgagttcgttggacttgacatggaaatggcaatcaaaggccactactctgaggtttgtgatgttgtggataggctgtttgttgctatgtttgatcatctgaacaagaactgcgccaaggaacttgaggccattaacaggcagtatccgttcaaacctttgaagtacttacccaagacactgcgcattgagtatgacgaaggcatccggatgctcaaggaagctggggtccacgtggaggccatgggagacctcaacacagagtctgagaagaagctgggcgagctggttcataccaagtatgacactgatttctacatgctctgccggtacccgtcggcggtgaggccattctacaccatgccctgctccgacgacccacgctacagcaacttcttcgacgtgttcgtccgaggggaggagatcatctcgggagcgcagagggtgcacgtccctgaggtcctggcacgaca

SEQ ID NO: 414145 - DNA, 571 bp, Oryza sativa
  unsure (1)..(571): unsure at all n locations
tttacgtgtccgcttcatttgtgcttacacataggatcatctgatagatcacataattctgatgttacatccaatggtggagtatctggaatagctccagttaataaagctgaaactgctcccacttcagagaaaaacctaacattggaagcattgtttggggctgcatttatgaatgagctccaatccaaggatgcacctgtttctatccgaggatctgcaactagcggtcctaactatgagttcgcagagacaggcaaaacttcaattgcatcaagccatgaaggatattaccctggtgaacaggtcctacccttcggcaccattaaagatggagttgcccctaaagaatcaggaactggcaacaggaatttagcattatctggcccaagtcagggcagtgctagcttagataagaaaagcttggagattcagttgcctgaagaagataatttgtttacagtgaacgactctttggatggtcaaaagcctgatatttttccatcggtgagatccagtagggttgaggggctactaccagaaaaggcagntgatgatcttaattataggc

SEQ ID NO: 414146 - DNA, 553 bp, Oryza sativa
  unsure (1)..(553): unsure at all n locations
cagctacattatggatgattgggtgctgngccggatttacaacatgaagggcgggctggagaagccgccggccgcggcggtggcggcggcggggatggtgagcaacggcggcggcgtcgagaggaagccgatggtgggggtgaacgcggcggtgagctccccgccggagcagaagccggtggtggcggggccggcgttcccggacctggcggcgtactacgaccggccgtcggactcgatgccgcggctgcacgccgactcgagctgctcggagcaggtgctgtcgccggagttcgcgtgcgaggtgcagagccagcccaagatcagcgagtgggagcgcaccttcgccaccgtcgggcccatcaaccccgccgcctccatcctcgaccccgccggctccggcggcctcggcggcctcggcggcggcggcagcgaccccctcctccaggacatcctcatgtactggggcaagccattctagacgaccaaaaaaaaaaaaaaaacaaccgcattggcagcaatggtgtcacttgacaccgtgcaggctagctag

SEQ ID NO: 414147 - DNA, 343 bp, Oryza sativa
gggatgaaagcagaggtagattatattaagaagcctggcacgcatgaggagatggagcaggagtacatgatgagatcaccatgatgatagatgatccatccaagctagctagggatccatccaacattgatcgacacacgcacacactgacaacgacgacgacggttttatttaggcgtcagagcaaaaggcaaggcctgcctacatataagctgggtactaatgcaagcaaattaaggcctcgatcaaagctctgatcgacagtagcagcatccatacgataaatccttatgcagccgggcgacgacgacgatagatttagttgcaggaacagaaggagcag

SEQ ID NO: 414148 - DNA, 459 bp, Oryza sativa
accggccggaatttccgtgttgacttacgcgccgtaattgcaacgcttgagctcaatcagcaacaacatgtatttccttcttgcttagttaagtccttcgccctcccaagaagaagaagatgtcttgctgcggcggcaactgcggctgcggcagcggctgccagtgcggcggcggctgcggcggatgcaagatgttccctgatgtggaggccacagccaccaccaagaccttcgtcctcgctgctccatccaacaaggcgagctctggaggaatggagatggcggtggagagcggcgagaacggcggctgcggctgcaacacctgcaagtgtggcaccagctgcagcggctgctcctgctgctcctgcaactgaatctatcgtcgtcgtcgcccggtgcatgaggatttatcgtatggatgctgctactgccgatcagagctttgatcgaggccttaat

SEQ ID NO: 414149 - DNA, 327 bp, Oryza sativa
cattccgatagatagcaacaagcagttcaaacaccataaccaaagcgaactcaattcatggtaacatcacggacgaagaacacctaacactggatggatggatagagggcttctcgactcgagagagccactggacacgataacgactcgactcgatgataagatgattctgacacggatagctaaggataactggccacgatgggccccaccaatcagttcctccagtttccgccggagtcgccgccgtagccgccgccacggttgccaccgtagccggcgccgccgacgccacgggcgtcgtcgtagccgccgccgacaccgtag

SEQ ID NO: 414150 - DNA, 466 bp, Oryza sativa
gctaaacctccccctctttaccttttcctcctcggttcggttccttggttcgtctagggtttagtgggccgagatggcggcgccggatgtcgagtaccgctgcttcgtcggcggcctcgcctgggccaccgacgaccgctccctcgaggccgccttctccacctacggcgagatcctcgactccaagatcatcaacgacagggagacggggaggtcacgtgggtttggcttcgtcaccttctcctccgagcagtcgatgcgcgacgccatcgagggcatgaacggcaaggagctcgacggccgcaacatcaccgtcaatgaggcccagtcccgccgctccggcggcggaggcgggggctacggcggcggcggtggcggctacggcggcggtcgtggaggcggcggctacggaggaggtggcggcggcggctaccggcgccgtgagggcggctacggtggcggcggc

SEQ ID NO: 414151 - DNA, 393 bp, Oryza sativa
  unsure (1)..(393): unsure at all n locations
gctgaaagctgcgcgagatgatgcgctgggccagggcgcgtggtgaggcctgcgccgccaaggacggccgcggctgcgagggctgcggcggcgcgcggttcgtcccgtgctgggagtgcggcggcagctgcaaggtggtcgccgccggcgccaccgccgccgccgccgacgtcgagcggtgcgccaagtgcaacgagaacggcctcatgctgtgccccatctgccactgattgtgctccaccgccgcgaatccttctagcgtttaatccgcgcccatgtatatttatccataatatactcgtataattgtgagtttaaactacactctattagtggtttataaatgagaattgaaatggtatatagtgcttgtnaaaaaaaaaaaacagaaaa

SEQ ID NO: 414152 - DNA, 501 bp, Oryza sativa
tttagtctcttccatctcattctcctaattgtcatcactagcttctagctagcttaattaattaattagccatggcggaggagaagcaccaccaccacctgttccaccacaagaaggacgacgagccggccaccggagtagactcctacggcgagggcgtctacacgtcggagacggtgaccaccgaggtggtcgccggcggccaggacgagtacgagaggtacaagaaggaggagaagcagcacaagcacaagcagcacctcggcgaggccggcgccctcgccgccggcgccttcgccctgtatgagaagcacgaggcgaagaaggacccggagaacgcgcacaggcacaagatcacggaggagatcgcggccacggcggcggtcggcgccggcggctacgccttccacgagcaccacgagaagaagaaggaccacaagagcgccgaggagtccaccggcgagaagaagcaccacctcttcggctgatcgacctcatcac

SEQ ID NO: 414153 - DNA, 503 bp, Oryza sativa
  unsure (1)..(503): unsure at all n locations
cttatcgataccagcagcagctcagccgccgccgatggcgtgcacgattatggccccaacctcccgcgtcctcgccggcaagacccccttcctcggacatccccgtccctgcaatgcccccctccgagacatagccgccgccggcaccggccgnatcaccatgagcaaggagctgtggtacggccctgacagggtgaagaacctgaggccattctcggcgcagacgccgtcgtacctgaggggcgagttcccgggcgactactggtgggacacggcggggctctccgcggaccgcgaggcagccgcgaggaacagggccctggaggtgatccacggccggtgggcgatgctcggcgcgctgggctgcatcacgccggaggtgctcgagacgtgggcgcgcgtcgacttcaaggagcccgtgcggttcaaggccagcgcccagatcttctgcgacggcagactagactacctcggcaaccgcaacctggtgcacgcccagagca

SEQ ID NO: 414154 - DNA, 556 bp, Oryza sativa
acgatgcgtcgcttcccctttccccccctcctccgccgggcgctttcatcccccacccactccactgtccccgctctccccccattgccgccgccgcctgcgacggccgcgagctcatcccgagacgacgtctctagctagcatcgagcgttctttctctcctcgggctctcgttggtgagataaggcaaatcaagagagcaaaattttggtggtacatgtggtgattctatgtcgacaaggcgtcatcttgcagtatttaccactgcaagcctcccatggatgacaggaacggccatcaacccgttgttccgggcggcctatcttgcaaaggatggggatagggaggccaccttggtaatcccctggctttctctgagggaccaagaattggtttacccgaataagattgtgttcggttcgcctttggagcatgaggcctatgttcgccgctggattgaggagaggatcagtttcagaccttccttcagcatcaaattctaccctgcgaagttctctaaagaactgagaagtattctacctgttggagatatcac

SEQ ID NO: 414155 - DNA, 532 bp, Oryza sativa
acctccatacctccccctcctcccctctacctccggcgcgcgagatccagggagagggcgaggcagagaccatggcggggacggtgacggtgccgccggcgccggtgccggcgacgccgctgctcaaggacgagctggacatcgtgagcccgacgatccgcaacctggactacctggagatgtggcggcccttcttccagccctaccacctcatcatcgagcaggacggcgacccgaccaagaccatccgcgtccccgagggcttcgactacgagctctacaaccgcaacgacatcaaccggatcctcggccccaaggcctcctgcatctccttcaaggactccgcatgccgctgctacggctacatgggctccaagaagaagtacgtcttcaccatcgacgacgactgcttcgatgccaaggacccatctggcaaggacatcaatgctctcgagcagcacatcaagaaccctctcagcccgtccacccccgtcttctcaacaccttggatgatccctaccgcgaaggcgct

SEQ ID NO: 414156 - DNA, 527 bp, Oryza sativa
caagtggctttcagacaagcccctgcgtcttccccttcaggacgtgtacaagatcggtggtattggcaccgtgcctgtgggtcgtgttgagactggagtcctcaagcctggtatggtggtgacctttggtcccagcggcctgaccactgaggtcaagtcggttgagatgcaccacgaggctctccaggaggctcttcctggtgacaacgtcgggttcaacgtgaagaacgtcgcggtgaaggatctgaagcgtgggtacgtggcctccaactccaaggatgaccctgccaaggaggctgccagcttcacctcccaggtgatcatcatgaaccaccctggccagatcggcaacggctacgccccagtgctggactgccacacctcccacattgccgtcaagtttgctgagctggtgaccaagatcgacagacgatctggtaaggagctggagaaggagcccaagttcctcaagaacggtgatgctggtatggttaagatgattcccaccaagcccatggttgtggaga

SEQ ID NO: 414157 - DNA, 130 bp, Oryza sativa
  unsure (1)..(130): unsure at all n locations
cagcaaattaaccccaccattgcttgcaaagctggncgtgtcacttcttctgttaagctctcccgcggtgcgcgagagcaagctaagctaggtcgggcatggggaaggacgaggtgatggagagcggcgg

SEQ ID NO: 414158 - DNA, 507 bp, Oryza sativa
atgagagcatacagttttgcaattcagctcagaatggcatatgtaccaagcttgggggggagtatcaagcaatgcacagcaaaatgggaagatatgaacaatcatggccaacgaggggctaacaacagtttagcacagtacaaaaagtaaacacacataacaggaatatgcaatgcaatggaaccggagtatactgacaaaccaatcattaaccagagaactacttattaaccagctactaatagtcttctccatcgtcgttctcgtcgtctgcaccctcggcaccgacttcctcatagtccttctcaagggcagccaagtcctcacgggcttctgagaattcaccttcttccattccctcaccaacgtaccagtgcacaaacgcacgcttagcatacatcaagtcgaacttgtggtcgatgcgcgagaaaacctcagcaacagcagtgttgtttgtgttatgcacactgcacgctgaccttagccaggtcaccacagggacaacag

SEQ ID NO: 414159 - DNA, 533 bp, Oryza sativa
  unsure (1)..(533): unsure at all n locations
tgagtagatgagagagancatcagcacccacatcgggcagtccttgatccaggtcggcaacgcgtgctgggagctctactgcctcgagcacggcatcgagcccgatggcaccatgcccagtgatacaacggttggcgtcgcacatgatgcgttcaacactttcttcagcgagacaggcgctggcaagcatgtgcccagggccatctttgtcgacctggagcccactgtcatcgacgaggtgcgcactgggtcgtaccgtcagctcttccaccctgagcagctcatctctgggaaggaggatgccgctaacaactttgcccgtggccattacactgttggaaaggagatcgtagatctatgcctggaccgtgtgcgcaagttggcagacaactgcactgggctgcagggattcttggtgttcaatgctgttggtggtggaactggatcaggacttggttctcttctgttggagcgtctctctgttgattatggaaagaagtncaagcttggcttcacaatttacccttccccca

SEQ ID NO: 414160 - DNA, 543 bp, Oryza sativa
ccctcactacacacgcagaaatccgcatcaacagccagccatggtgttcacgctgaccaacgttggcctgtctaccccggcggcggcggcgtcgtccctcgttaggccggtcaccggagctggacgcgtggtgtttccccgtgttggccgcggcgggttcgcggcggtgagggcgagcgggccggcgacgccgccggacatctcggacaagatgtcggagagcatcgacaaggcgaaggaggcgtgcgcggaggacacggcgagcggcgagtgcgcggcggcgtgggacgaggtggaggagctgagcgcggcggcgagccacgcgcgcgacaagctcaaggagacctccgacccgctcgaggcctactgcaaggacaacccggagaccgacgagtgccgcacctacgacaactgattcttaccattatatgtttgctaatctctctgtaattaattataagttactgcgttgaaaagattatttgtcgtagaagacagaggggagtttggtggaatggtgtatttaccgatagttcaaggggg

SEQ ID NO: 414161 - DNA, 448 bp, Oryza sativa
tcgcgatctagactaggggccgccgcctcctcctgctctcgccttctcccgtcttctccttcgagttagctacctccttattcaaccatgggtaaggagaagacgcacatcaacatcgtggtcattggccacgtcgactccggcaagtcgaccaccacgggccatctgatttacaagcttggaggtatcgacaagcgtgtgatcgagaggttcgagaaggaagccgctgagatgaacaagaggtccttcaagtacgcgtgggtgctcgacaagctcaaggccgagcgtgagagaggtatcaccatcgatattgccctgtggaagttcgagaccaccaagtactactgcactgtcatcgatgcccctggtcaccgtgacttcatcaagaacatgatcacgggtaccttccaggctgactgtgccgtgctaacattgactccaccactgg

SEQ ID NO: 414162 - DNA, 540 bp, Oryza sativa
  unsure (1)..(540): unsure at all n locations
tgaatagctgagtgtttctgagtacttggcattcaaggaacagtttgttgatggacacaccaacagcaactttgttcttgagcttgattttgagcccttcaatgcctccttcccgcgcccgtccatgtccaagtccatcggaaatggggtgcagttccttaaccgtcacctgtcgtccaagttgttccaggacaaggagagcctctaccccttgctgaacttcctgaaagcccataaccacaagggcacgacaatgatgctgaatgacagaattcagagccttcgtgggctccaatcatcccttagaaaggcagaagaatatctgatgggcattcctcaagacacgccctactcggagttcaaccacaggttccaagagctcggtttggagaagggttggggtgactgcgcaaagcgtgtgcttgacaccatccacttgcttcttgaccttcttgaggcccctgatccggccaactttgagaagttccttggaactattccaatgatgttcaatgttgntatcctgtctccgcatggata

SEQ ID NO: 414163 - DNA, 531 bp, Oryza sativa
  unsure (1)..(531): unsure at all n locations
ttagatactgatgttcaccattgntgntgnngcatgtatactaacttagatgaactatctaaacaaggctcttgacacattcaatactgcagttgtttcgcctatatattatacaatgtttacatcactaaccattttggctagtgtgataatgttcaaggactgggatcgtcaaaatccaactcaaattgtgacagagatgtgtggttttgttaccatcctttctgggacgtttcttcttcacaagacgaaagatatggtcgatggactcccaccaactctacctatccgaataccgaaacatgatgaagatggctatgcggctgaaggcatccccctcaggtctgctgctgaaggcctccctcttaggtcaccaagagcagcagaatgattttgaccagcgaactgcaagcaatcccagccattctttcattccatacaaattgtagatgtactttaggtcttataaggtaaaagctcggctcccctgtaatttttgagacatcggtacagattggngatagatacccc

SEQ ID NO: 414164 - DNA, 436 bp, Oryza sativa
ggaaaagggagaatcttagcacggtagaactcatcatcgatcatcatggccattgcttcatcaacgccttccagccattatcccccaacaatggcttctcgaaccccttgatatcacgcgttgctcctgaaggagccgagggccttgatggcgccggcccggaggatgtactggtggtagaacgccgcgatggcggcgccgacgaacgggccgacccagaagatccaatggttgtgccacgccttctcgttgttgaagatgacggccgctccgatgctcctggccgggttgatgccggtgccggtgatcgggatcgtcgccaggtggaccatgaacacggcgaagccgattggcagcggcgccaagaccgggacatgtgagtcgcgggcgttgcgcttggggtcggtggcggagaagacggggtagaccagcacga

SEQ ID NO: 414165 - DNA, 445 bp, Oryza sativa
gctctgacctgataaaatatcttgccaacaatgtaatatcatggcagaatgcttacataaacataactaggcagatatgacgctcggatcgtcactagaattgacttgtttagctaaaacaggcatatcaaaacgcagtacatcacagcagagaaaacagatgcgcccagagtatcttcacgcgctcagaagttctgtaatgcaaaatctcagttggtctggttgttgactcagctaaggacagggaatatgcgagttacatgctcgaacggaacagtttcagctgtgttcttcttgagctcagggtgattgaactcgttgcgtggaaggacaatcagctgagatcgtgcacccttctcgatcacccaaccggagtttgcaatatggtgctccaggaacttgtccaatgcaagaccctcaatgttgatggccttcgcagaacagg

SEQ ID NO: 414166 - DNA, 491 bp, Oryza sativa
gaggtgcctgaagacgcaaccaagggtagggatgttttgaatgtataacccccaccggacgagcttttggctgtatcagatttagggaagactgctacaacatcactccctgataatttggtgatgcatacttctatgggtgatattcacttgagattatatccagaagagtgtccaaaaactgtggagaatttcactacccattgccggaatggttattatgataatctcatatttcatcgtgtgattaaaggctttatgattcagactggagaccctttgggggatggcactggtgggcaatcaatctggggaagggagttcgaagatgaatttcacaaaagcttgagacatgataggccttttactctttcaatggccaatgctggaccaaataccaatgggtcccaattctttatcacaactgtggcaactccatggctagacaacaaacacacagtgtttggtagagctgtgaaaagggaggatgt

SEQ ID NO: 414167 - DNA, 323 bp, Oryza sativa
  unsure (1)..(323): unsure at all n locations
gaccgtcgtcgtcgtggtcttcaccttcgtcttctgcgccggcacggccgccggcgccagcttcttggccgcctcccggagcaagttcttctcgaccttgccgttgccgttcctcgggatggcgtcgtagacgaccaccttcttgggcaccatgaaccgcgccatgtgcttgcggcagaacgcgacgacgtcgttctcgcacaccccggccgncttggtccttgccacgacgaacgcgcacggcgtcttgccccagtgcgggtgcggcatggcgaccacccgcccgttggcgacggcggggtgcttgaacagcaacttcttca

SEQ ID NO: 414168 - DNA, 432 bp, Oryza sativa
gccgcggcatgaccgagccatcgggcgccttggtgacacccacctgtgctgtgcccggggtgttaacatcctgctcggggcgggaggcggcgggaagcagctcgcggcccggccacgtgctcaccggcggtgcgccaccggcggccgccctcctcgagcgcgtcgagcggatcggcttccgcgtgacgcacgcgtacgggctcaccgaggccaccggcccggcgctggcgtgcgagtggcgcgcgcagtgggaccgcctgccgctgccggagcgcgcgcggctcaagtaccggcagggcgtcagcgtcctgtccctcgacgacgccgacgtcaaggacgccaagacgatggcgagagtgccgcgcgacggcaagaccgtcggcgagatcgtgctcccggggagcagcattatgaagggctacctcaacaacc

SEQ ID NO: 414169 - DNA, 435 bp, Oryza sativa
ggccctcatcctccccctctttaccttttcctcctcggttcgtgtttcgaggttcgcctagggttcagcgggccgagatggcggcgccggatgtcgagtaccgctgcttcgtcggcggcctcgcctgggccaccgacgaccgctccctcgaggccgccttctccacctacggcgagatcctcgactccaagatcatcaacgatagggagacggggaggtcacgtgggtttggcttcgtcaccttctcctccgagcagtcgatgcgcgacgccatcgagggcatgaacggcaaggagctcgacggccgcaacatcaccgtcaatgaggcccagtcccgccgctccggcggcggaggcgggggctacggcggcggcggtggcggctaccgcggcggtcgtggaggccgcggctaccgaggaggtggcggcggcggct

SEQ ID NO: 414170 - DNA, 340 bp, Oryza sativa
ggggataaaacagattacttcgattgcaattttagaataaccagcagttacattgcaaccatggaaactaagaatctaagactacgacatgacaaagcgacgatctaataataacaccaactggtagaacatgacaagtccctatgaatcaagcaagaaccaaaggtgggctgatggcctaagcgcgctcgccgcggatccggcgcgcgagctggatgtccttgggcatgatggtgacgcgcttggcgtggatggcgcacaggttggtgtccttgaacagcctgactaggtacgcctccggggccttcttgcagggctggtgactgcggagttttggaag

SEQ ID NO: 414171 - DNA, 293 bp, Oryza sativa
agaagagggcccaaaaaccgtggagaagggcactacccaatgccggaacggggagtatgaaaaccccaaatgtcaacgggggagcaaagggctgatgaagcagaccggagacccagagggggatggcacaggggggcaaacaaaccggggaagggagcccgaagatgaaccccacaaaagcccgagacaagacaggcccaggactcgggcaagggccaagggtggaccaaaaaccaaaggggcccaagggcggaacacaaccggggcaactccaaggccagacaacaacacac

SEQ ID NO: 414172 - DNA, 487 bp, Oryza sativa
atcacaccacaaatatggcttcttccaagatgacgctgtttttcgacctcctcctcctcgccgcggcctcgccggcggcgctgggcgccttcgacgtgaaccagatgctcggcgacaagtcccagtacgggtcgttcctgaagttgctgacgcagacgaaggtcgcggaggagacgaaccggctcaagtcggcgtcgctgctggtcctccaagacaaggccatgaagccgatcacgtcgctccccgccgacaagcagcggatggccatggacaaccacgtgctcctcaagtacttcgaccccatccagctgggcgagatgaaggaccgcaccgccatgctccccacgctgctgtccaacaccgacaagaagctcggcgtcgtcaactacaccaaggccagcgacgggcagatgtacctgggcgcccccggcgcggcctgcgtcgccagctcgacaggtcgtggacggcgccctacgccattgcatat

SEQ ID NO: 414173 - DNA, 472 bp, Oryza sativa
  unsure (1)..(472): unsure at all n locations
tccttggacagacaagaanggactggcatgcttcttgacttcttttggccatcaaaacattccagactgtctaagcggcaatgggccctttgcttatggaatctacaaaggggctgtgcctgttattaccagcaattcactggctgttaaaatactctaccctatattttggggactcatgactctcagtacttttggtaatgatcttgagcctacaagcaattggcttgaggtgattttcagcataatcaatgtacttagcgggttgatgctcttcacattgctgattggaaacatacaggtcttcttgcatgctgtcttagcaagaaagcgaaagatgcagctgcggctccgggacatggaatggtggatgcggcggaggcagttgccgtcccgcctgaggcagagggtccggaagtacgagcgtgaacgctgggcggccatcacgggagatgaggagatggagatgatc

SEQ ID NO: 414174 - DNA, 376 bp, Oryza sativa
aaatacttaatagtaatagactctttgatggagtattacaacatgcagcagtggcattaatacgccagtacattaattaagttacacatatgcaggctccattttggtttcttttaatttatcgtattacagaatttctgtagccttgcagatgatcacttggatatcatgtactagtaattaacaataggatgcatacaaaagatggcccaacgacaacagaagatgcgtgcatctgacattggctggccttatttgttggtagtactccaattaattaacaagagatgatgcattcttgggccttagtttcttcacatgcttggctttacgttgagcctattcgcaatttttacccccaacgacttatcacact

SEQ ID NO: 414175 - DNA, 471 bp, Oryza sativa
ttgactccacgcgcccctcaagaaacagacccctctcactcccactaccagggatccttgcaagatccggtcgttgagctcgatcgacacgaagacgacgacgacgaacgcgggagctccggtgtggaacgacaacgaggcgctgacagtggggcccagggggccgatcctcctcgaggactaccacctgatcgagaaggtggcgcacttggcccgggagcgcatcccggagcgcgtggaccacgcccgcggcgcctccgccaagggcttcttcgagtgcacccacgacgtcaccgacatcacctgcgccgacttcctccggtccccgggcgcccagacccccgtcatcgtgcgcttctccaccgtgatccacgagcgcggcagcccggagacgatccgcgacccgcgcgggttcgccgtcaagatctacacccgcgagggcaactgggacctcctcggcaacaacttccc

SEQ ID NO: 414176 - DNA, 351 bp, Oryza sativa
agacagatgctactaatattacttgcatatacatatattcttcttctaactagggaggagggaggggggcaggttaaaaatcacaatgctgagcagcggggaaacaaaacaccataatgggacagagcaaaagcctccgaaagggagcttttaggcagaaggcttttcccacttggggggcttcaccacctcccaggggaagtctgggtcgtcccttccgaagggaccgtaagccgccgttttgagggagcgtccgttgccgccttttttgagggcaagggtgatgatgatcatgccaggcctgaaagcgaagttctccttcacaatcttgaggatctccttggcagggat

SEQ ID NO: 414177 - DNA, 506 bp, Oryza sativa
ggccaacatgccgtaacatcggttttgtgtcagctgatgtcggtctcgatgctgaccactgcaaggcgcttgtgaacatcgagcagcagtcccctgacattgcacagggtgtgcacggccacttcaccaagcgccctgaggagattggtgctggtgaccagggacacatgtttggatatgcaactgatgagacccctgagttgatgcccctcagccatgtccttgctaccaagcttggcgctcgtcttacggaggttcgcaagaatgggacctgcgcatggctcaggcctgacgggaagacccaagtgactgttgagtaccgcaatgagagcggtgccagggtccctgtccgtgtccacaccgtgctcatctgtacccagcatgatgagacagtcaccaacgatgagattgctgctgacctgaaggagcatgtcatcaagcctgtcattcccgagcagtaccttgatgagaagacaatcttgcatcttaacccatctggtcgcttc

SEQ ID NO: 414178 - DNA, 452 bp, Oryza sativa
attattattatttcaatgactgttttgattaacaaatgaaattttggtacatgtacactgcccaaatacaacactctttacaagatatctatctatatgtacacgttatttacaatatgtacatggcactgcttacggaaggctcaccaaaacgggcaccacccgacgtagttttggcacaagttttcatgcgaagtcgcttgaagtataagcctctgaacctgaaccttcacggataaaccaggttccacctctcgagtgtctcctgaagccagatgctcgttaccatgttgggtggagcttcccgcccccgacaacgatgatccggaagagaaatcgcgccctgtgagcttatgactcattcgtgccatcacagctacggcacgctcattcaaaacctcgttagcatcaccgagttgattgaccgccttgagcagttctctctcccgagc

SEQ ID NO: 414179 - DNA, 505 bp, Oryza sativa
  unsure (1)..(505): unsure at all n locations
gtgataacataagaatgctagggggcagcaaggctcatatccaattaagttgttctacacttcaaacatgcccatcattctgcactctgcactgattaccaacctctacttcatatcacagcttctctacaggaggtacagtggaaattttctggttaaccttcttgggaaatggaaggaatctgagtactctggccattcggttcctgttggtggtctcgcttactatgtaactgctccatcaagtttggctgatgttcttgcaaatccgttccatgcgttgttctatgtggtcttcatgctgtcagcttgtgctctcttctcaaagacatggattgaagtatctggctcatctgcaaaggatgttgctaaacagctgaaggaacagcaaatggtgatgcctggccatcgtgagtcaaacttgcagaaggaattgaacagatacatccccactgccgctgcatttggtggagtgtgcattggtgcatngactgttctagctgat

SEQ ID NO: 414180 - DNA, 417 bp, Oryza sativa
tttttggtttttttttttttttttttttttttctgaattctgcctacttatatttaggttagccaaattaaaacagacaggttttgagatcacagtagcaatatttattgagcatgcactaaaatatatacctacacgcttgggggagataaacccgagctgaaaagctaagggctttccgacttgtccgatcaccatggggggcattatgccgcctttgcgaagccaaccttcaggttgccatagtcaaacacggtatggtaggctcccataaagacatttcccaagatccagagaggaccacgagggggaggaatgtccatagctgggaatccactgatgcactgggtagcagttccctcaccaacctttaggatgtattgttttggtttgagaacaaacttgttgccaccgatt

SEQ ID NO: 414181 - DNA, 539 bp, Oryza sativa
gaccggccggaattcccgttctactccatgcgccggcctcggaggcttcgcactcgccttcggcctttaacgctcagtttcccaaagcctcttgttgattccgcgaacaagcccatgattctgcatcagattgaggccttgaaagaagttggagtaacagaagttgttttagccatcaactaccgcccggaggtaatgctcaatttcctgaaggactttgaggataagcttggcatcacaatcacgtgttcccaagagactgagcccttgggaactgctggccctcttgctctagcaagggacaagcttgtggatggatctggtgagccattctttgtcctcaacagtgacgtcataagtgaatacccttttgctgagctcataaaatttcacaagaacccatggtggtgaggcaacaattatggtcaccaaggtggacgaaccatcaaaatatggtgttgtggttatggaggaggccactggaatggtggaaaaatttgttgagaaaccaaaaatatttgtaggcaacaagatcaatg

SEQ ID NO: 414182 - DNA, 488 bp, Oryza sativa
gtcataccacagaactcactcgccgccgcctccgccgcgccaagttctcctctcctccttctggatggcccgcacgaagcagacggcgcgcaagtccaccggcgggaagggcgccgaggaagcagctggcgaccaaggcggcgcgcaagtcggcgccggccaccggcggcgtgaagaagccgcaccgcttcaggccgggcaccgtcgcgctccgtgagatccgcaagtaccagaagagcacggagctgctcatccgcaagctccccttccagcgcctcgtccgcgagatcgcccaggacttcaagaccgacctccgcttccagagctccgccgtcgccgccctgcaggaggccgcggaggcgtacctcgtcgggctgttcgaggacaccaacctgtgcgccatccacgccaagcgcgtcaccatcatgcccaaggacatccagctcgcgcgccggatccgcggcgagcgcgcttaggccatcagccca

SEQ ID NO: 414183 - DNA, 328 bp, Oryza sativa
aatctccaaattcaagtatcaagtgtagtatatcatcatcatgcaagtacagtgttacatagattaatcacaatgcagtttgattaagcagtgggcatcatcacatcgtattccgaggaaggctatcttagattacagatgaatatgcagacacccagcttggtgttacatacatagactggatttgggtgaaatttagccgccgagggccctggtgttgtacaccaggagggcgccgccctcgaggagcccggggagggtcacggcccagatcagaagcccggtggttccaccaacgtaggtgtcccccggcgggagacccttcctt

SEQ ID NO: 414184 - DNA, 505 bp, Oryza sativa
tcggtaagaaacatctagagtgaataagaaagatggggttcgttcgagccctgttcctgctggctacggtgtgcgtggcggcgcacgcgaaggactaccccaaggaggagggcgcgaaggcggaggggccggccgccgcctcggggggcggcggcggcggcagcacccacgacgtggtgaagctgggcggcaagggcgacggcaagacggacagcaccaaggcggtcaacgaggcgtggacggcggcgtgcgctggcaccggcaagcagacgatcgtcgtccccaagggcgacttcttgacgggtcccctcaacttcaccgggccatgcaagggcgacatcgtcattcagctcgacggaaacctgctcagctccaccgacctcgccttattcaagtcgaactggatcgagatcatgcgcctcgaaagcctcgaaatcagcgggaagggcaagctcgacggccagggcgccgccgtctggagcaagaactcctgcgccagaaatac

SEQ ID NO: 414185 - DNA, 347 bp, Oryza sativa
tttttgtttttttttttttttacaatcaaatatggttcactgacttctcattgagaagcagttatcagaatgggagtaacatacatgctatgtcaacatcttggaaggatcacaattataaagtatttatactgcattaaaagaacttgagtatcccataacataaaaaggattatttcacatgacaatctcagggttcaggatgcttgatttgccctttttgtgcgggagaataacaccgccgctggtttagaccctattacctacatgaacgtcctttcctaggatagtcatattttttattcgtgcccattgtccaacacgtgagtgccatccaataatgctgt

SEQ ID NO: 414186 - DNA, 462 bp, Oryza sativa
  unsure (1)..(462): unsure at all n locations
ctcaagccgcgcgagagcaacacaagcaagcgggcggtagggtaccccgagacggcgagcgcccccgcggcggagagctacacgatggagngagctcgcgcccgggacccccacaaccccgacagcctcaacgacctcgagggctgcggcaacgagcaggagtccaaccaaacagataacttggatgcaaatcttaggctgcttcgactggaccaggtcgaaccagaaagngagagtgtgcagattgtatctcgcatactgattaaggctctcatggcaatgccaggcccggacttcagcctatgcttattcttaattccagagcatgtgcaaatggaggaacagttcaagacgttgatagttctctctcactacctggagactgctaggttccgtcaattttgggatgaggcgtcgaagaaccgcaacatattggatgttggcccaggttttgagcaggca

SEQ ID NO: 414187 - DNA, 528 bp, Oryza sativa
ggcccatgcacacccggctgccactactcctgctactcggcggcgtggtggacgccgcggggccactgctccccaccggccaaatatgcggcgactggtactcctgcacctgccccaacgtcgagaaggtcgtctccaccgtcatcgagcgcaagttcaaggaggaccctaccacctgcggcctcctcctccgactcctcttccacgactgcttcgccaatggatgcgacgcgtcgatcttgatcgacccgctgtcgaaccagagcgcggagaaggaggcggtgccgaacatctcggtgaagggctacgacatcatcgacgagatcaagacggagctggagaaggagtgcccgcaggtggtgtcgagcgcggacatcgaggcgctcagcacgcgcgacagcgtgcgcctcgccgggggccccaactacgacgtgcccaccggccgccgagactcgctcgtgtccaaccgcgaggaaggcgactcgctccccgcccggacatcgccgtcccgagctcatggcgcagtct

SEQ ID NO: 414188 - DNA, 392 bp, Oryza sativa
tggcgtagagggagaggacggcctggatggcgacgtacatggcgggggcgttgaaggtctcgaacatgatctgggtcatcttctcgcggttggccttggggttgaggggggccttcgtcagcagcaccgggtgctcctcgggggcaacgcggagctcgttgtagaaggtgtggtgccatatcttctccatgtcgccccagttgctgaccatgccgtgctcgatggggtacttgagcgtcaggatgcctctcttcgactgcgcctcgttcccgacctacgcgatcttttgccccattcccaccattacccccgtgtgccgaggtctccccacgaatgctcgggaacaccgcccgtggtgcgttgtcccccgtaacccggcctttaccatcccc

SEQ ID NO: 414189 - DNA, 498 bp, Oryza sativa
cccctcagtccaaagagagcgccatttgacctctttgacacttggaagaagcaaaacaacatcaagctgtacgtacgccgggtgtttatcatggacaactgtggggggttgatcccagagtggctcagctttgtcaagggcattgttgattctgaagaccttcccctcaacatctcacgtgagatgctccagcagaacaagatcctgaaggtgatccgcaagaaccttgtgaagaagtgcgtggagctcttctttgagatcgctgagaacaaggaagactacaacaagttctacgaggccttctccaagaatctcaagcttggcatccatgaggactccaccaacaggaccaagattgctgagctcctgaggtatcactccaccaagagtggtgatgagttgaccagcctcaaggactacgtaacccggatgaaggagggccagagtgagatctattacatcactggtgagagcaagaggctgttgagaactccccct

SEQ ID NO: 414190 - DNA, 298 bp, Oryza sativa
ccattcaagctaagaacaaagtggagataacgctgaacaaagagccactttttatgggattttccgcattagtaaaaccgacttcgggttcagtcacctcgcctcttaaatctaaaaccgccactgtttgagcaaaaccctcgaaatggtcaggcgctaagacacggcaaatacccattcattcttgcattcaaaaatggcgaagagcccagagtcagataaagctttttagcacttgggttccacgcaaatgggggccgaatgacaaccatggcgcttagacgacctcctccatctt

SEQ ID NO: 414191 - DNA, 376 bp, Oryza sativa
agaagtccaaactcaagcatcaggtgataataagtctttagttaacagaaagtacgagtagcccaagtggtatgattgccaactgggatttgaaaacaaaaggtgtatgatcaatatttttctcatcacatatacgaaggtgtattgatttagtcgacctcctcaatcttagggccagcaccactcccaccagcagccggagcatcatcgtccattccaccacccatgtcggcaccagcaccctggtacatcttggcaataattgggttgcacaggccctccagctccttcatcttgtcttcgaactcttcaacctcagcgagctggttgttgtccagccactggatcgcctgctcgaccgcgtcctcaatttttt

SEQ ID NO: 414192 - DNA, 530 bp, Oryza sativa
tgtttattctcgcgtccgcgcatcattacctcttcaggaaatgtatggagcctgtggagaagtgcctgagggatgcaaagatggacaagagcactgtccatgatgttgtccttgttggtggttcaactagaatccctagggttcagcagcttctgcaggatttcttcaatgggaaggaactctgcaagagcattaaccctgatgaagctgtggcatacggtgctgccgtccaggctgctatccttagtggagaggggaacgagaaggtgcaggatcttcttctccttgatgtgactccactgtctcttggtctcgagacagcgggaggtgtgatgacagtgctcatcccaaggaacaccaccattcctaccaagaaggagcaggtcttctccacctactccgataaccagcctggtgtgttgattcaggtctatgagggtgagaggacacggaccagggacaacaatctccttggcaaatttgagctgtctggaatccctcctgcccctaggggagtccctcagatcact

SEQ ID NO: 414193 - DNA, 400 bp, Oryza sativa
gtcaaaaaggattccaatgagcctttatgtaaatggttgatttctattaggtaaccgttcagcaaactgtcggcttgggcagcatagagttcagtaaaggggtcaggcgcttgggacccgagtatctgacatggcatacatggaaagaaaaggtgctgcttcttgtcttaacatgaatagtagaaggtatatatccccgaagtactggttttagaccatgtatgttaacatatgtcgtactattgatgagaaactgttcagtgaatcatgtaccctctgcagctgatcagctggagatcacttcctcaagctctaaatgatgaaggcgccgtagaggtccattgagtacttgattgcgttgatggcatcttttgctgggagaagctcattgacagcaact

SEQ ID NO: 414194 - DNA, 540 bp, Oryza sativa
tgtttattctcgcgcccgctctctcatctccgcctccgctctcgcgagaactcctgagcgtttcgctccgccatggctggagacgctgatggaaaagccccactgggatcaagatacccccctgctgctctcaacgagcgcatcctttcttccatgtctcaaaaacatgttgctgctcatccatggcacgatctggagataggtccaggagctccagcagttttcaactgtgtggttgaaattcctagaggcagcaaggttaagtatgagttggataaggcaactggtctaattaaggttgatcgtgttctttactcatctgttgtttacccacacaactatggtttcattccacgcacactttgtgaggacggtgaccccatggacgtcctcgtcctgatgcaggaacaagttgtccctggatgtttcctgcgagctcgtgctattgggctcatgcctatgattgatcagggtgagaaagatgacaagatcatagctgtttgtgctgatgaccctgaatacccgcacttcagggacatc

SEQ ID NO: 414195 - DNA, 182 bp, Oryza sativa
ggatcaaagatagatgtactactacgattgaaagagatgggggcaacagagaaaaaaaaaggcccattcaagctaagaacaaagtggagataatgcagaacaaagagttactataaaagggctaatgcagaataagaaaatacagattctggattaattaactatgcatttttaaaattaaa

SEQ ID NO: 414196 - DNA, 423 bp, Oryza sativa
catcaaagctgccaagaagcagcagcagcccgctgccaatgccatcgggagaaacacctatgcctaccagcaggtaaaaatggacggggcaccctacctgcgcaaggaggacctgaagatgtacaacagctacaaggacctctccctagctctagagaagacgttcggcaccttcaccgaaactgggaacactatgaatgaggtgaagggctctgaagctgtgacaacttatgaagacaaggatggagactggatgctggatggagatgtcccagggccaatggtcggagaggcatgcaaacgcttgaggatcatgaatggttgcgaagccattgagcttgcaccaagagcagaggacaagtacaagaacaagagctgaaaatgaagcaggattaagatgctgagcatggcgccataagaatg

SEQ ID NO: 414197 - DNA, 463 bp, Oryza sativa
  unsure (1)..(463): unsure at all n locations
tttgattccacgcgcccgatcagtggactagnggagtgacgagagcncgtcggttttgcttggctaaaatcgccgatagaaacttgaggaatcgagcagctcgccgcgcagccatgggtacgcgacgcgaagggctcctcctcctcctcctcctcgccgccgtactgctccagcccctcctcgcggcggcggcggcggagggcgtggtccgcatcgcgctgaagaagcggcaggtcgacgagaccggccgcgtcgggggccacctcgccggggaggatgcccagcggatcctcgcgcggagccacggcttactcaccaacgacggcgccagggccgcctcgaggaaggcgagggctgaggccgagggcgacatcgtggcgctgaagaactacctcaacgcgcagtactacggcgagatcgccatcggcacgccgccgcagatggtcaccgacatcttcacacc

SEQ ID NO: 414198 - DNA, 428 bp, Oryza sativa
tgactctcagcgtgccaaagccgctcgtcgatttcgggaacaagcccatgatcctgcatcagatcgaagctctgaaagaagttggagttacagaagttgttctggccatcaattaccagcccgaggtcatgcttaactttctcaaggacttcgagagcaagcttggtatcaagatcacctgctcgcaggagacagagccactcggaaccgccgggccgctggccctggcacgcgacaagctcgctgacggctccggcgaccctttcttcgtcctcaacagcgacgtgatcagcgagtacccattcgccgagctcatccagttccacaagtcccatggcggcgaggccacgatcatggtcaccaaggttgacgagccttccaagtacggcgtggtggtcatggaggatgagaccgacaaggtggagcgc

SEQ ID NO: 414199 - DNA, 416 bp, Oryza sativa
cagagaacaaggtctgttgatatataattattctgtttttatttgaatacacataaacgatcaaactgtgaaacggtacaggatctgagataattaggaaactacagagcagcagctacaatattaaccatagcagctgcaggataaacacggtgctaaataggcaggctttgttcttctttcacagcctggatatctggaaggggaccatgacttcagtcatctcctccctcatgataatcttcccaacctggaaaaggtcggagatgcctagctgcgtcgacagatgccttcggcaatcctttgcagcaacaatgcctgaagaataagctccatgcacggacccagagtgatcgatgcaggcggcctccccagcgaaaaacaggttgcccaccggagcacagaatcttttatac

SEQ ID NO: 414200 - DNA, 351 bp, Oryza sativa
  unsure (1)..(351): unsure at all n locations
tttttgattctcgcgtccgggcctcantcctacctacacaagaaagagaaggaggaggatattttagagggaggcggaaaagaaccccgagctagagaagaagtttgttgtatttgcagctgtcagaaagaaagaaagaaagcagcaggtagagagagagatggcggacgctgatgacatccagcctctggtgtgcgacaacgggacggggatggtgaaggccgggttcgcgggggacgacgcgccgcgggcggtgttcccgagcatcgtggggaggccacggcacacgggggtgatgtgtgggaaggggtgccacgacgaagatctatgacccgctggaggaggacgcct

SEQ ID NO: 414201 - DNA, 453 bp, Oryza sativa
gatgtataaatccagcttgaactgcaactcaaattttatctgtaccaccaccagattaccaatttactgactttaaacaaatatcacacagatggcagcatcgccgtcatacagtcaacatatcacatccatccgacagcactttaacgcaccgaaaccatacaatccagaatgtcgggaagaggcccaggtggcttaacttactaatgtttgtggcacccagcaccatatcatgcacatcttgggaaatagtgttgacccacatagcctccggccattgcccttttaacattagcttcaaacagctttgggttgtcacggaggacagctgctgcttcatggttcaacggatcctcatcgtttggttgcgtaaaaagaaggttaaggccataaataacagtgttgatgttgagaacaggcttccaatcttcacgcaaaatgttcaggcataca

SEQ ID NO: 414202 - DNA, 515 bp, Oryza sativa
gccctaatagacgagacgagggagagaaggagaagagggggttcttcgcgggcgtcgtcgtgttcctccccccctctctctcctctcctctcctctcgatctccatccttccttccatccattcctccccgcacccttcgcattgctctcgtcgtctcgattcggtcgaggatctccaggaaaagaggaggaagcgatatgggttgcttttcatgctgcggagcggatgatgtcggcaagaagaagaagcgcgacgatccttacgtcccgatccctgatccagggggaaactatggacgtagcaagcccgggcccccagccccttcgcgttctccccccaccagcagaaatctgccaattgcagtaccggcaattccccttgatgaaataaagggaataaccaagaacttcagcagtgatgctctcatcggagaaggctcgtacgccagagttttctttggtgtgctgagagatggcaggagatctgcggtgaagaagctcgactccagcaacag

SEQ ID NO: 414203 - DNA, 362 bp, Oryza sativa
aaccaaaacataggaggtttcatttcttcttctcaaaggagggtagcatctttccttctttcaccattacataagcttaagcaataacagataacaaagcctcctgctcctttagggaaaatattcaaacacaatacccttataaggacttattattaggaaaggagcgggcatgggcataaaagggagcggggggcaggttaagaatcacaatgctgagcagcgaggaaacaaaacaccataatgggacagagcaaaagcctcccaaagggagcttttaggcagaaggcttttcccacttgaggggcttcaccacctcccaggggaagtctgggtcgtcccttccgaagtggcccgaagcc

SEQ ID NO: 414204 - DNA, 473 bp, Oryza sativa
gaccgtccggaattcctttcgtcatgcgccgacctccatccacagagagtgcagaccttgcatttgcaagctgtctggattgactttgtctctccggaatttattgctgcattgtctgtggatcagaggaggagattcaagctctttttcctgctactatctacggatgcttggaatgcctctgtcatacttgatgtggtataggcctctgtaccgcgcaatgagaactgatagcgcattcagctttggatggtttttcctttgctacatgcttcacattgccttctgtgtatttgctgccatcgctccaccagttatatttcgtggaaaatcattaactggtatattggctgcaattgacaccttctctgatcatgcaatagtcgggatcttttactttgtcggatttgccttgttttgcttggagacacttgtgagcatttgggttcttcagaaagtatacatgtatttca

SEQ ID NO: 414205 - DNA, 461 bp, Oryza sativa
  unsure (1)..(461): unsure at all n locations
caagggcaaccgcagggctggacaaagtgtctatgtttccttgaggatcacacactgnggagtttgttatgctgatgttgcatggacaaggaatatactcaacaattcgatgtaccctttagtccctgggcatgagatagcaggagttgtaactgaggttggtgcagacgtcaagagcttcaaagtgggtgaccatgtaggtgttggcacatacgtgaattcatgccgggactgtgagaactgcaatagctctctagagaactactgctcacaacatgtcttcactttcaatggtgttgacactgatgggactgtcacaaagggaggatattctactcacatagtagtacatgagaggtattgctttaaaatacctgatggctaccctttggaaaaggcagcacctttactttgtgctggcattacttgatatagtccgatgatgcggcataatatgaacc

SEQ ID NO: 414206 - DNA, 485 bp, Oryza sativa
ggcgctgatgccgctcccccgggacgaggccatcggcggcttcattttcgtctgcaacaacgacaccatggaggaaaacctcaagaggcagctcttcgggcttccatcgagatacagggattcagtgagggcgatcaggccagggctgcccctcttcctctacaactactccacccaccagctccacggcatcttcgaggctgcgagctttggcggaacaaacatcgatccgacggcgtgggaggacaagaagtgccccggcgagtcgcgcttccctgcacaggtgaaggttgcgacgaggaagatctatgacccgctggaggaggacgccttccggccgatcctccaccactacgacggccccaagttcaggctggagctcagcgtcgccgaggcgctctcccttcttgacatctttgcagacaaggatgacgcctgaggctactgcttccctgctgctgcttgctgaaagaaatcaggggact

SEQ ID NO: 414207 - DNA, 495 bp, Oryza sativa
gccctggatctaagtaatttacctcctccacctgctgctccttctcccgagcggatcggccctgctcctcctcctccgccgccgacaccgccgccgcagataggagaagatggccgcacttgataccttcctctttacctcggagtctgtgaacgagggccaccctgacaagctctgcgaccaagtctcagatgctgtgcttgatgcctgcctcgccgaggaccctgacagcaaggtcgcttgtgagacctgcaccaagacaaacatggtcatggtctttggtgagatcaccaccaaggctaacgttgactatgagaagattgtcagggagacatgccgtaacatcggttttgtgtcagctgatgtcggtctcgatgctgaccactgcaaggtgcttgtgaacatcgagcagcagtcccctgacattgcacagggtgtgcacggccacttcaccaagcgccctgaggagattggtgctggtgaccagggacacat

SEQ ID NO: 414208 - DNA, 385 bp, Oryza sativa
aaacgataatgaacataatatccactttattttgattaattgatgttcttgtacaactccattattgaaaatatcttccgaaagaaattagaaactgcacgagcctctgcatcggcaaaattaaatggccgagagcaaatgaccgaaatcaagataagagtccatataaaacggtgtgaattcaggcacttcatagttgatagttcgcttagccggtgttctgcattccagcagcaattcccttcatggtcaggatgagggtgtcctccagccccggcgcatactcactggtcgggttcagcttcaccagctccgcagccggcttagaccagtccatgatctccttggacatgtgggggcgcagcgtgacatggtagtccgggtc

SEQ ID NO: 414209 - DNA, 460 bp, Oryza sativa
tgttttgtttcacgcgtcccatcatgcggaggtcccactcatcttgccatcttgtgtagctaccagacacaatccatggatctctccgggtcactgtccagggtgaagtcattgagcagtcctttggtgaggagcacctttgcttcaggacactgcagcgtttcacggctgccactctggagcatggcatgcatccaccaattgcgccgaaaccagaatggcgtgctctgcttgatgagatggctgtggtggctacaaaggaataccggtccatcgtcttccaggaaccacgctttgtcgagtatttccgccttgcaacaccagagatggagtatggaaggatgaatataggaagcaggccatccaagagaaagccgagtggtggcatcgaatcactccgtgccatcccatggatcttcgcgtggacgcaaactcgcttgcaccttcctgtctggcttgg

SEQ ID NO: 414210 - DNA, 300 bp, Oryza sativa
ctccttgatttctatttcatttcattccgatagatagcaacaagcagttcaaacaccataaccaaagcgaactcaattcatggtaacatcacggacgaagaacacctaacactggatggatggatagagggcttctcgactcgagagagccactggacacgataacgactcgactcgatgataagatgattctgacacggatagctaaggataactggccacgatgggccccaccaatcagttccttcagttcccgccggagtcgccgccgaagccgccgccacggctgccaccgtagcc

SEQ ID NO: 414211 - DNA, 446 bp, Oryza sativa
ggcagtcactccccctctttaccttttcctcctcggttcggttccttggttcgtctagggtttagtggcccgagatggcggcgccggatgtcgagtaccgctgcttcgacagcggcctcgcctgggccaccgacgaccgctccctcgaggccgccttctccacctacggcgagagcctcgactccaagatcatcaacgacagggagacggggaggtcacgtgggtttggcttcgtcaccttctcctccgagcagtcgatgcgcgacgccatcgagggcatgaacggcaaggagctcgacggccgcaacatcaccgtcaatgaggcccagtcccgccgctccggcggcggaggcggcggctacagcggcggcggtggcggctacgcggcggtcgtggaggccgcggctacgaagaagtggcggcggcgggtaccggcgccgtgaggg

SEQ ID NO: 414212 - DNA, 498 bp, Oryza sativa
  unsure (1)..(498): unsure at all n locations
ttttgattcatcgcggccgatccatcatatcatcagcaaccaattcgcaccgatcgatcgatcgttcgatccagcaactagatcaacagtactagctaggaagcatggcccgtgcacagttggtggttggtcgncctggtggcagctctgctcctcgccgccccgcacgccgacgtggccatcacctgcggccaggtcaactccgccgtcgggccctgcctgacctacgcccgcggcggcgccgggccgtcggcggcctgctgcagcggcgtgaggagcctcaaggcggcagcaagcacgaccgcagaccggcgcaccgcctgcaactgcctcaagaacgcggcccgcggcatcaaggggctcaacgccggcaacgccgccagcatcccctccaagtgcggcgtcagcgtcccctacaccatcagcgcttccatcgactgctccagggtgagctgagccatcgatcagagagacggatcatatatatacagcagcgcg

SEQ ID NO: 414213 - DNA, 503 bp, Oryza sativa
  unsure (1)..(503): unsure at all n locations
ttttgatcctcgcgcccgcggctcnatctactctgctctctctcaggctcactctgccaatccttctgggcccgagcgcgttcgcgctttccccccctcgccgccggcgacgagctcgaggcggcggtgcgctcgcctacctccggagggcggagcggggggatggagcccatgagcgtggacggcggcgggggatgcggcggcctggacacgcagatcgagcagctgatgcagtgtcgcccgctcgccgagcaggaggttaaagcactgtgcgagaaggccaaggagatattgatggaggaaagcaatgttcagcctgtcaaaagcccagtaacgatttgtggtgatattcacggacaattccatgatcttgtagaactttttcggatcggtgggaagtgcccagatactaattatttatttatgggggattatgtggatccgtggctattactctgttgagactgttactcttttggtagcgctgaaggtgcgtcacccac

SEQ ID NO: 414214 - DNA, 344 bp, Oryza sativa
ctcacataaataagataaccgatcgctcaaggttgagaatcaaaaaccgaaagaaataggttctttgagcagagtgcagaacataaacaaaaatgcctgttgcaaattgcaagactacaggtaaacttaaatgccataaggagtttgtttggcagcataagatgaaactactgtgataaggctactctctcactcgtcatctccataactcgacatcatcatcagcaccagcctgtgagttgagagcattcaatctttcgacaagactggccttcctctgctcgtaggttagtttcttgaggttgaatctcttgtgggtagccggttccttcttggtcgatttt

SEQ ID NO: 414215 - DNA, 500 bp, Oryza sativa
cacgcgtccgggtcgatcgatcggatcgggagaggacgcgacgcgaggctgtctgcgatgtgagggagagaatgtctgctggcggtgttcgatcgggcggtggcgccgagccctgaaggggctccgcatcccggtgcggcggaggacggcgcggcggtgctcgccgagaggttccgcgacgcgcgccccggcgccgtcaccgtcgccctcggccccggcggcgccaactgcctcgcctactcctgccacggccagagccccctcctccccaggttgttcgcggcgacggacgagatattctgcctgttccaaggcacgatcgagaacatcgcggtgctgaagcagcagtacgggttgcacaacaagggcttcaccgagatcaacatcatcatcgaggcttacaggacattgagagacaggggaccctaccctgcggatcaagtcgtcagagacattaacggcaaatttcgcgttcgtgctctacgaatggttcaacaact

SEQ ID NO: 414216 - DNA, 422 bp, Oryza sativa
aaaaaaacaaagtactagttctcattgatttcattttcatcatcaacaacaacaaaactaattacatcacaacttatagaaccattacgcatgaactcagcagcagtagcagtttatccaggcttccatcagtcactgtgaaagttcagtgttcctcatggcctgaagaaggctgggtgagggcggccggtgccctggaaggaggtgttcttgaggtgctccggtgcgccctcgaacgagtgcttcctcgccagcgagaggatcttcttgtcggcggcgacgaagtatgccatcccagccgccgtgcagatgatcagcgcctgacccgtcgggttgatgttggccttcgcccatggcagcatcctcacgctcgccaacgttgggacggcggatgccaccgtcgccaccgccgcagccttggg

SEQ ID NO: 414217 - DNA, 497 bp, Oryza sativa
  unsure (1)..(497): unsure at all n locations
ctcnaaatgcaagccaactgaacgaactcaagaacagattctaacaattgtagctgattcctctctgcttctcgttgttcttggttggttgttgctgtagaagaagaagaaagaagaagatgtcgacggtgactcgtgcctacttggatcagaagctcgcactcgccaagcgctgctccagagaggcgacgctcgccggagccaaggctgcggcggtggcgacggtggcatccgccgtcccaacgttggcgagcgtgaggatgctgccatgggcgaaggccaacatcaacccgacgggtcaggcgctgatcatctgcacggcggctgggatggcatacttcgtcgccgccgacaagaagatcctctcgctggcgaggaagcactcgttcgagggcgcaccggagcaccttaagaacacctgctttcagggcaccggcccgcctcacccagcctttttaagccatgaggaacactgaactttcacagtgactgatgga

SEQ ID NO: 414218 - DNA, 511 bp, Oryza sativa
ccggggcggaaccgccgggttgatccacgcgggccctcaatcaccaagggccccaaagccaccgcaggagaaagccaagaggccgcccagaagcgaccaccagacggcccgtacgaagcagaccgcccgcaagtgcaccggcgggaaaggccccgaggaagcagctcgccaccaaggcggcgaggaagtctgctccgaccaccggcggcgtgaagaagccccaccgctacaggccggggacggtggcgctccgcgagatccgcaagtaccagaagagtacggagctcctgatccgcaagctccccttccagcgcctcgaccgcgagatcgcgcaggactacaagaccgacctccgcttccagagccatgcggagctcgccctccaggaggccgccgaggcctacctcgacgggctcttcgaggacaccaacctgtgcgccatgcacgccaaggcgcggaccatgatgcccaaggacatccagctcgcccgccgcatccgcggcgagcgcgc

SEQ ID NO: 414219 - DNA, 446 bp, Oryza sativa
  unsure (1)..(446): unsure at all n locations
gcactccaccccccccgacgccgccgagcggagcagcaacagcaggcgagcgacacgggagggcccgccaagacccagaagacccaggcctacttcaagcgttgccaaggcaagatcaagagacggaggcagggcaagactgactacagggccaggaggaggctcaccaaccaagagaagaacaagtacaacacaccgaaggaccgctttggggtgagattaacaaacaaagatatcacagcccaaattgtctatgctaccatagcgggtgatatcgtgatggctgctgcctactcccatgagctgcctcgagatggtcttgaagaagggctcaccaactatgcggcagcatactgcactggctggctgctggctcgccgtgagctcacgctccganggacggaccaggagtacgagggcaacgttgaggccactggggaggacca

SEQ ID NO: 414220 - DNA, 513 bp, Oryza sativa
gccctcggctcaacagaggaggggcgccgatctccatctggctatcagagcaggggaggggaagggaaggtatcctgaaagatgcttaatcttatcaaaataaaggataaaaagaaagagcaggcagcaagtgctgctggaaaggctcctgtgaagaagcaatctgctggagagctccgtcttcacaaagatattagtgagctaaacctacccaagagcacatcaatttcttttcccaatggcaaggatgatctgatgaattttgagatcatcgtccgacctgatgaaggatattacctaggtggcactttcgtctttacttttcaagtctctccctcttatcctcatgaacctccaaaggtgaagtgcaagaccaaggtataccatccaaatattgatttggaaggaaatgtatgcctgaacattttgcgtgaagattggaagcctgttctcaacatcaacactgttatttatggccttaaccttctttttacgcaaccaaacgatgaggat

SEQ ID NO: 414221 - DNA, 502 bp, Oryza sativa
ggcatgatggctcttcactctccccctgttcctgcaggggtcaggcactgcctgctacaagagtggtgcaggtgattcggctagctcagcgcgaagatgggggagatcaccaatgtcacggagtaccaggccatcgcgaagcagaagcttccgaagatgatctacgactactatgcatctggggccgaggacgagtggactctccaggagaacagggaggccttcgccaggatcctgtttcgcccacgcatactgatcgacgtatccaagattgacatggccacaacagtcctggggttcaagatttcaatgcccattatgattgctccctctgccatgcagaagatggctcacccagatggagagtatgcaactgcgcgtgctgcatcagcagcgggcactataatgacattgtcatcatgggctacttcaagcgttgaggaggttgcctcaactggacccaggattcgtttcttccagctttatgtttacaaagacagga

SEQ ID NO: 414222 - DNA, 500 bp, Oryza sativa
  unsure (1)..(500): unsure at all n locations
gaccggtcggatttctttttttatgcgccggacatcaaccactactggnctgacatnggattttttttaattttatcgcgattgtcctggcaaggtggcgttggcggtggggaatggcggtgctgctgctgctcgcggggcggcggcgccgggggcggaggcggcgtgcgacgcgctgcagctgtcgccgtgcgcgagcgcgatcatcgggaacgcgtcgccgtcggcgtcgtgctgcagccggatgaaggagcagcagccgtgcctgtgccagtacgcgcgcgacccaaacctgcagcgctacgtcaactcccccaacggcaagaaggtcttggccgcctgccacgtacccgtgccctgctgctaaaaccaaaccataatactccagttctgcgtgccgtttatacgtgtgtgagtgcgcctgtcgcatggcccacctgccatagacgccgtctatatatggacgtacgtacgtgtctcgcttacttgatttcgtgtct

SEQ ID NO: 414223 - DNA, 340 bp, Oryza sativa
acaactgcatttttggctttatttattcatacatacatacaaacccaatacagagcagtataaccgtacgcaatacacgggacgatcgaacttgtcgaagcagacacgaaatcaagtaagcgagacacgtacgtacgtccatatatagacggggtttatggcaggggggccatgcgacaggcgcacttacacacgtataaacggcacgcagaactggagtattatggtttggttttagcaggaggggacggggacgtggcaggcggccaagacctttttgccgttgggggagttgacgtaacgctgcaggtttggggtgggcgcgtactggcacaggcac

SEQ ID NO: 414224 - DNA, 463 bp, Oryza sativa
ctcagagagacaggggagaaaaccctaatctcaaggcctcggctgtgagcgctcctcccgtctctcccccaacccgccgccagccaccgagctcgccaccgtctgcgttgcctcgccgtgctctaggttctcggatggaggccgaggcggcggcgaagagggcgcgggagagcggtgacgcggcggcggccggtgccggcgagcaggcgggtatctctgccgtcatccctggatggttctccgagattagccccatgtggcctggtgaggcacactcattgaaggtcgaaaaggtactattccaaggaaagtcggactaccaaaatgtgatgggttttcagtcctccacgtacggcaaggtgcttgtgctggatggagtgattcaggtcactgagagggatgagtgtgcttaccaagagatgattacccacctgcccctttgctttatcaaagatcccagaag

SEQ ID NO: 414225 - DNA, 497 bp, Oryza sativa
cctacctcatgctgggactcgacagaagcctacagctttttgtgcctaaagcaaaatctgtctcccgaacagggaagtgttttatgccccaactacctccgttgacacgatgcgaggtaggatcgaatatattgttcaagaaaaaggaaaagccacagaatccacagtaccgaggatcacaaaatggaacaaccaatggcgctgatcccttagcccttcctcaactctgtgtacgcttgaatacgcttcaattcgtgcgaggtgaactcgagaacttagagaagaagataaaaacaggcttgcggaatgtcgagtcagctcaggcagatgttaccgatggattggacatcaaatttgagctttgtcagacagcctgtcaagagggcattcagcagttatgtgagacaactgcatataaggtgacattctatgatttggggcacgttctctgggatatcctttatattggtgacattgcatcaagtaggatcgagata

SEQ ID NO: 414226 - DNA, 452 bp, Oryza sativa
gcacgaaggaattgttctcaagaatcttaagatggtaaatacacacaagagagaggtacggtatacaagacttagtttttcttaagtacaacagatcttccattcctccatgatcctatcagcttctacacccaaaccacacaaatcaccatgcacgagccctcttcctccactgccaaatcaactcacctggggcttgagtagccaagcatccatgtggtgatcagtagccgatgtcagcgtcgtcgacgacgaggttgccggtgatgagctcacggtaggcggcgacgggccagatgaaccccctcgggaggagcttgacggcgagctcgacgtcgatgatgatctccctcatggccggcttcttctcgccgctgatggcgatgaggtagcttctggcgacccagccgatccagcccgcgatgtagaggaagagcaagccccgggtgatg

SEQ ID NO: 414227 - DNA, 495 bp, Oryza sativa
gtccatccgcctgcccctgctcctcctcctcgccggcgtcgtttccgccgcggcgccactgctcgccaccgcccagctctccgccgacttctactcctccacctgccccaacgtcgagaaggtcgtctccaccgtcatcgagcgcaagttcaaggaggaccctaccacctgcgccctgctcctccgcctgctcttccacgactgcttcgccaatggatgcgacgcgtcgatcttgatcgacccgctgtcgaaccagagcgcggagaaggaggcggggccgaacatctcggtgaagggctacgacatcatcgacgagatcaagacggagctggagaaggagtgcccgcaggtggtgtcgtgcgcggacatcgtggcgctcagcacgcgcgacagcgtgcgcctcgccgggggccccaactacgacgtgcccaccggcccgcgcgactcgctcgtctccaaccgcgaggaagggcgactcgcttccccggccggaca

SEQ ID NO: 414228 - DNA, 507 bp, Oryza sativa
  unsure (1)..(507): unsure at all n locations
atcgatccgaacgcgagagcgaggagagcgcgagatctcggctgctgcgacggcgatggcgctctccgaccgctcccgcgagtcgctcctgccgagcttcctctactcgacggcgggggcgcggccgtacaccgcgggcggcggcggcgccgccttccgcctccccgccgcggcggccccgggaggtgaggagggggcgcgccgatcgagatccaggcgcccagggagaagatcgagatgtactcgccggcgttctacgccgtctgcacggccgggggcatcgccagctgcggcctcacccacatgggggtcaccccgctcgacctcgtcaagtgcaacatgcagattgatccagcaaagtacaagagcatcacatctgggtttggaatattggctaaggagcaaggagtcaggngcttcttcaagggctggggtcccactcttcttggctacaagtgctcaggcgcctgcaagtttgggttttatgaattctttaagaagtactac

SEQ ID NO: 414229 - DNA, 369 bp, Oryza sativa
cgactggagaaagaaaccacctgatcgagcccgtatctttgcagttcgcaggagaggaggacgagtcgttcgttgtgcagcaggaggcggcggcgaagatgtcgtgggagacgtacgtcgacgatcacctgatgtgcgagatcgagggccaccacctcacctccgccgccatcgtcggccacgacggcaccgtctgggcacagagcgccgccttcccgcagttcaaaccggaggagatgaccaacatcatgaaggacttcgacgagccggggttcctcgccccgaccggactgtttcttggaccaaccaagtacatggtcatccaaggtgaacctggcgctgtcattcgtggcaagaaggggatcagga

SEQ ID NO: 414230 - DNA, 445 bp, Oryza sativa
agatcagattaaaaagccctaattctcatcgtgctcatttgctcattacatctgcattgcaccatccaagatccatatctgcatatccatagctgatacagctccatcgtgaaaacgtttattcctctacaaggttttgcatgctactactaatgcactatacctttagacattcccaggttacaataccgagtaaacaagctgcctaacaaacattacaatacttgatatgttgtatgatcctgaaggccctagccaagcaattcaagcagactcggcgaacccaatcctgtttttgccaaagtcgaagacagtgtggtatgcagccatgaacacgtctccaagaatccagagtggccgcgtggaggtggcacgtcgaacgccatgaacccgctgatgcaaacagtttgaccttgctgctccagcttcactacgtactgctctg

SEQ ID NO: 414231 - DNA, 509 bp, Oryza sativa
  unsure (1)..(509): unsure at all n locations
cacctccatgagccgccgccgcagcctcctctcggctgctcccatcctctccttcgagttagcttcctccttattcaaccatgggtaaggagaagacgcacatcaacattgtggtcattggccacgtcgactccggcaagtcgaccaccacgggccatctgatctacaagcttggaggtatcgacaagcgtgtgattgagaggttcgagaaggaagccgctgagatgaacaagaggtccttcaagtacgcgtgggtgcttgataagctcaaggccgagcgtgagagaggtatcaccatcgatatcgccctgtggaagttcgagaccaccaagtactactgcacggtcattgatgcccctggtcaccgtgacttcatcaagaacatgatcacgggtacctcccaggctgactgtgccgtgctcatcattgactccaccactggtggttntgaggctggtatctccaaggatggccagacccgtgagcacgctcttcttgctttcactctt

SEQ ID NO: 414232 - DNA, 514 bp, Oryza sativa
gactcaggcccctggtgacatttgtggttgtccagaagaggcaccacacaaggctcttccctgaggtgcatggaaggcaagatctgacggacagaagtggaaatgttcgtccaggaaccgtggttgacactaacatttgccaccctagtgagttcgacttctacctgtgcagccatgccggaatccagggaacaagcagaccaacccactaccacgttctccatgacgagaaccgttttagtgccgatcagctgcagatgctcacttacaatttgtgttacacctacgctcgatgcacccggtctgtctctgttgtccctccagcctactacgctcacctggcagcattccgggcgaggtactacgatgagccccccgccatggacggagcttcgtcggtcggcagcggcggcaaccaggcggcggccggcggccagccaccggcggtgcgccgcctcccgcagatcaaggagaacgtcaaggacgtgatgttctactgctgatcgaatcggcg

SEQ ID NO: 414233 - DNA, 506 bp, Oryza sativa
agacctgaactacaagtgcatacaatggaaatcaggcaggacgatatgcaggcaattctcaaagcatacctgcaaacgtcactacacaatatgagcggagttcactgacacctgaaagccagttcaatggttccgcactgcagaatcaagtttctaggggctccaatatactggcattgggaccaccacagcaacaacatcagcaaaattttgaattctcagcactaggtggccagtccatgcagcccaccggcttgaatcctttcgatgactggtcgcaaccgcaggagaaccggagtggggttgacgactacctgatggaggagatcaggatgcggagccacgagatattggagaacgaagagatgcaacagatgttgcggattttgagcatgggtggcgcgtcaaccaacctgacggaagacggcttcgcatttcctaactacatgccatcaactgcccccaacttcaactgtggggatgaccgtgcccgcccacctgggaaa

SEQ ID NO: 414234 - DNA, 547 bp, Oryza sativa
cggaccggtccgaattcctggttttatcacgcgtgcgctcaacactcccaagccgacggcgagcgtcacattcaaggttacggtgatggggtcgtcgtctgcgccgtccgtcgcgttcttctcgtcccgggggccgaacaaggccagcccgggcgttctgaagcctgacatcaccgggcccggcatgaacatcctcgccgcgtgggcccctggcgagatgcacaccgagttcgccgacggcgtcagcctctccttcttcatggagtccggcacgtcgatgtccaccccgcacctgagcggcatcgccgccatcatcaagagccttcacccgacatggtccccggcggcgatcaagtcggcgatcatgacgtcgtccgacgtcgccgaccacgacggcgtgccgatcaaggacgagcagtaccgcagcgcgagcttctacaccatgggcgccggctacgtcaacccgtcccgcgccgtcgacccgggcctcgtctacgacctccacaccaacgactacatcgcctacctctgcggcctcggcatcggc

SEQ ID NO: 414235 - DNA, 470 bp, Oryza sativa
attcgtctaatgccacttgaactttcaaattcaaaaaccacgatttataaagtgccggagatgaagtacacaaattaacattacatcgagttttaataaaacatcatgcgaaaagccagcaaaaacaaaaggcagcatacagctaatgaagctctactggagtagctcgcaaaaggtccgacttattttcagtagcactctactccatttcttccgaaagagtgaccatcttctactgggtgttgtacatgtgacggatcaggtcaacaacgcgagagctgtatccccattcgttgtcataccaagacacaagcttaacaaagttgtcattgagagcaataccggcctttgcatcaaagatgcttgacctgttgtcaccctggaagtctgtggaaacaaggtcctcctcaacgtaacccagaatacccttgagtttcccctcagactcctccttgatagctgccttaatc

SEQ ID NO: 414236 - DNA, 486 bp, Oryza sativa
  unsure (1)..(486): unsure at all n locations
gcgcgtcaacccactccgatcgcaaatactctctgtcggcgatagtagcagcagcagcaatggccgccctcgccgccgcatccaccgccttcgccgccaagccgcgcctggcgcgcgcgccgtcgtccccggccgcgcggttctccgtgtcgtgctccgcgtcgggcaacaacggcggcgccggcgagatggcgcagtcgctggcggcgtcggccaagacgttctccgcggcgctggcgctgtcctcggtgctgctctctcgggcggcgacgtcgccgccccccgccgccgccgacatcgccgggctgacgccgtgcaaggagtccaaggcgttcgcgaagcgggagaagcagtccatcaagaagctccagtcgtcgctcaagaagtacgcgccggactccgcgccggcgctcgccatgaacgccaccatcgagaagacgaagcgccgcttcgagaactacngcaaggtcggcctgctctgcggcg

SEQ ID NO: 414237 - DNA, 514 bp, Oryza sativa
gtgtgcttaactggctgggtcctggagtctgccctaaagttgttgaaaagggtttcagatgtataatgagtaaccaaggtgtatggtaccttgatcatcttgatgtttcctggcaagatttctacactagtgagccactcgctggaattaataacacagcacagcaaaagcttgtacttggtggagaggtttgcatgtggggtgagacagcagacacctctgatgttcagcaaacgatatggccacgagcagctgcagcagcagagcgtatgtggagtcagttagaggccatatctgcccaagacctggaaacaaccgtcttggctcggttacactatttcagatgcctgctgaatcaccgtggaatcgctgcagctccagtcacaaactcttatgctcggcgtgccccaattggtcctggttcatgcttcattcagtaaacagggagctgcagagcaaaataggcataagaggggtatttgccttcatacacctttcacactttaaacaaaat

SEQ ID NO: 414238 - DNA, 457 bp, Oryza sativa
ctgctaactggttctgaggtccgcatcattgatgatgacatgccctttgctcaatttgctgttgccttcaatggagcatcatggatagatcctgattctattgccttggatggtcatgcaatccatgcttggctcatggaacaagagtgctggaggagggaaacacatgggttcagagcttgtacaaagggtagcgatcaatgacattgctgagagtataatggcatttaatacaaattacaaggacactggcctctttggtgtctacgctgttgctaagcctgactgcttggatgatttggcttttgcaatcatgcaagagattagcaaactgtcataccgggttactgaggaagatgttatccgtgcacgtaatcagctgaaatcttacatccaactgcacctcgatggttccactgctgttgttgaggatattggccgtcagttactcatctat

SEQ ID NO: 414239 - DNA, 379 bp, Oryza sativa
gaatcaattgagtgggcttagatcaaaacccgattccattaaggattactttgcaacaactaccaaatcacaagctacaccatacacgccacgcattctggttacatgcttcaaaaactcttccaactcgatcagaagagatcagcacccggagttatttcccatctgcactaccataatcccccctaattaaacacaacacgcgaacaaattaacagcccatagacttgttttttaccaccttcttcttcttcttcttcttcttcttcttcttcttcttcttcttcttcttggtctacgcttctatcttaagattcttaattttaattagcctcctccgagaagcaccttggtctactgtgcttctgctgggcagaga

SEQ ID NO: 414240 - DNA, 446 bp, Oryza sativa
ttccatgcaggcgggttcctaagtccgctgaacactacacccgcaacgggatgctctatgtgagcatcatcaccgccgtgatcggcctgatcgacgtccggggcgccgccaggctgaggaaaggtcgacaagctcgacttcctcggctgcatggccgacttcctcggcgtcctcctcgtctccgtccagatgggcctcgccatcgccgtcggcatctccctcttcaagatcctgctgcaggtcacccgcccaaacatggtggtcaaggggcgtcgtccccggcacggcgagctaccggagcatggcgcaatacagggagggcatgcgtgtgccgtccttcctcgtcgtcggaggcgagtccgccatctacttgggcaactgcatgtacctcggcgagaggatcatgaggtttctccgggaggaagacgagcgggccgtcaagtgca

SEQ ID NO: 414241 - DNA, 493 bp, Oryza sativa
cacagtacgcactcacacactcagcttaagcgagcgagcgagtgaactagagagagagacagagatggcgagtgttgcctccttcccggtgatcaacatggagaacctggagaccgaggagaggggcgcagcaatggaggtcatccgcgacgcctgcgagaactggggcttcttcgagatgctgaaccatggcatcgcgcacgagctgatggacgaggtggagcgggtgagcaaggcgcactacgccaactgccgggaggagaagttcaaggagttcgcgcggcggatgctggaggccggcgagaagggcgccgacgtgaagggcatcgactgggagagcaccttcttcgttcgccaccgccccgtctccaacctcgccgacctgcccgacgtcgacgaccactacaggcaggtgatgaagcaatttgcgtcggagatcgagaagctctcggagagggtgctggacctgctgtgcgagaatctgggcctggag

SEQ ID NO: 414242 - DNA, 495 bp, Oryza sativa
gcgagtcagaacacaccctcaacctacactagccatggggcgagtaaacaagattcccctgctgctcgccgccgctgccgacctatagctcgccgagagcgccgaggcgggggagcccggcccgcgccgccggccggagcgcatgcggctgtacatgcacgacgtgatcgacgggccggggcagacggcgatccgcctcatctggggcgcggggccgccccacgcgtccatgccggggcgggcgatcggcgacacggtggccgtggacgacctcgtcacggagggcccgagcatcgcctccgccgccgtcggccgcgcgcagggcacgtacatgctcagctcccagcgcgaggcggtgctggtggttgccatcaccgaggcgctcacctcggccgggggcccctacaacgggagcaacctcgtcatcgccgggcgcgacagggtgcgcgacgagacgagggagctcgcggtggtcggcggcaccggcgcgctccg

SEQ ID NO: 414243 - DNA, 266 bp, Oryza sativa
aattcccgaggaaagcaacagggggtttaaacaccttacccaaagggaatttaatttttggtaacatcccgggcgaagaacccttaacattggatggatggatagggggttttttgatttgggggggccattggacacaaaaacgatttgattgggggaaaaaaagatttttgacccggatgggtaaggataactggccacgaggggccccacaaataagtttctccagttcccgccggagttcccccctgaagccccccccacgg

SEQ ID NO: 414244 - DNA, 417 bp, Oryza sativa
gtaggcttctcctccccctctttaccttttcctcctcggttctgttccgtggttcgtctagggttcagcgggttgagatggcggcgccggatgtcgagtaccgctgcttcgtcggcggcctcgcctgggccaccgacgaccgctccctcgaggccgccttctccacctacggcgagatcctcgactccaagatcatcaacgacagggagacggggaggtcacgtgggtttggcttcgtcaccttctcctccgagcagtcgatgcgcgacgccatcgagggcatgaacggcaaggagctcgacggccgcaacatcaccgacaatgaggcccagtcccgccgctccagcggcggaggcggtggctacggcggcggcggtggcggctactgcggcggtcgtggaggccgcggctacgagg

SEQ ID NO: 414245 - DNA, 463 bp, Oryza sativa
catcatatcaaaagaatgtcgaggcttcacataataagggtctgaagactgttccaaatagcattcgctcagagaactatgtcatcacctttgaagttgaggaagaaaaagtttcctttctttggaaaaaagtaccaactcaaatttgcaaatgaatcaatgttcgagaatcactgcctggtccactttcccagctttatgagattagcaagggaggcaggacttgaatatgtagagatccagaatttaaccgagttttacgatgataacagaactcagtttgctccattgctgggtggttatggttccagtttggtggatccgcgtggaaagcttgtcgctcgttcgtttgatattttaggcttgtattcaacttttgttttccagaagcctgacccagatgcaatgccaccaattggtaacacccgattgcatgatcctgagaatgatcaagagaggaatg

SEQ ID NO: 414246 - DNA, 434 bp, Oryza sativa
acgcgcccctcgcatgtttcgcgaaggcgattcaggcgagaagagagagagagagcgcgaggccggcggttctagaagcttccagacccttcggcgcgagcgagctcacctcccccgtaggagctgttcattagatctgaataagggggattgaagcagtgaggagaagatgagcgtggtgggctttgatctagggaatgagagctgcattgtggccgtcgcgcggcagcgcggcattgatgtggtcctcaacgaggagtcgaagcgggagactccggctattgtctgctttggcgacaagcagcggttcatcgggacagcgggcgctgcttcctccacgatgaacccgaagaattcttgttctcagatcaagcggctccttgggcgcaagtactctgatcctgagcttcagcgtgatattgcggccttcccct

SEQ ID NO: 414247 - DNA, 501 bp, Oryza sativa
tcgtacatcccccaaatcctcttcttctgctccgacctcacctttcctccttcctccgccgactccctcccctccgccattgcagcctcgcctacggccttgagctcgtcgccgatccccgccaccgccgcgacctctgcctgccccccatgcctcggccggcgaaaatcaggaaaaaacatgagaatgtgtttgatcaattgatcaaggcgataaaagctcctgtggactttgatctgccgcctgtattgaaagaatggaagtcaaattactatgtaccaattaagcggaatgcttatatgactcggaaacgcgttgaggatgatggcattttttgttcctgtaccccttctggatcatccgcaacttgtgacaaagattgccaatgcgggatgttgttctcttggtgttcgtcgacctgtaaatgtgagaataaatgtgctaacaaaccgtttcagcataggactttgaggaaaaccaaattaattaagacagagaaat

SEQ ID NO: 414248 - DNA, 467 bp, Oryza sativa
gccgcgtcggcggcggggagcgcgggcgccgggaagatgacggcgtcggcgccggggttgtagaaggaggcgatggacatgcggttgccgtcggggcgcgtgaggacgcggtgcatgacgctcttgtacctgccgttggtgatcacctccagctggtcgccgatgttggcgacgatggcgtggcgcatgggcggcacgtccacccactccccgtccttgagcagctggaggccgctcacctggtcgtcctggaacagcaggatgatgccaccggcgtcggtgtgggcgcggaggccgtcgacgagatcggggcgcgggcacggcgggtagctgctcaccttggtgccgaacgttgggccgttcgacccggcgaaggccttcttcaggtaacccttttccaggcccagatttttgcacagcaggtccagcaccctcttcgagagcttttcgatctcccgcgcaaattg

SEQ ID NO: 414249 - DNA, 507 bp, Oryza sativa
tgctcgatggctgttgtctggatacagaatcagctgcgacatatccaaacaagggagctcattttgcaatatgctgaccagctctgcgagcgtctcccaagccccaatggcgaattggcagtcgactgcgatgagatctcaaacatgccgaacctttcattcaccatagcaaacaagaccttcaccttgacaccagagcagtacgtagtgaagctggagcagcaaggtcaaactgtttgcatcagcgggttcatggcgttcgacgtgccacctccacgcggccactctggattcttggagacgtgttcatggctgcataccacactgtcttcgactttggcaaaaacaggattgggttcgccgagtctgcttgaattgcttggctagggccttcaggatcatacaacatatcaagtattgtaatgtttgttaggcagcttgtttactcggtattgtaacctgggaatgtctaaaggtatagtgcattagtagtagcatgcaaaacct

SEQ ID NO: 414250 - DNA, 447 bp, Oryza sativa
tcctttttttttgtttaatgtcaaaatattacaatcatcagttcatcacatcacaaaccagcacacatgtgctctccaagaattacatcaaatcggattgttctcttccacccttattagcaaggagcactggagatgaacacatctcacataagactagacaagattacaacacacattgcttattaatggtctagattaatgaaaacaacatgaagcaaaccataattaaacataataagcatcatcagacacaaccacagaggctagtactactagttgtaatgcagctgcaaccatgccattgatgccaatggccatggcgtgcgagctctccatggtggctcaaaactggaaggcgtcggccatggcggtggcgacgatgggctgggccgcgaacggcggctgccatgggcggagcagcgggtcgtcggggatcctccggat

SEQ ID NO: 414251 - DNA, 430 bp, Oryza sativa
ttaaccaaaacataggaggtttcatttcttcttctcaaagtagtgtagcatctttccttctttcaccattacataagcttaagcaataacagataacaaatcctcctcctcctctaggtaaaatattcaaacacaatacccttataagtacttattattaggaaagtagcgtgcatgggcataaatggcagcggggggcaggttaagaatcacaatgctgagcagcgaggaaacaaaacaccataatgggacagagcaaaagcctccgaaagggagcttttaggcagaaggcttctcccacttgaggggcttcaccacctcccaggtgaagtctgggtcgtcccttccgaagtgaccgtaagccgccgtcttgaggtagcgtccgttgccgcctttcttgaggtcacggttgatgatgatcatgccaggc

SEQ ID NO: 414252 - DNA, 524 bp, Oryza sativa
  unsure (1)..(524): unsure at all n locations
cctccnccacctccncggccggccttttatcggatcggcccggctcctcctcctccgccgncgncaccgncgccgcagataggagaagatggccgcacttgataccttcctctttacctcggagtctgtgaacgagggccaccctgacaagctctgcgaccaagtctcagatgctgtgcttgatgcctgcctcgccgaggaccctgacagcaaggtcgcttgtgagacctgcaccaagacaaacatggtcatggtctttggtgagatcaccaccaaggctaacgttgactatgagaagattgtcagggagacatgccgtaacatcggttttgtgtcagctgatgtcggtctcgatgctgaccactgcaaggtgcttgtgaacatcgagcagcagtcccctgacattgcacagggtgtgcacggccacttcaccaagcgccctgaggagattggtgcttgtgaccagggacacatgtttggatatgcaactgatgagacccctgagttgatgcccctcagccatg

SEQ ID NO: 414253 - DNA, 462 bp, Oryza sativa
gctcctctttatgcggccgccctttccttttttttggtgttcaagcaaacaagaattgctatgataaaatgaagagaatcacagcgtggcaaacgcctataatacaagatcactcatctaaaccacctctctcagaacataactgcaaacgtccatgcaccatcttcagatttaactgcgggcgatggtaacaaacctattgatacaaaagggccaaagtttttgaaccaaatgacattagcattccaggatttacagtgactgcatgtgtacttgtccatattcatttaaacaactcgttactaccccatgtcgtcactgctggaacgaaatggagtacgagcctgtgtttgggtctttaacagctttgaaattgtcgacgctcatcccaaagcgcccgagcacagaattcccgagatctttgagctttccgatcatctcttccttatcttttccctttct

SEQ ID NO: 414254 - DNA, 493 bp, Oryza sativa
gaacctacactatcctttttctttgtacagtgtaagcactaagtggtacaaaaggaaaacactcattaacactcaccatgctgacaaaaagaagaggttgaaaaaaaaaaggaatacataatcacacaaagagaaaaagaagggcaggagctcgatacacaaggggctttgtttatactatacacatgcacaaacaaatgaaacccaaaaatgcacccctgccaaacaggtattcatacagaacacaaataataacagggcgttgtgttgcacctcaggtcattggttagcatcaatcggagcgccagaccttgcttgtgaaatccggtttgcgtagatagttacaaggcgcagctgcgtgctgttaagcccttccaaatacgggacgaatgccttcccaacatgatgagatatccaccagcagaataaacagtctttcaacatcagggctttgttactaaagcatcaacagtgctggcaaaatgtgggcact

SEQ ID NO: 414255 - DNA, 472 bp, Oryza sativa
  unsure (1)..(472): unsure at all n locations
ccctggctacatgcacctcaagggntcctatagctcctagcgagctagtaaaggctccctcgctgatgttctccgcggccacctccgaggctcccttgcaggggctcaagtccactgcgggcctaccggtgaaccgccgttccagcagctcgagctttggcaacgtcagcaatggcggaaggagcagatgcatgcaggcgtggccgattgagggcataaagaagttcgagactctgtcggacttgccgccattgacagtggaggaccttctgaagcagatcgagcacctgctccgatctaagtgggtgccttgcttggacgtcagcaaggacggaatcgtctaccgtgagaataacagatcacccggacactatgacggtaggtactggaccatgtggaaactgcccatggttggatgcaccgatgccacccaagtgcttaaggagctcgaggaggcacaagaagcgtaccc

SEQ ID NO: 414256 - DNA, 477 bp, Oryza sativa
aaagaaggataatacatgactttctgtgtccaaaacttctaatgctacaaaactcccaagaattggtaaccgttatagctcacaacgcacaaatacaatagggcttctgaaatgtacaacagcggaagatccttgatgaaagattactcaagctttcttgtcagacctattaagattcaaattgaaccacttctttttacttgatttatctttaccatctatgttaccattcttgggactcttaaggggggatctactactgctgctaccagctccaacagagttcaccatagttcgttcggtcgtgaaggaggagtggatgtcatccctttctctcagcatatcatcaaccgcttctttttcttgggtgtatctgttggtcacttcttgaaaccgcgctaaagcttttctgtactcagtttcaaattggcgcaaatcatttctcttctctagaattttagactctatttcctttag

SEQ ID NO: 414257 - DNA, 536 bp, Oryza sativa
  unsure (1)..(536): unsure at all n locations
ggtanatgatactgctggttttgaggcattggagaatgaaggtatggatatggaaattgacttatctaatcttggaactgtgaacacaatgtttgctgcacttttcagcaagctcggtgttccaatcaagaccacagtatctcctaatgttcttgaagaagctatgagtggaacagttacagtgagacctctcccagttggatcatcagcaacgggaaaggttgacaagcaaagtgctcatttttatggtgtaacaataagtgaagaacaagctcagtcaggcattgtagtcagagtcacctcagccgcacaaagtaaatttaagctgcttttctttgaacaagaaattaatggaggttatggactagctcttcaggaagatagtcagaagactggtaaggtgacatctgcaggcatgtatttcttgcattttcaagtgtatcgtatggattcaacagtgaatgcgttggcaatggccaaggatcctgaggctgcattctttaaaagggttgaaggtcttcagccgtgcgaagtgt

SEQ ID NO: 414258 - DNA, 509 bp, Oryza sativa
gtcagaagacggaggtgctcctctcgactcgagtttggagattattccccccgcagaggccgtcgcttggcgcttgctcgcggagatggcgatgaccgtcgaagtgctcgctggacttgcatttatgttctcaacaagtattcttttgcaaatactggcttgtgctctgtacaataattggtggcctatgttagcagctcttatgtatgtccttgtaccgatgccatgcctattcttcggtggtggatctacccagttcttgactagcagagatggtggagggtggttcaatgctgcaaaattcctgactggtgcatctgccatgggaagcattgcaatcccagcaattctgaggcacgctggcctaattgagactggagccatgttcatcgagttcacgtccttttttatccttgtatgcacagtgatgtgcttccatagagctacactggatgaagattggtaaaggctcgaggcacatggacacaagaggtaaatctgtttcatgg

SEQ ID NO: 414259 - DNA, 375 bp, Oryza sativa
tgttttgttttttttttttttttttttttttttttaacctgaaacgggggtaatattatcgatgaacaatgttctgatagctttagggtacatttcttagatacggttggagtaaaagggccggaacaaatacagacattaggacaagaaattatactggttggcacgctcaaagtaatcccagccttttggcacattccacgctggtgtccaacgtctcctccaccgtaaacttgtacttgaaccccaaatccccaagcttgtttgtatccgttttcaccctcacattcttcccaatcacccctttaagctttatcgggatctccgggtacttgacagggaaacggtcgacatagtcctgcatgttggggtacc

SEQ ID NO: 414260 - DNA, 517 bp, Oryza sativa
  unsure (1)..(517): unsure at all n locations
gtcnggactggaggaagaagagatcgaacagcaatttgcgaattgctgatcgatcgcgagacgatgagcagcagcagcaggccggtgtgcgtcaccggcggcagcggctacatcgcgacgtgcctcatcaagaagctgctgcagcgaggctgcggcgtgcatgcgaccttgagaaatctcggagatgagaagaagacggcgctgctgaggaggatgcccggcgcggcggagcggctggtgctgttcgaggcggacatgtacgacgccgccaccttcgagcccgccatcgccggctgcgagttcgtcttcctcctcgccaccccgctaattcatgatccgcttagcaccaagtacaagaacaccaccgaggcggctgtggacgcgatgcacatcatcctgcagcaatgcgagcggtcaaagacggtgcggcgcgtcatccacacggtctccgtcanccgcgcgtcaccgctcagggaggacggcgaggggtacaaggacttcatcaacgagtcatgct

SEQ ID NO: 414261 - DNA, 460 bp, Oryza sativa
aaatacttaatagtaatagactctttgatggagtattacaacatgcagcagtggcattaatacgccagtacattaattaagttacacatatgcaggctccattttggtttcttttaatttatcgtattacagaatttctgtagccttgcagatgatcacttggatatcatgtactagtaattaacaataggatgcatacaaaagatggcccaacgacaacagaagatgcgtgcatctgacattgtctggccttatttgttggtagtactccaattaattaacaagagatgatgcattcttgtgccttagtttcttcacatgcttggcttcacgttgagcctattcgcaatcttcacccccaacgactcatcacactgggagaggtagttgacccagatggcgcggagctcaggggagaccttggggtgcgcgagctcgccggcgaagcggcggatgaacc

SEQ ID NO: 414262 - DNA, 481 bp, Oryza sativa
ccccgtcaacgtccgcttctgcaccgtcatccacgagcgcggctgcttggagacgatcctcgacccgtgcgggttcgccgtcaagttctacacccgcgagggcaactgggacctcctcggcaacaacttccccgtcttcttcatccgcgacggcatcaagttccccgacgtcatccacgccttcaagcccaacccgcgctcccatgtccaggagtactggagggtcttcgacttcttgtcccaccaccccgagagcctccacaccttcttcttcctcttcgacgacgtcggcatccccaccgattaccgccacatggacggcttcggcgtcaacacctacaccttcgtcacccgcgacgccaaggccaggtacgtcaagttccactggaagcccacctgcggcgtcagctgcttgatggacgacgaggccacgctcgtcggcggcaagaaccacagccacgccacccaggacctttacgac

SEQ ID NO: 414263 - DNA, 526 bp, Oryza sativa
gattcagagaacaaggtctgttgatatataattattctgtttttatttgaatacacataaacgatcaaactgtgaaacggtacaggatctgagataattaggaaactacagagcagcagctacaatattaaccatagcagctgcaggataaacacggtgctaaataggcaggctttgttcttctttcacagcctggatatctggaaggggaccatgacttcagtcatctcctccctcatgataatcttcccaacctggaaaaggtcggagatgcctagctgcgtcgacagatgccttcggcaatcctctgcagcaacaatgcctgaagaataagctccatgcacggacccagagtgatcgatgcaggcggcctccccagcgaaaaacaggttgcccaccggagcacagaatctttcatacaagtcagctggcttcccaaacaggtcgcaggaataagaaccaagcgaatcgggtcgttccccaccttgaaaccaatactggaccggttcagtagctctgtagcatt

SEQ ID NO: 414264 - DNA, 276 bp, Oryza sativa
ccaatctacctacttggaagttggaacgacgctgatgatatggacctgaggctactctgatgctagcgaagaagacaagccgtccagtgcagccgcaaggctggaatgcgggacgaacaagatgggcaacgcgactggagaccgctgcacaggcacgcaggggccgaggggcgcgcaaaggggcagcaacgaacacgtgcacgatcaaaagagagggggcgcggaagggcccggagacggggcgcccaagcggcaagaagggggggcaccctacaa

SEQ ID NO: 414265 - DNA, 504 bp, Oryza sativa
aaaggaagaaacaagctctgtgacactttattacatcgagcaaggaatagctgattatttattatacatcggtttagtaaatgaaataacgacaggatatactggacaagaattttcgaggtctgtctttctcaatcatggttttcaccatttatgacaaatggcctggtgtttctctggctctaaagcataaatacaaaacttcaagagtttcttgtctgggtcttaggtctgcaggaagctcgcgtacttcgcaccaaggaaaagcctctgcacgcagagcagggcattcttcctcacttcggcgttctcgtggttcatgagcttcatcactcggtccttcgccttcagatctgccaccacaatgcgcccagaagggtggtactgaaggaactgtgagaggtcatagcaggcgacagcaagagcagtcgtgtcggccgatgtgtcgatgattgtcataagcacacgtagaatctggaaatcattttcttcaaaattattaat

SEQ ID NO: 414266 - DNA, 544 bp, Oryza sativa
  unsure (1)..(544): unsure at all n locations
ggcgtcnggtgtaaaactgctcattcctttaatttctccagcttccacacaacagtcgatccatcttctctacgaaacttgcctctgcatctggcttttatccttttatgatgcagccgttgattatttgtccactacaagggttatgccaagacttgtagaggttgtgaaaggttcaacaaaagagaaggttgtcagggtcgttatcatgtctatccgtaacttgcttgcaaagggtgcgtttgctgcccaaatgattgatcttggactgccacacatagtacagaatttgaaagctcaagcatggactgatgaggatttattagatgcgctgaatcagctagaaataggactcaaagacaaccttaagaagctgagttcatttgagaagtacaagcaacaagttcttcttggccatcttgactggtctccaatgcacaaagacccaagtttctggcgcgagaacattaataattttgaagaaaatgatttccagattctacgtgtgcttatgacaatcatcgacacatcggccgacacgact

SEQ ID NO: 414267 - DNA, 222 bp, Oryza sativa
aaggcacttggcttagaccaaatagtattacattccacacatttggaccaactcaagcatacacatgtttggcctgcctacaatagaatagttatctttctttctgcatattctacattctaggcagactcaaaggagactcccgattattgtgtaactacagatattttgtatgatggctcctatctccttccagggaggatgtgctcacagctgcccctt

SEQ ID NO: 414268 - DNA, 468 bp, Oryza sativa
  unsure (1)..(468): unsure at all n locations
cganctcctttcttccccgcaatcaattgctcaccggcggagaggccgacgccgccgccgcgttcttcctcctcctgagccctaaaagggaatccagctcgaggtcgaaccaaccaaaagcttggcggcgtcgcggagacgcggccaacctgctccacatacaccgcccgtttcgccagtgtcttttctctttttactggcgcgcgcgcgggcgcgggcgcgggagaggcgagggagtggtggtggcgcgctgcagggggggctgcttggctgcggagtgcggacgacggctataaagagggcggaaagagagcgcccgatcccgctactcatcagctgccgtctcctctgtgtgtgtgctcgcgcgcgcgctccggntgctcctccttgggttcttgatttgctacacgcgtttgcttgctcaccacgtgtttgatggaatacctgtgagtttgcaggcctgatact

SEQ ID NO: 414269 - DNA, 413 bp, Oryza sativa
ggccaacttgggggatttttttgaattcgatatacacaatattactttacaggaatgttttacacctttaaaatttggtttttaacatacaacagcactggcacgatcactggacttttgaaaacaggacatgggaatggataaaaataacaggccagccaaatagcaacaaatcgtttaatctggcgcacgctttggtcatcagctacaaagggtcggtatgcaggccccatccgggttcgtttgttttttccagatacgggcgggcaccctcagcttcagctccttcctgtcaccgccggagaagaagagtgccatgttcctttggatgatgaggccgtcatggctgtcccgcacctttcgggggctggcgcggatgctcctaggggtgccttcccacaccatttttcttg

SEQ ID NO: 414270 - DNA, 504 bp, Oryza sativa
caaaaaattgtattctgaataatgagcataatatccaaactgaatctgttgacagtggaattttccagttaatccgttacaaaactaggaattcggtattactaacataaatcacatcagcatggattacaccatctactctctctttgcctaccaaagaacaagtggtcatgatagctgcaattgcctgcaaacagttacagcaaaaacaccactttctctccacatgggtaatcaccaggtcaaactatccacctgaagatgaatgcttcatgttgtagcctgaagaagcccgaacctgaattttctttgagctgccagaccagagctttagtcggagcacaagcggtttcttcataccagctcctgatccttgaagctcgacagtttcgcattctcccggtcacgcttgaacacaaggtacaaggggctgtagaacaggacgcagacgccgaaaggaacaatcatcattgtcagaagtcccctggagagcgcatacgctcc

SEQ ID NO: 414271 - DNA, 509 bp, Oryza sativa
cctttggcaggtatcctctcccttcactatgatcgcccaacagtgcttgcaatagggactgtcttctgggccttatcaacaggggctgttggagttagccagcatttccggcaggttgcattctggagagctgtaaatggccttggacttgctattgtaataccggcacttcagtcgttcatcgctgacagctacaaagatggtacacgtggcgcagggtttggtttactaagcctcatcggtgcagtaggtggtataggtggtagcattctagccacaatcatggctggaaatgactattggggtttggcaggatggcgtgttgcatttattatggttgctctcgtcagtttgataattggcattcttgtgtacttatatgcgactgacccaagaaaaatccctggtaatcatcttcttgacgacgatgactatgagaggttacatttggccagcaaagatgttcttccaccttcttctatatgaggggattctttggtagcaacaag

SEQ ID NO: 414272 - DNA, 527 bp, Oryza sativa
  unsure (1)..(527): unsure at all n locations
acgtaataccatccattttttttattgtcgacgaatttatcagatatgctctagatacatatcttgtgtgtatatagccggagctttgttttcacatatcctcacccaacgataattgtagtactcttacaataaaaccggtcggagagggagggaagagattattacatatgtgttaagagcagaggccattgagatggtacataaccaaattgtaaaataaaaatatatagcatattatatattgatatatcatcaacatagcccaaaacaaagctgcatactattattataggcagcaatccaccagcgcgatgcttgatcttagcttagttgccaccagactcctcgcaacctgggggcttgtaggcgatgaagctaatcaactgcacctgcctgacgttgtcgaagccgatgatacggacaaaggcatcggggtaggccttcttggcctcctcgagctccttgagcacctgngtggcatcggtgcagccgaacatgggcagctttcacatggtccaatacct

SEQ ID NO: 414273 - DNA, 551 bp, Oryza sativa
  unsure (1)..(551): unsure at all n locations
gatanactctactactactagccagtaagctagctaactaactacgtggctatggcccccaccgtgatggcctcctcggccacctccgtggctccattccaagggctcaagtccaccgccggcctccccgtcagccgccgctccaccaactcgggcttcggcaacgtcagcaatggcggaaggatcaagtgcatgcaggtgtggccaattgagggcatcaagaagttcgagaccctatcgtacctgccaccactcaccgtggaggatcttttgaagcagatcgagtacctgcttcgatccaagtgggtgccttgtctcgagttcagcaaggttgggttcgtctaccgtgagaaccacaggtctcccggatactacgatggcaggtattggaccatgtggaagctgcccatgttcggctgcaccgatgccacccaggtgctcaaggagctcgaggaggccaagaaggcctaccccgatgcctttgtccgtatcatcggcttcgacaacgtcaggcaagtgcagttgattagcttcatcgcctacaagccccc

SEQ ID NO: 414274 - DNA, 373 bp, Oryza sativa
aacctaacaggattgacccatccgccgccaccgcccccgagaagccaaaacaaagtggccccccccgagttcatcttattgaaacagcagaatttccctactcacacgacacacacaggacccagcggaccaacggatagggggcccacgcaacccactaggacccagggaaacgaggagggggcttggggcctcgggggggtccggctctgccgggagaagaagccccggacggcccctccgggactcaagcttcgggtaaaacaggttcaccttcctaaggtccctgatcaccgggtgcagcttcagctggaccaggttctcctcccaaaggacccaaagggacaggcaggttccggacaaccccctcccc

SEQ ID NO: 414275 - DNA, 470 bp, Oryza sativa
  unsure (1)..(470): unsure at all n locations
ngtcatgtttctcttgttaatttcttgagatcctgacaatctgttatcagagcctctcttgcttctcaaattctcttgattctgcggtgaaattgttccttggggtggattggagctgatcttcggatcggcaccgcgaaaaggaaacttgccccctaaggttcgcggaattcggagcgagagcagtaggtacctgatccagatccgaggccatggagactgataagaagttggacctccttctgcaacttgtggaagggaatgagaagaaacgagttgaggctgatgagcgcaccagggcggagtaccaagatctcaagcgtacggtggagtcacggattcctgccgtggagaagagggtggatgaactgggagccgcgttccaggagttgaatctcaaggtggacaagctcgagagtaagatgatgcaagctgccaaggtgagatncggacaggaagtcagctcaaag

SEQ ID NO: 414276 - DNA, 506 bp, Oryza sativa
  unsure (1)..(506): unsure at all n locations
ataggatgccaacctttacagagatgtgctagtgaccagtttggcagaatttccaggtctggttttggcggctctattggttgacagaattggtcggaaagtgtcactggggatcatgcttttgttgtcctgtgctttccttgcaccacttgctgtacatttgggacaaggttcagtaactactcttctattctgtgcccggacttgcatcatgggaggctttgctgttctatacgtgtatacccctgagatctatcctgcatcatctcgcaacacgggggtaggaatcacatcttcctttggccggattggcagtatagtttcacctgtggtgactgttagtttgtcagagaactgccgccagaaagaagcagtgtttttcatggacctgatgctctttctagcagcagtggcatgcgccctcatccctctagagaccaagggccggcaaatccagtgaggcagtgatgctttcttcagttngatgtacagaatcacattacatt

SEQ ID NO: 414277 - DNA, 452 bp, Oryza sativa
aagctgaaccaagtgatccaattattattcactaattaagcaaaaaaggaaataaaaacaagtacaaaattgtttgacaaaaaaaaaaatcgagcacgctagcacgaggacaatgtacgtgtcacactctcctagaccttaatgttgaccaggcgctccgacgccaacgacgcggcgtccaccgtcatggcgcggacggtggcgttcgttcccagggacgggtggctcactgtcaggttgtagtcgccgtgtgggaggtcgagctcgacggcgccgtcggcgccggtcgtcgccgccgtcttgtgcgtcttccactcggcgatcagcttgtcgacgagggtcccaacgggcaggttcttgaagctgttgtccgtcaggcacatcacgtagcaacccttggcgtgccacgccgcccacattatcatcccgttcaccgacgggtgcgcgtaccc

SEQ ID NO: 414278 - DNA, 551 bp, Oryza sativa
  unsure (1)..(551): unsure at all n locations
cacctcagtattagaaatcctttgtctcttctgctctcactgttgttgtcacttttgttgttcattcccttgtctgtagcagacttaacctctgaaaagcaagcccttctagactttgcctctgcagtgtatcgcggcaacaggctcaactggagtcaaagcacatcattgtgttcttggcatggcgtaaaatgctcaggagatcagtcacacatatttgaattaagggtaccaggtgctggtctcattggagcaattcctccaaacactcttggaaagcttgactctctccaagttctgagcttacggtctaatcgtttagctggaagccttccatctgatgtgactacgcttccttccttacgatccatataccttcagcacaataacttttcaggagatttgccttccttnttgaatcctaacctcagtgtagtggacctctcctacaattcctttaccggtgaaattcctataagcttacaaaacctttctcagttatcagtcctgaatttacaagaaaattctctctctggatcccatcctgatct

SEQ ID NO: 414279 - DNA, 456 bp, Oryza sativa
gacttagctgcattgtagtgagagagagaggcggccatggctctggcgtcgctgccgaaggtggtgatggggtcggtggcgttcggtgtgttctggatgctggcggtgttcccgtcggtgccgttcctgccgatcgggcggacggcgggggcgctgctgggcgcggtgctgatgatcgtgttccacgtgatcagcgccgacgacgcctacgccttcatcgacctccccatcctgggcctcctcttcgccaccatggtcgtcggcggctacctcaagaacgccggcatgttcaggcacctgggccggctgctggcgtggcggagccagggcgggcgcgacctcatgtgccgcgtctgcgtcgtcaccgcgctcgccagcgcgctcttcaccaacgacacctgctgcgttgtccttaccgagttcgggctcgagcttgccgccgagcgcaacctcccg

SEQ ID NO: 414280 - DNA, 513 bp, Oryza sativa
  unsure (1)..(513): unsure at all n locations
ccctttttggagctccaatgctggaggngcgcaaggagcaacactttcaggttctactggcaatgcaattaaccggtgccactgggggccttggagggttggggtcagctgatctgagcagtttatttggtggtcttgccggtaatacaggaactggtgctactggtggtctaggagggttgggttcagcagatttgggaagtttgcttggtggttctcctgattcttcttccttgagccagattttgcaaaaccctgttatgatgcagatgatgcagaatatcatgtctgatccacagtccatgaaccagatgcttaacttcaacccaaatacacgcaacctcatggaatcaaacactcagttgagggaaatgttccaaaatccagaatttattcgccagcttacatccccagaaactatgcagcaattactatcgttccagcagacattattatcacagcttggtcaaaatcaacctangcaggatggtagccaaggaggcaatgcgacag

SEQ ID NO: 414281 - DNA, 478 bp, Oryza sativa
gtcctgaatttttgctagtatatgcatataagtagatactactccactacagtacagaggagaggattgacattgactagctagtccacttaaccgtctccttactactatcagaagaagctaatttaattaagtggagtaaaagcaaaatgaggggtgggctgggctcattggtcgtcgttgtcgtcggtgacgaacttgccggttccggggttgatggcggcgaagaagaagaagaggatgttgaagaggaggagcggctcgatctcgttgatggggacgccggtctcgatgttgagctgcgccagcgcgcccttcccggtgatgatctcgccgatgagggagaaggcgatccccagctgcgcgaggcgacccacgaagagctcgttcgccttggtgaacccgaacagcgggccaccctcgctgagccccagcgccgcgcggaaccccttccccggcgggatccggcgcgctccag

SEQ ID NO: 414282 - DNA, 511 bp, Oryza sativa
  unsure (1)..(511): unsure at all n locations
cataaatccaatcaaagagaggtatagttggntgatatctgtgtatatataccatggcctatttgacgaccatggacgtcgccggagacgccggaggtggccgccgcccaaacttccccttgcagcttcttgagaagaaggaggagcagccgtgctccagctcggctgcaggaggtggtactgggccatcatcggcgggtggcaacgggaacaatggatcgggaccgggcggtgccggaggggagatgcagctgcggaaggcggcgccgaagcggagctccaccaaggaccggcacaccaaggtggaagggagggggcggcgcatccggatgccggcgctgtgcgcggcgagggtgttccagctgacgcgggagctggggcacaagacggacggcgagaccatcgagtggctgctgcagcaggcggagccggcggtgatcgcggccaccggcaccggcaccatcccggccaacttcacctcgctcaatatctccctccgctcctccggatc

SEQ ID NO: 414283 - DNA, 416 bp, Oryza sativa
  unsure (1)..(416): unsure at all n locations
gcgaagagacaaaaaattcaaaaggcaaaccccaagggggattccgggctagcagggggaagaacccccccccacacaagtgggggtgggggccaagtaataatatttttaggagaaaccaccatgggaggggaacctcttgcacaaaaccatttcagaggtatcaaggcagggagcccaacctccgggggggaaataccggggggcaaacttatcaaaaatatgggtgccaaaaaaaggagacccggcctcaaagctgctaaaactgtggacaccccggaagagaagggggncaaggtcctcctcaacgtaacccagaatacccttgagtttcccctcagactcctccttgatagctgccttaatctgatcataggatgctggcttctcaagcctgacagtcaaatcaacgacag

SEQ ID NO: 414284 - DNA, 411 bp, Oryza sativa
  unsure (1)..(411): unsure at all n locations
atancttcgtagcattgagctctgctttccttacagacgagaacagagtttatatcgcgttttcaaccggcgaagatgaagaccgggaacaatgggtgcggcaggatcgggaggctcgaggacagggaggccctgcagagcgacaacgtcgagctcagagcacgaaacgaccccttcataaccaccgactacatgacatacatgttcaaggatgacactgcgcacgggcagtggaagcatcatgaggttaaggtgaaggactccaagaccctactcttcggtgagaaggaggacaccgtgtacggctggaggaaccctgaggagatcccatggggtgagactggcgctgagcttgtagaggagtccactggagttatcactgacaaggacaaggccggtgctcacctgaag

SEQ ID NO: 414285 - DNA, 515 bp, Oryza sativa
acgcgcgcagcatgcattttatttaggcacggtccacaattcatacatgtatagtggatacgtctcgttggcagacactcacggtatagtagggtagttgtgtgtacagtgatatagtcatatctgcgcgtcttttcatgccgttcgttgacttcgttcacagggtcagggtcgggtaggcgatatcgagtgtgacgccacacaggccggggccaccgacgtcgcggagaatccggatgtagccgcgctcgccccatgactggccccatgagttcttgatggtccagtacttggcgccggaagacgcgtcggtgccgtacccgacgacggtgacggcgtgcgctaggcgcgtgccgcacgggcccgtgtaaacgccacccttgtagaactgcatcccactaccgacctcgatggccacagccacgggctgccgagcgacggcggcctgcaacgccgcctcgttccgcggcggcacctttccgaagcccgtgatctttgcggcatggtgcgcggac

SEQ ID NO: 414286 - DNA, 470 bp, Oryza sativa
cacacgctaggtgcatgccatggcaccattcatggcgtgcgcctcgccaccggtactcacgctggccctgctcgcgtcgtgcggtgcccttctcgccacctccatgctcccggcgcgtgcgacggcgggcagctgcttggacgtcggcgacatggtgatgatggacaggttccgcgcttggcagggagctcacaaccgatcgtacccgagcgcagaagaggcgctgcagcggttcgatgtgtaccgccgcaacgcggagttcatcgacgccgtcaacctgcgcggcgacctcacttaccagctcgccgagaacgagttcgcagacctcaccgaggaggagttcctggccacgtacaccgggtactacgccggcgatggccccgtggacgactccgttatcacgacgggtgcccgagacgtcgacgccagcttctcctaccgcgtggacgtttccgccagtgtcgactgga

SEQ ID NO: 414287 - DNA, 464 bp, Oryza sativa
gcccatgggccggcacgggcccacagcgtacggactacggactacggctgtgaacttgcactggccagtgttatttctcgatctttcagtggagcatcatactacacgcccacacaattgttttgccattttacaacaacacacatcattcgtgtagctcattgactcatgagaatctcagtgctggctcaattattacaggatcacgcacttctggccacgcttgctcgccggcgcggcggagggccctgcactcttcgtcctgctgccgccgtcgtggtccctcttctcctctatcctcttcctcctcttcttggccatcatgcacttgacgaactcctcgtagttgatctgcccgtcgccgtcgacgtcggcctcgctgatcatctcgccgacctcctcgtcggtgagccgctccccgatgttggccatcacgtggcggagctcggtggcagagatgaaac

SEQ ID NO: 414288 - DNA, 532 bp, Oryza sativa
gcgaattctagggcagaacccaacggaggcggagctgcaggacatgttcagcgaggtgtacactgacagcaacggcaacatcgaattcaaggagttcctgggcctgatggcgcgcaagctgagggacaaggactccgaggaggagctgaaggaggcattccgcgtcttcgacaaggaccagaacggtttcatctctgccaccgagctccgccacgtgatggccaacatcggggagcggctcaccgacgaggaggtccgcgagatgatcagcgaggccgacgtcgacggcgacgggcagatcaactacgaggagttcgtcaagtgcatgatggccaagaagaggaggaagaggatagaggagaagagggaccacgacggcggcagcaggacgaagagtgcagggccctccgccgcgccggcgagcaagcgtggccagaagtgcgtgatcctgtaataattgagccagcactgagattctcatgagtcaatgagctacacgaatgatgtgtgttgttgaaaatggcaaaacaat

SEQ ID NO: 414289 - DNA, 549 bp, Oryza sativa
gacgagagcggagcacactaagattcattcattcattcatttgatcaaagcaaacgagacgagctttcttcttgcgatcaaaaacacagatgggcaaccacacagttaacacaaactagatagttccacacaaaactaacgatgataacgatcggatgatgatgatggcagctcgattagatagatagataacttggccatgagggccccaccgctcagttcctccagttcccgtcggagttgccgccgccgcggctgccgtagccgtcgccgtagccgccgccaccacggccgccaccgtagccaccgccaccgccgtagccgccttcacggcgctggccgtagccaccgccgtcgtcaccaccaccgtagccgccgacaccgtagactccgcctccgccgcgctggccgtagccaccgccgcctccgccttcggagcggcgcgactgggcctcgttgaccgtgatgttgcggtcgtagagcttcttgccgattatcccctcgaatgcgtcacgcatggcctgctcgtttgagaacgcaactaacccc

SEQ ID NO: 414290 - DNA, 406 bp, Oryza sativa
  unsure (1)..(406): unsure at all n locations
gncctgnacgggtccggttcgatttcggtttttccttcggttctggtgttggtgggaaagcattgcttccccggatgttgagtaccgctgcttcgtcggcggcctcgcctgggccaccgacgaccgctccctcgaagccgccttctccacctacggcgagatcctcgagtccaagatcatcaacgatcgggagacggggaggtcgcgcgggttcgggttcgtgacgttctcgagcgagcaggccacgcgcaacgccatcgaggggatgaacggcaaggagctcgacggccgcaacatcaccgtcaacgaggcccagtcgcgccgttccggacgccaaagctgcctgcggctacaaacagcgcggnggaggcagaggctacggtggcggcggctacggaaaaagctg

SEQ ID NO: 414291 - DNA, 493 bp, Oryza sativa
aaatacttaatagtaatagactctttgatggagtattacaacatgcagcagtggcattaatacgccagtacattaattaagttacacatatgcaggctccattttggtttcttttaatttatcgtattacagaatttctgtagccttgcagatgatcacttggatatcatgtactagtaattaacaataggatgcatacaaaagatggcccaacgacaacagaagatgcgtgcatctgacattgtctggccttatttgttggtagtactccaattaattaacaagagatgatgcattcttgtgccttagtttcttcacatgcttggcttcacgttgagcctattcgcaatcttcacccccaacgactcatcacactgggagaggtagttgacccagatggcgcggagctcaggggagaccttggggtgcgcgagctcgccggcgaagcggcggatgaacctctcctgtctatccggcgcccacgacctgtacc

SEQ ID NO: 414292 - DNA, 508 bp, Oryza sativa
  unsure (1)..(508): unsure at all n locations
ccgcccganggacgaccaggacacgctcggggttgtttggagccatagccgcggttcccaggagctgtacgactccatcgccgccggcaacttccccgagtggaagctgttagtccaggtgatcgacccggaggaggaggagaggttcgacttcgacccgctggatgacaccaagacatggccggaggacgaggtgccgctccggcccgtggggcgcctcgttctcaaccgcaacgtcgacaacttcttcaacgagaacgagcagatggcgttcgggccggggctggtggtgccggggatctactactccgacgacaagatgctgcagtgcaaggtgttcgcgtacgccgacacgcagcgctacaggctggggccaaactacctgatgctgccggtgaacgcgcccaagtgcgcccaccacaacaaccactacgacggcgccatgaacttcatgcaccgggaccaggaggtggactactacccggcggccacgcgccgtttcgcacgc

SEQ ID NO: 414293 - DNA, 460 bp, Oryza sativa
  unsure (1)..(460): unsure at all n locations
gtanacccttacaactgcaacttgttgcaaatccttggttgttgtgtatggaggtaattgtgttctccaaattggggttgctgctggctctccagaggatggtaatgcagttatggtggatgcacagaagttcatgcaaggttccctttatagaagtgccatggaatccaagaagcaatcttacctagcaaatcttgccttatatcctggaaggactgaactaccattcttgccagctaacacgcaggccctaatattgcaaccaattggtgataaaggaattgcagttattggtggtgacactataagggggttcactaatcttgatcaggtgctatttctaatctacagcctcctaacatatatagtaccacgttttgttttgggtgattcgcacagataatacagagaaaaacaatctatatgtgtaagctaaagatcacagtttttaaaaacaaac

SEQ ID NO: 414294 - DNA, 475 bp, Oryza sativa
tccgcctccacctcgccgccgtcggcggtggccggggcgccgttgagccagcgcacctggtacacctcgttggtcatggcgcccttgagcggaatcacctgcagcgcccggcagtcggcaacgtccgcccacgacgccgccatctcgtgcagtagccgccgcgcctccctggggatccgtggctgcgccgccgcctccgccgcccgctggccctggctctggttctcgatcgccaccatccttgctaatcacgtccttttaccgttttttttttctctctccctttttgctcgcgatcaagaaagaagaaaagctgaagcgaagtggctagagatgagaagaggaatggctaatcacgctttctaatttttttttctttttcttcgatttggatatctttccgaagcaagattagagaaagagttgcaagtaacaagcgtactagcgagttttcctccaatctgatccgctatcg

SEQ ID NO: 414295 - DNA, 480 bp, Oryza sativa
ctaagcggaccagattggaggaaaactcgctagggcgcttgttacttgcaactcttcctctaatcccgcttcggaaagatatccaaatcgaagaaaaagaaaaaaaaattagaaagcgtgattagccattcctcttctcatctctagccacttcgcttcagcttttcttctttcttgatcgcgagcaaaaagggagagagaaaaaaaaaacggtaaaaggacgtgattagcaaggatggtggcgatcgagaaccagagccagggccagcgggcggcggaggcggcggcgcagccacggatccccagggaggcgcggcggctactgcacgagatggcggcgtcgtgggcggacgttgccgactgccgggcgctgcaggtgattccgctcaagggcgccatgaccaacgaggtgtaccaggtgcgctggctcaacggcgccccggccaccgcctaccgccgcaaggttgaagccgaagcagt

SEQ ID NO: 414296 - DNA, 478 bp, Oryza sativa
  unsure (1)..(478): unsure at all n locations
gtcnatcttgctgacggctctgagtacagnggggattatggttaagctggcacgttagaattcctgaaagattttcataagcgaaggctggaggttcttgcggaagcaggtcctgatttgatcgcctttgaaacaattcccaacaaattggaagctcaggcttacgttgaacttcttgacgaatgtaacatcagtatccctgcatggttctcatttaattcaaaagatggagttcacattgtgagtggagactcgttaattgaatgtgctactattgctaatgggtgttcgaaggttggtgcagttggaataaattgcacacctccaagatttatccatggcctgatactcttcattcgaaaggtcacagataagccaattctgatatatcccaacagcggagaaagatatgatgctgagaaaaaagagtgggtggaatcaactggcgtgtcagacggtgattttgttttctacgtaa

SEQ ID NO: 414297 - DNA, 528 bp, Oryza sativa
  unsure (1)..(528): unsure at all n locations
atancaggggccatgaacgctttggttcgagtatccgcagttctgacaaatgccccttacattcttaatcttgactgtgatcactatgttaacaatagcaaagctgttcgtgaagcgatgtgtttcatgatggacccttctgttggtagagatgtctgctatgtccaattcccacaaaggttcgatggcattgatcgcagcgatcgttatgccaataggaatgttgtgttctttgacgttaacatgaaagggcttgatggcctccaaggtccggtttatgtgggaactggttgttgtttctataggcaagcgctctatggttatggaccaccatcactgcctgcgcttccaaagtcttctgtctgttcatggtgctgctgctgctgtcctaagaaaaaagctgaaaaaagtgagaaagaaatgcatagagactctcgacgtgaagaccttgagtccgccattttcaatcttcgggaaattgacaactatgatgagtatgaacgctcgatgcttatctnccagatgagc

SEQ ID NO: 414298 - DNA, 524 bp, Oryza sativa
acaatgctgtagacttgatacatgttcagttaacgcccgtttacagaagcaatctgtgcatccgtgccttacagtaagtttcacaattgtgtcccaagctaccaaattttgacaccccatgttccaatcctttgtgtatacaacttgagtggaggagatgggtggcgttttcgtcaggtttcagaatacagaatgagcaattggagagcatcaatttggcaacttgatgaataacaacagaggaataataatctctgtccttgctactcaagaatgtctgttggccacaactgtctccactttgagatctcatccttgctgcggagcttgctgattccaccgtagaaaccgtcggcctcattgccctgttccctgtggtccttccggatcaccagcgcctggctgcatcttgaaccaggtgtgtattggttgaactccagaacaacagtgtcactaagatgacaccgacataagtggtgatttagatcagatgactccaagtggacaacaactccataccacca

SEQ ID NO: 414299 - DNA, 395 bp, Oryza sativa
ggtccgtataacagaaaaatgatacataaactttctgaaggaaattcttggccataagttatacagatacaaagttttaactgtctggtcaataaacaggttaaaacaaaaattttgcaagatgtagtaatgcattggagcagcctagtttcctatcatttcttcagaagcttcctcagcacttcctcagcatgatgctccatctttggtaaagcccagtcatgctggattatatccaggttgtctttctctgcggccaaacccattgtgggattaccgccaaatcccccacccatctgcatcatcttttgtgcatcatcattagcattttctttaccgaggatcagactgaagagacccctcaaaccaaacaaattgagaaagtaccatgaacg

SEQ ID NO: 414300 - DNA, 379 bp, Oryza sativa
gggtggtggcacgcggcgaccggcgagaacgaggggggctccgtttaacacctccctcgtttccctcctcctaccctgcctcctctccttgctcctcatccgcctctccacccacctcaaccctgacccgaccgccgccgcgccccgtttcaagaggacccctcccttccccctccggttccgccatgacggcgccttcaagatcctccaggtggcggacatgcacttcggcaacggcgccgccacgcggtgccgggacgtggcgccggaggtgggcggtgcgcgctgctccgacctcaacaccacgcggttcctgctgcgggtcaatcgaggccgagaggcccgacctcatcgacttcaccggtgcgtttttccccct

SEQ ID NO: 414301 - DNA, 516 bp, Oryza sativa
agaacatcagtgaacgatggattttttttaaaaaaaatcaaacagtgcatgtctagataaaaatcaaacagtgcccttgccaatcgaagggtcactcatgttatcatgtatgtacatctcaggttaacaggaaggtttgtattagcgccacacgagcgacgcggccatgctcttcaattccctactgtgcaacaccgcaccaccagtttggatttagcgtgtgaaaaaaaaagaatcacattacgaatctcgcacctaaaacgctacatgtcaaccaatcagaacgtcgaggccaagacgaaacgaaatcctcatagtctagtcatcatcctcatcatcgttattgttgttcgcatggtatatcttttgtgcacggtacatatcagcaacttgctcagatgtggttgcctgttctggatttttatcatcacgaacacgtaacatgcgaggaaatcttagggagatgccccttgtcggatcaactataccatttgcagcacgatgcacaggactaat

SEQ ID NO: 414302 - DNA, 543 bp, Oryza sativa; identical to SEQ ID NO: 393636

SEQ ID NO: 414303 - DNA, 526 bp, Oryza sativa
gtcacagcatgcccgttcaagaaaatatcgaacttcttctcgatcgaagccatcttgaacgcatccaagggtatgacaaggttgcacattgttgactatggtatacagtatggattccagtggccaatcttcttccagcggatctcgaagagacctggtggccctccaagtgttcgaatcaccggtgttgacttaccacagccgggattccgccctgcacaactcattgaggcgacgggccgtcggttgcatgactatgcccgtatgttcaatgttccatttgaataccatgctattgctgccaagtgggacactatccgtgtcgaagatcttaagatagacaaagacaaggatgaacttcttgttgttaactgccttttccggatgagaaacatgatggacgaaatggtgacagatgacagcccaagaatgcaggttctgaagacaataagaaagatgaatccaaatttgttcatccatggcgttgtcaatggcacctacaatgcgcccttcttcgtgacacgat

SEQ ID NO: 414304 - DNA, 428 bp, Oryza sativa
agggaagagtgatgttgcaacataacatattgactgaacacaggcagcaaatccacacaagattaatatcgttgcacaagaggttgatagagcattacatatttagatgaggcacacaaccaaagaagcagcagctgctgaccaaagtttagacccatacatagggcaaccagtcattgcatacaagatgatactagtggattatggcagcttctctttttctcttctgattgagcagagagatgccaccgccattatttcttgaggtgagggaagcacgcggtgaggtcgctcttcggatgcttcgcctcagcatgctctttgcacttggtctcagaggtggtgcagatgaaagtctgcatgcatatcttgcactggatgttcatggccttcttgttggcctcaagctggctccccttggcgccctt

SEQ ID NO: 414305 - DNA, 400 bp, Oryza sativa
ggccggaccggccggaccgacccagcgcgcattttctttaagcaaaaaaacactcggaggcccaggagcgaatcgaatcaactgctgctacgaagggggagaggaaggccgaggtcgacgagatgggcggcggcaatgggcagaagtcgaagatggcgagggagaggaacatggagaagaacaagggcgccaaggggagccagcttgaggccaacaagaaggccatgaacatccagtgcaagatatgcatgcagactttcatctgcaccacctctgagaccaagtgcaaagagcatgctgaggcgaagcatccgaagagcgacctcaccgcgtgctttcctcacctcaagaaataatggcggtggcatctctctgctcaatcagaagagaaaaagagaag

SEQ ID NO: 414306 - DNA, 482 bp, Oryza sativa
atcccattgacgattgtgccgaacagagttggtgtttcttggtcaccaaaaaacacctgctgtttttttggatctgatcttgcaaccttcaaggagatcgccaagaaaaatcatgcttctgcggagtcttgtttaactctgctcttccatgcatcagcctggcaggatgagatttgagttccagggtgcatctttctgatgtgttcatcctttcttgaacagttcccccttcggtagttccttgcatggtagaaaataaaatctccaagggaaaataagagcaaacacatgagagacacttgcaggagccttactaccggcggctatgaagaagctgctgaatgaagggcgacgagggaggcgtaggcgccatccttgatgttcatcaagacaaacggtgagcaacgatcacggttgtccggttgaccatcactctgtccagcgcgtcttggaccaccctttcggattcagcatccagcgca

SEQ ID NO: 414307 - DNA, 447 bp, Oryza sativa
ggggacacaggcagacacagtaataataacctgattggtctttaaacattaaaggaggagaaaacgatctcagtagaagtagagtgctacaatctcaacacaaaacgggctcaagtactagttgacaccacgaacgacacatcaatggtaattcaaacttctagattgaagtatcaacggtaattcaaacttccggatttttctttttatctttgggcaccgatcgccatcacctgactcaaggaagatctagatcttgttgaacgcaacaatgtcgcagctctggatgtactcattcgctggttcggtgtagaagtagtcctcaatcagactatcaaccgacacaagatcatcgacaatggtcatcatgatttgcaatttcttgataccgtaaccaaccgggacaagcttggatgcgccccaaaggaggccttccatcttaacatt

SEQ ID NO: 414308 - DNA, 489 bp, Oryza sativa
  unsure (1)..(489): unsure at all n locations
ttgcctgatgccgccgccgctgcctctcctcctcctcccctcgcctccgatccaatccggtctctttcagtcttttttcttgagggggagatggcggtttctttcaccaacgttagctcagaggcaggcctcanaaagctcgatgagtaccttctcactcgcagctacatctctgggtaccaagcctccaatgatgacttggctgtgtactctgcattttcaactgcgccctcttcaagctataccaatgttgctaggtggtttactcacattgatgcactcctacgtctgagtggagttactgctgatggtcaaggcgtaaaggtcgagtcgacagctgttccttcagcttcaacccctgatgttgctgatgcaaaggctcctgcagctgatgatgacgatgatgacgatgttgacctttttggtgaggagactgaagaggagaagaaggcagctgaggagcgtgctgctgctgtcaaggcttctggc

SEQ ID NO: 414309 - DNA, 431 bp, Oryza sativa
aaggcacaagggtgtaagtaacattagatgaatgaagatgtacatttttcatgtttttggacagatatgcttagattctgccttttacggatacatccatgctattttgcaagccatgtaactgatttataattaatgcagcctttccgggggttccatgacgatcatcgcattactcgttatcatcatcagccaggtcgaactggttgagcagcgcgccgcaaatgggcagggggatgtccttgaggtagcccagtgggttggctaagcgcaggttgtcacagatgccgacattcctggtgagcaaaacacgggcacgatccctttcggccttgatttcagagcagtttgcaagggggctgtggacgaggacaacctcgcagatgtcctcctcatggctggccttgagctcaatcttgtatgtcccggtc

SEQ ID NO: 414310 - DNA, 464 bp, Oryza sativa
cgtttccccaaataataatagaggaaggggaaaaacacatttgctgccacatcatccatggttctctctccgcaccattccggtgatcttcggcatcctcttctatgtccttgccagcactgccactgccaccgacgcaccggactacgtcgtccaaggccgtgtctactgtgacacgtgccgcgccgggttcgagaccaatgtcaccgagtatatcaagggtgccaaggtcaggctggagtgcaagcactttggcaccgacaaggtcgagcgtgcgattgacggtgtgactgatgagaccgggacatacaagattgagctcaaggacagccatgaggaggacatctgcgaggttgtcctcgtccacagcccccttgcaaactgctctgaaatcgaggccgaaagggatcgtgcccgtgttttgctcaccaggaatgtcggcatctgtgacaacctgcgcttag

SEQ ID NO: 414311 - DNA, 301 bp, Oryza sativa
ttcatgactacggtgaactggagcttctgggtgaggtcgacctcgtcgccggcgacctcgcgccactcgaactccctgacgaggatggtgacaaagtactcgaggtggagcagcgccagcgccatgccggggcacattctctgaccgggaccggacggacttatcactgtctacttgctgaccaagagggacacatgctggccctagccgacagagaggaaccaattatgcctgaacacttacggagagagtgagacgcttgctgattaggacgatttttgcctcctggaacatatacctc

SEQ ID NO: 414312 - DNA, 416 bp, Oryza sativa
tttggttgagaagacaagctcatcgctcaaattcacagtcctgatcccgaaagggcgcatttggacaatggctgcaggtggtggtgctagtgtcatatatgctgatactgttggagatttgggatatgcgtcagagcttggaaattatgcagaatacagcggcgctcccaacgaggaggaggttctgcagtatgctagagtggttttggattgtgccactgctgatcctgatggccgtaagagagctcttctcattggaggtggtatagcgaacttcactgatgtcgctgctacattcagtggcatcattcgagctttaagagagaaggaatccaaattgaaggctgcacggatgaacatttacgttcggagaggtggtccaaactaccaaactggccttgccaaaatgcgtacac

SEQ ID NO: 414313 - DNA, 442 bp, Oryza sativa
gctggtgaagcgcgagggcaaagcgcatgcatagcagccagtagttgacggcgagcttccgctcctcatcgacgctggccgaccaccccaagctccccaaggggaagacggtagccctcgtcgtgcttgacggatggggcgaggccaacgccgacaagtacaactgcatccatgtcgcccatacgcccgacatggattcgctcaagaacggtgctcacgagaggtgcagattagcgcaggctcatggaacagctgttggtcttcctagcgaagatgacatgggcaacagcgaaatggggcacaatgctcttggtgctggtcgcatttttgctcagggtgctaagcttgtggaccttgctcttgcctctgggaaaatttatgatggagaggggctcaattacatcaaagaatggtttgacaagggtaccctgcaccttattgg

SEQ ID NO: 414314 - DNA, 539 bp, Oryza sativa
cgactacctcctcctcctccgccgccgccgcctcgggtgcccttttattcaccgtgatgtcggtttctccctccggcgccagcctcgtcctctcctcgccccccgcgcccggggcccggccccagccgcgccccgcgcgggtgtcggtcgccgccgccgcgcccgccgcgcgacgcggggtcgttgccgccgcagcggtgtcgagccccgccgtgtcgtcctctgctggtaaagatgccaaacagattcctaaggactttcttcatattgatgatttcgacaaggatacaatcatgaagatccttaatcgggctattgaggtcaaggcaatgataaagtcaggagacaggagcttccaacctttcaaagggaaatcaatggcaatgatatttgccaagccgtcaatgagaacccgtgtttcatttgagacaggattctttttgcttggtggccatgctatctacctgggtcctgatgatatccagatgggcaagcgtgaagagacccgtgatgttgctcgtgtgctttctggatataat

SEQ ID NO: 414315 - DNA, 476 bp, Oryza sativa
gaattctgaacatagccattttgagaggaaaaaacagagacacaaacttaattggaactaaagactagataatgggaactaatgaagaaacttattcgcaattctcagctggaatatcaaagttctccacgtgatgcagaggcaaacaagatcagatagatgaactctcatgatgaggatgcaatcaggtgcttagatcttgtcaagcgcctgaacaacgtcattcttcaaatcctcaaaatcctccactccaatgctgaacctgatcaagttgtccttgattccatagatttctctctgctcctttgaatcccagtaagacatgatggcaggctgatcaataatgctctcacagcccccaaatgatggggcatgatagggcatcttaacagaatcaattaatctcctagtagcatcaaagtcttcaagaacctcaaaactaacgacaccaccaaagccggtcatttgactcttgg

SEQ ID NO: 414316 - DNA, 519 bp, Oryza sativa
  unsure (1)..(519): unsure at all n locations
gaactanactgcaatgcggatggcccaatnnttagaggaacattctaagattgcacgtgtctactatcctggtctgccaagtcacccagaacatcacattgccaagagtcagatgaccggctttggtggtgtcgttagttttgaggttgctggagactttgatgctactaggagatttattgattctgttaagataccctatcatgccccatcatttgggggctgtgagagcattattgatcagcctgccatcatgtcttactgggattcaaaggagcagagagaaatctatggaatcaaggacaacttgatcaggttcagcattggagtggaggattttgaggatttgaagaatgacgttgttcaggcgcttgacaagatctaagcacctgattgcatcctcatcatgagagttcatctatctgatcttggttgcctctgcatcacgtggagaactttgatattccagctgagaattgcgaataagtttcttcattaggtcccattatctagtcttta

SEQ ID NO: 414317 - DNA, 390 bp, Oryza sativa
cgaagaagaaaagcaggagcaatgggcgcgggaggcaaggggggcatatggacagggcaggccctgcagagcacctacgggcaagatcgcaggagtgaacgaccccaacatcacggaaaggaaagggccacactggccaaagcatgagacggagcacgggcagtggaagcacaaggggggaaagggaggaggacgaagacccttctcttcggcgagaaggtggccacagcgacaggctgcaggaaccctgaggagaacccatggggagagactggcgctgagtatgctgtggagaccactggtgttttcactgacaaggacaaggacagggctaacctgaagggaggtgctaagaaggacgtcatcactgctcccagcaaggatgccccc

SEQ ID NO: 414318 - DNA, 480 bp, Oryza sativa
ggtcattgctgaaagcctgtctgaggaagagattggaggactaaaggagctattcaaaatgattgatactgacgatagtggaactataacttttgatgagctgaaagagggcttgaaaagggtgggttcagaattaacagaacatgaaatccaggctttaatggaagcggctgatatcgacaacagtggaaccatcgactatggtgaattcattgctgctactctccacatgaataagctagagagggaggaaaacttagtatcagcattctcatttttcgacaaagatggaagtggtttcataactattgatgagctgtcacaagcatgccgcgaatttggccttgatgatcttcaccttgaggatatgattaaagatgttgatcaaaacaatgacggacaaattgactacagcgagttcacggcgatgatgaagaagggcaatgcttgtggagctggaaggaagaccatgaggaacag

SEQ ID NO: 414319 - DNA, 451 bp, Oryza sativa
catagatctctttgattcagcttctgaagaaatacagggcaaaattgactataggcacacttatttagatttctcaaaacttgaagttaaagtttctacaagtgcaggcggtcagcagaccgtgaaaacatgcccagcagcaatgggttttgcttttgctgctggaaccacagatggccctggagcttttgatttcagacaaggagatgtcaagggaaaccctttctggaagttagtaaggaacttgttaaagacaccagggaaggaccaagttgaatgtcattctccaaaaccaatattgctagacactggtgaaatgaaggaaccatatgattgggcgcctgcaatacttccagttcaaatgattagaattggtcagctggttatcttgtgtgttcctggagaattcacaacaatggctggcaggcgtctacgtgatgctgtgaaaact

SEQ ID NO: 414320 - DNA, 533 bp, Oryza sativa
caaaaaccacgatttataaagtgccggagatgaagtacacaaattaacattacatcgagttttaataaaacatcatgcgaaaagccagcaaaaacaaaaggcagcatacagctaatgaagctctactggagtagctcgcaaaaggtccgacttattttcagtagcactctactccatttcttccgaaagagtgaccatcttctactgggtgttgtacatgtgacggatcaggtcaacaacgcgagagctgtatccccattcgttgtcataccaagacacaagcttaacaaagttgtcattgagagcaataccggcctttgcatcaaagatgcttgacctgttgtcaccctggaagtctgtggaaacaaggtcctcctcaacgtaacccagaatacccttgagtttcccctcagactcctccttgatagctgccttaatctgatcataggatgctggcttctcaagcctgacagtcaaatcaacgacagagacatccacggttggaacacggaaagccataccagtcaactttc

SEQ ID NO: 414321 - DNA, 536 bp, Oryza sativa
ctacttgtagctctcgacccccgcatctcatccctcctctcgcttagttcagatcgaaatctcaaatggcgaagattaagatcgggatcaatgggttcgggaggatcgggaggctcgtggccagggtggccctgcagagcgacgacgtcgagctcgtcgccgtcaacgaccccttcatcaccaccgactacatgacatacatgttcaagtatgacactgtgcacggccagtggaagcatcatgaggttaaggtgaaggactccaagacccttctcttcggtgagaaggaggtcaccgtgttcggctgcaggaaccctgaggagatcccatggggtgagactggcgctgagtttgttgtggagtccactggtgttttcactgacaaggacaaggccgctgctcacctgaagggtggtgctaagaaggtcgtcatctctgctcccagcaaggatgcccccatgtttgttgctggtgtcaatgagaaggagtacaagcctgacatcgacattgtgtccaatgctagctgcaccaccaac

SEQ ID NO: 414322 - DNA, 373 bp, Oryza sativa
tggcttgatcagccaaatcctgctgatcctgcacagactgacggttatcacatttttatacaggacaaaccagaatataagaggcgtgttcgtgttcaggccaagcagtaccctgctttgctttgaggacattggcctaataaagttactacccgattcatcatgcacatccgcatagtagtttgcaaaatctcagattattgcaccagaaaatatcggattttatgggatataacctaaaatggaatgtttgaagaactgtccaatatcattgtggactttttgtgctgacattaccatttgtgctgtgtgaagaacagaaatagctttgtcaactgttgaaaccgcttgagtgatggatgctaatttggat

SEQ ID NO: 414323 - DNA, 402 bp, Oryza sativa
tgtactccttatcggcactgccatctcagtctcctaattgtcatcactagcttctagctagcttaattaattaattagccatggcggaggagaagcaccaccaccacctgttccaccacaagaaggacgacgagccggccaccggagtagactcctacggcgagggcgtctacacgtcggagacggtgaccaccgaggtggtcgacggcggccaggacgagtactagaggtacaagaaggaggagaagcagcacaagcacatgcagcacctctgggaggccggagccctcgccgccggcgccttcactctgcttgagaagcacgaggcgaaagaggaccccgagaacgcgcacagggacaagatacatgcggagaacataacttgaatgtaataatgaagcc

SEQ ID NO: 414324 - DNA, 356 bp, Oryza sativa
tgcctccgccgccgagtggctcctccgccccgccggcgtctactggttaaggagccactcccgcctcgaccacgtcctcgcccgcgacgacatccccgtcgccgccgccttccgccgcgcccgcctccgcaaggacccctccgcccacttcctcctcgccgtcaatctccaggtgccggggcggccggacgcgtacagcgcggtgttctacttcgcggcggaggcggcgatcccggcggagtcgctgctggggcggttcgtccacggcgacgacgcgtaccggaacgcgcggttcaagatcgtgaaccggatcgtgaagggccccgggctggtgcgcgccaccgtcgggaactacg

SEQ ID NO: 414325 - DNA, 407 bp, Oryza sativa
actcattgggtcactgtgtattaaaagcagagaacccagaaggttaaaaggaacttgcggtgtcactatttcagagcgtggttttgatgtccacaatgacccacaaaaactaagcttcctcgatatcaaggaatcgactgatcttgaggataaagaattgcgaagaacgctgcaatcacttgcatgcggtaaaggtcggcctctccaaaagatgccacaagggcgagacgtagaagataaggacgaatttatatttaatgaagaatttagtgcccctctctatcgcataaaggcgaatgctattcagatgaaggagacggttgaagaaaacacatgcacaactgagacagtattccaggacagacagtatcaggcggatgctaccataggtcggatcatgaagacac

SEQ ID NO: 414326 - DNA, 558 bp, Oryza sativa
caggatcaactaccgttttcgatgtttattgacatgaaaattccagtggttctcactcccagcaacgaacagaaatgaaaatgaaagtggatgaagctaccaaataccagtagcccaatacgccagtctctcccggtgtgttacaaaactggaccttattctctacaacgctcagttgaaatggtagagcggcagctcggcgttgagcgggtgcgacatcaccgtcagcacgtcggtcaccgacagcatcgagctaatcgccgccttcagaacctcccgcgagcatccaggcttcaccatcgtcctcaccttgctgagacagtctttcagtatctcaatgtcgcccatgtagtcttggttctcaatggtcaatgtgatgggttttgcattgcaacccgggccttcatattgaatgcctcctggagtcctgtagaaatcatcaaggagaaaacttgatgctttctctcgcagcaactcataagccttccctttcaggtcaattgggagaggatgaatggcaggctttcctatcgggattggtccaggaccacgcaaatg

SEQ ID NO: 414327 - DNA, 542 bp, Oryza sativa
cttgtcagctgcgctgttccagttcttgccacccttcatcagaagagagctgctgctccatcaagaatcagacaactctgcccagctgtcccagattgatactgagcaattgttggcccacttagtagaagcagaaatgataaagagaacaaaagaaggaagatacaagggaaggaagttcagctctgtatgccatttctttggatatcaggctcgaggatccgtcccatcaaactttgactgtgactatgctcatgctcttggccgtatctccttgcatatgatagcagctggcttgactgggtacatggcaactgtggctaatctgaaggaccctgtagacaagtggcggtgtgctgctgctcctctaactgcaatgatgagtgtgaagaggcatttgcgtggtcctggagcaatcccgataggaaagcctgccattcatccttctccaattgacctgaaagggaaggcttatgagttgctgcgagagaaagcatcaagttttctccttgatgatttctacaggactccaggaggcattc

SEQ ID NO: 414328 - DNA, 519 bp, Oryza sativa
gtgactggacagaaacagtgcgcttcttccactgctataaaagtgtaggggaccggatttcatgttgatcatcctatgtttcttgagaaggtatggggcaagactggaccaaaattatacggtcctaccactggagatgactaccgggacaaccagttgcggttctgccttttatgcctcgctgctttggaggctccaagggttctcaatctcaacaattctgaatatttctcgggaccatatggtgaaaatgttgtcttcgttgcaaatgactggcacactggagtcctgccatgctatctcaagagcatctatcaggcaaaaggaatgtatgtgaatgctaaggttgctttctgcattcacaatattgcctaccagggtagatttgccagagaagactttgaacttcttaatctaccggacagtttcctgccttcatttgattctattgatgggcattttaaacctgtagtaggtagaaagattaactggatgaaggcagggatcactgaatgtgat

SEQ ID NO: 414329 - DNA, 295 bp, Oryza sativa
caacatagaaagggggactgtcaggttcaaaaaatcttggaacacgggtacagaaggctgggaactatcatcgatgcatgacacggagtgatgccatgcacaccactttatcttgaacacacagagggccaatggctgcaagacaaaatgaatgtaactacaagcttgaactccacggccccatcctgtacaaccttatcatctgctccgaggccaggagacctcttgcgaaaaacagcaaacaccacgctgtgcggaagaagacaaattattacagacacaaatcgacgacacg

SEQ ID NO: 414330 - DNA, 424 bp, Oryza sativa
ctattttctccttcaccgcggtgcttatgagggcacactgcagtggaaatgacatcaaatcatcataatttaaagggatcaatgcattggttgttgatcataggccagtccgtgcaaaggttaccaagtatcacttgcaaagacttggagttaagaccgaactgacagctgagctaaatcagttcatttctaaattaaactctggatcactgactgcaaagctagtgctaatagacaaggaaacctggcttaaggaatcccattgcacgcctcttctggttaacaaattgaggaataatgacaagccagactctcctaagttatttcttttggggagctctgcaagttctcccaagggcggttcagatacatccagggaacataacttgaatgtaataatgaaagccgttcgtgcaagcatgct

SEQ ID NO: 414331 - DNA, 529 bp, Oryza sativa
gaactagaaacaaacattaacattattgcgtaattacgttacaaacttacagatgtagtttattctaacaatacgatctttctttgttttgttttacaccaacaacagcacacattccctcagagagaaaggcaacacctcacactgacaatttctgaaacaaaatggactcaagctgggaacagcgcaaatagttgtctgaattatgcttcagccatgatgcaatcaatggcttgcttgcagattccagtcattgttgcctctggtccatatacctcaattggaacaccaagttctgcacctagtgtacgcattttggcaaggccagtttggtagtttggaccacctctccgaacgtaaatgttcatccgtgcagccttcaatttggattccttctctcttaaagctcgaatgatgccactgaatgtagcagcgacatcagtgaagttcgctataccacctccaatgagaagagctctcttacggccatcaggatcagcagtgcacaatccaaaccactctagatact

SEQ ID NO: 414332 - DNA, 442 bp, Oryza sativa
  unsure (1)..(442): unsure at all n locations
acttgagttagatgctaccccaattgnccctgctctaaagagtttctttgatgatgctctgaactcgacaggaagtgagctaaacttcaaaaccatagatgatggcttacgcgctgatctctaccagtacccatttaatgtaccggcatactacgcattgatactgctaccaaccactgggctggaaggcatagcactctatgctgatcccaattttaaggtgctcgctgcctcggacccttactttgcgaaaaggctactcactgatcccaatccatatctcagagatgctgtaattgagctactattcaaggatggaaaattcagatggaataggcttgaaaatcttcttgttcaagggagccaagatagagagtttgcagcaaaagatgctttgcaaccagctataaagcttctacttggtcctgatggggaggaattg

SEQ ID NO: 414333 - DNA, 486 bp, Oryza sativa
tcataatcccaaagctaagcttcgagctcccccattgatcagtgtgctagctagtagctggttggttaaaaggcctttttgttttgtttgagttggagcagaggagaagaatggcggctctgcttgtggtcgtgttggttgccatgtcggccatggtggcgacggccaactttaaccaggagttcgacatcacctggggcgatggccgtggcaagatcctcgaggatggccagctgctgacgctcacgctggacaggacgtccggctcagggttccagtccaagcacgagtacctctacggcaagatcgacatgcagctcaagctcgtccccggcaactccgccggcaccgtcaccgcctactacttgtcgtcgcaggggccgacgcatgatgagatcgacttccagttcctggggaatgtgaccggggagccgtacacgctgcacaccaacgtgttcacgcaggggcaaggccagcgcgagatgc

SEQ ID NO: 414334 - DNA, 433 bp, Oryza sativa
  unsure (1)..(433): unsure at all n locations
gctaaaaaaatctcggagtgcataactgagtaagctttgctcaatggcggaggagaacaagtccggctccggcgacctgatggcgagcggcaaggtagtcgcggaggcaaccatgtcggtgttccagcagaagagcgtggagggcgtcgacaagaaggaggtcgccggcgccgccgcggacctgctgcactcggcgtccacctacggcaagctcgacgacaagccggtcgggcagtacatcgacaaggcggaggggtacctcaaggacttcagctccggcagtggcggggccgcaccgccaccgccggcagccggagacgccggagcgccgaagccagcggcggaggagcccgccaaggagcctgcgccggctgagaaggaggaaggcaagccaccgtcgtcgtcggaagggntcggtctcgacgacgtcatg

SEQ ID NO: 414335 - DNA, 424 bp, Oryza sativa
  unsure (1)..(424): unsure at all n locations
gcctaagttcccccgaattcttggaaggagaagagaatcccgtaaccaagccgtcgccgccgccgccactatgcaccgaaaccctcgcctccttctccgtgccgccgnnctccttctnacgccctactnctnctncgccgccgncgacccaacgccggcgctccctcctcttctgcggcgcccgcccctcttcttcccggaggggtgcccccaccggcgcgccttctcgacggcgggcttcggcaaggatgtcgacgaggtgaaccgcaagttcgcggaggcgcgggaggagatcgaggccgccatggacagcaaggagaccgtctacttcgacgaggaggccgcctgcgcgcgcgacgccgccggggaggccctcgcgggcttcgagtcgctgattgcgcgccttccgccggccgacgccgac

SEQ ID NO: 414336 - DNA, 494 bp, Oryza sativa
  unsure (1)..(494): unsure at all n locations
acgggagttatttcgcataaccaaacaacccaacccaacccagccaaaatcccagccctccgccatgcctcgcctccacctcctcctcctcgccgtcctcgccgtcgccgacgcggcggcggaagcggcggcggagaagaagccgacggcgcacgaggtcctggagtcctacgacttccccgtcggcatcctccccaagggggtcacctcctacacgctcgaggccaccacgggcgacttcacggcgacgctcgacaccggcgacgacgacgactcatcctcctccacctgcgagttcgccatcgagggctcctactcgctccgataccagcgcgccatcaccggccgcatcgccacggggcacctcaccgacctccgcggggtcgccgtcaaggtcctcttcttctggctcaacatcgtcgaggtcacccgccgcggggaccgcctcgagttctccgtcggcatggtctncggcgacttcaccgtcgacaact

SEQ ID NO: 414337 - DNA, 434 bp, Oryza sativa
gtggaaggtaaaaaagaagccatttcattagatatttttctatggtacaaaatgattgcaacgttataaatagctctaaataaaaaagggagacctcctcctgtgactaggcagcctattggtgttacaaatacaacagggttgaagaatcactagtacagatgtgtatacagtatgtcagttgccgaacccaaaaggtgatctcgtcctgctgccaccttcaccatactgttcgttccattttcttaattcgttcatgctcgtcgcatcatacgaaacagacgggcttaccttggcttttgcttgaatgaaatcatcaagtctaaggggtcttagacccgtattttggctacacggaccttccttcttttcttcttctaaaagttcatgaactggcctatatgctgaagctatacataggttctttaaatcac

SEQ ID NO: 414338 - DNA, 534 bp, Oryza sativa
ttagctcacagtccagttctaccacgtacaacagcagaagttagagagggagaagaagacattggatgacgcggagcttagctagccagccatggcgaggcgctctccttgcctcgccgtcgccatgctcctgcttggggcgttggcggcggcgagcgccttcattgatgaagcggcggctgctggccgggggctcggccatggcgcccgcttcatgagcaagcagggtcgtgtgacatacgagaagctgccggagccggagccgaagccaaagccaaagcctcatcctaaacccacgccaaaacctgagcccaagccagagccggagccaaaaccagtacctgagcctgagcctaaaccgggaccaaagccagaaccaaaacctgagcctaagcctgaacctaaaccatacccagagccaaaaccggagccgaagccagagccaaaacctgagccggagcctaaacctgagccttagccagaaccaaaaccagaaccaaagccgtacccagagccgaagccagagccaaaacc

SEQ ID NO: 414339 - DNA, 367 bp, Oryza sativa
gatcgtacaatgtcctctccgcttgtcgaaatgcaaataacatcatcgggggatatgatcatcagttcacgagaacagaggaagaaacaaaagctaaaaattaaaaccatcaacagcccgatcgagtttggattactagatacacacattgcagccttccttccctctctccatgtattgatatatcaacccgggcacgcacaaaacatttgttcattccctactcgagctgggcgtaccacaccccttggatcttgacatccttgggcaccttggcgccgaggtctgtgtccgacggctgcacgctctttaagacgccaatcacctcgccggtctctggcttgctcttggtgacgctcaacgtgat

SEQ ID NO: 414340 - DNA, 559 bp, Oryza sativa
acgcggcccggacttaccggctcgattcacgcgaccgctgtagtagaccacgcgagcgagcggacatgggagcatggcttcaagccgcgggcaccctgattcatccggccaagctcggcggccgggcctactccgccgcgctgccatcgcgcccgtcttcgcacgtcgccagggcgtacggcgtcgacaccggtgccgacggcaggatcacgtgctccctgcagcccgacatgcgggaggacgccaacaagtgcgccgatgccgccaagctcgacggcttcgccctcgccacctgaggtctgctcggctcgggcgccagcgcggagggcgtgccgaggaggcttaccttcgacgagattcagagtaagacgtacatggaggtgaagggaaccggcacggcgaaccagagcccgacggtggagggcggcgtcgactgcttcgcctataaggccggcaagtacaacatgaagaagttctgcctggagccgacgtccttcaccgttaaggcggagggcgtggccaagaacgcgccacccgagttccagaagaccaagctcat

SEQ ID NO: 414341 - DNA, 526 bp, Oryza sativa
  unsure (1)..(526): unsure at all n locations
cggactgngtgggtggaagctcacctccggccgctctccgccgctgctctcctcctttcccccgctgcgccgcttcccaccgccgatgctgcttctgcgaggagagcatcccccggtggcaggaggaggagcagcgtgagggccagcgcgggcggcgggggctggctgtcgggcctgctcggaggcaagggcggcggcggcgcgccgacggcgatgacggtgacgccggggaccgtgaaggcgggggaccccgtcctgcacgagccggctcaggacgttgcccccggggacatcccctcggagaaggtccagggcgtcatcgaccggatggtcgccgtcatgcgcaaggcccccggcgtcggcctcgccgccccgcagatcggcgtccccttgaagattatcgtcctggaggatacccaagaatacatcagctatgctcccaagaaggacattgaagcgcaggatcgccgtcctttcgatcttcttggtatcatcaatcctaagcttaagacgacgagtaaaaaga

SEQ ID NO: 414342 - DNA, 511 bp, Oryza sativa
ggcttgttgaagcagtcccgggagggctggggttcgaccggttattggaccgagatcgagggagcgtgggtgctgaagcctaaatcacaggagccctcgttcgttgttcacttcgttggtgggatttttgttggagctgctcttcagatcacttatcgtttcttccttgaacgacttgcagacaagggagctttggtgatcgcaacgccatatgctagcggctttgatcatttcttcatcgcagatgaagttcaatttaagtttgacaggtgcttaagaaacatggttgaacctgtaaatgaccttcccacatttggtgttgggcattctttgggatctgtgatccaccttctcattggatcaagatacgctgtgcagcgaagtggaaatatattgatggcctttaacaataaggaagcaagcttggcagttccattattttcgcctgtaattgttcccatggcacagagttttgggccaatattttcccagttgacatcatatccaacac

SEQ ID NO: 414343 - DNA, 460 bp, Oryza sativa
gtttttgttttttgatacataagaaataatttaattacactagctagcagtggcacatctgaaaaaacaacgtgaaataaaagggaaaaaaagcaagcagaaagctagctcatcactttattccagaaacggtacagtgtagtgactcgctcgctcctccctctggcgaaataatgtcgtcaatgcctcaatcgtgcagcagcaagtgctcggtctccggtgatcgccgtcactggtcggtcgctggcggtatgtgcggcggcttgtgcttcttcggaggtgcttcaggttttggctcaggcttaggcttaggtttcggttcaggctttggctctgggtatggtttaggctccggctttggttcgggcttaggctctggtttagggtcaggcttcggctctggttttggctcccgctgtggcttgggctctggctttttctctgggtgtggggtgggtct

SEQ ID NO: 414344 - DNA, 391 bp, Oryza sativa
tttttgtttttttttttgttttttattttttttttttttttttttttttttttaacagttgacaaagctatttttgttcttcacacagcacaaatggccatgacagcacaaactgtccacaatgatattggacagttcttcaaacattccattttaggttatatcccataaaatccgatattttctggtgcaataatctgagattttgcaaactactatgcggatgtgcatgatgaatcgggtagtaactttattaggccaatgtcctcaaagcaaagcagggtactgcttggcctgaacacgaacacgcctcttatattctggtttgtgctgtataaaaatgtgataaccgccagtctgtgcaggatcagcaggatttggctgatcaagc

SEQ ID NO: 414345 - DNA, 518 bp, Oryza sativa
  unsure (1)..(518): unsure at all n locations
ggatangttattaaaactaagagaccctctcaaaatataaagtatttggctaaagacgagtcttaacgcaactccatttctgctgttgtccctcctgatgaaattggagtgaaatttgatgatattggggcacttgaggatgttaagaggacgctggatgagcttgttactcttccaatgaggagacctgaacttttctcccatgggaatttgttaaggccctgcaaaggtgttttgctctttgggcctcctggaacaggaaaaacactcctggcaaaggcacttgcaacagaagctggagcaaatttcatcagcataactggttctacactcacatcaaagtggtttggagatgctgagaagttgacaaaggcccttttctcctttgctagccgattagctcccgttatcatatttgtggatgaagttgacagcttattaggtgcaagaagtggtgcatttgagcatgaagcaacagaaagatgcggaacgaatttatggcagcttgggatggtcta

SEQ ID NO: 414346 - DNA, 506 bp, Oryza sativa
gatgcacagttttacagaagcaaagcaacgggttcccaaaggtccacacttacagtacgttcaacgtacaactgatccaagcaaatgaaacaggtttgatgatgcactgatgcgagaaactaaacggttggatcggagtcggagacgaggcgatcatggacaagcggcggcggcggcgatgagcttagtagtcggtggtggggagctgctcgtgggtgtgggagatgaagaggacctcgtagatgacgccggcgaggccaccgccgatgagtgggccaacccagtacacccactgggactcccaggaccagctgacgagggccgggccgaaggagacggccgggttcatggaggcgccgtcgaacgcgccgccgacgaggatgttcgcgccgacgatgaagccgatggcgatgggggcgatggtgccgaggctgcccttcttgggtcaacggcggtggcgtacacggtgtagacgaggccgaaggtcatgacgatctccagcacca

SEQ ID NO: 414347 - DNA, 276 bp, Oryza sativa
acacacacaccagtccatatgggagcactgctagaaggagcgagagagcagcagaaggcagccgagcaagatgccgatccgcaatatcgccggggggagccaccaggaggtgtaccacccgggagcactcaaggcggcgatggccgagttcatctccaccctcatctgcgtcttcgccggccagggctccgggatggccctcaagaaggcgaacggccggggaacgaacaaccccggccggccgaacccggcgggggtggcccacgccttcgccct

SEQ ID NO: 414348 - DNA, 531 bp, Oryza sativa
ccctggattgtttactcggcacattaattatgctgccactgatgctgtaggagatcatactttgtttgctggcgatgacctcatccagtcagatgtgatactggggtcaaagaaaattgaggcccctgtattatttcggggaattggacatgcgggtaatccatctaacagcttgggcctgaaagtcttatccgcctctccgtcagcatactcagcaaacccaaagtctaagttggcttcccctccatctctcacagggtcggctatatcactgggttctgttatgcaggcaagaaacaatgctcgggtcttgatatctggatcactcgatctgtttagcaacaggttcctaaaatctggtgttcagaaggccggtagcaagataaggcatgagaaagctggaaatgaacaatttgtgacagaaacaagcaaatgggtcttccatgagaggggccatctaaaggcagtgaatgtcaagcataacatggttggggagacaaatgagccttgcatgtaccgcatcaatgatga

SEQ ID NO: 414349 - DNA, 484 bp, Oryza sativa
aaggatcttcgggttccccaagaagctgtttcttgcgtggtcgcctaccaaggagaagaaggccgcgaacgggaagggtggcggtggcggtgtgtctgttgatctcaagcgaaaggagcagcagcaggcggcggcggcaggggttggcgtcaggagccccggttctggtagcaaggatgaaatgttctttgactcgcgggcatggttagattctgattgcgaggacgacttctacagtgtgaatggagattttactccgtctcgtggcagcactccaaactaccaacccagaacacaaacagttatgagcaatgtctttgtacctgataatgtacagaattccaaatcacctgaaccttctccaactggaaggagaaaactagccgagctcttgcaggaggcgatgcagaatggttccgaagatagcaccgatgcatctgttccagacatcagcaagaatgagatgcagcaattccagcctatt

SEQ ID NO: 414350 - DNA, 537 bp, Oryza sativa
gtcttattcctcgccaccacacccacccacccaccaagggcgtcctcccgcctcctcctcctcgccgcgctgctcgccacggcggcggtgctggcggcgtcccaaaagccgaaggccgccacgccgacgaaggccacgccggcgtcgcccggccccgcggcggcggcggccgacggccccgcgccgacgaacgtgacggcagcgctggagaagtccggcaagtacaccaccttcctccggctcctccacgagagccgggtggacacccagatcaacagccagctgatggacagctacaacgggctgaccatgttcgcgcccacggacgccgcgttcgcggcgctcaagccgggcacgctcaactcgctgtcgtcgcaggaccagatccagctgatgctctactgcgtgctcccgcggttctacagcctggccatgctcaccaccctcggcggccccgtgaacacgcaagcgttcggcgccgacggcccgtacaagaacaagatcaagccgtcgaacaacaacgtcaacatctccacc

SEQ ID NO: 414351 - DNA, 531 bp, Oryza sativa
acgttttcgtcttcatcgcgctcgcctccgagggcaccgacgtccgcgccctcttcgagctcaccctcctcgaccagagcggcaaggccaagcacaaggtgcactcccacttcgaccgctccctcgagtccggcccctacaccctcaagtatcgcggctccatgtggggttataaaaggttctttcggcggactgctcttgagacatcggattttcttaaagacgattgcttaaagataaattgcactgtgggtgttgcggcatctactatggattactcaaagccacattcgatacatgttccagaatctgacataggctaccattttgggacactgttggacaatcaggagggtgtggatgttatatgtaatgtggcaggagaaaagtttcatgcccatcagttggtcttggctgcccgatcttcctttttcagatctgaactttttgagcatgaatcagatgaagagaagaatgaagttgatactagcaatgaaatcaaagagattgtcattgatgacatggagccaa

SEQ ID NO: 414352 - DNA, 549 bp, Oryza sativa
  unsure (1)..(549): unsure at all n locations
cccggctcctcctcctccgccgccgccaccgccgccgcagataggagaagatggccgcacttgataccttcctctttacctcggagtctgtgaacgagggccaccctgacaagctctgcgaccaagtctcagatgctgtgcttgatgcctgcctcgccgaggaccctgacagcaaggtcgcttgtgagacctgcaccaagacaaacatggtcatggtctttggtgagatcaccaccaaggctaacgttgactatgagaagattgtcagggagacatgccgtaacatcggttttgtgtcagctgatgtcggtctcgatgctgaccactgcaaggtgcttgtgaacatcgagcagcagtcccctgacattgcacagggtgtgcacggccacttcaccaagcgccctgaggagattggtgctggtgaccagngacacatgtttggatatgcaactgatgagacccctgagttgatgcccctcagccatgtccttgctaccaagcttggcgctcgtcttacggaggttcgcaagatgggacctgcgcatggct

SEQ ID NO: 414353 - DNA, 560 bp, Oryza sativa
cgtactcgtgggctcgactgctcggggacggggtgggggctgcaggccatggatttcaggcacgtcgccctcgtggcgctgctcctccgctccgaggggttcgagcactaccgctgcgaccgcaacctctgcatggggatgaacctcaacaacatggccaagatgctccgctgcgcgggcaacgacgacatcatcaccatcaaggccgacgatggctccgacaccgtcaccttcatgttcgagtcgcccaaccaagataagattgcggatctcgagatgaagctgatggacatcgacagcgagcacctcggcatccctgactccgagtaccaggccatcgaccgcatgccgacctctgagttttccaggatctgcaaggatctgagcagcataggagacactggtatcatctcggcgaccaaggagggcgttaagatctcgaccgctggagatattggaactgccaacattgtctgcaggcagaacacgactgttgaccagccagaagaagctacaatcatagagatgcaggaaccggggcactaacctttgccctgagg

SEQ ID NO: 414354 - DNA, 446 bp, Oryza sativa
ttgtgcgtgggccgcgcccccccgccgcttctgcggggcgcctttgagagaatgccgctcaagatgttcgcggagaccgggcgggaggccctggagaactacggcaaggactacggtcgcctcgttgtcatcagcgatgtcgccgaccagaaccgggcacttgtggatgctcctgacatggtcaggtgccagatcaacttcaagaggctttccctgaccgacatcaagattgacatcaaacgtgtgccgaagaagacaactttgattaaggctatggaggaggctgatgttaagaacaagagggagaatagctcatggggcaagaagctaattgtccagaagaggagagcgtcactcaatgactctgacaggttcaaggttatgttggccaagatcaagaggggaggtgctatcatgcaagagcttgcgaagcttacgaagactgc

SEQ ID NO: 414355 - DNA, 561 bp, Oryza sativa
cacctttttggcttcctcccctctctaagccggggaagctaagccatggcgtccgtcaccgcccgtaccccggtcgcagccctccgctcgtcggcgtcgctcaagtctaccttcctagggcaatcctgcacccgcctcgcccgcgcaccgactacgaggcgtaatgttcgggcggaggccaagggagagtggctccccggcctcccttctcccacctacctcaacggcagcttgccaggcgataacgggttcgacccgttgggcctggcggaggacccggagaacctgcggtggttcgtgcaggcggagctggtgaacgggcggtgggcgatgctgggggtggccgggatgctgctgcctgaggtgctgacgaagatcgggttgatcgacgcgccgcagtggtacgacgccggcaaggccacctacttcgcgtcgacgtcgacgctggttcgtatcgagttcatcctgttccactacgtggagatccggcgggggcaggacatcaagaaccctggctgcgtcaaccaggacctcatcttcaagagctacagcctcccgccg

SEQ ID NO: 414356 - DNA, 537 bp, Oryza sativa
ctctttgtcgcccgtcggagcggatcgcttcccgtttgatcctcgggagtattcgccggcgatgagctccgactccagggagctgctcgggatcgatcccccggagctcatcttcccgcttcgatctaaagaagcaaatctcgtgttctctgcacctaacaaacaagacagatgaatatgccacgtttaaggttaagacaactagtccaaagaagtactgcgtccgtccaaataacggcattgtggctccccagtccacatccaatgttcttgtaacaatgcaagctcagcgggaggcgccaccggacatgcaatgcaaggacaaattccttgtgcagagtgccatagtgacacaagagctcacaccgaaggatatcaccggagacatgtttacgaaagaatcaggtaatgtggtggatgaggcgaagttaaaggttgtttatactcaaccctacccgccatctcttaatggcgggtctgaggaaggcctaggaagcttgagttttcaagaagcaaccaaagggtctagagaatcag

SEQ ID NO: 414357 - DNA, 561 bp, Oryza sativa
  unsure (1)..(561): unsure at all n locations
aatgttgcctaacatatcataaggagaactttgcctatgagcactgggatgaaattcttgatatttgcaatcagtatgatgtggcattatccattggcgatggtttgagaccaggttctatttatgatgcaaatgatagcgctcagtttgcagaattgctgactcaaggggaactcacacgccgagcttgggcaaaagatgtgcaggtaatgaatgaaggcccagggcacattccgatgcataaaattcctgaaaacatggagaagcaactggagtggtgcaatgaagcacctttctacacactggggccactgacaactgatattgcacctggttatgatcacatcacctccgccattggtgctgccaacattggggctcttggcactgcacttctctgttatgtaacaccaaaggagcaccttggattgcctaaccgtgatgatgttaagacaggcgtgatatcctacanaattgctgctcatgctgctgattttgcaaagggccatccctatgcacaagcattggacgatacactaagcaaggccagattgagtttag

SEQ ID NO: 414358 - DNA, 496 bp, Oryza sativa
  unsure (1)..(496): unsure at all n locations
cctgtactcgatcccaagcgttggcgcaagtatggcaactaccggctgagcttcatggagcgtcactgcccaccggcggtggagcgcaaggagtgcctggtgccgccgccgcaggggtacaaggcgcccatccggtggcccaagagcaaggaccagtgctggtacaggaacgtcccctacgactggatcaacagccagaagtccaaccagcactggctccgcaaggaaggcgacaagttcatcttccccggcggcggcaccatgttccccaacggcgtcggagcctacgcagacctcatggcggagctcatcccgggcatgacggacggcacggtgcgcacggcgctggacacgggatgcggcgtagccagctggggaggcgacctgctggggcgcgggcggtgcatcctgacgctgtcgctggcgcccagggacaaccacgaggcgcaggtgcagttcgcgctggagcggngcatcccggccatcctggggatca

SEQ ID NO: 414359 - DNA, 559 bp, Oryza sativa
ccgtttcaggctggtactattcgcaagaacggtcatattgtcatcaagaaccgcccatgcaaggttgttgaggtctccacctccaagactgggaagcatggacatgcaaaatgccactttgtggccattgacatcttcaatgggaagaagcttgaagatattgtgccctcctcccacaactgtgacgtcccccacgtgaaccgtactgattatcagctgattgacatttctgaagatggatttgtcagcctcctgactgaaagtggaggcactaaggatgacctgaggctccctagtgatgaggctctgcttactcagatcaaggatggattcgccgaggggaaggatctgattgttaccgtgatgtctgccatgggtgaggagcagatctgcgctctgaaggatattggccccaagaactagaataccttgttaccgtgtttggctacctgtctggtcgctctaagtttggagctggtcttgagattatatataaacttttgatttgagcgtaagttaagaagacatatgggccgttgttccatcttgcggtttatac

SEQ ID NO: 414360 - DNA, 488 bp, Oryza sativa
cgatctacgaggcggagccccttctactatgattgatcctcttcaccctcctcggcgccatcggttcgctcggtgaccgcggcagcttcggggacgaccagccggtgacgagcctcgacaaggccgtcagtcccccgggcaagggcttccgctccgcgctgggcctcagcgagggcggcccgctgttcggcttcaccaaggccaacaagctgttcgtcggccggctcgcgcagcttggcatcggcttctccatcatcggcgagaccatcaccggcaagggcgccctcgcgcagatcaacatggagaccggggaccccatcaacgagatcgagccggtcgtgctcttcaacgtcggcttcttgttcatcgtcgccatcaaaccgggcaccggcaagtttgtcagcgacgacgacgaagagttgaattacgaggatcgatcgatctaccgaggtttcgccgccattgttgtgcttgcgcatcattgagac

SEQ ID NO: 414361 - DNA, 561 bp, Oryza sativa
gtttttgacgccgcgccccccaagccgcctccgcagcggaaggaggaagagcagcagcagcagcagcaggaggaggcgggggcgtttgtgccttatccggaccctgtacaggtgggcgagatcacgctcgagcagctcgcggcctacgacggcaaggaccccgcgaagccgatcctaatcgccatccgcggccaggtctacgacgtcacgcgcgggaggctcttttatggtcctcaaggaccatattccttgtttgctgggagggatgcaactcgggcccttgcattgatgtcgtttgaccctattgacctcactggagatttggatggccttggtccagacgagctagaggtcttgcaagattgggaagataagtttaaagagcggtatcctacggtgggccaccttgcttcagaaaatgcagcggatggtaaccacggtggcgcagcttgatcacgaggaaggaatgctttactccatcggtttgtcagtttctctgttcttttttactggattgcaagtgggtagatctgatcatatgatgctctggtaggctctgtt

SEQ ID NO: 414362 - DNA, 528 bp, Oryza sativa
gtttttcatcccagctgttcgggactgctctagactcgattgtgactgcaactatcagttccctggatgaggcatctaccggacctgttaataccttcttcagatcaatgagagataccctggattttgactttgctgacgatgttgaagatcgatggaaatctgatgaaccaccatcgctatatatcttcatcaattgcagcacacgtgacctttcaactatagagaagtatgtggaacaatttgcctcatctgtcccagcccttctctttaatcttgaactagataccttgcgctctgacttggggcttctgggattcccaccaaaagatttgcattacagatttctttctcagcttaccccagtattttatatcaggcagcgtgactactctaagacaattgcagtcactccatatatcgtgaactacagtggtgctgtattccgtcaatacccagggccctggcaggtcatgcttaagcaagcgatggttcttatgcatgtgtcgcagagagtgcagctcggtt

SEQ ID NO: 414363 - DNA, 564 bp, Oryza sativa
  unsure (1)..(564): unsure at all n locations
tatagtatgccaacctttacagagatgtgctagtgagcagtttggcagaatttccaggtctggttttggcggctctattggttgacagaattggtcggaaagtgtcactggggatcatgcttttgttgccctgtgctttccttgcaccacttgctgtacatttgggacaaggttcagcaactactcttctattctgtgcccggacttgcatcatgggaggctttgctgttctatacgtgtatacccctgagatctatcctgcatcatctggcaacacgggggaaggaatcacatttagctttggccggattggcagtatagcttcacctgtggtgactgaacgtttgtcagaaaactgccgtcagaaagaagcagtgttcttcatggacctcatgctccttctaggagaatgggcatgcgccctcatccctctagagaccaanggccggctaatccactcgaggcagtgatgctcttttcaatttgatgtacaaaatcacattacattttggtatccagcacatatttacacctgccaaaatcactgacttttggattaacaaa

SEQ ID NO: 414364 - DNA, 559 bp, Oryza sativa
gcgatttaacacaaggaggctggctgccagcagcccgagggcccaatcctttgcatcaataactgcggcttctttggcagcgcggcgaccatgaacatgtgctccaagtgccacacggagatgatcatgaaggaggagcaggccaagcttgctgcctcctccatcgatagcattgtcaatggttgtgacggtgggaaggagcatattgttgctgccagtggtagcacggcggtggcggtggctcaggtcgaggcgaagacgctcgttgtgcagcctaccgatgtcgcgggcaccagcgaggaggttgctgtagtccccaaggtcaaggaagggccgaaccggtgcgctacctgtaggaagagggttgggctgacgggattcaactgccggtgcggtaacatgtactgtgcgttgcaccgctactccgacaagcatgaatgccagttcgactaccggactgcggctagggatgccatcgcccaggcccacccagtggtgaaggctgagaagctcgacaagatctaaggcggctaggggcgtggaatggattgcacctaca

SEQ ID NO: 414365 - DNA, 529 bp, Oryza sativa
  unsure (1)..(529): unsure at all n locations
gcgatttgtctgcttcttggccgtggccgccgcgctagccaccacctgccacgggtggggcgccggcgccggcgatgtcgtgtcgtcgtcgtcggcggcgctctcgttcgtgaacaggctgaggcagatgatgatcccggcggccgtgggcgacggcgactactgcgacagctggcgcgtcggcgtggaggcgaacaacgtgcgggggtggacggcggcgccgcgcaagtgcgacaactacgtcgagaactacatgcgcggccaccactaccgccgcgacagcaaggtcgtcgtcgacgaggccgccgcctacgccgaggccgccgtcctctccggagaccccgccgccgacgccaacgccacctgggtgttcgacgtcgacgagaccgccctctgccacgtcaagttctacaagaagcacggcttcgggtaccacaaaaccgacgagccggcgttcatggagtggctgatcngccgcagagcgttggcgttgccgaacacggtgacgctgtacaagaagctgttcttc

SEQ ID NO: 414366 - DNA, 363 bp, Oryza sativa
ggtgaagctaagcttcttacagaagactgggaaggagcggctcaggatctaaaagaggctgcccagaaatctccccaggacatgggaatccgagaagcactaatgagagctgaaaagcagcttaagttaagcaaaagaaaagattggtataagatccttggcatttcaaagacggcatcagctgcagagattaagcgtgcctacaagaagttggcactgcagtggcatccagataaaaatgtagataagcgagaagaagcagaaaacatgtttcgagaaattgctgcagcttatgaggttcttggggacgaagataaacgtgtaagatacgaccgaggagaggatcttgatgagatgaatatg

SEQ ID NO: 414367 - DNA, 562 bp, Oryza sativa
gtccttctcggcgcggccacaccacggcggccgtcgggtcccacacggccggcgcgatcgctcgccgcggctcgtggggacgggccgtcaatggcgcctgcattcgcgcctacaacccccccccccaccccaacccacgcgcgtgccaacgatcctctgcctcctcgccgccggcttccaccggtggctccgcgtggagcccgccaccacgggcggggccgctctgctctccgaccggcgccgtcgccagcagccatgcttctcgaggaacgtggaatagctcatacttgctcaagaatcttcggcctggttgattcatgtcagatactccattgaagagataggcttgccggatgatcggaaagaataagctgcatgctatgcttgagcggattccttttggtagacagcctaacatgacctgctggctgagtccctctgccttgaattgtaggcagaagtgagatagcacttgctgctttatgttctcagacagaagatttgccattgacatttttgctgttaagtggagaaacttacaaattcctggtgcggctggtcc

SEQ ID NO: 414368 - DNA, 525 bp, Oryza sativa
gtattcacgatctcgcgggggcgaaccgagaggctgggccatagttcggatccttcagatgttgagcctcgtcttctctctggaccacttgagggtgttcttgttgcacagatttctgctgggaattgctatctccttatgttggcctaccagccaactggaatgtcagtgtattctgtaggctgcggtttaggaggcaagcttggtcacggatgcaaaaacaataagggcaccaccaagttgattgaacatttcctgacattgagctttaatccggtttcagttgcggctggcacttggcatgctgcagctctaggtgacgatgggcgtgtctgcacctggggttggggccatactggctgtttgggacatggcgatgaggagtacagggttctccccactgtggttcaaggattgagcaatgtgaaggctgtgcatgtctccaccggtgaatacaccacctttgttgtctccgataacggcgatacatacttctttggatccgctgcatccctgaatataggt

SEQ ID NO: 414369 - DNA, 555 bp, Oryza sativa
atatgtagtgctccatagaggattatgtcatagccactctgcattagtcaaggggtcaatgtgtttaagcaaattgatcaagcaagttgcatacccatgggagagcagaatccatatgcccacatagattatccagacaccaatctcttcttcatctctgcatttgggtaaaggtttagataggtagccatgaacagcttagatgatgttccaaagccacactttgtattgataccattcatggcacaaggccacaccatccccatgattgacatggcacatttcctagccaagcatggcgccatggtcagcttcatcaccaccccggtcaacgcggtacggattcaatccaccattgacagggcaagagagctcaacatcccaatccggtttgttcccctccggctcccctgtgccgaggtaggaatgctcgatggctgcgagaacgtcgaccagatcttggagaaagaccaggtgatgaagatgacagacgcctatggcatgctgcacaagcctctggtgctgtattcttcaagagcaaaacgtcccaccttc

SEQ ID NO: 414370 - DNA, 548 bp, Oryza sativa
  unsure (1)..(548): unsure at all n locations
cttttctgagcctctagaagctcacctgacccttacaccagtaaaaaaggatgaacctcccattgaggaaaagaacattaactcatcagatggtggtgcattggaaaaaaaggatgcttcaagatcacacaggaaaaatggttttgcaagaccactcttgaaatgtgcagaagatgttatactaaatggtgatgtcgcaagtacttctgggaaagccattgcaagtttacaggtggaagcttctgatttggcaaacttcctcaccatggaccgaaatgggggttacagaggttctcaaactctcctaagatctgtactgtcagagaagcaggagctatgcttctctgttgtctcattgctctggcagaagctcattgcatctcccgaaatgcagatgtctgcagaaagtacatcagctcatcagggttggagaaaggttgtggatgcgctttgtgacgttgtttcagcctcaccgaccaaggcttcagctgctatcgttctgcaggtcaagatattggtattggtatatttacatacttgntatcata

SEQ ID NO: 414371 - DNA, 479 bp, Oryza sativa
ttctgtaggagatcgccgccgccgccgccgccgggtgggactggttcgtgcccccccgccgtgcgtgtaccacgggcttgggggattgatcggtagcgatggcggcgccgccggcttgggcttgggccgactacgattatctcatcaagctgctcctcattggcgacagcggtgtaggaaaaagttgtctcctcctacggttctcagatggctctttcacgactagtttcattaccacaattggtattgacttcaagataaggaccgttgagttggatggtaaacggattaaattgcaaatctgggatactgctggccaagaacgctttcgaactattaccactgcttactacaggggagcaatgggcattttactcgtttatgatgtcaccgatgaatcttcattaacaacatatgaaattggatcagaaacatcgatacaacatgcctctgataatgtgaacataaatttggtgggg

SEQ ID NO: 414372 - DNA, 475 bp, Oryza sativa
aggaaaaaaaaacaaaacacaccaagccaaataaaagcgacaatgggatcgctcaccaccaacatcgtcctcgccgtcgccgtggtggcagcgctggtcggcggcgggtcgtgcggcccgcccaaggtgccacccggcccgaacatcacgaccaactacaacgccccgtggctccccgccagggccacctggtacggccagccctacggctccggctccaccgacaatggtggcgcgtgcgggatcaagaacgtcaacctgcctccctacaacggcatgatctcctgcggcaacgtcccaatcttcaaggacggcaggggatgcggctcatgctacgaggtgaagtgtgagcagccggcggcgtgctcgaagcagccggtgacggtgttcatcacggacatgaactacgagcccatcttggggtaccacttcgacttctccggcaaggcgttcggcgccatggcttgccccggga

SEQ ID NO: 414373 - DNA, 573 bp, Oryza sativa
gctccggtgaccactcccaacccaggccccactaggggggcagccttgtgtcggattagggttcttgaagcttcttctatgcaggcgccgccgatcgcctcctcgccgtcgcctgcgtggaccgccatccagcccgcgccggcgaggctctgctgctcccgccgcggcgccctacgcctcgaagccaaggccggctggaggccggcggcccgagggccgcgggtgccaggcacgggcgccgtcctcgcctacgaggtggagggcccctttcacctactcgacgcgcgcaacgagcaagagctcattctgcatatcacaaaggaagtggagaaagggaagctgcctgcagatgtcgctgccaatctagaagagctatactacaactacgaggacgcggctatgcagagcagggatccaaatgcacacgacatcgtgcttgcaaacatggcggccctgaccgactgtgctctgctcgatgtagagaactcggttaccttttcgccttataacaaagctgctagggaaccattcgcctattacatgtttggtcagaactacattaggcccgttgtg

SEQ ID NO: 414374 - DNA, 563 bp, Oryza sativa
cctccttctcctcctctccgctttcgctttgaccaaacccaaaccacgcgcagcgctcccatcgcccagggcaacgccacgaaacctagccccaccgactcgcctcgcctcgcctcggaatcccccaacaccagagcgcggcggcgaccatggagccctcccccgtcggcggcgggtccgcctccgggtcggtggagcggtggcgcgcggaggcgtcgcgggcgttccagcactacctggatcgggcggcgccgcacacggcggggcggtgggccggcacgctcgtggccgcggcggtgtacgcgctgcgggtctactacgtgcaggggttctacgtcgtcacctacggcctcggcatctacctcctcaacctcctcatcgggttcctctcccccatggtcgacccggagctcgaggcgctcgacgccggcccggccctccccacccgcggctccgacgagttcaagcccttcatccgccgactccccgagttcaagttctggtatgccatcacaaaagccttttgtgttgctcttctgatgacattcttctctgtattcgac

SEQ ID NO: 414375 - DNA, 545 bp, Oryza sativa
ctctcctcttctttagatcagttaaaataaatggctgacgcagaggacattcagccccttgtctgtgacaatggaaccggaatggtcaaggctgggtttgctggagatgatgctccccgtgctgttttcccgagtattgttggccgtccgcgacatacaggcgttatggttgggatgggacaaaaagatgcttatgtcggtgatgaggcccaatccaagaggggtatcctaaccttgaaataccccattgagcatggaattgtaagcaactgggatgacatggagaaaatttggcaccacacattctacaatgagcttcgtgtagcaccagaagagcatccaattcttcttacggaggctccacttaaccctaaggccaacagggagaagatgacacaaattatgtttgagacattcagcgttccagccatgtatgtcgctattcaagccgtgctttccctctatgctaggggacgtactactggcattgccttggaatctggagatggtgtcagtcacacagtcccaatctacgagggtatgcc

SEQ ID NO: 414376 - DNA, 432 bp, Oryza sativa
ccctcctctcctcgtccctcctccccgccggcgccgtagcagatttaatcctcaatggcggccttcaacaagctcggtagcttcctcaggcacagtggcttgacaagcagtgcctcggccggctcttcccctgccatgttcaatgctgctcgtctgatgtccaccaagcttttcgttggtggtctttcttggaatactaatgacgattcgctgaaagaggcattcaccagcttcggggatgtgactgaagctcgggtgatcaatgacagagaatctggaaggtcaagagggtttggctttgctagctttgccaatggcgatgatgccaagagtgccatggatgccatggacggcaaggaacttgagggacggagtatccgcgtgaacttcgcgaatgagagacctccagggaaccgaggtggcggcggctat

SEQ ID NO: 414377 - DNA, 524 bp, Oryza sativa
cttttggatgtggcaccccttaccctcggtatcgagactgtcggtggagtcatgaccaagttgatccccaggaacaccgtcatccccaccaagaagtcccaggtgttcaccacctaccaggatcagcagacaaccgtctccatccaggtctttgagggtgagcgcagcatgaccaaggactgccgtcttctcggcaagttcgacctatctggcattccagcagcaccaaggggcaccccccagattgaggtgaccttcgaggtggacgccaacggcatcctgaacgtgaaggctgaggacaagggcaccggcaagtcggagaagatcacgatcacgaacgagaaggggcgcctgagccaggaggagatcgaccggatggtgcgcgaggcggaggagtttgcggaggaggacaagaaggtgaaggagcggatcgacgcccgcaaccagctcgagacctacgtgtacaacatgaagaacaccgtcggcgacaaggacaagctggcggacaagctggagagcgagga

SEQ ID NO: 414378 - DNA, 564 bp, Oryza sativa
  unsure (1)..(564): unsure at all n locations
ctcttctcttgcatcctcccatctcctctccggcggcggcggcgtcttgtgcgcgtgagaaagagaggagaagaagatggcgacgatcgtgaacacgacggaggaggagccgatgctggccgtggtgcgcttcaccgccgagctggcctgggcggacgccggcgccgacgtcgccgagccggaggtcacccgtctctgcgtcgaggcgcagcagcacatcctcgccgcccgctggctcgacatggcctccctcatgctcgcctccgccgacctcctcctccaatccacgcgcctccccgacaaggacaaagatctcgagtgcatcctcgctatcatctgcaacctcgtcaccaaggcccgatcccaagacgaggccctgcagatcgccgaactcatctgcgccaagctcacccaccagccccaagacaaaccggccctgcgcctcaaagttctcttcagcttgtacaatctgctcgggagcccctatgccaaggccttcgtctacaagaaggcactcgacctcgccgccgctgggaaggctgccgactgcattatncctacttt

SEQ ID NO: 414379 - DNA, 490 bp, Oryza sativa
attgatggttcaaggatattttccaggaggtctatgaagctgggtggaaatccaagtttgaggctgctggaatatggtatgagcatcgtctcatcgatgacatggttgcttatgcacttaagagtgaagggggctatgtgtgggcttgcaagaattacgatggagatgtgcagagtgatttcttagctcaaggctttggttcattgggtttgatgacatcagtattggtgtgccctgatggaaaaacaattgaagctgaagctgcccatggcacggttacccgtcatttccgtgttcaccagaagggaggtgaaaccagcacaaacagcattgcttcaatctttgcttggaccagaggacttgcacacagggcaaagcttgacgacaatgctagacttcttgactttgcactaaaacttgaagctgcttgcgttggaaccgtggaatctgggaagatgaccaaagaccttgctctttttaatcacgggtc

SEQ ID NO: 414380 - DNA, 513 bp, Oryza sativa
attttaaagttgaaatgtttctcaagacatatggcacatccaagcccatgaggtacactttctccgatgttaagaaaataacaagacggttcaagaataaattaggccatggtggatttggaagtgtctacaaaggtgagctaccaaatggagttcctgtggcagtcaagatgctagagaactccttaggagagggagaagagttcatcaatgaagttgcgaccattgggagaattcaccatgcaaacatcgtccgtctcctaggattttgctctgaaggaacacgacgggctttaatatatgaattcatgcccaatgaatcgttggagaaatatatattctcaaatggttctaatatttcaagagaattcctagtaccaaagaaaatgctagatattgctttaggcatcgcccgaggaatggagtacttgcaccaagggtgcaatcagcgcattcttcattttgacatcaagcctcacaacatatttgtggactacagcttcagtccaaaga

SEQ ID NO: 414381 - DNA, 561 bp, Oryza sativa
cacactctgtcaccacaacagccaccaactcctctcaacttcttgatccggcggcggcggcaagatgttcggcggcggcggcggcggcgggaggaagccgctggactacgaggagctgaacgagaacgtgaagaaggtgcagtacgcggtgcggggggagctgtacctgcgcgcctccgagctccagaaggagggcaagaagatcatcttcaccaacgtcggcaacccacacgcgctcggccagaagccgctcaccttcccccgccaggttgtggcgctgtgccaggcccccttcctgctcgatgatcccaacgtcggccttatcttccccgccgacgccatcgcgcgggccaagcactacctcgccatggcacccggtggactaggtgcttacagtgattcccgaggtatccctggtattaggaaggaagtcgccgagttcatcgagaggcgtgatggttatccaagtgatccagaacttatttacctcacagatggtgccagcaaaggtgtgatgcaaatgctgaataccattatcagacatgagagagatgggattct

SEQ ID NO: 414382 - DNA, 469 bp, Oryza sativa
cgcgttttgactccactactgcggttgcatatactactacacttgcagttgcatccagagcccgccccgcgtctctactcgctccgccgcgccgtcgtctctcccgacttcggcgacaagcgagcgacgcaggccaccgcgcgcggttcgttttcgcgagggaggccgtcgccgaccagccgccatggtctcgccggacaccatacgcacgggcatcggcgtcgtaggcaatggaaccgccctcgtgctcttcctctccccagtgccgacgttcatacggatctggaagaaggggtcggtggagcagtactcggcggtgccgtacgtggcgacgctgctcaactgcatgatgtgggtgctgtacggcctccccgcggtgcacccgcacagcatgctggtcatcaccatcaacggcaccggcatggccattgagctcacctacatagccctcttcctcgccttctccctc

SEQ ID NO: 414383 - DNA, 531 bp, Oryza sativa
gcgcaccttctgctgaaagtcgggaaaggcaatggcggcagtaagatctattgggtctctcccagtgcctaatgtgcaagcactggcaggaacttgcaacggttcatacgaccagatgtcttggaggcacattacgacagaggctacttgtgaggaggtcatcagcaactaccatggggacatggcgatgacaatcattgatctcagtaggttgttttgtccacaatcatcagcagcagagtgtgtgaagctgacacctgcctgccagtgtcggggattctttcaggtcatcaagcatggagtgccagaggaagtgattgataacttcaggagcatcattattgagttcatgagcctgccactggatgccaagacggagtcctaacagctgcccaacagccttgaaggctatggacagacctttgttgtctctgaggaccacaaactagactggcgagacatgttgtaccttcaagtgcatcctaccgagtcaagggacttgcgattttggccagtcaccctgcatctttc

SEQ ID NO: 414384 - DNA, 546 bp, Oryza sativa
tactgttgcttctatggacaccgcaattcatgaggatgattcagaaatagttgcaatgataaaagagttgctggagactcgcattcgaccagctgttcaagatgatggtggcgacattgaatatcgaggatttgatccagaaacagggatagttaagctaaaaatgcaaggtgcctgcagtggatgtccaagttcgtcagtcacattgaagtctgggatagaaaacatgctcatgcattatgtccctgaggtatctcttctgtgctttatttctgtttcctcaaaacctccactccttttggctcattatataaggcgttttatctgataagtaaaatgttgaaagaagttgcaattcctattagtttgttcagactgcttaaagcagtaatttatcctttgatctagcgaaattttaatatttcacacttctttggcaggtgaaaggagtagagcaagaacttgatggtgacgaggaagctgaactgactggccagttggaatgacttttctttcggccaaatctcaacatcttcacatgtcgag

SEQ ID NO: 414385 - DNA, 568 bp, Oryza sativa
  unsure (1)..(568): unsure at all n locations
cttttgtctcattgtctcctccgctccttgcgccgctgccaagacgagtcgcggctgaacaggggaggggcggcgatcttcatctggcgagcagagcatgggaggggatcctgttgatgaagctcccgtaactgaagaagaaccaccaacagtttccataattgatgtattctgagactgatttctctttcaaggatgccaacaaactgtgctctcttgttcggaagcagaaagcacttgccaaaaagaaaaggaaatggctgcggtctctgattccaagggaagacggtctcatcaaacctatcaaacgacccaagtttctaaaagatgcgcaagtgcaccatttacaccattcttggggtttcaaattgtactgattggaagcttgctgtctactaatgtgatcatgtcttgtaaacaaatgatctatttgttgctcatttcaaaatattgaattgttttgtaatatcacaccatgggtacttttatgctttattacntgaagcactaagaacataaatggatgatcaggtggcatttcaatatatggttctatgtattcatcttt

SEQ ID NO: 414386 - DNA, 543 bp, Oryza sativa
gcattagcttgctgggttttccgccacgttgcaagcaatcatttctttcgttgagaacagtggtgaccatatcaaatttgtaagggctgccaaacatcagatagttttccttgtcaagggtccaatatacttagtttgtataagttgcactgaagagtcatatgaaggattgaggggacaactagagctcatgtatggtcagatgctgctgattttgaccaagtctgtcaacagatgctttgagaagaaccctaaatttgatatggcaccattgctaggtggcacagatgcagttttcctatcacttatacatgcattcagctggaatcctgctacatttcttcatgcgtacacatgccttcccctcgcccaatccacaaggcaggcggctagtgcagttttacaagacattgctgattcaggagttttgtttgcactgttgatgtgtgagcacaaggttattagtctagtgggagcacaaaaggcaactttgcatcctgatgatatttttctactttcaaatttcatattgtcctctgaatc

SEQ ID NO: 414387 - DNA, 484 bp, Oryza sativa
gcgtgtgacgacgacgacgacgatcgccgccgccatcccgctcccgctcccgcctacggccacgactcagcccctccgccgggtccctacggccaagcgcctcctccggctgatccctacgctcgccacccgccttcccacgactacgctcatcctcctccggcgtatgggggagggggctacggcaacgtcgtccacgtttcccacgaggtctccgaccaccagaggcccacgccgcactacggtggatccgagtacatcagccccgtccaagagacccgcccttaccacggtggcggaggagccccaccggtgacccacaggatctactgcaaggccggggaggacaactacagcctcgccgtcagagatggcaaggtctgcctcgtccgctccgatcgcgacgaccacacgcagcactgggtgaaggacatgaagtacagcacgagagtgaaagacgaggaagggtaccctgccatggcgc

SEQ ID NO: 414388 - DNA, 539 bp, Oryza sativa
gtttttgcgagaagtccggctcgggcggcggcggcggcggggcggtgaagacaccgtgcgacttccttaagcccatcagggggcgccccgtcgtcgtcaagctcaacttcggcgtcaactaccgtggcctttcggcttgtcttgacggttacatgaacattgcaatggagcaaacggaagaatatgtcaatggtcagctgaagaacaagtacggagacgctgtcatacgaggaaacaatgttttatacatcagcacatcaaagcgtaccctcactgatggcgcatgagagggtgagacagcatgcagctcaatgcctgccactatcgcacctttgatgtcctgtgcgatcaatgtctaaagaaatactgccttacaatctcgtagttgctacatggaaagagatgttttctggaatggaggattatcaccagatatttgtaccccaaaaaaaacttatgttcgaatctagtagattctacagattgtggtctgctgcactcttgatgcatgtggtgattattggaccgccagggatatg

SEQ ID NO: 414389 - DNA, 536 bp, Oryza sativa
ggagtttctgcagaatagagcacaggtatgcaaagatggaatccaagagtgccgctatttgaaatccaagatttcagaccagaagggtgttcctcttgattcaacaactttgatcactgccagtgacagacaggaaggacttgctttgataactgaaaagatgcatgcactggagatgattaaaaagaaggtggagagagcaaggagttctcttgaatctttttgcaacactaaaggtgatattagctgcgatgattttatcaaggcagctgaacagcaattggagatgaggaatcaatgtcggatcatcaaccagcaagcacggctatggaagttgaatgaccttgctaaaagggagaataagcgtgatattgttctgaactattgcagtttgttgctccaaaggatcgtgttaaacattagtgatatgtctggcatatttgtgagtaattcattgaatggaaccaaaataggccaggcattttcaaatttgaatgcatctgtggcattcaatttgtattcaaagctgagggaac

SEQ ID NO: 414390 - DNA, 478 bp, Oryza sativa
ggcttttgtcgacggtgcaccgcgtcgaggagctcaaggcgatcctccgcatgctgcccatctgggcggcgggcatcctgttggtgacctcggcgtcgcacaacagcagctttgcgatccagcaggcgcgcaccatggaccgcgacatcacgccgcacttcaagatcccgccggcctccatgctcatcttcaccaacctcgccatgctgctcaccctcgccttctacgaccgcgtcctcgtccgcgtgctccgccgtttcacgggccacccaaacggcatcacccacctccagcgcgccggcgtgggcatgaccattgccatgctcgccaacgcggtggccgcggtcgtggagagtcgccgcaagtccgtggccgcggcgagcggcatgctcgacgcgcccaagggtagctcgctgcccatcagcgtcttctggctggtgccgcagtacgccatacacggcgtcgccgacgccttatg

SEQ ID NO: 414391 - DNA, 474 bp, Oryza sativa
ggccgttctttttcttttttttttttttgaggaacagagcatcggtacgtagtatattcgcgatggacaaatcgatatatatatatataggatagagccgcaggaggcatatttagattgagaagaaagaatcattagttgacggagaccttgccgaccatcccagctccggcgtgcggttcgcagtagaagccgtatgtgccggggacggtgagcgtgacggagaaggtctcgccgggggcgtcgaggtactcctcctgcgatatcttggacacgtcgacgccgatcggaaccgtgtcctcgtcgaacaccacgttgtgagggaagccggcgatgttcttgaacgtgatggtctcgccggacttgacggtgaagacgatcgggtcgaacaccagcacgccgacattggcgccgagaagcacctcctgcgccatggcgccgcccgcgagcatggcgctggcggtcacggccact

SEQ ID NO: 414392 - DNA, 508 bp, Oryza sativa
gccggttcgcgcagctcggcatcgccttctccatcatcggcgagatcatcaccggcaagggcgccctcgcgcagctcaacatcgagaccggcgtccccatcaacgagatcgagccgctcgtcctcttcaacgtcgtcttcttcttcatcgccgccatcaaccccggcaccggcaagttcgtcagcgacgacgacgaagagtagaattacgaggatcgatcgatctaccgaggtttcgccgccattgttgtgcttgcgcatcattgagactttctttcaagtgtatatgtactgtgtacgtgtaggtgtaaagacgtaccttgcttaattagttgtgaattaatgcccatggagaaaattaacgtgagatttagctacttgctgcggtaaatctaattggagatgcctctccaattagtcttaaccagagacatccaattagtcttaaccagagacacccatactttaggagttttggctgctattaatccattgagcatctatgcttg

SEQ ID NO: 414393 - DNA, 441 bp, Oryza sativa
gcagttcaagaggaaagccacgacgatcttggaggagtacttctccacggacgacgtcgcggcgacggcgaacgagctgagggagctgcgcgtgccgtgctaccactactacttcgtcaagaagctggtctcggtggccatggaccgccacgacagggagaaggagatggcggccgtgctgctgtcctcgctgtacggcgacgtcatcgaccggccgcaggtgtacaaggggttcggcaagctcgccgagtcctgcgacgacctgtccgtcgacacgcccgacgccgtcgacatcctcgccgtgttcgtctgccgcgccatcatcgacgacatactcccgccggcgttcctggcccagcagctgacgtgcctgccggagggatgcaagggcgccgaggttcttcacagggcggagaaaagctacctgtccgggccgcacca

SEQ ID NO: 414394 - DNA, 509 bp, Oryza sativa
  unsure (1)..(509): unsure at all n locations
ttatatgtttccctacaatacaatggagcctgtcaatgatttccaggaaggcatttcaacagagcatgcctttgaggcagagcctgtgccatcattgtcggaaacaataacgccacgatcaatggtggtgagcttcatccttagtgtaactctcagcatcgtcgccatgaaggtcaccttgagctctggcttcattccngcgttcagcatcccagccggcctcctcggtttttgtgtatcccgtgcgtagatccgcattcttgactacttcgcagtggcacaactaccattcacacgccaagagaacaccatcatccagacctgtgtcggcgcatgcacctcgatcacattcaccggtggctttgggacatatattcttgcaatgggaaagaaagcagctgcaggggatgtcaatgcccaaaataacgttgaggagccaagctttgccaggatgatcaccttnctcttccttattaagcttgctggcatgttcatcatcatgcccttca

SEQ ID NO: 414395 - DNA, 556 bp, Oryza sativa
gtttataaatagcatctttagaaaggcggatttctaattcaatgtcaaatagtcgaggcatgcatgataatttagaactctcactgccttacattgaaatacctgagcaactcaatgagaaagcgtttcaacttgaggcaagtgagtgccaagagtttctgttgtcagaaagaaccacatttcagcacaacacaggcattgtccaagaaacaggatctcaagctcacaaaggaaagccattgcccagtgatgtatctgatgaatttctgaaaaaggcgtcacaggcagagattgatgaactgaagcagagggtatctgaactcactgaagccaaatctcaactagattcttgtaaccataagcttctagaggaaagtacatatgccaagggcctcgcctcagtgaccagtgttgagctgaaggcactatcagtaaaagtcaccaaactgatgaagcagaacgagaggcttagcagcgagttggcatcaggaagaaaccaaagaagaagaagccatggtcccaggggagctaggagggaaagccacacgaaacgata

SEQ ID NO: 414396 - DNA, 543 bp, Oryza sativa
gcaccaaccccgtctccttcctccattcctccgccggtagaaccttctagaagctctcctcctcctcccatggcggcgacgatcgtgtccgtcaaggcgcgccagatcttcgacagcaggggcaaccccaccgtcgaggtcgatgtgtgctgctcagatggaacctttgcaagggctgcagttcccagtggtgcatcaactggtgtctatgaagctctcgaattgagggacggtggatctgattacttgggaaagggtgtctccaaggctgtcgacaatgtgaactcggttattgccccagctctgattggcaaggaccctacgtcacaggctgagcttgataacttcatggttcagcagcttgatggaaccaaaaatgagtgggggtggtgcaagcagaagcttggtgctaatgcaatcctggctgtgtcactggccatttgcaaagctggagctatcatcaagaagattcctctgtaccagcacattgccaaccttgctggaaacaagcaactggttttgcctgtacctgcattcaacgtc

SEQ ID NO: 414397 - DNA, 502 bp, Oryza sativa
cggctatgggcaagatcgcggcgctcaagaaggtgcggggcgacatcctggagcccgagagcgtccgcttcatggcccgcgagatcctcatcctccgccgtcttcaccacccctaacgtcgtaaagctcgagggcctcgtcacctcccgcatgtcctgcagcctctacctcgtcttcgagtacatggagcacgacctcgccggcctcgccgccagccccgacatcagcttcaccgagccacaggttaagtgctacatgcaccagctgctgtccgggctggagcattgccacaacaatggagtgctgcaccgcgacatcaaggggtcgaacctgctgttggataacaatggcatgctgaagatcgcatatttcggcctggcgtcgttgttcgatcccaacaagaatcagccgatgacgagcagggtggtgacgctgtggtaccgcccaccggagttgcttttgggctccacggattatggggtgggcgttgacctgtggagcg

SEQ ID NO: 414398 - DNA, 495 bp, Oryza sativa
gcaatttcatatggtggagcaaagggtgggattggatgcgctcctggtgaattaagcacgagtgagctggagcgtttgacacgtgtatttacacagaaaattcatgatcttattggagctcattactgacgtgccagctcctgacatgggaactaattcacagaccatggcttggattttggatgagtactcgaaattccatggtcattcaccggcagttgtcactgggaagccaatagatcttggtggatcattaggtagagatgctgctacaggaagaggtgtgatgtacgctactgaggctcttttggctgaacatggaaagtccatttctggatcaacctttgttatccagggttttggtaatgttggttcatgggctgcacgaatcattcatgagaagggtggcaaggtgattgcacttggagatgtgacaggctcaatcagaaacatgaatgggttagacatacctgctctgatgaagcacagaaatga

SEQ ID NO: 414399 - DNA, 439 bp, Oryza sativa
catgttttttcctcgcgccgccgccgccgccatgccgtcgcacaagacgttccagatcaagaagaagctggcgaagaagatgcgccagaaccgccccatcccgtactggatccgcatgcgcaccgacaacaccatcaggtacaacgcgaagcgcaggcactggcgccgcaccaagctcgggttctgagcttggggaggagaggaggacgaggcgccggacgccgctgccctgggaagaagaagaagaaggagaagctagggcttatgggttgcgtcgtgttcgtttcgaggttttgcctgtcctgaagagactatcagtagctgtgtgtatcttggagcatcataattttgctgattaaagaaccactttcttatcctgcctaaagttgtctgaattttatctcagctgcagtggattgatcagttgaactcccttgtt

SEQ ID NO: 414400 - DNA, 391 bp, Oryza sativa
ggcttcttctccccctcccggttcggttcggctcggttggggtccggttcgatttcggttttgccttcggttcgagggttggtgggaaagcatggcggcgccggatgctgagtaccgctgcttctgcgactgcctagcctgggccaccgacgaccgctccctcgaagccgccttgtccacctactgcgagagcctcgagtccaagatcatcaacgatcggtagacagtgaggtcgcgcgtgttcggatatcggacgatctcgagcagagcaggtcatgcacgacgccattgaggtgatgaacggcgaggagcttgacggccgaaacatcaccgtcaaacgggcccagtcgcgccgctccggaagctgaggctgcggtggctactgccagcg

SEQ ID NO: 414401 - DNA, 462 bp, Oryza sativa
cttgtttttagtgggttgagatggcggcgccggatgtggagtaccgctgcttcgtcggcggcctcgcctgggccaccgacgaccgctccctcgaggccgccttctccacctacggcgagatcctcgactccaagatcatcaacgacagggagacggggaggtcacgtgggtttggcttcgtcaccttctcctccgagcagtcgatgcgcgacgccatcgagggcatgaacggcaaggagctcgacggccgcaacatcaccgtcaatgaggcccagtcccgccgctccggcggcggaggcgggggctacggcggcggcggtggcggctacagcggcggtcgtggaggcggcggctacagaagaagtggcggcggcggctacaggcgccgtgagggcggctacggtggcggcggcggctacagcggcggccgtggcggcggcggcggcggctaccgtggcagcc

SEQ ID NO: 414402 - DNA, 536 bp, Oryza sativa
ccgaagttaccacagggtagaaaagatcaagatggacaccctgttcatttccaacactgaaaacggcgtacgcgtcaagaccttccagggcggctgcggcaccgcccggaaaatgaagttcggtgacatccttatgaagaacgtcaagaacccgatcgtcatcgatcagcagaactcctcgagcaacgaaattccctgcggatcaaagaacggaagcgcggtgacggtgggggagatcagctacacggacatcaccggcacgtcggcgtcggagcgggcggtgacgttcgcgtgcagcgaggcggcgccgtgcagcaagctgtcgctggagaacgtgaacatcaccatggccggcgggcagaacgcgtccgcctactgccaccacgcgttcgggaagagcgtcggcgtcgtcgtcccggactcgtgcctcgggaaggaggactacctccgccggcaagtccccgcctccgccgccgccgccggcggcggaacgcatgagaagggaggagaagatgacgatcggtgaaaccgcggca

SEQ ID NO: 414403 - DNA, 522 bp, Oryza sativa
gttcttctctggtgatcatcatcatcatcaagtcctattaaacatctggagaatggctgaagaaaagaagaccccatgcctgaatgagcggatcctgtcgtcgctctcgaagcgatccgtggctgcgcattcctggcatgatcttgagattggacctggagctcctcaggttttcaatgttgctgctgagatcacaaaggggagcaaagtgaagtatgagcttgacaagaagactggaatgatcaaggctgacagggtgctatactcatcggtggtgtacccgcacaactacggtttcataccgcgaacgctgtgcgaagatggggatccaatggatgtgctggtcctgatgcaggaaccagtgattcctggctgctaccttagagccaaggccattggcctcatgcctatgattgatcaaggtgagaaagatgataagatcatcgcggtttgcgttgatgatcccgagttccgccacttcaatgatctcaaggagctctctcctcaccgacttgctgaaat

SEQ ID NO: 414404 - DNA, 550 bp, Oryza sativa
cttctcattcccaactcatcgatccatcagtagctagctagctagctagctgcattgtccggcgagagagatagctgctgcagggggcggccatggggaggggcaagatcgagatcaagcggatcgagaacgcgaccaacaggcaggtgacctactcgaagcgccgcacggggatcatgaagaaggccagggagctcaccgtgctctgcgacgcccaggtcgccatcatcatgttctcctccaccggcaagtaccacgagttctgcagcccttccaccgacatcaaggggatctttgaccgctaccagcaagccatcggcaccagcctttggatcgagcagtatgagaatatgcagcgcacgctgagccatctcaaggacatcaaccgcaacctgcgcaccgagatcaggcaaaggatgggagaagatctggacgggctggagttcgacgagctgcgcggtcttgagcaaaatgtcgatgccgccctcaggaggttcgccacaggaagtatcatgtgatcagcacacagactgaaacctacaagaaaaag

SEQ ID NO: 414405 - DNA, 575 bp, Oryza sativa
aaaaaattgagagagagatggcagcaacagcctccctgaagagcagcctcctgctaccatctcctatctctgacttcagtagtgcagcactctccatctcaacccaagctaggagggaggcatggcagccaaggggggcaaggatgcaggtagcagcagctgcagactccaagaacattcttgtgatggggggaaccaggttcattggtgtcttcttgtccaggctccttgtcaaggaggggcaccaggtcacattgctcactagaggaaaggcccccattacccagcagttgccaggagagtcagatgcagagtatgcagagttctcttcaaaggtgttgcacttgaaaggtgacaggcaagactttgatttcgttaagacaagccttgcggcaaagggcttcgatgttgtttacgacataaacgggagagaagctgttgaggtagccccaatcctagacgcattgccaaaccttgaacagtacatctactgctcatcagcaggagtgtacctgaaatcagacctgcttccgcacttcgagaccgacgccgtcgacccgaagaggccgcacaag

SEQ ID NO: 414406 - DNA, 547 bp, Oryza sativa
cggtgccgcgaagttctccgggtgcgacgccatcgcgtcccgaaaagtttttgtgtcaaggagagggtaccagcaccttggggtcctttgccttcagagaaaccggaagcaatggcgtctgctactctcctcaagtcatctttccttcccaagaagtctgaattggggtgcccacccgccaggctgccgcccccaagccggtgactgtctccatggttgtccgcgctggtgcctacgacgatgagcttgtcaagaccgcgaaaaccattgcatcaccaggaaggggtatccttgccatggatgagtcgaacgcgacctgcggtaagaggcttgcgtcaattggccttgagaacaccgaggccaacctgcaggcttaccggaccctccttgtcaccgcaccgggcttgggacagcacatctccggtgctatcctcttcgaggagactctgtaccagtcaactgtagatggcaagaagattgccgacatcctcactgagcagaaaattcgtccaagtatcaaggccgacaaggggcttgtgccccttgc

SEQ ID NO: 414407 - DNA, 504 bp, Oryza sativa
gaagtccttgacgatccagccatcaggtggaaaggagggggctgtgggcctctccacgaccaagaccaacaagcagaatgccccagctaagctctaccacaagtctgggatgcgcaaggagttccgcaagatggctaaggctgccaagaaccaggttagtgacaactactacaggccagatctgaccaagccggctcttgcaaggcttagctcagtgcacccgagcctccaggttgccaagtctggtgtgaagaagaagaacaggcagccagccaagctgcaaatcgcttgaagctgcgcgtttgtgccatggcacctcttgatgctcatgtttccagctacctgtgagttctaaaagggtccagacttgaaatgagggatctctgttagaattggatcaaccttgtcacaaatctgccgtgtagttagtattctagacagtttatttgctcggggcccttacaaactgttggctttgcacttattatagtagctaatggcatc

SEQ ID NO: 414408 - DNA, 559 bp, Oryza sativa
gccttgtcgccgatccgatccgcctccgcctccgcctcgcggcccggcctgcctgcctcgccgccggtggtcccgatccgaggttgctcttgctgggcatcaaacatgggtctggtgaaggatggcgccgccgatttggaggaggggaccctggagatcggcatggagtacaggactgtttctggtgtggcaggacctctggttatcttggataaagtaaagggcccaaagtaccaggaaattgtaaacatccgattgggagatggcaccactcgccgtggccaagttctggaagttgacggtgaaaaggctgttgtgcaggtctttgaaggcacttcaggaatagacaacaaatataccactgtgcagttcacaggagaggtcctgaaaactcctgtctcacttgatatgcttgggcgcatttttaatggatctggaaaacccattgataatggcccacctattttgccagaggcctacttggatatctctggaagctcaattaatcccagtgaaagaacctatccagaagagatgatccaaacagggatatcaacca

SEQ ID NO: 414409 - DNA, 522 bp, Oryza sativa
ggttttcaagaaccaggcagctgtgaacccagagaggaccatcttcgatgtcaaacgtctcattggaagaaagtttgaagacaaggaagttcagagggacatgaaacttggccccttcccgaattgtgaacaaggacggtaagccctacattcaggtcaagatcaaggatggagagaacaaggtcttcagccctgaggaggtcagtgctatgatccttggaaagatgaaggagactgctgaggcataccttggcaagaagatcaacgatgctgtcgtgactgttcctgcgtacttcaatgacgcgcagaggcaggcaaccaaggatgccggtgtcattgctggcctgaatgttgctaggatcatcaatgagccaactgctgctgctattgcgtacggtttggacaagaagggtggtgagaagaacatccttgtctttgaccttggtggtgggacattcgatgtcagtatctcgaccattgacaacggtgttgttgaggtgttggcccccatggtgacactca

SEQ ID NO: 414410 - DNA, 518 bp, Oryza sativa
gtgtagtttattgatcacattaattatgctgccacgggtgctttttgagatcatactttgattgttggcgatgacctcatccagccagatgtgatactggggtgaaagaaaaatgaggcccctgtattatttcagggaattggacatgcggataatccatctaacagcttggtcctgaaaggctcatccgcctgtgcgttagcatacttagcaaacccaaagtctaagttggcttcccctccatgtgttacagggagggctatatcactggtttctgttatgcaggcaagaaacaatgctcgggcctcgatatccggatcactcgatctgtgtagcaacaggctcctaaaatctgatgttcagaatgccggtagcaacataaggcatgagaaagctggaaaagaacaatttgtgacagaaacaagccaacgtgtcttccatgagaggggccatctagaggcagtgaatgtcaaacataaccaggttggggagacaaatgagcctggtatgtaccgcat

SEQ ID NO: 414411 - DNA, 488 bp, Oryza sativa
aattttatcactcggattatgtggagaaatattcttggccaaggtttgtatcagctcctggtgctggctactctaatggttattggaaagaaactccttagtattgaagggcctcaatctgataaaaccatcaatactctcatattcaactctttcgccttttgccaggttttcaatgaaataaatcgtagggagatggaaaagatcaatgtcctccaaggtatcttcagaaactggatctttgttggtatattgacagctactgtcatattccaagtgatcatagtagaatttcttggcacttttgcaaacactgtaccattgagcggggagctgtggctgctcagcgtcgtcattggctcaattagcatgatcatctctgctatcctcaagtgcattccagttgaatttaataagacagatactaaaccccatgggtatgagttgattcctgaaggcccagagattctatagcagcttcacgggag

SEQ ID NO: 414412 - DNA, 515 bp, Oryza sativa
aaaatggtagcatgtcaaggacaccacaaccattggggaggggaaaatgttctctcctggtgacctgagggctacatttgataatcctgaatatgacaagctcatcaactactatgtcaaggagaagtacacattgcgttacactggaggaatggttcctgatgtcaaccagatcatagttaaggagaagggcatcttcaccaacgtgacgtctccgacagccaaggccaagctgaggctcctgttcgaggtggcgccgttgggtttcttgatagagaaagccggcgggtacagcagcgacggcaaacagtcggtgctggacaaggtgatcaacaacctcgacgagcggactcaagtggcctacggttccaagaacgagatcatccggttcgaggagactctctacggctcatcgaggctcaccgccggcgccaccgtgggcgccgccgcctaatcttttgctgcaacgcgagcccagtgtctctgcaggcctcaaaaacgctgaaactgcagtc

SEQ ID NO: 414413 - DNA, 373 bp, Oryza sativa
ccgggggccgccccaccattactgcctcgacccacccctcccgccagatttttaacaccgggaacccggcatcacaacccgggggggcaccttaacacccctgggggggtaaaaaaaaaaggcgctccatccttagctcccaagcaaaaaacacacggagctcctaccaccaccacggatccatggaaccaccccccgcagtacccaaaaccatgccaatcctgagacgtacctatttcatgtgctctccaaggctggggcgctggtgaactacatcttgttttcgctcttcgtgaagagcttcgacatcatattcgtcatcaccgtgttcctggcggcgctcgacttctgggtggtgaacaatgtgagtggc

SEQ ID NO: 414414 - DNA, 468 bp, Oryza sativa
aagttgaatgcttataataagatatatcacatgttaatacatcttctcaatttaacatacaagcaacgatgagacatcccctcaagagtttaaaatccaatctcatatataatatcgtgggggtggtacagtttcatgtagatatcttttcatggagtgctactgctagctaggggaacttggtcactgataataataactacagcaggtgatcatgcaagtgcaaaccaagataatactccctccgtttcatattataagactttctatcattgcccacattcatatagatgctaatgaatctagacatatatatgaatgtgggcaataatagatagtattataatatgaaacggaggaagtatatcttatgcatgtgcaccggcaacaaaccagctaattacactatacatacatgctatgctggctggatcttgctgtttctcattctccagagcccccagaaga

SEQ ID NO: 414415 - DNA, 465 bp, Oryza sativa
ggtcttcaggaggtcatcacctcgtgtgacaaagggggacgttcaaaaggctgctgggggtctgaaggggtctgaccaccggcgtgctaccaatgttagcgctagactgctctcacaggagaagaagctcaaccttccagaccttactacaaccacaattggttcattcccacagactgtggagctcaggagagtccgccgtgagtacaaggcacaaaagatctctgaggaggagtacatcagtgccatcaaggcggaaatcagcaaggttgttaagatccaggaagagcttgacatcgatgtccttgttcacggcgagcctgagagaaacgatatggctgagtacttccgtgagcagcttactggttctgcatccactgccaacggatgggtgcaatcttatggatcacggtgtgtcaagccaccaattatctatggtgatgtgagccgccccaaccccatgac

SEQ ID NO: 414416 - DNA, 514 bp, Oryza sativa
cgcgtgagcaccgacgacccaacaacacaagacggggggagcgacgagacgacctggggccaaagcgaaaaaagttgctgcatccttagcgcgcaagcgaaagcgagagggagctcgcgcgcgcgcgagggatcgatggatcgaccccaggtagttaccgagaactatgccaatcctgtgacgtgcctctttcatgtgctcttcaaggctggggcgctggtgttctacatcttgttttcgctcttcgtgaagagcttcgtcatcatattcgtcatcaccgtgttcctggcggcgctcgacttctgggtggtgaagaatgtgagtggcaggatattggtcgggatgcggtggtggaatgagatcgacgacgagggcaacagcgtgtggaagtttgagtgcctcgatggggaggctcttgctcggatgaacaaaaaggactcgtggctgttctggtggactctttacttgactgctgctgcatggatcattcttgggatattttcacttatcagac

SEQ ID NO: 414417 - DNA, 448 bp, Oryza sativa
tttattcttggcggggaggagggggccaggccggcgggggttttttagggggcgcgggggcctatgttcctgtgcctgcacgggttccggactagcggtgagatcatgctgaagcaggtggtgttgaagtggccccccgacgtcacggtgcgcctcgaccttcttttttctgacgcgccgttcctcgccgaggggaagtccgactactagggcatcttatacccgacctactacgagtggttccagttcgacaagaattttacagagtacaggaattttcgacgaatgcctgaactacatggaggaattgatgattaaagaagggccttttgatggactgatgggtttctctcaggtctcgattctatctggcgcccttccgggcctccaagaacaaggtttggctcctgctagagttgctaagatcaagtacgctataatcataaga

SEQ ID NO: 414418 - DNA, 310 bp, Oryza sativa
tttgttgtttaaaaaacataactatcgagttcaaaattcataaatctcaacagtttgatcatccgcagcaccagcagctcagagtagcaaagcatttaaactgggtactcaaaatatctgccacaaaactcaggacaagtacagaaactgggaaagctatcaggtgaggttcgattgaattctgatggcctaggccttgagcttgccgaagaacctctgcttctcgtcggtggtctggaagcgaccgtgcccgaacttggacgaggtgtcgatgaacttgagcttgatctcctccaggggcgagcccgga

SEQ ID NO: 414419 - DNA, 492 bp, Oryza sativa
ttcatctcgcgccgccgccgccgtcgccgtcactgtggtcaggtaaggaggaggaagatgtcgcacaggaagttcgagcacccgaggcatggatccctcggcttcctcccgaggaagcgctcctcccgccaccgcggcaaggtgaagtccttccccaaggatgacgtatcaaagccctgccaccttacttccttcgttggctacaaggctggaatgacacacattgtgcgtgaggtcgagaagcctggctccaagctccacaagaaggaaacctgcgaggctgttaccatcatcgagacccctccgcttgtcattgttggactcgtggcctatgtcaagacacctcgtggacttcgctctctcaactctgtctgggcccagcaccttagcgaggaggtgcggagaaggttctacaagaactggtgcaaaagcaagaagaaggctttcactaagtatgccctttaagatgacagtgatgctggcaagaaagaa

SEQ ID NO: 414420 - DNA, 420 bp, Oryza sativa
gcgtgtgatggcgacagacaacaagcttcttggtgaggttgatcttgttggcattccaccagcgccaagaggtatgccacagatcgaggtcacatttgacatcgatgccaatggaattgtgacggtctctgcaaaagacaagtctaccgggaaggagcagcaaatcaccatccgatcctccggtggcctctcagaagctgagattcagaagatggtccaggaggctgagcttcactctcagaaggatcaggagcggaaagccctcattgacatcagaaacaacgctgacactaccatttacagcgttgagaaaagtctgggagagtacagggacatgattcctgcagaggttgccactgagattgagacagcaatcgtcgatcttcgctctgtgatgacctcagatgacatcgagaagat

SEQ ID NO: 414421 - DNA, 539 bp, Oryza sativa
cacgacagctattgatgtgtggtctgctggctgtgtggttgctgaactacttctagggcagcctgtttttcctggtgacagtggcgtcgaccaacttgttgaaattatcaaggtactgggtactccaacaagggaagaaatcaaacatatgaatccgaactacactgagtttaagttcccccaaatcaaagctcacccatggcacaagatctttcataaaagaatgccatctgaagctgtagatcttgtgtctcggcttctgcagtactcaccacacctccggtgcagtgcattggaggtgttaattcatccattcttcgatgaactacgagatccaaatgctcgcttaccaaatggccgtactcttcccccactattcaatttcaagcctcgtgagctgaaaggagcatcaatggaatttcttgtgaagttggttccacagcatgctaagaagcaatgtgccttcttaggattatgagcagacagttcatacactaatcgggtattacgttggtctacttggttccgtagaacagcat

SEQ ID NO: 414422 - DNA, 344 bp, Oryza sativa
gaatccaataccaaatttcatgtggttgaagcaaaactggcgagttacacacctcttacatgagaaagatccatagcatccgcgcacatataaaagacccagatacactaaaccagttggatgtccgttacacgcatggcaatcggaaccgagattttaagcagcagagaaacaagacaggtaggtctaaggtagggcttgtttggcagcattacacattagcgatcgtcacctcggcctcgaccccaggctcgatggcgatggaggcgatctgcttcacaacatttggggagctgatgagacccatcccccgcttgtggctgcggaacttgaaacgatcccat

SEQ ID NO: 414423 - DNA, 539 bp, Oryza sativa
cgcctcctgcgccgccatccccgagcaccaccaaccggggcccctgagcgagcggagcggagaacgcgaggcgaggcgaagcaaacatggcggcggctgcggtgtacggcgccggcggcgcgatgaagggcgggaagctcggcatggaggaggcgcgggagctgcagctcaaccgcatccgcatcaccctctcctccaagaacgtcaagaacctcgagaaggtttgcgctgatctggtgaagggcgccaaggacaagcagctgcgcgtcaagggccccgtcaggatccccaccaaggtgctccacatcaccacccgcaagtcgccgtgcggtgaaggaacaaacacatgggatcgtttcgagttccgcatccacaagcgggtgatcgatctcatcagctccccagatgttgtgaagcagatcacctccatcaccatcgagcctggtgtcgaggtcgaggcgacgatcgctgatgtgtaatgctgccaaactagcactaccttagacctacctgtcttgtttctctgctgcttagaatct

SEQ ID NO: 414424 - DNA, 482 bp, Oryza sativa
attgaggacaggtatttattccaacttccaagcagtgatcggacgtgtctagtacaacaaaattttggttccatcaaaagaactaaccataccaagcgtcacctgatttaacatacattgacacatttgtcatatgcaccatccaacttagttccgtggtattttcccttcattgttatgaaagttctactggggtaccacagagctcaccaatctctttctccagaagttcaacaagattagctcctgtccgcctgtatatccaacaatttgttggtgcatcccaatcgaacctagaaggcccactcacaggtgaagatagccaaatttgtctgtttggtgcttgcttgtttacaacatatgtccccaactctcctaaccttagtgttagaacttgattcccatagtctatgtcaaagccatccatttgaagagagtcaccatattcctcaagtttttcaagcggccatggattggctcat

SEQ ID NO: 414425 - DNA, 456 bp, Oryza sativa
ggttatcgttatcctcctccccacttcgacggcgcgccggcggcgatggcgtcgcggaagctggtcctcggcctcacggcggcaaggcggttgaggtctcgcgctcccgtgctcgtctcgacctctcccttcctggaagcctccacatcgacttctgacgccaccgccgccaccgcgacgcggggttcggggttggggccgtgggggctgttcctatcttcgagggccctctcgtcgactcgtccggtgtctctgtccgccggtgatgcgcctggctcgtccgctgcggaccacaggtcgatactaccagaggatgagtatcacaaattagcagatgagacaatacatgacctgcttgaaaaacttgaggaatatggtgactctcttcagatggatgggggtgacatagactatgggaatcaagttctaacactaaggttaggagagttggggaca

SEQ ID NO: 414426 - DNA, 468 bp, Oryza sativa
gttcgcgcggtgcgtagcgatggcccggccacgcgtcctcctcctacctctcctcgcggtcgccgcggcggtgctctcgtcgccgctcggccgcgcgctcgccaagacggccaagaagagcaacgacatcgtcaatggcccactgctcacctccaagatcaacgccaagcgcacgctgatcgtcggccccgaggacgagttcaagaccgtgcagtccgccatcgacgccgtgcccgtcggcaacaccgagtgggtcatcgtccacctccgctccggcatctacagggagaaagttatgatcccggaaaccaagccgttcatctacgtgaggggcaacggcaagggccggacctcaatcaaccacgagtccgattactcccacaacgccgagtttgccgtcttcaccgtgcacgcggacaacgtcatcgtcttcggcctcagcatcaggaacagcgcgcgcgccgggct

SEQ ID NO: 414427 - DNA, 413 bp, Oryza sativa
gtggacaacatgcaattcataaaacgtataggattacacgtacgcacagatcgtgtacatactgaagaaaattaagatagaacatgcacacagggagcgtgcaacataaagtatacagctgatacagagagagagtggagcgctgcatgtctgccgcagctgttattttaattactttgttcatatatgctgtagcaagtacgtgcttaattactagctgatcaactccgattgagctagcatgttaagctcgatcgatcgatccaagcaggattgatttcactgaccttgttgcagtcggtggagaggctgatggggaagccaacgttgacgccgcacttgccggggacgccggcgacggtgccgaggttgagcgacttgatgctgccggcgaggctcttgaggcagcggca

SEQ ID NO: 414428 - DNA, 463 bp, Oryza sativa
gttattattagctatctagcttagctactcgatcgtgagatcatcgatcatccgacggtcaaatcagtaatcttgaatatggcggctttgaacggtaaggtggtggtggcggtgatggtggtggcgatggtggcggtgatattcaactctttcgtcttttgccagggtttcaatgaaataaattgtagggagatggaaacgatcaatgtcctccaagggatctttagaaactggatctttgttggtatattgacagctactgtcatattccaagtgatcatagtagaatttcttggcacttttgcaaacactgtaccattgagcggggagctgtggctgctcagcgtcgtcattggcttaattagcatgaacatctttggtttcctaaggggattccagttgatttaatagaccaatctaaccccatggtatgagtgattctgaggccagagatttatgcagt

SEQ ID NO: 414429 - DNA, 465 bp, Oryza sativa
agtcctccgccgtccggccctgcttgatccccagcgacgccagcacggcgcccagctcgtccacggtgatgaacccgtcgccgttccggtcaaacacgtcgaacgcctcgcgcatgctcgcctcatccacgtcgcaggcgccgccgccgccgccgtcgacgcgcatgacggtctcgtacagctgggtgaactcatccatgtcgacgcacccgtcgccgttggcgtcgatgcgggcgatggtggcggcgagctcctccctgtgcacgggcatcccgagcctctcgagcgactccgtcagctcctcccgggtgatccggccgtcgccgtcacggtcgaacagctcgaacacccgccggagctccgcctgctggtcgcacgccatcccctcgccgccggccggcgcccgccgccggtagctggtggtgcagccggctgcacgtacggccacaggggagcgtgtgggag

SEQ ID NO: 414430 - DNA, 440 bp, Oryza sativa
atcgtggcctccgacgcctccctcccacacgctgccgtgtggccgtacgtgcagccggctgcaccaccagctagcggcggcgggcgccggccggcggcgaggggatggcgtgcgaccagcaggcggagctccggcgggtgttcgagctgttcgaccgtgacggcgacggccggatcacccgggaggagctgacggagtcgctcgagaggctcgggatgcccgtgcacagggaggagctcgccgccaccatcgcccgcatcgacgccaacggcgacgggtgcgtcgacatggatgagttcacccagctgtacgagaccgtcatgcgcgtcgacggcggcggcggcggcgcctgcgacgtggatgaggcgagcatgctcgaggcgttcgacgtgatggggcggaacggcgacgggttcatcaccgtggactagctgggcgcc

SEQ ID NO: 414431 - DNA, 455 bp, Oryza sativa
gtactcctcgtgatggacacccgcctccccctcctgctgctcctcgccggcgtcgtcgccgccgcggcgccactgctcgccaccgcccagctctccgccgacttctactcctccacctgccccaacgtcgagaaggtcgtctccaccgtcatcgagcgcaagttcaaggaggaccctaccacctccgccctcctcctccgcctcctcttccacgactgcttcgccaatggatggcgacgcgtcgatcttgatcgacccgctgtcgaaccagagcgcggagaaaggaggcggggccgaacatctcggtgaagggctacgacatcatcgacgagatcaagacggagctggagaaggagtgcccgcaggtggtgtcgtgcgcggacatcgtggcgctcagcacgcgcgacagcgtgcgcctcgcctggggccccactacgacgtgcccaccggccgcc

SEQ ID NO: 414432 - DNA, 512 bp, Oryza sativa
  unsure (1)..(512): unsure at all n locations
ctctcctctcctcctccccttccaccccacgcgcccggcacccacccacgcgccgcgccctaaccctaaccctaaccctactcctctcgctcgccatgtccgagcccgcgtcgcccccaccggccatgcccgaggacgccgcgccgccgcagccgcagccggagccggcggttccagcgggggaggaggccgccccgtctctggagaggaaggaggagttgctgccggtggaggagaagatctcggaattagatgaatcacagtcacagcttatggggagacttcggggactcaaggaggatttgctgaattggaggagcagtttagatacacaagtgacaaaatacaaaagcgaactctctgatatcaaaactgcgctgaatagcgaaattgaacagctgagatcagattttcaagaattgaggaccacccttaagaagcagcaggangatgtatcacatagtttgaagaatttggggctacaagatgctactgacaatgatgggaacaaa

SEQ ID NO: 414433 - DNA, 469 bp, Oryza sativa
ctcttttgtaaacttgccctctgtggtgacctcgttactgccagcaccttctgaaggctcgaatttatacccaaatgcatcaagagcagccgccatgctatctgcgggatcacgatctttacatgaactggcagtcaaggatgtggcaacctatatgggtagatcggacaggtcgctatttggaacgcatttgatttgtgctgggcaaggatatcaggaggcaggtcctcagcttgaggatgctggttgctcgcgagaagcgtgaactgcggctgcaaggactgtacatgggtctgagtatgctgggatcctacagaggcggcgagatgatattcttcggagcgtacatatcaggggtagagctctagtactatatgtagctgcttgagcactacctgaggctatagaaacgcttcgcactaccagcgaccagacatgtgaagcgctgttgttgctagcgtgccatgag

SEQ ID NO: 414434 - DNA, 537 bp, Oryza sativa
ggaatgttagaggatggtaccatatttgtcacaagaggtcatgatggtgacgagccattcgagtttaagactgatgaagaccaagtggttgaagggcttgacaaagcagtacttagcatgaagaaaggagaagttgcattggtgactattccaccagagtatgcgtttggatctgatgaaacaagacaagatttgtctgttgtccctcctaattcaactgtttattatgaggtggagcttgtgtccttcgataaggagaaagaatcatgggacatgaaggagaatactgagaagattgaagcggctgcaaagaagaaagatgaagggaatgcttggtttaagatggaaaagtatgccagggcttctaagagatatggaaaggctttaaacttcatccagtatgacagctccttcagtgaagaagagaagcagctgtccaaaccactctaggtgagttgcaagctcaacaatgctgcatgtaagctgaagcttaaagactacatggaagcaaaggaactgtgtactgaggtcctggag

SEQ ID NO: 414435 - DNA, 405 bp, Oryza sativa
aggtgggaaacgaataaaatcattattgcaaaaacatcatcttcttcttcatcttcttaggggacacaacaccaactcgatcatgatttcgtcgcactaaacccattttccccaacccaaagacaacgaactcgctggccacaaatccatccaaccacaattaaccactgctaagctacgggcccccacttcacttgccggggaccaagttggtggcgtacccccaggcgttgttgttgacggggtcggcgagggggcccgcgaggctctcgagggggcccttgccggtgaccatggcctggacgaagaagccgaacatggagaacatggcgaggcggccgcctttgagccccttcaccttgagctccgggaacgccccggggtcattggccaggccgagcgggt

SEQ ID NO: 414436 - DNA, 507 bp, Oryza sativa
atcgccatctctctcagctctcacagctcactgcatgaatggccgcggccaccatggcgctctcctccccggtgatggcccgcgcggcgccgtcgacctcctccgcgctcttcggcgaggcgcggatcaccatgcgcaagaccgccgcgaagcccaagccggcggcgtcgtcggggagcccgtggtacggcgccgaccgcgtcctctacctcggcccgctctccggcgagccgccgagctacctcaccggcgagttcccgggcgactacgggtgggacaccgcggggctctccgccgacccggagacgttcgccaagaaccgggagctggaggtgatccactcccggtgggcgatgctgggcgcgctcggctgcgtcttcccggagctcctcgcccggaacggcgtcaagttcggcgaggccgtgtggctcaaggcgggctcgcagatctttagcgagggcgggctcgactacctcggcacccgagcctgatccacgcgcagagcat

SEQ ID NO: 414437 - DNA, 507 bp, Oryza sativa
gagttattatgaatccccttaaagcccttcatccgtttagtgcttctagttagccatggagtgctcaatctccactgagcatttcttggctatcttttagaactgtgattgcatccactgtgcttattagcttggcaagatagttttgcgattccacaagcaaccacatcctgaggcttcaaagtttgtacaatacagatgtactactaggaggatatcttttgcgatgaatattgcaacttatttgatgtactattaggaggatatcttctgcgatgaatattgcaacttatttgatcaagaaacctacttcaccaaccgggagctggaggcagtccagctcccggtgggcgatgctgcgcgcgctcagctgcgtcttcccggagcttcttgcccggaacggcgtcaagttctgcgaggccgtgtggactatggcggcctcgcagatcttcaacgagggcgggctcgactaccttggtaacccgagcctgatccacgcgcagagca

SEQ ID NO: 414438 - DNA, 527 bp, Oryza sativa
aaagaatactgcataaatttcatactggacaagaagaacaaattttgaacgagttaaaagaagttccaggtaaactgaactgaatgctctatgctctctcccaaacatttcattgagagctccacgaaaaggggggtgtcatttttctgaattacaggtcattatagggggtagctaagcagcagcaagaaatgggtgggttgctaaacaagaggcatatacggattataccgaaagaaatgtaattcagcaccccattattgcgcagttataaacgaatacaccagcacgctccttcaccgagagcacttcccagtcagcaccaccattcccatcttcagggcaccaagaatgcagcaatattacttcaccacggggtactctatggccaccaataacaagcaatctatcaccacatgccttgaaagctaggccccaaccattggaagagtcagctctgactggcaatggcttcactatgttccaggtgttatttccttttgcgacttctttacacatttgttgct

SEQ ID NO: 414439 - DNA, 476 bp, Oryza sativa
gttggataattcctggcagaagtacacattaacctactttgttttggtcaggagtgagtacttatctagggattcaaggaagccttcagatgggaagaaccaacttcttgactgctgtgatgattcagaattagatttggatgtgctgtatgctgatttggatagtcaaagaactggagcttaagttgcagaaacctgttgtcaagactcaatcaaaaggtgactcatgtgccagtggatcaaatgattgcttctttcctggccttcacgacgacctggctcaggactgccttgcttgggcgagcagatcagactacccatcgctatcttgtttgaataagaagatcaatttgttaatcaacagcgggtctctgtgcagactgagaagaaaatatggcattgttgaacactgggtgtatctagcgcgtagcttgactgcctgagaagcatttgatccttcagcatgcgatggatga

SEQ ID NO: 414440 - DNA, 499 bp, Oryza sativa
atgcttaaatgcactgtctgcgctgaagcaatgcaagtgggatgctgagatttctaccagggcatcatccctttaccatttgattgacttgcatggtaaaacagtgacctccattgtgaacaaagctgagcctctagaagctcacctgacccttacaccagtaaaaaaggatgaacctcccattgaggaaaagaacattaactcatcagatggtggtgcattggaaaaaaaggatgcttcaagatcacacaggaaaaatggttttgcaagaccactcttgaaatgtgcagaagatgttatactaaatggtgatgtcgcaagtacttctgggaaagccattgcaagtttacaggtggaagcttctgatttggcaaacttcctcaccatggaccgaaatgggggttacagaggttctcaaactctcctaagatctgtactgtcagagaagcaggagctatgcttctctggtgtctcattgctctggcagaagctcattgca

SEQ ID NO: 414441 - DNA, 416 bp, Oryza sativa
tttttgcgtgggctagtgttatgcttggtgctgggcttgtggtaaacaaagcctgtgaactggttcttgaggtgaaaccatgggccaagacaagccttgcccctggatctggggttgacactaaatacttgttacagagtggccttcaagaatacttgaacaagcaaggtttccatgttgatggatatggttgtaccacttgcattggcaactctggtgatctatatgaatgtgcatcaggtgccatttcagaaaatgatgatgttgctgctgttgttttgacagtcaactcgaacttcgagggtcgtgtgcacccattgacccgggctgatgaccttgcttaaccacgtcttgtggttgcatatgcagttgctggcactggtgacattgattttgagaaagaaccgattggagtt

SEQ ID NO: 414442 - DNA, 388 bp, Oryza sativa
ccacggatcccaaatgttctcattgattgatagcgatatcatagaagcagcgacccgaattaagatttaaaaccaaccccaagaaggatcgcagatccaactccaccgaatcgatccaagaactccgcctaatccaaccaaaccatgggcgatctcatttcaccaacacgacacgaactcataaaaggactaacaccaccaccacctcctctttatttagggactcgacgactcaagacgactgatactggcaaagggcgaaggggaacagcccagatctaggagagctggccgcagtcggcgatgacgaccggcttggcggtgctcccgccgggggatcccaccttctcgatggccttgacgacgtccatgcccttgacgacgcggc

SEQ ID NO: 414443 - DNA, 510 bp, Oryza sativa
aaacagcaaaaaaaatcaaacaaaaagaaaaaatattccccatctgtgaaattcgcaaaaccctagcgcggcggcgatgtcgaacacgagggtgttcttcgacatgaccgtcggcggagctccggcggggcggatcgtgatggagctgtacgcgaaggacgtgccgcggacggcggagaacttccgcgcgctctgcaccggcgagaagggcgtgggcaagagcggcaagccgctgcactacaaggggagcaccttccaccgcgtgatcccggagttcatgtgccagggcggcgacttcacccgcggcaacggcacgggaggggtagtcgatctacggcgagaagttcgccgacgaggtgttcaagttcaagcacgacagccccggcatcctgtccatggcgaacgccgggcccaacactaacgggtcccagttcttcatctgcaccgtgccctgcagctggctggacgggaagcacgtcgtgttcggtcgcgtcgtcgagggcatggacg

SEQ ID NO: 414444 - DNA, 444 bp, Oryza sativa
gggaaacgaataaaatcattattgcaaaaacatcatcttcttcttcatcttcttagtgtacacaacaccaactcgatcatcatctcgtcgcactaaacccatcttccccaacccaaagacaacgaactcgctggccacaaatccatccaaccacaattaaccactgctaagctacggtcccccacttcacttgccggggacgaagttggtggcgtacgcccaggcgttgttgttgacggggtcggcgaggtggtcggcgaggttctcgagggggcccttgccggtgacgatggcctggacgaagaagccgaacatggagaacatggcgaggcggccgttcttgatctccttcaccttgagctccgcgaacgcctcggggtcatcggcgaggccgagcgggtcgaaggcgccgcccgggtagagcgggtcgacgacctcgccgag

SEQ ID NO: 414445 - DNA, 505 bp, Oryza sativa
gccatctctctcagctctcacagctcactgcatcaatggccgcggccaccatggcgctctcctccccggtgatggcccgcgcggcgccgtcgacctcctccgcgctcttcggcgaggcgcggatcaccatgcgcaagaccgccgcgaagcccaagccggcggcgtcgtcggggagcccgtggtacggcgccgaccgcgtcctctacctcggcccgctctccggcgagccgccgagctacctcaccggcgagttcccgggcgactacgggtgggacaccgcggggctctccgccgacccggagacgttcgccaagaaccgggagctggagggtgatccactcccggtgggcgatgctgggcgcgctcggctgcgtcttcccggagctcctcgcccggaacggcgtcaagttcggcgaggccgtgtggttcaaggcgggctcgcagatcttcagcgagggcgggctcgactacctcggcaacccgagcctgatccacgcgcagagca

SEQ ID NO: 414446 - DNA, 511 bp, Oryza sativa
aagatcacagaaaatccacggatcccaaatgttctcattgattgatagcgatatcatagaagcagcgacacgaattaagatttaaaaccaaccccaagaaggatcgcagatccaactccaccgaatcgatccaagaactccgcctaatccaaccaaaccatgggcgatctcatctcaccaacacgacacgaactcataaaaagactaacaccaccaccacctcctccttatttagggactcgacgactcaagacgactgatactggcgaaaggcgaaggggaacagcacagatctaggagagctggccgcagtcggcgatgacgaccggcttggcggtgctcccgccgcgggatcccaccttctcgatggccttgacgacgtccatgccctcgacgacgcggccgaacacgacgtgcttcccgtccagccagctgcagggcacggtgcagatgaagaactgggacccgttagtgttgggcccggcgttcgccatgacaggatgccggggct

SEQ ID NO: 414447 - DNA, 519 bp, Oryza sativa
gcgatctgaagtgaaacagcaaaaaaaatcaaacaaaaagaaaaaatattccccatctgtgaaattcgcaaaaccctagcgcggcggcgatgtcgaacacgagggtgttcttcgacatgaccgtcggcggagctccggcggggcggatcgtgatggagctgtacgcgaaggacgtgccgcggacggcggagaacttccgcgcgctctgcaccggcgagaagggcgtgggcaagagcggcaagccgctgcactacaaggggagcaccttccaccgcgtgatcccggagttcatgtgccagggcggcgacttcacccgcggcaacggcacgggaggggagtcgatctacggcgagaagttcgccgacgaggtgttcaagttcaagcacgacagccccggcatcctgtccatggcgaacgccgggcccaacactaacgggtcccagttcttcatctgcaccgtgccctgcagctggctggacgggaagcacgtcgtgttcggccgcgtcgtcgagggcatgg

SEQ ID NO: 414448 - DNA, 522 bp, Oryza sativa
gctttaggtattcctgaaggtctcatccctgtgcaacttctgtgggtcaatcttgttacagatggtcctcctgcaacggctttggggttcaacccacctgataaagatatcatgaagaaacctccacgaaggagtgatgactcgttgatcactccatggatcctattccgttatatggtcattgggatgtacgttgggattgccacagtgggagtgtttatcatttggtacacacatggctctttcctgggaattgacctggctggtgatggtcactctcttgtctcgtactcccagctctcaaactggggccagtgctcctcatgggagggtttcaaggtgtcaccattcacagcaggtgcccgtacattcaacttcgatgtgaacccatgtgattacttccagggcggcaaaattaaagcgacaaccctctccctgtctgtcttggtggccattgagatgttcaactcgctgaatgcgctgtcggaggatggtagccttctgagcatgcctccgtgggtt

SEQ ID NO: 414449 - DNA, 478 bp, Oryza sativa
gatggcgccgtcgcagccgaagtccgggctcttcgtgggcatcaacaagggccacgtcgtcaccaagcgcgagctgccgcctcgcccgtccgaccgcaaggggaaatccaccaagagggtgacctttgtcaggaacttgatcagggaggttgctggatttgctccctatgagaagcgtatcactgagcttctcaaagttggcaaggacaagcgtgcactgaaggtggcaaagagaaagcttggcacccacaagagggccaagaagaagagagaggagatggctggtgtcctcaggaagatgaggtctggtggcggtcacgctcacaccgagaagaagaaatagagtatctccaagttcatgaagtccatggcaatattgtcttgttgagtttactcttgtagaaccctactactagaattgcactctattatccagctaaacatcatggtgttagttctgtgttaaaaacctcctgtc

SEQ ID NO: 414450 - DNA, 464 bp, Oryza sativa
acatagcaatggattatattcaatactaatatctgtaaaaatcaacagtacagtacgacagttctagtgcaacttatatatacggctattaccatttagcagccaaattacatcattttgtcaaaatatccgacaacagcgtgacgagcacgctggcacctacggatacaaaagttacatgtagctggtatccagattccacccagctatgtaccaaaaaaaggtaggaggagaagaagaggagagaagaaaaattaacccgcgaaaaaagaaaacctcaatgttgctgcagtaagatgatgagccatcagagtgatctgaagctttctattgggtctgattcctcaagcattgaggctgcctggaagcagtcagcagcatcagctagcctgccatcatgcttgtggaccttccctaggtagaaccatgccatccggttcgtcggctcggccttaggcgtccga

SEQ ID NO: 414451 - DNA, 519 bp, Oryza sativa
atccttttgctcatgataatattgaaaaagtggtaccttgggaagactcactgggatccatcagtgatggagcatctaacatttgcattgtcactttgtggtcagacatctgttcttgccaagcatcttgaagaggttttacctggaatataccctcgaactggaagatggtatagtctagctctttgcaattatgcagcttcacataatgaagctgcattaaatttgttaaggaagttgttgaataagaacgagagtcctggtgacataatggccctcctgttagctgctaagttatgcagctcagattattctcttgcttctgaaggagtagagtatgcaagaagagctgttacaaatgttgattcatcagatggtcatttaaagagcgctgcgctccacttcttggggagttgcctggctaagaagtctagaatcgctacatctgatcaccaaagatctctcttgcagactgagtctttgaagtcacttagtgaagcgatttctcttgatcgtcac

SEQ ID NO: 414452 - DNA, 270 bp, Oryza sativa
aaattatcacatatatataactgatttgatcaaaggtggccgacaaaccaaatgtcgatggatacaggttagcttatcttctttacaagccaaaaagtacactcagggccatttcattacgattgttccaacttacaagtcggtagattggaaaacaaaatgcaactcattttcccaactagcatgatcagagggggcgggtcctgcgtgaacccccgtctcgaactatttcacccgaaaaccaacccatgcgcccagtccactgttgat

SEQ ID NO: 414453 - DNA, 503 bp, Oryza sativa
tgggggtgccgcggtgttattggggggaccgacgcgtccggcgtatatgtgtagccaacacagggggttaacatcagagggggattgattaagaggaggggggggcatgtagcacaagagcggtaactgcgactgtgctgacaagagccagtgcgtgaagaaaggtaccagctatggcgtcgtcatatttgaagccgagaagagccacttcgaggaggccgctgccggctaggagaacggcggctgcaagtgcggcaccagctgttcctgcaccgactgtaagtgcggtaagtgaagttacgaagcaaccgaacactctccgccggtgaggtacctaccttaattagtccacaataaaaaccacctatatgagtgtggtttgtgtgtgtgctgattattgctgaataaaacccgtgtgttatcgattaattaagcagttggtggcttcgaagactatgcgtgtatcaacgtatgaatttgtgtgatgtgatgtacccgtgcta

SEQ ID NO: 414454 - DNA, 354 bp, Oryza sativa
gttccagcaacaaatttccgcgcattacatactcaaaaaagaataagcaacgtatacagtaggaaagaaaggatttgcgagcccagatctctattacaagcctcctacatttctaccatcacgaggtgtactcgaaaggttgtggtggctgctgctcgaattcgacagccatggcagatgaggcctgttggcctgtgccaccacttgaactaccagtggtcgcagccacagttgaggtggcatacctgagtgcgagtacctccgcctcggctggctgcatgtcctggaggaggaagaatccagatggagcaggtttcaccgggacatatcggctgccctcgataaactttgatg

SEQ ID NO: 414455 - DNA, 524 bp, Oryza sativa
gaaaattttgctttccttttgaatgtgaggaatcgtgtggcttcacaaactcctgagtctaaccctgatagtggatcggctttaccggatgatcaagctgctaatgcgggtacgggcagcacagaaccagctggggatgttcagatgagagatgacacagctacaccaaatggtagttctcacacagtagatccaaatgaggtagcacgtgctgataggcttgcgaaaataaaaggaatactgtcaggggagacatctatccagttgacactgcaatttttgtatagccacaatagggcggatcttttaattttgaaaacaataaagcaggctgtggaaatgaggaacagtgtttgccacagtgcaacaatatgtgccaatgcaatcatgcatgctggaacaactgtagacaccttcctaagagagaatctggagtggttaagcagggcaaccaattgggctaaattcagtgcaaccgctggactaagtgtcattcacagaggccatcttgaacaagggcgagc

SEQ ID NO: 414456 - DNA, 397 bp, Oryza sativa
tattggaaagctggtcgcctgcggcgccgccgcggactaaccgccgggacccaccccgccggctgtgtttttgactggcggtcttatcgctcaccaggggcggaaggtcaaactgggtacagaaggaactcctgcacacgatttggggactgacccacctggggaagagatcatgcagaagcctttacctctggcagtggactggcaaagcaatcactggatcctcatgacggatatggaccttggggctgcacggtactgatttggcacacgtggcaaatgacttataagtaggacacacaatgggtctttgctgggaatcgacctgggtggtgatggtcactctcttgtctacgactcccagccttgaaactggggccggggacccttatgggga

SEQ ID NO: 414457 - DNA, 500 bp, Oryza sativa
aagattcattcattcattcatttgatcaaagcaaacgagacgagctttcttcttgcgatcaaaaacacagatgggcaaccacacagttaacacaaactagatagttccacacaaaactaacgatgataacgatcggatgatgatgatggtagctcgattagatagatagataacttggccatgagggccccaccgctcagttcctccagttcccgtcggagttgccgccgccgcggctgccgtagccgccgccgtagccgccgccaccacggccgccaccgtagccaccgccaccgccgtagccgccttcacggcgctggccgtagccaccgccgcctccgcctccggagcggcgcgactgggcctcgttgacggtgatgttgcggccgtcgagcttcttgccggtcatcccctcgatggcgtcgcgcatggcctgctcgctcgagaacgtcacgaacccgaacccgcgcgacctccccgtgtcccgatcgttgatgatc

SEQ ID NO: 414458 - DNA, 431 bp, Oryza sativa
ctccccctcccggttcggttcggttcggttcgggtgcggttcgatttcggtttttccttcggttcgggggttggtgggaaagcatggcggcgccggatgttgagtaccgctgcttcgtcggcggcctcgcctgggccaccgacgaccgctccctcgaagccgccttctccacctacggcgagatcctcgagtccaagatcatcaacgatcgggagacggggaggtcgcgcgggttcgggttcgtgacgttctcgagcgagcaggccatgcgcgacgccatcgaggggatgaacggcaaggagctcgacggccgcaacatcaccgtcaacgaggcccagtcgcgccgctccggaggcggaggcggcggtggctacggccagcgccgagaaggcggctacagcggtggcggcggctactgtggcggacgtggt

SEQ ID NO: 414459 - DNA, 480 bp, Oryza sativa
gctgttgttcccgatcaagaacctccaggacttgaccggcgaggtgccggagagctacaggaacctggtgcagagcgaccggccggccacgtcggtgtcggagctcccctacgtcttcgtcgacctcgaccatggctgcacctaccacgacaagctcttctactgcgacgacgaacgccatttcctccaccgggcgccatggctgctgatgaggaccgacggctacttcccgacggcgctgatcctcaacccggcgtaccaagacgagctcgaccggctgttccctcggaaagactcggtgttctacctgttggcgcactatcttctccatccgacgaacaaggtttggggattgatcacgaggttctacgactgctacctgagggattcggacgaacggctcggcattcaggtcagggtgttcgacggggacaccccgttcatgcacatcttggatcagatcaccgttgcacgttacag

SEQ ID NO: 414460 - DNA, 377 bp, Oryza sativa
atatgcaaccagcataacaaaattacaactgcactggacgggttatattcttcacaagcaaaaaagtagactcaggtccatatcatcagcatcgttacaacttacaaggaggtagattggaaaacaaaatgcaactcattatcccaactagcattaacagagggggggggtcctgatgaacaccgtccacgttttattctcagcatagacaaagcataccggtatttcccggtcgggggccatggaatccctgggaagcaaaaggattctactgggccttggccatgtgggggatcaggtcgatgacacggttgctgtaaccccacttgttgtcgtaccaggcgacaaggttgacaaagttattgttaagagcaatt

SEQ ID NO: 414461 - DNA, 492 bp, Oryza sativa
ccacaacagccgaagggcaataatcaggctcagaacaagtttaaaccgaacagaaaatagagagttttaaacgacacagtgcacacagcgggcatatgataataacggtcaatgcaacgagtgccatggccgtgcacaaaacttaacgaattagtaaaagctagatatcttaaatgcagacacgcaaaccaccacttgaacgaggatcatttcttcttggcggcagccttggtcaccttggcaccggttgggtccttcttctccacgttcttgatgacgccaacagccaccgtttgcctcatgtcacgcaccgcaaaacgaccaagaggagggtactcagagaaggtctccacaaccatgggcttggtgggaatcatcttaaccataccagcatcaccgttcttgaggaacttgggctccttctccagctccttaccagatcgtctgtcaatcttggtcaccagctcagcaaacttgacggcaatgtgggag

SEQ ID NO: 414462 - DNA, 534 bp, Oryza sativa
ccactaagtactactgcacggtcatcgatgcccctggtcaccgtgacttcatcaagaacatgatcacgggtacctcccaggctgactgtgccgtgctcatcattgactccaccactggtggttttgaggctggtatctccaaggatggccagacccgtgagcacgctcttcttgctttcactcttggtgtgaagcagatgatctgctgctgcaacaagatggatgccaccactcccaagtactccaaggcccgttacgatgaaatcgtgaaggaagtctcatcctacctgaagaaggtcggctacaaccctgacaagattcccttcgttcccatctctgggtttgagggtgacaacatgattgagaggtccaccaaccttgactggtacaagggccccaccttgcttgaggctcttgaccagatcaacgagcccaagaggccatcagacaagcccctgcgtcttccccttcaggacgtgtacaagatcggtggtattggcaccgtgcctgtgggtcgtgctgagactggagtct

SEQ ID NO: 414463 - DNA, 392 bp, Oryza sativa
gagagagatattacgagacatcaaatgacacaaaaaccaagaaaatagtaggcacaagttatatcatcagaatacatagcaactgcaagtgctcaaaaattgtgacaaagcatcatcttgtccacagaaaactgcaccaattaccgaagaaaaactagcagtaccatgtctatccatcacaacgacaaacacttcctcatctataatgttttaaggtcttataggggtcttatgcggtggtggcagcagccttggtggcagcagaaagcttggacctcctctttgccaagctctcactcctgcgttccctctgctccttgagcctctgggcaagcagcttctggtactcggcagcctcggacttctttttgggaattctttgcttcttctgg

SEQ ID NO: 414464 - DNA, 474 bp, Oryza sativa
caagatcatgggaggctgtgacaagcaaggtttccccatgaagcagggtgtgcttacttgtggacgtgtccgccttctcctccacaggggtaccccctgcttccgtggatatggcaggcgtgatggtgagcgcagaaggaagtcagtccgtggttgcattgtcagccaagatctctctgttatcaacttggtgattgtaaagaagggtgataatgaccttcctggcttgactgacactgagaagcccaggatgaggggacccaagagggcatctaagatcaggaagctgtttaaccttgccaaggatgatgatgtccgcaagtatgtcaacacttaccgcagaaccttcactaccaagaacggcaagaaggttagcaaggctcctaagatccagaggcttgtcactcccctggactcttaaaggaagagggcgagaatcgcccagaagaagcaagaattgccaagaagaagttc

SEQ ID NO: 414465 - DNA, 326 bp, Oryza sativa
gcaggtttttggttcacgtggaggaggaagcggtcgcggaggttcaggcggtggaggaagcggcggcggcggacgaggaggaagcggcggccgcggcggaggaggaagatgcccgatcgacacgctgaagctgggggtgtgcgcgaacgtgctgaatgggctgataaacgtgcagctggggacgccgccgcggcagccgtgttgcagcctcatccagggcctcgtcgaccttgagggcgccgtgtgcctgtgcaccgacctacgcgccaacatccttggcatcaacctcaacctacccatcaacctcagccttctcgacaactact

SEQ ID NO: 414466 - DNA, 528 bp, Oryza sativa
aaagatgcaacaactgcagaagtagagggtgttctaacacaaagcggaacttctcccgattacaaggttggcaacagaataacagacatcagccaaaaaatggttgaagaactaaaggagtctgtgaatgaagagcaggctgagaaaaaggaggcagccgaggagaagccagatgaaccagatgagatcgtactgaaagtcgacatgcactgcgaaggatgtgcaaagaaggtcgagaaatccctattgagatttgaaggagtcgaaaacgtcaaggctgacagtcgatcgaagacggttgtggtgaaaagcagggccgcagatccctcaaaggtctgcgagagggttcagaggaagacaaagagaagagttgagctgattttccctcttcctccacctccagaagaggagaagaaagaggaagctacagcaccacctccagaagaaaagaaagaggagccaccgaagacaataactgtcatcttgaaggtccagatgcactgcgacgcttgtgcgcagattctgcaa

SEQ ID NO: 414467 - DNA, 526 bp, Oryza sativa
  unsure (1)..(526): unsure at all n locations
ctgtggctcgaagcgtatttctcttctgcgccttcgcttttgcctaagcacgatgtctgctacaatggacatcgacggcgccgccgccagcgccgccgcgggcggtgggagacattcggagaaggagctcttcagcgcggcggagtccggggacgccgcggccttctcctccctctcccccgccgacctcgccgccgcgctcgccctccgcgatgaggacggccggtccctcctccacgtcgccgccgcctccggccacgcccaggtggtgagagtgcttgccgcgatgggcggcgacgcggcggccagcgttgtgaacgggaaggacgaggaggggtgggcgccgatccacacggcggcgagcagcggaaaagctgagatcatctccatcctgctcgatcaaggtgctaatgttgatttgacaaccgatgctggcccgactgctcttcattatgctgccagtaaaggacggcttaatatagcagaaacactaatagcgcacagtgcacatgtcaacangaaagat

SEQ ID NO: 414468 - DNA, 505 bp, Oryza sativa
agaatgcataagcaacacaagggattaactcatcactcacttagctaattaaatcttcgaccatgtcggacaagtgcggcaactgcgactgtgctgacaagagccagtgcgtgaagaaaggtaccagctatggcgtcgtcatagttgaagccgagaagagccacttcgaggaggtcgccgccggcgaggagaacggcggctgcaagtgcggcaccagctgctcctgcaccgactgcaagtgcggcaagtgaagtcacgaagcaaccgaacactcgccgccggcgagtcacctaccttaattagtccacaataaaaaccacccatatgagtgtggtttgtgtgtgtgctgattattgctgaattaaacccgtgtgttatcgattaattaagcagctggtcgcttcggcgactatgcgtgtatcaacgtatgaatttgtgtgatgtgatgtacccgtgctattctcagtgaaattaatcaatcgtgtattcgtgtggtttgcctagt

SEQ ID NO: 414469 - DNA, 387 bp, Oryza sativa
caactgttctatggtcagccccctccagcgtttatcaacacacagcctggtttcggcttccagcagcctcttatgcctgggatgaggccaggtgcaggtccaatgccgaactttatcatgcctatggttcagcaaggacaacagccgcagcgtccggctggtaggcgtgctggtgctggtggaatgcagcaacccatgccaatgggtcagcaacagatgatggctaggggcggccgtggctatcggtatcctacaggacgtggcatgcctgatcctgcaatgcatggtgttgggggtggtgtgatgccatcttcatatgagatgggaggcatgcccatgagagatgctgctgcgtcacagcctgtacctattggagcattggctact

SEQ ID NO: 414470 - DNA, 507 bp, Oryza sativa
aaaaaaatatctcccctcgaagcgaagcgtcgaatcggcttctcaagatgcagatctttgtgaagaccctcaccggcaagaccatcaccctcgaggttgagtcctcggacaccattgacaatgtcaaggccaagatccaggacaaggagggcatccccccggaccagcagcgtctcatctttgctggcaagcagcttgaggatggccgcaccctggccgactacaacatccagaaggagtccaccctccaccttgtgctcaggctcaggggaggcatgcagatcttcgtcaagaccttgactggcaagaccatcacccttgaggtcgagtcgtctgacaccattgacaatgtcaaggccaagatccaggacaaggagggcatccccccggaccagcagcgtctcatcttcgctggcaagcagcttgaggatggccgtaccctggccgactacaacatccagaaggagtctaccctgcaccttgtgctcaggctcacgggaggcatgc

SEQ ID NO: 414471 - DNA, 300 bp, Oryza sativa
ctactcagtacttggtgcaatacggagcatcacctttctttcaatggggcaggtagccctcatgaaccaggacatggtcctcacggagagctcatcctaccttaaggactcagtcctggacggccgcatcccgttcaacaaggcgtacggaatgacggcgttggagaaccacggtacgaacgcccgctttacccgcggcttcaacgagggccagaataaccactccgctaacaccaacaaggagttgctggacctctacaccggatgcgacaccgcctgcaccggcgtccaggtcggggg

SEQ ID NO: 414472 - DNA, 406 bp, Oryza sativa
aaatcaaactgttgtttatcatagtaaatcttcccggagaatcagatgctcagaattcatagtgttcttcagcatcttacaacttacaagatggcgcagatatacaagcgcaactatcttaaagtaagctgtaggaggaaatggaaccatttctaacaacgggaaaaatataggttatagaaggaaaccatttgaacaaattaatagggaaataaattaggaggatcgtttccgtccgatctcaatagaactggacgtttgatacgtagatggcgtctggcatccagttgaccgggatgacgtctttggcgatgaggctcttgccggactcggtggtgacgcgaatggagaagggtgccttgagtggcgtggcggtgtttatcctccagatggcgccccacgacag

SEQ ID NO: 414473 - DNA, 495 bp, Oryza sativa
ttaatggaaaaaaaaacaaaacacaccaagccaaataaaagcgacaatgggatcgctcaccaccaacatcgtcctcgccgtcgccgtggtggcagcgctggtcggcggcgggtcgtgcggcccgcccaaggtgccacccggcccgaacatcacgaccaactacaacgccccgtggctccccgccagggccacctggtacggccagccctacggctccggctccaccgacaatggtggcgcgtgcgggatcaagaacgtcaacctgcctccctacaacggcatgatctcctgcggcaacgtcccaatcttcaaggacggcaggggatgcggctcatgctacgaggtgaagtgtgagcagccggcggcgtgctcgaagcagccggtgacggtgttcatcacggacatgaactacgagcccatctcggcgtaccacttcgacttctccggcaaggcgttcggcgccatggcttgcccgggcaggagaccgagctccgc

SEQ ID NO: 414474 - DNA, 477 bp, Oryza sativa
cgaagaactcaccctgcacagaagagtttcctgtgactccaaacaatccatatggcaaaacaaagcttgttgttgaagatatttgccgtgatatctaccgtacagatcctgaatggaagattattctacttaggtacttcaatccagttggggctcatcctagcggataccttggggaagatccatgtggcattcccaacaatcttatgccttatgttcagcaagttgctgttggcaggaggccagctctgacaatactaggaaatgattatgcaaccagagatggtaccggggtccgagattacatccatgtggttgaccttgctgatggacatattgcggcattgcagaaactctttgagagctccagcatagggtgtgaagcatacaaccttggaactggtaaaggtacctctgtgctggagatagtcaaggcatttgagacggcttctgggaagaaaattcctttgattattg

SEQ ID NO: 414475 - DNA, 353 bp, Oryza sativa
gcattttatatatgaatgggagagtaaagcgggtggggggggctgtggaaccactatgggggggaacccatcctcttttcttgaaaagctatcctggctgaacatgaggtagccgataacgggatcaattacttactgggcgagagagggtgatgccaactggttggaacatgctgtagcgtttatggcttacggttgatggtgtacttatgcaactgaggacacaccacatgtattgctctattggtagtgactaagcaaaacccatggtactgcgtgactggtagcaaatataggggacctttgctagtgtgcctgcaaagggatacatgttcgactctgcagcatatcag

SEQ ID NO: 414476 - DNA, 451 bp, Oryza sativa
actgaggcataaagtgagagaccgtggggggatcgatcaccggagcggcgatcaatgacgacgctcaccgtgcccgccgccgtgccgcccgtcgccgaggactgcgagcagcttgcgcaaggcgttcaaagggtggggcacgaacgagaggctcatcatgtccatcctcggccaccgcgacgcggtgcagcgccgggcgatccgccgtgcctacgccgaggcgtacggcgaggagctgctccgcgccctcaacgacgagatccacggcaaattcgagagggcggtgatccagtggacgctggacccggcggagcgggacgcggtgctggccaacgaggaggcgaggaagcggcacccggcgggccgcgcgctcgtcgagatcgcgtgcacgcgcactccatcgcagctcttcagttggaagcaggcgtaccacgagcgcttcaagaggtcg

SEQ ID NO: 414477 - DNA, 457 bp, Oryza sativa
gcaaggaatgcggggtcttaacaaaatgggaaaagctagcctacaaaattagaggctaattctgacaagcaactccggggtacaaaggggaccaacacacgatggaaaaaaggcacaggcaacaccattatttgttccgattaaccgagacaatttgattcaactgcgggcaaaatttaaaggcgacaccagtaaaaacaatgctgggatgctcttagaccgtttacgcacgcggcttcccaccaagggttgggaactgagcctgatcttcaatggatggggcagatgtagaatatgggccacgttggtaaccaccaccatatccacgaccggcacgatctgcacgcccccttgcacgaccacgggcgccataggacctttcttcttccgcaggcttcaggaactgattgatgctcacagacttgttggcacgctgattgcgctcagcattttcctt

SEQ ID NO: 414478 - DNA, 431 bp, Oryza sativa
acatgataaaattattattgtcttgaattatgtaaacgatgataacaaatccttttccagctacaaaagaaccagcataacaccaaagaattataaagttgcttaagtaatctctcccttcatctcaaaaagagctatatctagggggcctaggccacagcaacactttcacttaaagggtactttccatcctgcgacacacaagctcccaggatcaatctacttggccttgccgttctcgacagcagcagccgaggggttcagctcatcccaggcctcgatccaggtgaccatggcatcggcaagcttgacgaagtaggggtcgatcttgccgagcttctccctgacctgctcggcgagggagaggtagcacttttggacggtgtcgcactccttggggatggtggcgttctggaagaaggggatgatgt

SEQ ID NO: 414479 - DNA, 525 bp, Oryza sativa
ctcatttctatcacctcctcctcctcctcctcttcctgcgggcgcgcgagatccagggagagggagagggagagatcatggcggggacggtgacggtgccgtcggcgtcggtgccgtcgacgccgctgctcaaggacgagctggacatcgtgatcccgacgatccgcaacctggacttcctggagatgtggcggcccttcttccagccctaccacctcatcatcgtgcaggacggcgacccgaccaagaccatccgcgtccccgagggcttcgactacgagctctacaaccgcaacgacatcaaccggatcctcggccccaaggcctcctgcatctccttcaaggactccgcatgccgctgcttcggctacatggtctccaagaagaagtacgtcttcaccatcgacgacgactgcttcgttgccaaggacccatctggcaaggacatcaatgctcttgagcagcacatcaagaacctcctcagcccgtccaccccgttcttcttaacaccttgtatgatcccta

SEQ ID NO: 414480 - DNA, 437 bp, Oryza sativa
  unsure (1)..(437): unsure at all n locations
gtgctttcaatggactttgggcgataccattcacttttggagttgcggtcttctgcttcgaaggattcagtatgactttggcactagaatcatcaatggcagaacggagaaaattccgctgggtactttctcaagcagttgtcggtatcataattgtctatgcatgttttggagtttgtggttacttagcctatggggaggccactaaagacatcataacacttaatcttcccaatagttggtcttctgctgccgttaaggctggtctttgcatagcactggtattcacatttccagtcatgatgcacccaatccacgagattgtcgaggaaagattccaatcaagtggatgtttcccgaagctctcgcacaaggttcgcggngctgaatgggtgggcctgcactcaagccgcatcgtcatgggaactatcctgtct

SEQ ID NO: 414481 - DNA, 532 bp, Oryza sativa
gttctctggcagtgagactacttcagtttggttagaggtttctgaagttaaaggagatgatgtggtttgtgtgataaaaaattcggctactctggctggttcactgttcaccctgcattgttctcagattcatatcgacttacctacactgtctgatgaggacaaggaggttatcagaagatggggagctccaaacaagattgacttcctctctctgtcttatacaagacacgcggaagatgtgcgacaggcacgtgagttcctctcaaagttaggcgaccttagccaaactcagatttttgccaaaattgagaatgttgagggtttgaatcattttgatgaaatcctgcaagaggcggatggtatcattctgtcaagaggaaaccttggaattgatcttccacctgaaaaggtgtttctgcttcaaaagtctgctctgcacaagtgcaacatggctggaaagcctgctgttgttactcgtgttgtggacagtatgactgacaacctcaggcctactcgtgcggaggctact

SEQ ID NO: 414482 - DNA, 533 bp, Oryza sativa
aattctcagcttatagtcaggtgaggtctgagctgaggttgagagatggcacaggcaatggcgtccatgaccgggctgtcgcagggcgtgcagctgccggccgggcccaggcgcgccggcggcaggtccaggctcgccgtcgtcagggccgacgccgccgccgccgacgtccagaccggccgccgcgccgtgctcggcctcgtcgccaccgggatcgccggcggcgccctcgcgcaggcggcgctcgccgaggccgccaagcccatcaagctcggccccccgccaccgccctccggtggactccctgggacgctgaactcggaccaggcgagggacacggacctgccgctgaggcagaggttctacctgcagccgctgcacgcggcggaggcggtggcgagggcgaaggagtgggcccaggacatcatcaacctcaagccgctcatcgagaagaagcagtggccgatcgtaagggacgaccttcgtctcaaggccttctacctgcgctacgaccttaaaacccgtcataactc

SEQ ID NO: 414483 - DNA, 479 bp, Oryza sativa
ggagaaaagcaataaacaaggagtcaatactgcaatagtttcaagaaaagtaaattactcttagttcccaaagacactcttcaagatacattacgacaaggttccatagctgcaaaatattatcctagggcaaaacatcacccaacgaaacgcttcatcaagtctcgggtggttcttaggcttatcgcttcttggacacaccgacagtcttacccctccttccggttgtcttggtgtgctgcccacgcacacggaggccccagtagtgcctcagaccacggtggttcctgatcttcttgagcctctcaagatcatccctgagcttcatgtcgagcgcgttggagacaacctgggagaacctcccgtccttgtagtccttcttcctggtgaggaaccagtcgggcaccttgaactgccgcgggttcgccaccacggtcaacagccgctccagctcctccggcgtaagctcaccggccctc

SEQ ID NO: 414484 - DNA, 509 bp, Oryza sativa
cccggaggaatccgccgccgccgccgccgccatgtcgctgatcgccggggaggacttccagcacatcctgcgtctgctgaacaccaacgtcgatgggaagcagaagatcatgttcgcgctcacctccatcaagggtgtcggccgcaggttctccaacatcgcctgcaagaaggccgacatcgacatgaacaagagggccggtgagcttacgccggaggagctggagcggctgatgaccgtggtggcgaacccgcggcagttcaaggtgcccgactggttcctcaacaggaagaaggactacaaggacgggaggttctcccaggttgtctccaacgcgctcgacatgaagctcagggatgatcttgagaggctcaagaagatcaggaaccaccgtggtctgaggcactactggggcctccgggtgcgtgggcagcacaccaagacaaccggaaggaggggtaagactgtcggtgtgtccaagaagcgataagcctaagaaccacccgaga

SEQ ID NO: 414485 - DNA, 266 bp, Oryza sativa
ttcgtgaatggggtggaaagactcccatggatcggagacaatgggctcaagatgctactgatctctttgaaccattccaaaactatgatgaagctggcaatccgcggagaattcaatgcctgaaacatgatggtgttgcaaatatgttgatggaatctgaagtgaatccctttgatgggcaagaggctaagccgtacaaaaatgatccggacatcctggccatgacagacttgattgcagcatatcagatgaatgacatcatggaa

SEQ ID NO: 414486 - DNA, 405 bp, Oryza sativa
gttaaaggcaagaatattattcataaatgacgcatgatttttatcaaaacgcttgcaaatgatatcagataagtagagtcaacaagacaaaactgtatctgccaaagcacacctccccaactccacccaattacgccattatttctgggcaaaagcaaacggcttcccattcctccccttcaccagtctcaaaccataaaccccacaacaaatcctcctaagtgacggcatataagatgatgaaaacaaagcaggatactccagagtcgtcatggcgaacttcaagttgacacttctcatgccacagccgctagtcgtgctgggcagcctagtaccggtagtgcgcgggcttgtagggaccctcaactggaacgctgatgtagtcagcctgcgacttggagagct

SEQ ID NO: 414487 - DNA, 456 bp, Oryza sativa
ctgagtttgaccccatctgtgccctccaggcccttatggggggtctccaggtcctcacctcggaggatgtcgtctcggaggctgacatctttgtgaccaccactggcaacaaggacatcataatggttgaccacatgaggaagatgaagaacaatgccatcgtttgcaacattggtcactttgacaatgagattgacatgctcggccttgagacctaccctggtgtcaagcgcataaccatcaagcctgagaccgaccgctgggtcttccctgagaccaacactggcatcattgtgcttgctgagggtcgcctcatgaaccttgggtgcgctactggccaccccagttatgacatgtgctgctcattcactaaccaggtcattgctcagcttgagctgtggaaggagaagagcacatgcaagtacgagaagaaggtgtacgttcttcccaagcacc

SEQ ID NO: 414488 - DNA, 521 bp, Oryza sativa
ccaatttctacctcccaccccccgccgccgacgagccacagacgaagatggcggaggtgaacccgaaggcgtacccgctcgccgactcgcagctggcgcaggcgatccaggagctcgtcagccaggccgccaactacaagcagctcaagaagggcgccaacgaagcgacgaagacgctcaacagagggatcgcggagttcgtggtgatggcggccgacgccgagcccctcgagatccttctccaccttcccctcctcgccgaggacaagaatgtgccatacgtctttgtcccatcaaagcaagctctcggccgtgcatgtggggtgacgaggcccgtgatcgcctgctcggtgaccagcaatgaggccagcaacttgagagatccaatcaataacctcaaggtcgctattgagaagctcctgatctgatcagtgatctgatgaggtgaagttcaaccatggcgttttcggcgtgaagggcctcacatggagccggaggcctggactggtgatggtgtctct

SEQ ID NO: 414489 - DNA, 502 bp, Oryza sativa
atcatatagaaaggcacacaacttttggaagtctatggtattgagatccaaatgtacactgaaacaaagaacaacaaaaaattgaaggaactatatacaaaagctctttccatcaaatcagcgatacctcatccaagaatcatgggtataattcgtgaatgtggtggaaagatgcacatggctgagaggcaatgggcagatgctgcaactgatttctttgaagcattcaaaaactatgatgaagctggcaatccgcggagaattcaatgcctgaaatatcttgttcttgcaaatatgttgatggaatctgaagtgaatccctttgatgggcaagaggctaagccgtacaaaaatgatcctgagatcctcgccatgacaaacttgattgcagcatatcagaagaatgacatcatggaatttgaaaagattctaaagagcaacagaagaaacaatatggacgatcctttcattcgtaattatattgaggacctattgaagaaca

SEQ ID NO: 414490 - DNA, 461 bp, Oryza sativa
tgcattttgtgttgggaggattctgaggatcggattgaccttgttgccctttcagcaaaagaaccaattcttttctatgacgaggttatcctgtatgaagatgagttagccgataatggcatttcattcctcactgtgcgagtgagggtgatgccaactggttggttcctgctcttgcgtttttggcttagggttgatggtgtacttatgagattgagggatacccgggtgtattgctcttttggtagtgacgaagcaaaacccattgtactgcgtgaatgctgctggagggaagcaacatttgctagtctgtctgcgaagggatacccttccgactctgcagcatatggagacccgaatcttattggttataagcttccaagtgtgatgcagaagatccaaaagctgaaattacccaattaacctgacaacccatctcgtgtacatcagcgttttttttt

SEQ ID NO: 414491 - DNA, 527 bp, Oryza sativa
gttctttttgctgctgctgcttcttgttcctactgccgtgaaccatggccgctgagactgttgtcctcaaggtcggtatgtcatgccaaggttgtgctggagccgtaaggagagttctcacaaaaatggaaggcgtggagacctttgacatagacatggagcagcagaaggtgacggtgaagggcaatgtcaagccagaagacgttttccagacggtctcaaagacagggaagaagacctccttctgggaggctgcagaagccgcttcggattctgcagctgcagctgctcctgctcctgctccggcaacagcagaagctgaagctgaagctgaagctgctccacccaccaccaccgcggcagaagcacctgccatcgctgctgctgctgctcctcctgctcctgctgctccagaagcagctccggccaaggctgatgcttgatgatcacacataatgcttgcattgacatctggaaattgaactccaagcgattgatttactctctttgcatttagcctctagtaa

SEQ ID NO: 414492 - DNA, 187 bp, Oryza sativa
gtcataactattgctatttatataaaaaaaatatagagcacagtacaaaatcgccctcccccagggcggcaagggggccgcctgcaaaattccatgccccctcgccgcccatttgcaggcggccccccacagtacaaaatcgccctagcggagggcggcaaggggtccgcctgcataattcccattg

SEQ ID NO: 414493 - DNA, 327 bp, Oryza sativa
cataatcctatatcgtgatagccgagttagttcagggaatgagtgttccttggattgtcctgtggtttcttcaatatcactgtatgactcttgcatggaagcaacagatagtgatcacaaacctataaaatctgtgttcaatttggatattgcttatgttgacaaacagacaatgaggcagaaatatgtggagcttatgagctcaaataataaagtggtgcatttgctttaggaacttgaagcattccctggagtaaatataaataattctaacatcatcttgcaagatcggaattcatctgttgtgaaattgcaaaacaaaacaag

SEQ ID NO: 414494 - DNA, 504 bp, Oryza sativa
gctggatcacgtgccttgcatggtgatgttgctcaagctcagcgtgaagttattcttgctgggttcaggagtggcaagtttttagttttggttgctacaaacgtggctgcacgagggctggacattaatgatgtgcagcttatcattcagtgtgaacctccacgtgatgttgaagcctacatacaccggtcaggtcggactgggagagcaggcaatactggtgttgctgtcatgctttttgaacccagatataagttcaatgtgaacagaatagaaagggagtctggggtcaaatttgaacatatctctgcaccacagccaactgatgtggcacaatctgctggtactgaagcagcagaagccatttccagtgtttcagacagtgtcattcctgtttttcgggagcaagctgagcaactattgaactcttctcggatgtctgcagttgatctactagccaaagcacttgcgaaggcagttggctacacggacataaagagagat

SEQ ID NO: 414495 - DNA, 391 bp, Oryza sativa
ttgtggaggttcaaatccaaggtattcataaagcatactgctgtcccacaggaaactgtttcataaaactaacatatcatacggactcgatggtccattaaaccagacacaagtagacatcagcaccacaaatacttgacgaacagaggctcgggatgaccaggcacatcggcagctccaccaaactggctgattactgaccaccacggaggcggagcaccaggtggagggtggactccttctggatgttgtagtcggcgagggtgcgtccatcctccagctgcttgccagcgaagatcagacgctgctggtctgggggaatccccttcttggcctggatcttggcctttacattattaatggtgtcggagctcttaacctccaaagtgat

SEQ ID NO: 414496 - DNA, 449 bp, Oryza sativa
ctttttaatctcgcgaggctctcgtcgtcgaatcgaattctctcgcgtcctaaagatgcagatcttagtgaagacattgaccggcaagactatcaccctccaggggcagtcctatgacaccatcgataatgtcaagggtaagatccaagataaggagggcatccccccggaccagcagcgtgtcatcttcgctggcaagcagctggaggatggcaggacccttgctgactacaacatccagaaggaggcgacccttcaccttgtcctccgcctccgtggtggcatgcagatctttgtcaagactctgaccggcaagactatcacccttgaggtggagtcttctgacaccatcgacaacgtaaaggccaagatccaggacaaagagggcatccccccagaccagcagcgtcttatcttcgtcggcaagcagctggaggatggcaggaccc

SEQ ID NO: 414497 - DNA, 358 bp, Oryza sativa
gattgtttgcgtctcacattgttgggtacccccgcatgggccccaagagggagctcaagtttgccctggagtctttctgggatgggaagagcagcgctgaggatttggagaaggttgcgaccgacctcagggccagcatctggaagcaaatggctgacgctgggatcaagtacatccccagcaacaccttctcgtactatgatcaggttcttgacacggctgccatgcttggtgctgttccagagcgctactcatggactggtggagagattgggttcagcacctacttctcgatggctaggggcaatgccactgtccctgccatggagatgaccaagtggtttgacaccaactacca

SEQ ID NO: 414498 - DNA, 548 bp, Oryza sativa
  unsure (1)..(548): unsure at all n locations
atttccatcagaagctagtgatgcagattcagtttctgaattttcatcagaatttgaaatatttgcggtgatcatgcatagtggtaagctagaagctggccattatgtgacatatctcaggttaaacaatcactggtacaaatgtgatgatgcctgggtaaccagagttgaagagcatactgtcagaacctctcaggcatacatgctcttctatgtgcagaagacactttactacaaagcttgtgaaagagcaactgctgtctgatttggaacaaatatggctgatattattctgatcagccacaaaatatagtcatcagagagcgcaccatgtaattccatccagagaaaaagtgcctgtcatttggacagccacgaagtcggatgagattcaatttttttgcatgcaataacctttggattcggttgaccgagggtttttggcaattttctcaatagccaccacccaaaggaagaaggtcaattttatttgctcaatttatcttattacctganttatgtgatcaattaagctggaagcattacac

SEQ ID NO: 414499 - DNA, 466 bp, Oryza sativa
ataactaacagggcttattcaaactaatatgaccagttgttcacaagatattaattaattgcttacagcaaaatcaaacatcctcggtgttgaagctgatgaaaagaaaaacgaatcgtttctatgtacaagtggacagctagaagagagttcctccttgcctgctggtaaaattgctcattttgtcagctcaactttctgttctaccctatcaaaagcagactacatttcactgcttggtgcatctggaactttgtctttgcattctctgaatttcggcagctctgctctgctctgctcaagatggtgggaagaacctattgaggttgaatggcagggtgtagaactcttcattcctgctgtcgcctcggaacgtcctgaatcgcgcccaccatggcattccccggtcccttgccgcctttctgacatcgagtgtgttgtcaaggagaaccgccatgatgagggc

SEQ ID NO: 414500 - DNA, 298 bp, Oryza sativa
gatgtatattatcttcgtcctccagcagaaggagcattccaagttcaagagaaagggagatgaccttttctacgagcacaccctgaacttaactgaggccctttgtggcttccagctcgttctcactcacttggacaacaggcagttgcttatcaagtccaagcccggtgaagttgtcaagcctgattcattcaaggctggtaacgtcgagggcatgctcatgtaccagcggccattcatgaaggggaagttctacaattcacttttccgtggaattccccgactttttgaaccctga

SEQ ID NO: 414501 - DNA, 392 bp, Oryza sativa
cgggttttgcggcccgcccaaggtgccacccggaccgaacatcacgaccaactacaacgccccgtggctccccgccagggccacctggtacggccagccctacggctccggctccaccgacaatggtggcgcgtgcgggatcaagaacgtcaacctgcctccctacaacggcatgatctcctgcggcaacgtcccaatcttcaaggacggcaggggatgcggctcatgctacgaggtgaagtgtgagcagtcggaggcgtgcttgaaggagccggtgacggtgttcatcacggacatgaactacgagcccatctcggcgtaccacttcgacttctccggcaaggcgttcggcgccatggcttgcccggggaaggagaccgagcttcgcaagg

SEQ ID NO: 414502 - DNA, 491 bp, Oryza sativa
ttgtgtgttttgggagtatgagggaatgcacagcaaaatgggaagatatgaacaatcatggccaacgaggggctaacaacagtttagcacagtacaaaaagtaaacacacataacaggaatatgcaatgcaatggaaccggagtatactgacaaaccaatcattaaccagagaactacttattaaccagctactaatagtcttctccatcgtcgttctcgtcgtctgcaccctcggcaccgacttcctcatagtccttctcaagggcagccaagtcctcacgggcttctgagaattcaccttcttccattccctcaccaacgtaccagtgcacaaacgcacgcttagcatacatcaagtcgaacttgtggtcgatgcgcgagaaaacctcagcaacagcagtgttgttgctgatcatgcacactggacgctgaaccttagccaggtcaccaccagggacaacagagggtggctggtagttgatgccacact

SEQ ID NO: 414503 - DNA, 433 bp, Oryza sativa
  unsure (1)..(433): unsure at all n locations
tttaactggatcaggacttggttctcttctgttggagcgtctctctgttgattatggaaagaagtccaagcttggcttcacaatttacccttccccccaggtctcaacagctgttgtagaaccatacaacagtgtcctctccacccactccttgcttgagcacactgatgtggcagttctcctagacaatgaggctatctatgacatatgccggagatcccttgacatcgagaggccaacctacaccaacttgaacaggctcatctcacagatcatatcttcactcaccacctctctgaggtttgatggcgctatcaatgtggatgtcactgagttccagaccaaccttgtcccataccctcgcatccatttgatgctttcatcctatgcccctgntatctctgctgagaaggcttaccatgagcagctttct

SEQ ID NO: 414504 - DNA, 343 bp, Oryza sativa
ctttatatttatactgctcgcaaattgaggatctcatgtttgagctgtctatgtggcgatgcaatgatgagcttcgggcacgagcagatgagctgcatctctcctcaaagaaagatgcaaagcactatatagaattctggaagaaggttccgcccagtgagccataccgagttgttctaggtgatgtgagagacaagctgtacaacacacgtgaacgagcacgccagttattatccagcggatattctgacattcctgaagaaaccactctcaccagtgttgaacagttcttagagcctctggagctatgttacaggtcactctgcgattgcggtgaccgtgt

SEQ ID NO: 414505 - DNA, 409 bp, Oryza sativa
tttatatcctctccttcctcttcctctgctcactcagctctcccccgcgcgcgccaccgtcgtcgccatgtcgggcaacatcgccttcggccgcttcgatgactccttcagcgcggcctccctcaaggcctacgtcgccgagttcatctccaccctcgtcttcgtcttcgccggcgtcggctccgccatcgcctacaccaagttgaccggcggcgcgccgcttgacccggccgggctggtcgccgtggcggtgtgccacgggttcgggctgtacgtggcggtggtcatcggcgccaacatctccggcggccacgttaacccggcctgtaccttcggcctcgccctcgggggccagatcaccatcctcaccggcgtcttctactggatcgcccagctcctcggcgccatc

SEQ ID NO: 414506 - DNA, 474 bp, Oryza sativa
tggtttttcagaaaaaagggggcacatacaactcagtagtaataatttcaaagcctccaccgattcgattccactcgacaagagcaaagccgacgcccggccccatcgcgacgcgacggtagtatagtagttacaaaaagtgaatgtgccgcgtacgcacgcgcgtgcgtgcgtctcacacgagaaagggagaatcggtggccgtaagcactcggctcaatcaatcatcactcacctcaccggccgcggagcagggccttctcggcggtgtccatctcctcgaggatgcgggcgcggcgcttgttggggatgggggccgtggggccgaagctgatgtagtggcccgacacggcgttgagcgcggagtacatctccctgaaggacgggcggcccagcagcgacttctccctgcggtacttggccacccacgagttggacagctcgcggagctccgtcaccgggtccgtcaccccg

SEQ ID NO: 414507 - DNA, 529 bp, Oryza sativa
ttcagcgtcgtcccccgtgccggccgtcctcacggccccggctaccgctgccactgccgccatcgccgtaaagccaacgccgcctcaacgcgcgcttcaagccagcaggcgcgagttggtggtggcggcgggaggggtggcggcggcggcggtggcgctgtggccgtgcgggggagcggcgcgggcggcgtcggacgacgagtacgtgagcgagacgaaggacgtgatcgggaaggtgcggtcgacgatcaacatggacagggcggaccccggggtggcggacgcggtggcggagctccgcgagctgtccaactcgtgggtggccaagtaccgcagggagaagtcgctgctgggccgcccgtccttcagggagatgtactccgcgctcaacgccgtgtcgggccactacatcagcttcggccccacggcccccatccccaacaagcgtcgcgcccgcatccttcgaggagatggacaccgccgagaaggccctgctccgcggtccgtgaggtgagtgatgatgattgag

SEQ ID NO: 414508 - DNA, 507 bp, Oryza sativa
tgttgaactgcaatcttgatgttcacaaacagccagagaaggacagttagatcacttgagcgtgatgttggatgcagatttgacttcataagtcctccagcaattgaggatgtgctggagtcctctgctgaacatgtcatagctactttaagaggtgtgcacacggagtcgattcagtacttcattccagcagctgaaagactgcaagaagaattaggacctaatgctcttgcttctgcattggcacatctgagtggattttctcagccaccctcttcacgttctcttatctcatgagcagggatgggtgactttgcaactaactagagatccaggatatggaagggggttcttttctcctagatctgttactggctttctgtctgatggttcttcagctgctgctgatgaagttggcaaaatttccttacagcagatgagaaaggtcaaggtgcagtttttgatttacctgaggagatttgcgggggatttgtttagtatggaact

SEQ ID NO: 414509 - DNA, 370 bp, Oryza sativa
gcgcaaactggtccttgttatcaacaacactccaacagtcatgctgatacaggtagcaatgcatagcggatttacagccaaacccagacagtactagcataagcacaacgcatgtgccagaatttattcttgttcatagagcggaaaccgcttctttattacattgcactggcattactacataaggtttgcgctttgcctcctagcacagaacttgggccatctctcatcttcactggagttccttcaggaagtcggcgttttcaaccaaaaccactttccagccattaagggtcagggaagaggcaatctttggggtggggccttgtaagggaaccgggttgccgaaaaatttttccccctagttttt

SEQ ID NO: 414510 - DNA, 508 bp, Oryza sativa
  unsure (1)..(508): unsure at all n locations
tgtttgcggtagtgaagctgagaagtcacctgaggttgtgctggagtggcctaagaaggacaagaagaggcttctacatgctgtttaccgtgttggagatttggatcgcaccattaaatgttacacagaatgctttggaatgaaattactgaggaaaagagatgtgcctgaagagaaatatacgaatgcatttcttgggtttggacctgaggacaccaactttgcacttgaattgacatacaattatggtgttgataagtacgacattggagcaggatttgggcatttcgctattgcaactgaggacgtgtacaaattggctgagaaaattaaatccagttgttgctgcaagatcactcgtgaacctggtcctgtcaagggaggatccactgtgattgcctttgcacaggatcctgacggttacatgtttgagcttatccagaggggtccaacacctgagcctctntgccaagttatgcttcgtgtgggtgaccttgatcgctccatc

SEQ ID NO: 414511 - DNA, 396 bp, Oryza sativa
aaacaaatgtcctgcgaatcaccaggcaaaaaaaagggagctggtacaaagcctcaatacacactggagtaaaaccagcaacggaatttgcgctccacatttcgcgatgtgcagcggtctgagataaacagtttctatgtgatggaacttaaaagtcttttttattcaaaaacacgggagcgggcaatcgctcactatttgtccctctgggtattgcttagctttagttgaggcatgagtaagcgagcgttttttcctccgacagttcctgggcagtcgcgtccatcttcttccttgaaaactcgaggatcgggagaccctgaacaatcgaccatttgccaccactgcatgttactgggaaccagttgatcagaccagcgggcacaccatacgaac

SEQ ID NO: 414512 - DNA, 373 bp, Oryza sativa
cataatagcagcgtcgcctctcctcctcctccctaacccctacgcttccagaaccttctcgaagctcccgctcccccccccttccgctccaatggcgaaggaaccgatgcgcgtgctcgtcaccggcgccgcaggacaaattggatatgctcttgtccccatgattgctaggggtgtgatgttgggtgctgaccagcctgttattctacacatgctcgacattccaccagctactgaatctctgaatggccttaagatggagctggttgatgctgcattttctcttttgaagggaattgtcgcaccaactgatgttgtggaggcctgcactggtgtgaatgctgcggctatggatggtgggttccccaggaag

SEQ ID NO: 414513 - DNA, 529 bp, Oryza sativa
gacatttttagtgttcaatgaaaacaaagtgccaaatttgcaatcgcaccttgagaatatcgttggcgagaattatttcctgaatcagtcagctaaagaggcatacagatcctacatcttggcatacgactcacactccatgaaagacatttttgatgttcataatctcaatctgaaggtacactgcttattgaatttctttctgaaggatttttggttcccctgtgcatgaccaattgttacccattatatgctttgttgtattggacattcaattcacaacaaatgctcttcattttggcatgttccaaatcttttaagtgtcaagtggagtgtctgttgttttttcttcaattttagtagtatttagctctcttgagagaaaatggtatgtgctaggtaagtgatgataatttatcatctttaacttttatataaagtatgtgctaggtaagtgaaggtaatttatcatctttaacttttatataaactaactgaattcttttgcactttttactgagctagatta

SEQ ID NO: 414514 - DNA, 484 bp, Oryza sativa
ttggtgtgtctcagaaatgggaaacagattcttataatactgtcccaaaaagatttatgctctgacagcacaattctatcagaatgtagtgaatatcagaaagttaattctatcagaatgtagttcatgaccttaatgtgtttatcccagcgatttcaatcagagcgagaaaccaggatcacacaatgcataatcttccagtttcagctaagccaagataatcccatccaaaaaataactgagcactacgaagcatgaacaaaaagccttagttcaatccagtgtgagtgaaaggcgtgcttcatctccttcgcctccgaagcttccactgctccaggacgtgctgcaaggcctcctgcatgctggccttcctgtcctccttgttgttccacagctctgacaccacgtagctgccgctggcattgtactcgttgatctccagcagcgccgtggtcacggccttgtagacctcgtcaccgagctg

SEQ ID NO: 414515 - DNA, 518 bp, Oryza sativa
accagtttacagctaagagcaagtatttggtggaactggaatgcagatgcaatcaaatgaatctctctgttaaaagggcaatggaagaaactgacttgctgcacaaaagttacaatgaagaaatgcgaaatatgcaatctgctgctcgtgaacattcacagaaaatatttgaagagactgatcagctgaggaaacagttggatgataaagagaatgccatcgagaggagatccaagcaactaagcaagtttgttgctcaaactgacatagaaagaagaaaattggagagtgagatgaaaaagaactctgagcaaaacgactccatccacatggctagaatcgagcaacagaagtctgataaaaatgtgctaaagcttgttgagaaacacacgaaagagaaggagattgctctgaacaaaatcctgcagttagaaaagcaattggatgaaaagcaaaagctggaactggaaatacaacaacttagaggaagactgctggtggtccaacacatggaggga

SEQ ID NO: 414516 - DNA, 365 bp, Oryza sativa
  unsure (1)..(365): unsure at all n locations
aatgtttagttattacactttgttgaatgctttgattgaggatggacgagtggaggaagcagaagagctgtatggaaaaatattctcacgatatttggaggctttgcctcatacctttttcatgagaatgatatctttatattacagactagaatcatatcagaagaggtttgaggtaggaatccaaatatattatactttcgttctaatgaacacccttcttatgttaattctggaccatggtttcccttgcatggaggaacagaactgaacttgtgaaaattttctgctaacagcctaacacataagtattgttaagatagtaagttgtaattcntgttaaaattttttttttgttttctact

SEQ ID NO: 414517 - DNA, 472 bp, Oryza sativa
gtgtttttagcaatgtaagggctcgcattccaaaacagccgatggacaataatcggactcagagcatcagttttaaccgaacagaaataaacgagagtattaaacgactgacatagtgcacattgcgagcagatattaacggtccatgaaacgagagccatgcccgtgggcaaaacttaacaaatactagaactagatatctcaactgcagacatgcaaaccaccatttgaacgaggctcacttcttcttggcggcagccttggtcaccttggcaccggttgggtccttcttctccacgttcttgatgacgccaacagccaccgtttgcctcatgtcacgcaccgcaaaacgaccaagaggagggtactcagagaaggtctccacaaccatgggcttggtaggaatcatcttgaccataccagcatcaccgttcttcaagaacttgggctccttctccagctccttgccaga

SEQ ID NO: 414518 - DNA, 540 bp, Oryza sativa
  unsure (1)..(540): unsure at all n locations
ttcctctcgccttctcccgtcttctccttcgagttagctacctccttattcaaccatgggtaaggagaagacgcacatcaacatcgtggtcattggccacgtcgactccggcaagtcgaccaccacgggccatctgatttacaagcttggaggtatcgacaagcgtgtgatcgagaggttcgagaaggaagccgctgagatgaacaagaggtccttcaagtacgcgtgggtgctcgacaagctcaaggccgagcgtgagagaggtatcaccatcgatattgccctgtggaagttcgagaccaccaagtactactgcactgtcatcgatgcccctggtcaccgtgacttcatcaagaacatgatcacgggtacctcccaggctgactgtgccgtgctcatcattgactccaccactggtggttttgaggctggtatctncaaggatggccagacccgtgagcacgctcttcttgctttcactcttggagtgaagcagatgatctgctgctgcaacaagatggatgccaccactcccaagta

SEQ ID NO: 414519 - DNA, 449 bp, Oryza sativa
cgtatgggagtgcctcccggttcaggcccagctcctgctgctgctaatgtaaaccgaggaacagcccctcctaggcctactggggtttcattttccccacttcttaatgtgcaccatgaagacgatgagccagaagacgagttctctgttctttcccgcaggtctgcaagggatggcacagcagcacagggcaatctaccttctgctccaaaaagtgaaaggccttacccaagcccacttcttcctccgccaccatcatcaaagaggccagttttcacggaggcaagcagtgttgactatcttagtggcgactcctacaagacagaaaaagtatcagatgactttattaatccaactgccccagccaatatacctgcgccgtctcattcaaaaacagaaacgaatccgccgccaagttatgatagccggtcagaaagtgtgtctgatga

SEQ ID NO: 414520 - DNA, 495 bp, Oryza sativa
tttacgcgtggggcgccgcgccgcgccaggctccgcaccctcgccttcttcctcctcctcgacgtcgccgtcttcgccctcatcggcgtcaccaccctctacctcgtccccaagccccaccaggtcaagttcctcggcagcgtctgcctcgccttctccatggccgtcttcgtcgcccctctctccatcatcttcaaggtgatcaagaccaagagcgtcgagttcatgccgatcgggctctccgtctgcctcacgctcagcgccgtcgcgtggttctgctacggcctcttcaccaaggacccctacgtcatgtacccgaacgtgggcggcttcttcttcagctgcgtgcagatggggctctacttctggtaccggaagccgaggaacacggccgtgctgccgacgacgtccgactccatgttcccgatctccgccgccgtcgcggccacgcagagggtgatcgagctacccgccggcacgcacgcctttaccatc

SEQ ID NO: 414521 - DNA, 512 bp, Oryza sativa; identical to SEQ ID NO: 392414

SEQ ID NO: 414522 - DNA, 422 bp, Oryza sativa
attcaaaatccgggcctcattttattcgggaaaaagaggctcaggccagttccagggcacctgatggcaagctcacaagttcagacaggcacccacacacatacaatactttgggacaaactgtaacaagatgcaagctcccttgggattattttatctcactttacgatgactgccggagctttgggcgcacgaaatcggcgttggcaggcacggagatgtccacggggggccgcaactcaacgcacacctcgattggcccatggacggggtcggacatgaagttgctgatgaggccctggttgatgggagcatccttggccactgtcacgaatgcttgctgggtcaggatgtaatcaaagcgtggcgcccatttccttgatcccagacgagcccgcgttgagcagttgtcaaccatgaag

SEQ ID NO: 414523 - DNA, 419 bp, Oryza sativa
aattaatggtgctggtatcaactctagttttgctgttcaccaggatgttgatggaagggcaactgatgttgctctaggatggtcagttgcgctgggatctcccttcacatttgctactaccttagaacaggagtacaagagcgatatctttggggagcgaggcattcttcttggagctgttcatggcatcgtggaggctctgtttaggagatacacagagcaaggaatggatgaagaaatggcatacaaaaacaccgtagagggcatcactggaattatctcgaaaactatctcaaagaagggaatgcttgaagtgtacaactccttgacagaggaggggaagaaggaattcaacaaggcctacagtgcatcattctatccttgcatggacatactctatgagtgctacgaagatgttg

SEQ ID NO: 414524 - DNA, 484 bp, Oryza sativa
  unsure (1)..(484): unsure at all n locations
gttatatcaagagccttgttagcaccaaggctagcaatggtgggaatctgatggcaggtgggcgcattgggttcggcgagcactctgacccgcagatccttagcttgctccgagcaaacgatgtggaagggctacaggtgtttgtgccggaccacgagggcaaggagatgtgggttcaggtgccatcggacccatcggccattttcgtcaatgttggtgatgtcctccaggctctgacaaatgggaggctgataagtatccggcacagggtaattgcaaccgcctgcaggccaaggctgtccacaatatacttcgcatcaccacccctgcatgcacgaatctcggcactcccagagacaatcacagccagcagcccacgccgataccgatcattcacctgggctgagtacaagacgacaatgtactcactccgnctgagccacagccgnctagaactcttcaaaattgacgatgatgacagcga

SEQ ID NO: 414525 - DNA, 448 bp, Oryza sativa
ttgttgttttagacagcaactggataatctttcgatatttcaccgagggtaatgtatggtaggaaaatcgccagacataacagagccggccagactcaactcaaactcaaccctatgatggtaaactgtttgcgattaacgcctccgcctatgacaatgtttggagataaacgcttccaccaaaaaacgaatgtcggggagtgttctcccctacaagaattattattgttttcaatgttaaaaaggcaaaattcaccagatcccgttagtgcaggaccaggaataaacacttgttcgtcatcattttctgccagtttaggcaccgcccgagccgtacttctttccaaagaagaggatctgcagctggtcatagcctgagagcacaccagcaccagcaatggcacgtaggatgttggcaccagcacccttgaacagtgacttggcaccc

SEQ ID NO: 414526 - DNA, 500 bp, Oryza sativa
ccaagtagacttgttacgcctgttggtgttcgagtggtaggagcccttgggcttttccaggttcagatcgacgcctccttcctctggacattgttgctagttggtgatggctgagcaggctaatcaaccgactgtccttcagaagttcggtggccagttccaccttggctccagcttttctgaaggtgtacgggctcgcaacatctgcccatctgtctcatcctatgacaggcgctttaccacaaggagctacatgacccagggccttgtcaatggtggcatcaacgtcccaatgatgtcgtcctctccaatttttgctaatgctccagctgagaaaggtggcaaaaacttcatgattgatttcctcatgggtggagtgtcagccgcagtttcaaagactgctgctgctccgattgagcgtgtgaagctgcttatccagaaccaggatgaaatgatcaaggctggtaggctctcagagccatacaagggtattggggact

SEQ ID NO: 414527 - DNA, 518 bp, Oryza sativa
cgatgagccggtagctacagagaacagtgacgctgctcctgctgaggcatctgtagatgctgtgaacggcaagattcctcctaccaagttgattccccaacatcctctggaaggtgttacattgacagaaagaactgtacgtattactgggaataagaagcagatagaagcggcaaaagatattattaagcaagctatgagtcaggttttggtagaagcaaatggtgtaacacggacattggttttgaataggccaaagcagttgaatgccctctcctctgcaatgataacgtgttttttgaggtgcttcactgcttatgaggaagatgatggagttaaactattgattgtgaagggaaaaggaagagcattttgtgcaggtggagatgttgctgcagttgtccggtctataaataatgatagctggaaatatggtgctcattttttccgaaatgaatttctgttaaactatatcattgcaacatatagcaaacctcaggtttcgcttctaactggaa

SEQ ID NO: 414528 - DNA, 507 bp, Oryza sativa
ctcttttccaggctccagccgagtacccgcctcctcctcctcgctcgccgcggaatcttctggaagcttctagatccggccgttacgatcggcgaagaagggatggggcaggccttccgcaagctcttcgacgccttcttcggcaacaaggagatgcgggtggtgatgctcgggctagatgccgcggggaagaccaccatactctataagctgcacatcggcgaagtatctctccaccgtccccactataggcttcaacgcggagaaagttcaatacaagaatgtggtgttcactgtgtgggatgttggtggccaggaaaaattgaggcccttatggaggcactactttaacaacaccgatgctctgatctacgtaggtgattccctggatagagagaggattgggagagccagagctgaattgcaggccattattaaggaccctcttacgcttaatagcgctctattgcagtttgctaacaagcaagacatgacgggcgcaatgac

SEQ ID NO: 414529 - DNA, 533 bp, Oryza sativa
gaccatgaagacatagatcgtgctattgcattatctttatcagaagaagatcagcggaaggggaaggctgttgatgaggtagatattgatcatcgtttacatgaagatgaacaacttgcacgggctctacaagagagtctgaatgatgaacctcctcgtcagaatgttccagtaaaagatgttcactcggagagtactccagcaactttcatgcccccatatatattcccttcaactggattaagggtttgtgctggatgtaaaactccaatcggtcaaggacggtttcttagttgcatggattctgtttggcacccccagtgcttcaggtgttttgcttgtgataggccaatatcagaatatgagtttgcagttcatgaaggtaacccataccatcgatcctgctataaggagcttttccatccaaaatgtgatgtctgcaagaactttattccaacaaacaaagatggccacattgaatatcgggcccatcctttctggatgcagaagtattgtcctgccccatgaactga

SEQ ID NO: 414530 - DNA, 433 bp, Oryza sativa
tttgttttttcttgttcaatgggttatcagttctttttcttgtggtgggaaaaatgacactacagagagagctacaaagaccaaattaaagttcctcagcaatgctcatctacagagtactttcttgtcaagtttctgatcacgaaaaagggaacttcataacaatgggagaactagcaaatcctggcatcgtcgcgaaggcggcctccattcttcatcctcaccatcttagagctcatcatgcttctcatcatcagaatccttgccatcctctgcatcagagtcagccttctcatcggccttgtcctcatcctcagcatcctcgtcattcaaatcataattgtcctcaccggccttggcagcttcctcctcttccttctttttctctgcctcgtcaaaagcagccttttcaggatccttgtgcttgccccat

SEQ ID NO: 414531 - DNA, 484 bp, Oryza sativa
aaggtatccaaacctctgaggactacaggttctacgctatttcagcggagtacccagaattcagcaacaaggataaaaccctggtgctgcagttctctgtaaagcatgagcaaaagcttgactgtggtggtggatatgtcaagttgcttggtggtgatgttgaccagaagaaatttggtggggacacaccgtacagcattatgtttggaccagacatctgtgggtacagcaccaagaaggtccatactatctttactaagaatgacaagaaccatttgatcaagaaggatgtcccctgcgagactgatcagctgtcccatgtgtacactttgatcatccatcctgatgctacatacaccatacttattgacaatgttgagaagcaatctggcagcatctacgagcactgggatattctgcctgcgaagcaaatcaaggacccagaagctaagaagccagaggactgtgatgacaaggagtacat

SEQ ID NO: 414532 - DNA, 392 bp, Oryza sativa
ttgttttattcaagcacaggtgcacaccacgcatacataatacaacatcatcagtaactggtacaaaatgtcaagagacaacacacggtttaaccgctggatcatagcacacatcaagtggtttggtaaatgaaatgaagttcttgcgttgatcgataataatgcatgcgcatgcaggtaagtaacacgagcactgcaatttattcgtcggcttgttatctagatcgagcgatgatacggtgtccggcggccggccggccggcgacgagcaggccgccggcggcggcggcggcggcggcgatgatatattaaccgaggcgcaggtcgtggttgccgtcctaggccatgccgtgcaggttgggctggctgggcaccacgcggaaggcgaacat

SEQ ID NO: 414533 - DNA, 425 bp, Oryza sativa
gtcatcatcatgttctcctccaccggcaagtaccacgagttctgcagcccttccaccgacatcaaggggatctttgaccgctaccagcaagccatcggcaccagcctttggatcgagcagtatgagaatatgcagcgcacgctgagccatctcaaggacatcaaccgcaacctgcgcaccgagatcaggcaaaggatgggagaagatctggacgggctggagttcgacgagctgcgcggtcttgagcaaaatgtcgatgccgccctcaaggaggttcgccacaggaagtatcatgtgatcagcacacagactgaaacctacaagaaaaaggtgaagcactcctacgaggcgtacaagactctgcagcaggagctggggttgcgcgaggagccggcgtggttcgtggacaacaccggcggagggtg

SEQ ID NO: 414534 - DNA, 464 bp, Oryza sativa
gatgttttgcaggacatcctatgtgcgagttctgcagaagttcattttatggagataacgagctttacacacatatgtcccgagaacactattcatgtcacatatgtcaaaggcaacatcctgggcagtatgattatttccggaattatgatgacttggagttgcatttccgtaaagatcatttcctctgtgaagatgaagcatgtttggcgaagaagtttgtagtcttccagagcgaagcagagctcaagagacataatgctatggagcatggtgggcggatgtctcgtgctcagaggaatgccgcacttcagataccaaccagctttatatatcgaagaaacgagcaagatgaaaggcgtggtagaggtaggggacggaattctcaccgtgatggatctgaccgggataccccctttatgcaaaatggcagtgcaattataggcaacggtttttcaagtcga

SEQ ID NO: 414535 - DNA, 479 bp, Oryza sativa
gtgtttttttcttaaggcaggttttctttcgatgtcaaaatctggatacaactaaataatggaataaataacaaaacgttttattgactacaaagggtatctgttacaaacatttggctatacgatggactcgtacaaaatatacatccatctcaactcgccagtttggccaaaatcaccatatctaagatcttgacttcgtatgtgtcatcaagcttcacaatgccgtcggaaccatctatacctatgagctttccagagtatccacggaaattgccgttcattatcttgatcttgtcgctcttctttggccgaataacctcgagctcggttggaagaaccgtcacgatctcaccattacctgatgacccaagggcgacgcgacaagatccatccgcaagaactttcctcaccacaccaggaccatcatcgcctgccctcaacacattaaccaaaacatctggcaacagccagttacc

SEQ ID NO: 414536 - DNA, 489 bp, Oryza sativa
gtaaactgaggcatttcaggttctgaaaggagtaccggatagaccagaagttgtcctagtaaaattaagagaaataaaaagcaagattgatcgccgaacatccgcaaaagatcggtccaacaatatgatttcatctaaggatgttgtccgagtagttgagggagcatgcaagggaaaacaaggaccagtggaacacatacataaggggatattatttatctatgatagacaccacctcgagcatgcaggctttatttgtgcaaaagcacagtcctgtcttcttgttggtggatcagctggtggacgtcgtggaaatggtatggatacgtcagatccaaggcttggtgctttgagatctccagcaagcattttgcaatcaccgggaaggctgcccccaagaggacctcatatgaactttggtggaaggtttggaggaggtggtcgtggtggcagagggcatgatgcattggtgggcaaatgtattaaaat

SEQ ID NO: 414537 - DNA, 472 bp, Oryza sativa
aaactgggggcatccttgcttgcaaaatctgaagtacaaaaagtagaatactagaagtacaaaatctgaagaagttctcaactagtacaagacatcttattattcatacaaccaaaactagcataacaaaaaagcactccagcagctgccaacagtgataataatccaactcaaacctcactttttatcatcttcctgaaccaacgtgttgagtctttagggtaccgtgtgaaagtgctccggtctacatagacgattccaaattttgaagtgaacccgagccgccactcgaagttgtcaagcagggaccaagcaaaatatccagtgacccttgcaccatccttgatcgccctcttaagctcatggaggtactgatcaaaatattgtatcctgaagaagtcatacagtgcaccaggtagggtctcattgcctggctggtcaatgccattttctccgatgattataatggggt

SEQ ID NO: 414538 - DNA, 458 bp, Oryza sativa
ttttatattccgccaccgagccttacatcgcagcccataaccttctcctttcacatgccgctgctgtcaggacatatcgtgacaagtaccaggctattcagaaggggaagattggcatccttctcgattttgtatggtatgagccactcaccgacaaagaagaggatcacgcagctgcacatagagccagggagtttacccttggctggtacctgcacccgattacatatggtcattacccagaaactatgcagaatgctgttaaggaaaggctgcccaatttcacacgtgagcagtctgagatgataaaaggatcagcggattatattgcgatcaaccattacacaacttattatgtcagtcaccacgttaacaagacattcatcagctatcttaatgattgggatgtgaaaatttcatatgagcgtaacggtgtgccaattgggaaacaggcgtac

SEQ ID NO: 414539 - DNA, 497 bp, Oryza sativa
ccccccctgaccgcccgcctactgctcgtccacccacccggttctttcttaagccccgcggattcggcaccacgggagggtaggaggtctcggatgataggaccgccattctgcagacgaatacgcattcctttcttctatattttgcttctagtcagagcgcaaacttttacggcacatacagacatattctatagtcgatggcaacatatcgagagcgcataacagattggagattttagagaaacaccttaaggcaactggtggaaaagtgatgacctcgtataccaccagaacctaatggatatcttcatattggacatgccaaggctatgtttattgattttggactggcgaaagagagaaatggtcattgttaccttagggttgatgacacacatccagaagcctcaaagaaagagtgtattgatcacattttggaaaatttcactggatgggatgggagccctactaaagttcctatacaagtgattatt

SEQ ID NO: 414540 - DNA, 332 bp, Oryza sativa
tttttgttttttttttttttgggttttttttttttttttaaaaaaagggctcactcttttgtattggcattgttgcatcaaaatccatataatagctaatcatatcagctccaccaagatgaaacaccagctccaagaaagaacccaagatgattgtcctacctccgttttaggttataagactttttagcattacccacattcatacagatgttaatgaatttaggcccacatatatgtctagattcattaacatatatttgaatgtaggcaaatgttaaaaagtcttataatatgaaacatcgggagtagttgcgaggggccgttaattg

SEQ ID NO: 414541 - DNA, 409 bp, Oryza sativa
ccagtttaagaagctcatctcctcctcctctcgcatggcagccatggccaccaccgcgtccagcctcctcaagacctccttcgctggcgcgcgcctccccgccgccgtccgcaaccccaccgactccgtcgcgctgagcaccggcggcgccatctgcaactccatctcgacggcgtcggccactaccccctacgacctcaacgccatcaggttcagccccatcaaggagtccatcgtgtcccgcgagatgacccggcggtacatgaccgacatgatcacctacgccgacaccgacgtcgtcgtcgtcggcgccggctccgcggggctctcctgcgcgtacgagctctccaaggacccctccgtcagcgtcgccgtcatcgagcagtcggtgtcccccggcggcggcgcg

SEQ ID NO: 414542 - DNA, 480 bp, Oryza sativa
cagtttgctagctaactaactacgtggctatggcccccaccgtgatggcctcctcggccacctccgtggctccattccaagggctcaagtccaccgccggcctccccgtcagccgccgctccaccaactcgggcttcggcaacgtcagcaatggcggaaggatcaagtgcatgcaggtgtggccaattgagggcatcaagaagttcgagaccctatcgtacctgccaccactcaccgtggaggatcttttgaagcagatcgagtacctgcttcgatccaagtgggtgccttgtctcgagttcagcaaggttgggttcgtctaccgtgagaaccacaggtctcccggatactacgatggcaggtattggaccatgtggaagctgcccatgttcggctgcaccgatgccacccaggtgctcaaggagctcgaggaggccaagaaggcctaccccgatgcctttgtccgtatcatcggcttcg

SEQ ID NO: 414543 - DNA, 474 bp, Oryza sativa
gtgtttttttttttcagggtgccagagatcattttagaatcaacaaatggaatccgtcctacaaatacaacactcgtagtatcagatagtacaccagcaaaccggatgcaactacgcagcagtatttgtataaacaatagcactatggcacaagaactactactgctaaccacccatcacccaaaagatgaacaacgaagaacaccgtgaaggcgtttcgctgatggcacattgcctttggtcacgccaaaaatctctcattgtacatggctacatgtatatcctcccggttggtcaaagccattgcccaaactctgagagagctctaggtgaacgactgcgccacagaggaagttgtgaccagaccagaaagaagaccaacgagggtgccgctgttgtaagtgcttgactctgtctgaacagcattgtcccgagaggcgaccaaagggtcattttggaacggcccgcccacga

SEQ ID NO: 414544 - DNA, 486 bp, Oryza sativa
tgttccacgaagcagctggaccctgcgcttgatgctctccgatggatcactgatttcctcgtcaatgcgcatccatctgacaatgtgttctacattcaggttggtgatcctgatctagatcacaactgctgggaaaggccggagactatgtctgagaaaagaccactcacacagattaacacaaagtctcctggatcagatgttgctgctgaggcagcagcagctatggcatcagcatcaattgttttcaaatccagagacactacatattctgattcacttcttcaacatgctcagaagttgtttacttttgctgatacttataaaggcctcgccagtgacacctatccaaagctccaaaactactataattctactggttatcaagacgaactcctgtgggcagcgagttggctctatcatgctacaggagaccaaacatacctcagttatgtgactgtagagaatggaaaagcttttgctgat

SEQ ID NO: 414545 - DNA, 339 bp, Oryza sativa
gtgtttttttacagaagcggggcaacgggttcccaaaggtccacacttacagtacgttcaacgtacaactgatccaagcaaatgaaacaggtttgatgatgcactgatgcgagaaactaaacggttggatcagagtcggagacgaggcgatcatggacaagcggcggcggcggcgatgagcttagtagtcggtggtggggagctgctcgtgggtgtgggagatgaagaggaccctctagatgacgccgattaggccaccgccgttgagtggggaaacccaatacacccactgggactcccaggaccagatgacgagggccggtcctaaggagacggccg

SEQ ID NO: 414546 - DNA, 288 bp, Oryza sativa
tatatacacaccactccatttctgagctcttctagtttgagtgagagagcagcagaagggagtagtgcaagatgccgatccgcaatatcgccgtggggagccaccaggaggtgtaccacccgggtgcactcaaggcggcgttggccgagttcatctccaccctcatcttcgtcttcgccggccagggctccggcatggtcttcagcaagctgaccggcggcggagcgacgacccccgtcgggctgatcgcggcggcggtggcccacgccttcgccctgttcgtggcgg

SEQ ID NO: 414547 - DNA, 531 bp, Oryza sativa
tttttcccacgccgtctcgccgcaatcgctcgctcggtcgcctcctcttccgccgcgagacacgaagagcagcagctcacaggtaggcctgcgcgtcggcggccatgggagacagccagtactccttctccctcaccaccttcagcccgtcggggaagctggtgcagatcgagcacgcgctcaccgcggtcggatccggccagacgtccctcgggatcaaagctgctaatggtgtagttatcgccactgagaagaaattgccttctattttagtcgatgaaacatctgtgcaaaagattcagtcattgactccgaacattggagttgtctacagtgggatgggtcccgatttccgtgttcttgtgagaaaaagtcggaaacaagcacagcagtattatcggttgtacaaggaaactatccctgttactcagcttgtccgagaaactgctgctgttatgcacggagtcacacagtctggtggggtaagaccatttggagtatcattattgattgccggtacgatgacaatgg

SEQ ID NO: 414548 - DNA, 473 bp, Oryza sativa
gtgttttggaataccataaggataagtcacatattgatagcacttagtaccaacagcttccaggggcggaagttgagttaaacatgagtttgaaaacaggatatagatagagcatgctggcataattcgaattcattgaagttcagcacatcgcaactactagccacaccaaaatgtaggtatttactatcagtaaaggcatggaatcgtagccatcctttaaaaccgacaattagtgatcaggctggatgataaattagcatagtaccttctacggctcatcctacaatttctaatgcttcttgtttttcaacggacccttggggatcttagagaggcatttctcatcgaaaatagcatagtacttcttcagttcgatcatggccttctctccaaaagcatcgatttggtcctcatacttctcatacagaacaggcacggtgtacagtaccataaagactatgtagaacaag

SEQ ID NO: 414549 - DNA, 579 bp, Oryza sativa
  unsure (1)..(579): unsure at all n locations
ttttaaaagagttcgtgcgaaaaaaaaaagaaagaagagttcgactgttcgagcgaggagggagaagaagagggggagagagagagccagcagctagccatggcggagcacaaggaggaggagtcgttggtggagtcggtgatggacaagatctccgacaagctccacggccgcgggggctcgtcgtcgtcgtcgtcggactccgacggggagaggacggccgacttgaaggccaagatctaccgcctcttcggccgcgagaagcccgtccactccgtcctcggcggcggcaagcctgctgatctctttctatggaggaacaagaaaatctccgttggggtactcgctggcgccacggccatctggctgctgtttgaagtcatggattatcatctcctcaccctgttgtgccactgtatcatcctcaccctggccatgctcttcctctggtccaatgcctcaactttcatcaacaagtccccttctaacattccttgagtgaagatcccagaggacctggctgtaatgttgctcgctcactgagattngagatcaataggggctttgctaccttgaggg

SEQ ID NO: 414550 - DNA, 486 bp, Oryza sativa
ttgttggggttacaaagaatggtgaatacttgtttttcaagcaattatgtacggcaaatcaagatgtactcagaaagacctaccggctcaacagggagccatacaactacattgttcatctctacaaggatcatgaaaaaagaaaaaagaaaattaggtgaaatttgtggggaagaaaggcgaacaaaatgaatacaaagagaatagttttcctttcataatacaaatttgctacttgatgcttcgagtcaccactgcagcccccaagccaagcatcagccaattagagataagtgagaacacgatgaatcctcccagctgtaggtatacacttgaatcatgatgcagcaaagcagctcgcgatagccaagcgccacgggcaaaggtagtaagaataacacacaggagattcgaggggaaaaaaatatctgcaaccagggaacttcacctagctatcaaacatttgctgcagagacagtccaccac

SEQ ID NO: 414551 - DNA, 493 bp, Oryza sativa
ctctttttcgcctcctccacacacgagcgcgtcccccgacgccgcgccgagatctagggttgggcgcgcgcgacgccccccccccgcggtgaggaggatgagcagcccccatggcggcctcgacgaccagatcgagcgcctcatgcagagcaagcccctccccgagcccgaggtcagagcactttgcgagaaggcaaaagagatattgatggaggagagcaacgttcaacctgtaaagagtcctgttacaatatgtggtgatattcatgggcagtttcatgaccttgcagaactggtccgaatcggtggaaagtgcccagatacaaactacttgtttatgggagattacgtggatcgtggttattattctgttgaaactgtcacgcttttggtggctttaaaggttcgttatccctaagcgattactattcttagaggaaaccacgaaagtcgacagatcactcaagtttatggattctatgaccagtgctta

SEQ ID NO: 414552 - DNA, 492 bp, Oryza sativa
  unsure (1)..(492): unsure at all n locations
cttctttaagattccacggatattttctctccccctgctcccgtcgccatcgcaaaggagaaaaaaaaaagaggaggaaggaaggaaggatgagcgccacggcggtgtcgtcgctgaacccggacgcgccgctcttcatcccggcggcgttccggcaggtggaggacttctcgccgcagtggtgggacctcgtcaagaccaccgcctggttccgcgaccactggttccacgagcaccagcagctcgacgagatggccgactccctcgccctccacgacgccgtcgccgacgacgacgaccttgccggcctcctccccgacgacgccttcgacgacgacgacgacgacgacctcttctttcgaccagacccataacctncttgtcgatcccccgcaagccgccgccgctctcaagactgatgcggtgctcaaggcgctgagccttgtgtctcccaagggcggcgaccccccgcgggggctccgggagaagccc

SEQ ID NO: 414553 - DNA, 343 bp, Oryza sativa
attgtttagcgtcgcctctcctcctcctccctaaccgctacgcttccagaaccttctcgaagctcccgctccccccccctttcgctccaatggcgaaggaaccgatgcgcgtgctcgacaccggcgccgcaggacaaattggatatgctcttgtccccatgattgctaggggtgtgatgttgggtgctgaccagcctgctattctacacatgcttgacattccaccagctactgaatctcttaatggccttaagatggagctggttgatgctgcatttccctttttgaagggaattgtccgcacacctgatgttgtggaggcctgcactggggtgaatgctgc

SEQ ID NO: 414554 - DNA, 458 bp, Oryza sativa
gtggtttttttaactcaggcgttggtacattaatcaagcttaaagtttatttcccgtacataaacgcataggagacaaacacatttgggacccttggaggagaccacacattcataaacacatgatcatatcacacacattttggactgtgtccctcacgacacaagcaaagtaccaaaggaggagatcaattgcagcattgaggagaagcagcagaataaacaaacggggctctagccggagatctggatggacttgacgtcgggcttcttgggctcttccttgggcacggtgacggtgagcacgccattctccatggacgccttgatctgctccggcttggtgttctcggggaggcggaacctgcggaggaacttgccgctgctgcgctccacgcggtgccacttgtccgacttctccttctgctccctgctgcgctcgccgctgatctgcaggat

SEQ ID NO: 414555 - DNA, 316 bp, Oryza sativa
ttttaatcgcgatcccttgtgctcacatcccaagcttcccaagcacacactgttttagtgttcacaaacacagccttccttctcgcccaaatccgtcaaccatgtcgctgatccgccgcggcaacgcgttcgaccccttctccctcgacctctgggatcccgtcgacggcttccccttcggctccggggggagcagcagcagcagcgggaggctctttccttgggccaactccgacgcggcggccttcgccggcgcgcgcatcgactggaaggagacccccgaggggcacgtggtcaaggcggacgtgccggggct

SEQ ID NO: 414556 - DNA, 457 bp, Oryza sativa
gtgttttttgaatataaggggggtttgcaccatttataaatgctagaagtcaaatcaccaaacctcattgacatgagaacatacccaatcatgcacaatttgatggaaacatataacaagtcaaacaagtccattttacaagaaagggcccttttttttcactatggttatgtatcacattgctgttttcttcccactgtgtaacctcagtgcacccaggtaaagaaacttactgaaaattcagtaagttggcaatcactttggcccagctttcccatacgaatcacgcagggtaaccgtcctgttgaacacaatgttctcaggtgtcgagtctgtgtccactgcgaagtagcctagccgctcgaactggaacttgtcaccaagaaccgcagtcgcaagcgatggcacggcgtaggcacccttgatcaccttttttgagttcgggttaagatcaccc

SEQ ID NO: 414557 - DNA, 453 bp, Oryza sativa
gttataaggaaaaagcagcaaaagttgaggagaaaaaagctgcagtagtcactgctgcaccgccatctgaggaggaattgaatccatactctatatttcctcagccagaggaaaattttaaggttcatacagaaatattctatagtgatgggaacatatggagagcgcataacagtaaggagattttagagaaacaccttaaggcaactggtggaaaagtgatgacccgtttcccaccagaacctaatggatatcttcatattggtcatgccaaggctatgtttattgattttggactggcgaaagagagaaatggtcattgttaccttaggtttgatgacacaaatccagaagccgaaaagaaagagtatattgatcacattcaggaaatcgtacactggatgggatgggagccctacaaagttacatatacaagtgattatttccaggctt

SEQ ID NO: 414558 - DNA, 474 bp, Oryza sativa
gtgtttttttttaaatgtgagtcgtgcttttaaaaactcacagatcagctggacggtggttcacccatcacccttcacaaacacgtacgagagatcaataagcagagagcgtatcaattacaacgtgataattcgatatcgagtcggcatatcaagagcgcttcgtgatcggcctcctccccgccgccggcacgagcggcggcggcgaatcacctccctgccacgcccacaccatgtcgccaagcgacggcttaagctcctgcttgtagaagtcccggaaatccggtgagtcgccgccggtcttcctcacctccaccacgtgcacctccggcgccaccttgaagatctccgcctcgatggccagcgcgcccttccgcccgtcctggctcccctccagctcgaccctccctttctccttcagcttgaagctgaacctccccgccttccggatctccttcagcttggagacgatcg

SEQ ID NO: 414559 - DNA, 464 bp, Oryza sativa
attgtccctccggccaatttcccggccggccggaacggcggaacctcgtccatgatcacttgaaacacctcccttgctcttcatggccatggagacgacgagccaagattcgcaggtgatcatgggccggtacaagctcggccggctcctcggccgtggcacgttcgccaaggtctacaaggcctataagttggccaccggcgaggccgtcgccatcaaggtgttcgacaaggaggcggtgcagcggtccggcacggtggagcaggtgaagcgcgaggtggacgtcatgcggcgtgtgcaccaccgccacgtcatccgcctccacgaggtgatggctacgcggtccaggatctacttcgtcatggagtacgcgagcggcggcgagctctttacccgcctcttccggagcccgcggttccccgagcccgtcgcgcgccgttactttcagcagctgaacaccgccg

SEQ ID NO: 414560 - DNA, 441 bp, Oryza sativa
tgtgttattctgatcccagggttttatttttcatatttatccgtaccaaactcttgacgtcacttgcaacatgtaccgtacgtgcatgcaatgtacgtacacaccaaacgttttattcgttattactttgtttattattcagtcctgatcgatgagccgcgcagcatgtgtgcatgtaactcaacagtaaaggttgccacccgggtcaacgccgaattggcggcagtagtctttgtagtagtttacccttgcgttgacggcgccggggttcttgccggtgcactcgagcgcaccgttgatggcccggatggtggtgccgtacccctgcaacatcacctggtgcacgttgttcatccagaaccatagcgccttcttgaaggagaatcgtctgttcctgtgccaccctgtccgggttcctcattcccgtcaacccgatgtttt

SEQ ID NO: 414561 - DNA, 424 bp, Oryza sativa
ctttttcacaccatatcctataatggcgaactcaccgacgccgacaatgctggcgttcctggctcttgggctagcgctcctcctctccgccaccggccaggcgagcgcgcagaactgcggctgccagtcgaacatgtgctgcagcaaatgggggtactgcggcacgggcaaggactactgcggagatgggtgccgctctggcccgtgctacggcggcggcggcggtggaggaggaggaggcggaggtggtggaggcttgaggctgaggcagcgtccagtatgtagagagcgaggtccccggtgcgttcttcaatgggatcaagaaccaggccccgaacggttgtgccggcaagaacttttacacacgacagcctatttcttaacgctgaccacttctactcgggctttgccaggggtccgacca

SEQ ID NO: 414562 - DNA, 521 bp, Oryza sativa
  unsure (1)..(521): unsure at all n locations
gattgaacaagggccgccaagttgcagttagctagctgttgcgctcgctttcccccaaacgtgacccggccgggagggagaagtcgccatgaagcagcctcccgctgctgctttctctctctcgcctcgttaaaatctctcttccaccccgaaccccatccagttcagttccctctcgatcgcttcccgtgctctcgctctctcgcttgctagatcagagattcccctctgcggcggttgtgaggtttccgcttcggctcgctagctagctctgctgtttctgtgagagccgggagcaccaaccgcgcgtggggtgggtgcccggaggtttgatgcgcgtggccgccggtttctccccgtcgtttgatgggcaacgcatgcggcggttcccttagatccaagtacctgagcttcaagcagaccgcgtcgcagcgccacgacaccgacgacaacaacaacgccgncgtggtcgactcgccgagaagccctcccgcctccagcagccgccagacggacgacca

SEQ ID NO: 414563 - DNA, 448 bp, Oryza sativa
tatgtcaccctcacacagacgggacagcagctggtggtgttcctcaccaaatggctgggcgatcacccagagttcgcctcgaaccctctctacatcggcggcgactcctactccggctacaccgtcccagtgacggcgctccagatcgccaacgacgacgacgcccgggcgcggctgaacctcaagggctacctggtgggcaacgctgccacggacgtcaagtacgacagtgggggcaaggtgcccttcatgcacggcatggggctcatctccgacgagatgtacgaggccgcgcggagcagctgctcgggagactaccggatcaccccgaccaaagccgactgcgccaacgcgcttgaggccattagtatggcaaccttcgccattaacccggtgcacatcctggagcccatatgcggattcgcgctgcgcgggcgcccgatgcctg

SEQ ID NO: 414564 - DNA, 448 bp, Oryza sativa
gtgttttgtaagcataggcatgtgaccacaaaaaatgttgagccactgcacacggtgcagtgtcagttgtagcattcacaacataccgagtttctttttaggaggtaaaactctacgagtctcacagcatagtaaaacgtagccagctattactagatacgagtagcattttttaagtcgcaaacaaaagggatacagtcccggcttaaggggtgtaaaatcagcttcactatcttcatgttcgccgcaacgggaaacagagcacaatcatctttgggtccaaaaatttacggcaaacctttgcgacgacgttgatttgtgaaccaatgacgagtttcctagatgacatactctgcttactgttgcgcgcactgaactctctgggcacctccaggcatctcatcgtcctcatcatacgcctcctgagcagcttgggcttttctgcgca

SEQ ID NO: 414565 - DNA, 578 bp, Oryza sativa
  unsure (1)..(578): unsure at all n locations
tgttcctgataccgttacgggagacattgtattcgtcctccagcagaaggaccactccaagttcaaaaggaagggcgatgatctcttttatgagcacaccttatctctgactgaagcactttgtggtttccaatttgtcctgacacatctggacaacagacagctgctcattaagtcaaaccccggtgaagttgttaagcctgaccaattcaaggcaataaacgatgagggaatgccaatgtaccagaggcctttcatgaaggggaagctctacattcatttcacggtggagttccctgattccctggcgcctgaacaatgcaaggctctcgaggctgtgcttccaccgaagcctgcatcccagctgacagaaatggagatagatgaatgcgaggagaccacgatgcacgatgtcaacaacattgaggaagagatgcgcaggaaagcccaagctgctcaggaggcgtatgatgaggacgatgagatgcctggaggtgcccagagagttcagtgcgcgcaacagtaagcagagtatgtcatctaggaaactcgtcattggttcacanatcaacgtcgtc

SEQ ID NO: 414566 - DNA, 466 bp, Oryza sativa
aattccaggaggtagtaatttaagtccacagttaaagctagtatcacaattcgcatcgacaacacaccattaatcaacacaaggaaaaaaaagagtaactagagcatcaaatcacctaaaataaacatcttacgacccagatcgacagttgcaatacagtactaggtaataataacacaagggagcacatcctcaatcatcatctacgatggatgacgagagcgagaggaatggcaggcaggtaggtggcttaggcagcaacctcgtcttcctcctcgtcgccgtagtcctcttcctcgtcgtcggctgtcgcgtcctggtactgctggtactcggccaccaggtcgttcatgttgctctcggcctcggtgaactccatctcgtccatcccctccccggtgtaccagtgcaagaaggccttcctcctgaacatggccgtgaactgctcgctcacgcggcggaacat

SEQ ID NO: 414567 - DNA, 562 bp, Oryza sativa
gttccagcagatgtgggacgccaagaacatgatgtgcgccgccgaccccaggcacggacgctacctcacggcgtcagccatgttccgcgggaagatgagcaccaaggaggtggacgagcagatgctcaacgtccagaacaagaactcgtcctacttcgtggagtggatcccgaacaacgtgaagtcgagcgtgtgcgacatccctcccaacggcctgaagatggcgtccaccttcatcggcaactcgacgtcgatccaggagatgttccgccgcgtgagcgagcagttcacggccatgttcaggaggaaggccttcttgcactggtacaccggggaggggatggacgagatggagttcaccgaggccgagagcaacatgaacgacctggtggccgagtaccagcagtaccaggacgcgacagccgacgacgaggaagaggactacggcgacgaggaggaagacgaggttgctgcctaagccacctacctgcctgccattcctctcgctctcgtcatccatcgtagatgatgattgaggatgtgcttccttgcgtattattac

SEQ ID NO: 414568 - DNA, 480 bp, Oryza sativa
  unsure (1)..(480): unsure at all n locations
cttaccacgtaccaacaatggccaccatggctccaaggctgctcatcgtcgtcgtctccgtcctcttcaccgccggcataatcgcctccgccgccgccgcgcgcgacctcaccgccgacccggccggccaggccccgccggcctacgacttcggcatcccggcaggcttcttcgtccccggcaccaacaacccgtacaacggcgatcctgcagcgtgggcagctgggtacggcagcgccgccgccggcgacgtcggcgggttcgggaatggtggggcggaggcgccgtcgatggtttgctccgacaaggggccatgcaacggcaagaagctgacctgcccgaagaagtgcttcgtctncttcagccgctccggcaatggctacgccgnctgcggtggcggcggcggctgctccttcgactgctcgaccaagtgcgaagctacctgctgatcattntactacttcatttcctcacccatcg

SEQ ID NO: 414569 - DNA, 290 bp, Oryza sativa
ccatatttataactagtcttgtccaccggagcatagcagcggcagcttcaatggacgctctcctcatggcgaaggactttcaggccctgcaagtgcgtgccgtgctctccctagagctggccaagctcaccgggaagagggtacacctgccggccggaccctgaggtgaacccatcgcttgccactgggtcccgcgcggtgacgacctcaaccacacgaaactgatggccctgcctcggcctgtcggcgacaagctagttcttcgaataggactgcggaagctgctggta

SEQ ID NO: 414570 - DNA, 424 bp, Oryza sativa
attctctcatctctgtcattctgcagctagctgaaaaaatcttcagagaatcatcagttcatcacaaaagactatcaagcgaggcaagtacgtgacggtgactgtgatgagcggcggcggcggcggcgggagggggatgacgagggggctggacctgaagctgaacctgtcgctgccggcggtggcgcgcgcggtgtcgccggcggcggacgacgagtcgtcgccgagctcgtgcctgtcgtcggagagcgagctgcggcagcagcacggcggcggcggcgggcagctgcagtggtcggacagcccggaggcgacgtcgatggtgctcgccgcgtgcccgcgctgcttcctctacgtcatgctcgccgaggccgacccgcgctgccccaagtgccggagccccgtcatcctcgacttcctccac

SEQ ID NO: 414571 - DNA, 400 bp, Oryza sativa
gcaacggcaaaattaaagagggaattgaaacagcatgtaaagggccttacactgactggttcgttcaaaaaaaaagggccttacactcagaaagcctaaacacggactcatcaagcacaaactacttgaaagcctgccgttttattcaaatccaatatattattgaaactggcattcctatatatatgctcattaaagcaaacgatacttcacagggacttggccgttgcaatgacattttccactgtcaaaccaagctccttgtatattttcccagcaggcgcactagaaccaaaacggtcaacaccaatagctttacctttttctccgatatatttctcccatccaaatgtgaccccagcctcgacgctgatcctagaagttacttcacttggaaaaa

SEQ ID NO: 414572 - DNA, 389 bp, Oryza sativa
gccaaatggaaggtgtgtcaaatgaggcatcctcccttgctggtcactggggtctcgggaaactaattgccttctacgatgacaatcatatatcaattgatggtagcacaggcattgctttcactgaagatgcacttgcccgatatgaggcactaggttggcatactatctgggtgaaaaatggtaacacagggtatgatgacatccgtgctgcaattaaggaagcaaaggcagtcaaagacaagccaactgttatcaaggtgactactactattgggtatggatccccaaacaaagcaaacacttatagtgttcatggtagcgctctaggtaccaaagaagtagaggcaaccaaaaacaatctttcttggcatcatgaacctttccat

SEQ ID NO: 414573 - DNA, 471 bp, Oryza sativa
tttgttggataatttaaatacttaatagtaatagactctttgatggagtattacaacatgcagcagtggcattaatacgccagtacattaattaagttacacatatgcaggctccattttggtttcttttaatttatcgtattacagaatttctgtagccttgcagatgatcacttggatatcatgtactagtaattaacaataggatgcatacaaaagatggcccaacgacaacagaagatgcgtgcatctgacattgtctggccttatttgttggtagtactccaattaattaacaagagatgatgcattcttgtgccttagtttcttcacatgcttggcttcacgttgagcctattcgcaatcttcacccccaacgactcatcacactgggagaggtagttgacccagatggcgcggagctcaggggagaccttggggtgcgcgagctcgccggcgaagcggcggatg

SEQ ID NO: 414574 - DNA, 399 bp, Oryza sativa
  unsure (1)..(399): unsure at all n locations
gcggagtcagctgcttgatggacgacgaggccacgctcgtcggcggcaagaaccacaggcacgccacccaggacctgtacgactgcatcgccggcggcaacttccccgagtggaagctgctcgtccaggcgatcgacccggaggaggaggagaggatcgacttagacccgctggatgacaccaagacatggacggaggacgaggtgccgatccggcccgaggggcgcctcgttctgagccgcagcgtatacaacttcttcaacgagaacgagcagctggcgttcgggccggggctggcggtgccggggatctactactccgacgacacgatgctgcagtgcanggggttcgcgtacgccgacacgcagtgctacaggctggggccaaactacctgatgc

SEQ ID NO: 414575 - DNA, 293 bp, Oryza sativa
ctccttggtttttatttcatttcattccgatggatagcaacaagcagttcaaaccccataaccaaagcgaactcaattcatggtaacatcacgggcgaagaacacctaacactggatggatggatagagggcttttcgactcgggagagccactggacacgataacgactcgactcgatgataagatgattttgccacggatggctaaggataactggccacgatgggccccaccaatcagttcctccagttcccgccggagtccccgccgaagccgccgccacggttgccac

SEQ ID NO: 414576 - DNA, 293 bp, Oryza sativa
cgtgtgaggtcacgtgggtttggcttcgtcaccttctcctccgagcagtcgatgcgcgacgccatcgagggcatgaacggcaaggagctcgacggccgcaacatcaccgtcaatgaggcccagtcccgccgctccggcggcggaggcgggggctacggcggcggcggtggcggctacggcggcggtcgtggaggcggcggctacggaggaggtggcggcggctgctacgggcgccgtgagggcggctacagtggcggcggcggctacggcggcggccgtggcggcggcagcgg

SEQ ID NO: 414577 - DNA, 392 bp, Oryza sativa
gcatgtacgccgtgggaaaggtgcggatgtgcgcgtcggagttccatctcggcgaccagaacgtgaccgccgcgcagggccgagccgaggtcggagggttcgtgctctggcagaagtgccccgaggtctggtacttcgagctcatcatggccggccacaagatgagcgccggcagcgacggcaaggtcgcctggcgccagtccgccgccgagaactcccacgcctcccgcggacctccccgccccctccgccgctccctccaggggctggacccgaggtcgatcgcgaacctgttctccgacgcggtgtgcatcggcgagaagatcataccgggagggagtgcttcatcctgaagctggaggcgagcgcggcgaagctgcgcgcccggagcg

SEQ ID NO: 414578 - DNA, 460 bp, Oryza sativa
gcaatgacttgcgcgatggcgcccgagtgccctcgatcgagtcgctcaaggctatgaatcccaccgagtcatccgtggaggtggtcctcatagatagggtggtcgactatgatctgaggcaactgataagcaccgcgattgacgtttctcggagccgcgctgactcaagggaaatcaccactcgccttgctggcattgtgtcctcaaagatggggggttccgtagcgtctaccgaagaacatgaactgtgtccccggtggagagactctgccgggttcctgaagattagttcaggttctgttgtgcttccaattgggaagttatcaatcggtctttgccggcaccgatcgttgctgtttaagaccttaacagacactatcagtctcccatgtcgagttgtgaggggatgcaagtactgcaaatctgctggtgctgcttcatgccttgtgcactttggtaa

SEQ ID NO: 414579 - DNA, 446 bp, Oryza sativa
gatccaggttccacatccgttacatcacgacagagtaaaaatagtttctcagtagcacgcgaacataggattgttgatgtgaaacacatgcattcgacaaaagggaaatgaaatacgacaacgaaagcagttctcttagcagtagaccaactagaacatgtaagggtaacggcacaacacatgcggcggccaaaaatttagagcttgtcctcgaaatcggagaggggagtcatctgctccttgagacccttcctcttgcggatatcctgcaccagggttgaagcctgcgagccagcttcaagaggatcagaggtcatcatgtcccaatggtcgaacacacactgggggaaggcctggccagatgtcgcagccctaagctggcttgagaacccaaaggactcgatgacagggaggtaagccttgatgttgtacagaggggtaccagg

SEQ ID NO: 414580 - DNA, 302 bp, Oryza sativa
ttgatcctatggtgctctgtactattgaggagtctggtgagcatatcattgctggtgctggagagcttcaccttgaaatttgcttgaaggatctgcaggaagatttcatgggtggtgctgaaatcattgtttccccacctgttgtttctttccgtgagactgtccttgagaagtcgtgccgtactgttatgagcaagtccccgaacaagcacaaccggctctacatggaagctcgccccttggaggagggattggctgaggccattgatgacggtcgtattggcccacgtgatgatcccaag

SEQ ID NO: 414581 - DNA, 307 bp, Oryza sativa
cacgccatgtcgccgaggtgctcgacgaattgccccaacggcggggaaggcgcgcgcggcggtggcggtggccgctcctcggtgttccggctggagatgatgagcagggcggtccacgccgccgcgaggggcggcagcgtggagatgctgagggagctcatcgagcgccgctccgacgtgtcggagtatctcgacttccgtggatccaccgtgctgcatgctgctgcagggagagggcagctagaggttgtcaagtaccttatggccactttcgacattgtcgattcgactgataatcaagggaaca

SEQ ID NO: 414582 - DNA, 395 bp, Oryza sativa
  unsure (1)..(395): unsure at all n locations
gctctctctctgatctcgtcgttctccatggcctccaaacccgcggacgttacggctacaggtggcggcggcgtcgccgtcgtccgtgacaacaacaacaacgccggcggcggcgaggcggaggtgtaccgctccgagctgacgccgctgcagaagcacgtcgccttcttcgaccgcaacaaggacggcatcatctacccctccgagacctaccaagggttccgcgcaatcggggcaggagtcgtgctgtccgccgtcggcgccgtgttcatcaatggcggacttgggcccaagacgataccggagaacaccaagactggtctcaagttacccatatacgtcaagaacatccacaaaggcaagcatggaagcgattaggncgtgtatgatgcgat

SEQ ID NO: 414583 - DNA, 476 bp, Oryza sativa
atctcgcggcgcatggcggcggcggcggtggcggcgaacggcggcggcgacggcgcgcaggcgtccaacgcgcccgcccccaccaggctcgcgtcggtctacagcgaggtgcagaccagccgcctcaagcacgcgctccccctcccctccgtcctccgctcccccttcgccctcgccgacggccccgccagctccgccgccggcaaccccggtgagatcgcgaagctgttccccaacctgttcggccagccgtccgtgtcgctggtgccgtcgccggagccggcgtccaccaggccgctcaaggtcggcgtcgtgctctccggcggtcaggcgcccggcggccacaatgtcatctgcggcatcttcgattacctgcaggaatatgcaaaaggatccgtcatgtatggattaagggaggtccagctggagtcatgaagtgcaagtacgttgagctcactgcggattatgtgtacccc

SEQ ID NO: 414584 - DNA, 208 bp, Oryza sativa
aaaaaaaaaactcaacatagtactttccctcaacaagaagcaaaatctgatgacaaggcatggtttttaccaacacaatcttaagttaacaatatacacgagggcactttaaacataacaagggaaccatctttcttgagcatctaaagccttcattctgtttattccatgcttgccaaccaagatgtaccagtaatctaagacctgg

SEQ ID NO: 414585 - DNA, 392 bp, Oryza sativa
ctcccagctcgtgctcccctcgccgccgccgccgccgccgcctcgcctcctcggagatcttcgctgcccttccgccaacatggggaagacacgtggtatgggagctgggcgcaagctcaagacccaccgcaggaaccagagatgggcagacaaggcctacaagaagagccacttgggtaatgagtggaagaaaccctttgctgggtcatctcatgccaagggcatcgttctggagaagattggtattgaggccaagcagcccaactctgccatccgtaagtgtgctcgtgtgcagcttgtgaagaatgggaagaagattgctgcctttgtgcccaatgacggttgcctgaacttcattgaggaaaatgatgaggtgttgattgctggatttg

SEQ ID NO: 414586 - DNA, 444 bp, Oryza sativa
accacgcacacggaaagagaggagaggtcacatcgcggcggcggcggcgaggatgttggcggtgtttgatccgacggtggccaagtgcccggagggcctccggagcccgccggtggccggcggcgccgaggcggccggaggtgcgggcgcgctgatgaagggcttcgccggagcgcacgccgacgcggtcaccgtcagcctgggccccgccggcgccctcgcctactcggtggacaaccagagccccctcgtccccaggttgtttggtgctgtgaatgacatattctgcctgttccaaggacacattgagaacattgccagtctgaagcaacactatggtctgagcaagacagcaactgaggttaccatcctgattgaggcctacaggaccctcagggacaggggccctctccagctagtagggtcggagagatcttacgggaa

SEQ ID NO: 414587 - DNA, 407 bp, Oryza sativa
  unsure (1)..(407): unsure at all n locations
tcgatgacgcgacggcgaaatgcggtgtattctctggctcaccaccgtcctttacggacaacataccgctatgatgcggtcgacctgggtgtggaaagtggtggtcgcacangctttgctatcttgatggaatacgtgaccgatgtccgtcgatttgaggagagagaggcggcaacagcaataaagaggggagaggcctgccggcggctgtatggtggagaagcgccgacgtagcccgcatacccttctattgccccttcctctaccacccgggcgattcgcaagccgccgatgccaccgctctcgaccggcattgctgccgtctcatgggctccaggaaccggcggcgggggcgatcttgacctcgaccttagccttggctgctttaatgtggggataagaggaga

SEQ ID NO: 414588 - DNA, 436 bp, Oryza sativa
gacctcatgggccgcggctccttcggcgacgtctacaaagggtttgacaaggaactgcataaggaagttgcaataaaagttatcgatttagaagaagctgaggatgacattgaagacatccaaaaggagatatctgttttgtcacaatgccgttgtccatatataactgactattatggctcatatcttcatcaaacgaaactgtggatagtaatggaatatatggctggtggttctgtcgctgacctactccaaactggccctcctctagatgaattgtctattgcatgcattctgagggacttgttacatgcagttgaatatcttcattcagaaggaaagattcaccgtgacattaaagcggcaaatatcctcctgactgaaagtggagatgtgaaggttgcagactttggtgtttctgcgcagctgactaaaa

SEQ ID NO: 414589 - DNA, 351 bp, Oryza sativa
gtattgtcttcagacggagttaagatcttgggaaacttggttttgccaccttgtaagaaggaacctcgccaaagggcttacggtaggggcagccaaggaaggtgtattagccattttcttgttacttggaggttcagagggaggttcagatttctttgcgaaaactgatgtcgccgtctcttgaagactttgcagcgaggactccttcgagctccctagccgatggagcattctgccaatcagcacctcacaagatccaggtagctctttttcgagatgcatcaaggaatcaaggaatgtatgaacaactggtccgttaaacttgtcaccagtagcctcttttagagaagg

SEQ ID NO: 414590 - DNA, 451 bp, Oryza sativa
tcgcttagccactgcatatcttccagcttttgtcatagccttttttgtttcttctcttttggtacaaattcagggtctggaatacttgaatcagtgagaagaaaaaacaagatgtataaccctccaagtgcccaggcgatgacatacagagatcatgttcagaggcgccatgaggaaaaaggctgcacatatgcatgcctgtttacactgtgctgctgctactgctgctacgagacctgcgagtgctgcctccagacactcagctgctgctgctgacgtcgtcatgacgaagtgatatgcgcactgagacgtccactgggacactcatcgatgtccatctgctttgtctgaataaaaaatgtatctatgtacttaattaattatttgagtgctgaaaatccgcaaggcgtgtgttgatgtgtttaattaccttttcttttctctgcaatgg

SEQ ID NO: 414591 - DNA, 391 bp, Oryza sativa
ttgttttttttttttaagaccaaatccggacccaaatgtctattgtgtggttataaacggccgaattaagattaaaaccaaccccagaaggacgagatccaactccaccgaatcgatccaagaactcgctaatcaaccaaaccatgggcgatctatttaccaacacgacacgaactataaaaagataaaccaccaccactcttcttatttagggactcgcgactcaagacactgatactggcaaaggcaaggggaacagcacagatctaggagagctggccgatcgggatgacaccggttgggggctcccgcggggatcccacctttgaggcttgacactcatgcctgacaccggcgaacacagtgttccgtcagcagtgagggacgggca

SEQ ID NO: 414592 - DNA, 478 bp, Oryza sativa
gtgaaacagcaaaaaaaatcaaacaaaaagaaaaaatattccccatctgtgaaattcgcaaaaccctagcgcggcggcgatgtcgaacacgagggtgttcttcgacatgaccgtcggcggagctccggcggggcggatcgtgatggagctgtacgcgaaggacgtgccgcggacggcggagaacttccgcgcgctctgcaccggcgagaagggcgtgggcaagagcggcaagccgctgcactacaaggggagcaccttccaccgcgtgatcccggagttcatgtgccagggcggcgacttcacccgcggcaacggcacgggaggggagtcgatctacggcgagaagttcgccgacgaggtgttcaagttcaagcacgacagccccggcatcctgtccatggcgaacgccgggcccaacactaacgggtcccagttcttcatctgcaccgtgccctgcagctggctggacgggaagcac

SEQ ID NO: 414593 - DNA, 313 bp, Oryza sativa
  unsure (1)..(313): unsure at all n locations
gagggggacgacaactttaaatattgctcaataaaacactatctggagacaacacacacgagagtcatatccagaggaaaacaatcagcccagacggaccactagcaccaaatgcaaagcaatgggaagaactaattcgaccgctaccaccctagtaaaaaccagagaagagagaggaaggggggacaggaagaaaaacattctagtagaacaggagaagaatccatccatcatggtgacagcagcatgaggcatctaaatcgatggtctccaataacatgcgggagcgcatcgatcagagtcggnatcttcc

SEQ ID NO: 414594 - DNA, 314 bp, Oryza sativa
caaggagtaccgtggcaagattgaagctgagctgagcaagatttgcgatggtatcctgaagttgcttgactcacaccttgtgccctcatctactgctgcagaatctaaggtgttttacctcaagatgaagggtgattaccacaggtaccttgcggaatttaagactggtgccgagagaaaggaagctgctgagagcacaatggtggcttacaaggctgctcaggatattgctctggcggatcttgctcccacccatcccataaggcttggactggcacttaacttctctgtgttctactacgagattctaaact

SEQ ID NO: 414595 - DNA, 323 bp, Oryza sativa
ttggtgttttaaaaagttcaaaattttagtgatttttattgtcttgaattttcaggatgttacaacaagtcaggggtagatctgaactgactggtgtatcaggttgcaccgccttcttaagtaaagagatgtgaaccactgggtgaatcaagctcccagccggcaatgccaatcgataagccactgctccaatccgttccaggactttataaggtccaaagtacctgaaactcaatttgtgacaagaacgtttggccatggttagctgaacatatggttgaagttgcaagtaaaccatatcaccaggggcaaactggcgtttt

SEQ ID NO: 414596 - DNA, 386 bp, Oryza sativa
acggattatgtttgtctggcctggactaaaaagggatgtcacggcttatgttcagtcttgtgcaatctgtcaacaatgatacggagaacattgtaagagcccaggattgttgcaaccccttccagttccactttaggcttggactgtcattagtcttgacttcattgaagggcttcctaagtctgggggctttgatacaattatggtggtggttgataagttcaccaaattcgctacgttcattcccttatctcatccctttactgccttaaaagtggctcagttgttcatccagcacatctatgatgtttttgtcatgccgcaggccatcatctctgacagggacaggatctttacaagtgctttatggcaggaactcttttgac

SEQ ID NO: 414597 - DNA, 407 bp, Oryza sativa
acggcggcacggtcaccaccgcaccagtgccaccacccacggcgagccttcgccgcgagctcgccctctctccaaacctccccgcgcgcggaggcgtcgccggacagcccaacgctgccacccgcgaggcccccgccgccgccgtctcctccgcccggcgagtcgtcgtcgtctctccctccctcgcgggatacctagatgagcaattttgtcaggtggaagatttgcaggatgaagctagtcctaattttgtggaagaagttgttactttgttttttaaggactcgggcaggctaatgtcaaacattgagcaagctctggagaagtacccaagagatttcaacaggtgggatacatatatgcagcaactaaaaggcagctgttccagcatcggcgcttctaggatg

SEQ ID NO: 414598 - DNA, 395 bp, Oryza sativa
gcggcccttccgtgttcccactgtcgatgtctcagatgttgctcttacagaaagaatagaaacctatgcctgatatgatgctatccacagtgctatcaagtctgaataccagggaaagctcaagggaatcataggatatgtatgaggactacctggattgtactgactttgtacgggacagaacgtccagcctctttgaccccaagggtggaactgctgttaacgataactgtctcaagattgcagggtgagcccacaacacctggtgatacaggaaccgatgtatcgacctgatcactcacatggccaagaccgaacagaatgcggttgcttgccatggtataacatggccgacgagccggacataccgaaatgctactgctatgctgagaata

SEQ ID NO: 414599 - DNA, 471 bp, Oryza sativa
ctccactgcgctatagatagctacgtgctgcattcgcgcgcgtgtgcatgcatggcagcaattggtaacatgaatttgttcgacttgttcttcgtcttgcagcttctcctgtcaggagtatgcgtgctcgtcatctgctaccgatatcagcggcttaaatccatgaaaaaatgtagcctaggggttgtccagtggccgatcgtcggcgtgctcccggccatcgtcgccaacatgcaccgcctcctcgacggcgtgaccttcctgctggccacgtcgcagctcaacttccagtgccgcttctggctcgccggcttccggttcttcgtcacctgcgacccggacaacgtgcgccacatcttcacgtccaacttcgacaactaccccaagggcgacgtgttcgccgacatgttcgacgtcctcggcggcggcatcttcaacaccgacggcgagcggtggcggcggcagcggaac

SEQ ID NO: 414600 - DNA, 413 bp, Oryza sativa
tcgcataccccgaaatctcgaggagcttgtcttttttcggtagcaatggcgttggagcagaccttcatcatgatcaagcccgacggcgtccagaggggcctcattggcgaggtcatcggccgcttcgagaagaagggattctacctcaaagccatgaagctcatcaacgtggagaagtcgttcgccgagaagcactacgccgatctgtcctccaagcccttcttcggagggctcgtggagtacatcgtctccggccccgtcgtcgccatggtctgggagggcaagcaggtcgtctccaccggccgcaagctcgtcggggccaccaaccccctggccgctgagccgggcaccatccgtggcgacttcgctgacgacattggcgggatgtcatccacggaagcgactcggtcgag

SEQ ID NO: 414601 - DNA, 410 bp, Oryza sativa
gtgttttttttttttttttttttttttttttggtggatcgggaaatttcttatgcacgtgacaaatttatacaggtgcattgcccatgtacacaggaaaacacgacaaaagacctaaaattccagtgcgtcgttgaacccggcgtcgtaggcggcgtcagcctccatgtcgccgaccatttccccgagcattatcccgccgaccgcgccgccgaggagcccgagtccgaggcccatgcccattcgtccacctttcctcgccgccggctgttgtgccgccgcgtagctgtacgtcgccggcggcggtgggccggcgttgtacgcgtacgggggctgacccgcgtaaccgtactgctggtgatgcggggggtacccttcttcgtacggcgcgccgtacggcacgaccggcgg

SEQ ID NO: 414602 - DNA, 437 bp, Oryza sativa
  unsure (1)..(437): unsure at all n locations
gcggcacgttgccaccacaggctacgcaaaattctctcccttcctcctccaccacctccactccgacgatcctcctcctgatcctgtgccggccggcgatggcgtaccggttgctggagctcacgctggtctccgcgagcgacctcaagaaggtcactctcttctcgcgcatgcatgtctacgccgtcgcctccatctccgggagcaacgtccccatgcccatgcacggcacccacgccgaccgcaacggcggcagcaaccccgcgtggaacaccgtgctccacttccccgtccccgcccgcttcgacacccgcgggctcgccctncacgtacagctccgcgcccggcgctccttcggcggccaccgagacgtggngacgtgntcgtgcccttcgacgacctcctcgccggcgcgcacgacggcggcgagccgaggc

SEQ ID NO: 414603 - DNA, 347 bp, Oryza sativa
ctcttcccaacactagtaggataaagccacagagagagcagtagtagtagcgagctcgccggagaacggacgatcaccggagaagggggagagagatgagcggcggtcaggacctgcagctgccgccggggttccggttccacccgacggacgaggagctggtgatgcactacctctgccgccgctgcgccggcctccccatcgccgtccccatcatcgccgagatcgacctctacaagttcgatccatggcagcttccccggatggcgctgtacggagagaaggagtgggtacttcttctccccgcgaggaccgcaagtacccgaacgggtcgcgggcgaaccgcg

SEQ ID NO: 414604 - DNA, 314 bp, Oryza sativa
ttggttgtttttttttttttttttttttttttttttttttaaagacaaaggaattagcaatgtatactcgcattccacaacagtcgaagggaataataagtcttaacatccaaattaaacccgacagaaaatagagttttaaacgacttacatagtgcacaaagcgagcagatattaacggtcaatggaacaactggaaatgaccgccacaaaacttaacgagtactaaaagagctagatatctcaaatgcagatatggaaagcaccacttgaacgaggctcatttcttcttggcggcagccttggtcaccttg

SEQ ID NO: 414605 - DNA, 438 bp, Oryza sativa
  unsure (1)..(438): unsure at all n locations
gccgccgccgcagcctcctctcggctgctcccatcctctccttcgagttagcttcctccttattcaaccatgggtaaggagaagacgcacatcaacattgtggtcattggccacgtcgactccggcaagtcgaccaccacgggccatctgatctacaagcttggaggtatcgacaagcgtgtgattgagaggttcgagaaggaagccgctgagatgaacaagaggtccttcaagtacgcgtgggtgcttgataagctcaaggccgagcgtgagagaggtatcaccatcgatatcgccctgtggaagttcgagaccaccaagtactactgcacggtcattgatgcccctggtcaccgtgacttcatcaagaacatgatcacgggtacctnccaggctgactgtgccgtgctcatcattgactccaccactggtgggttt

SEQ ID NO: 414606 - DNA, 413 bp, Oryza sativa
cggttggattctacttcccctaccggttcggttcggttcggttcgggtccggttcgatttcggtttttccttcggttcgggggttggagggaaagcatggcggcgccggatgttgagtaccgctgcttcgacggcggcctcgcctgggccaccgacgaccgttccctcgaagccgccttctccacctacggcgagatcctcgagtccaagatcatcaacgatcgggagacggggaggtcgcgcgggttcgggttcgtgacgttctcgagcgagcaggccatgcgcgacgccatcgaggggatgaacggcaaggagctcgacggccgcaacatcaccgtcaacgaggcccagtcgcgccgctccggaagaggaggcggcggtggctaccgacagcgcggaggaggcggaggcta

SEQ ID NO: 414607 - DNA, 478 bp, Oryza sativa
  unsure (1)..(478): unsure at all n locations
tggctgcggcggcggcggcgaggggtgtgacgaccgtcgcgctcccggacctcccctacgactacggcgcgctggagccggccatctccggggagatcatgcgcctgcaccaccagaagcaccacgccacctacgtcgccaactacaacaaggccctcgagcagctcgacgccgccgtcgccaagggcgacgccccncgcatcgtgcacctccagagcgccatcaagttcaacggcggaggccatgcaatcattcgatcttctggaataacctcaagcctatcagcgagggtggtggtgagccaccacatgcaaaacttggctgggccattgatgaggattttggttcatttgaggcacttgtaaagaagatgagtgcagaaggtgctgctttacaaggatccggatgggtgtggctagctttggataaagaggcanagaagctntcagtgggaacaactgctaaccaggaccctctg

SEQ ID NO: 414608 - DNA, 470 bp, Oryza sativa
  unsure (1)..(470): unsure at all n locations
tcggtcggatctaattaatttacctcctccacctcctcctcctccccccgatcggatcggcccggctcctcctcctccgacgacgccaccgacgccgcagataggagaagatggccgcacttgataccttcctctttacctcggagtctgtgaacgagggtcaccctgacaagctctgcgaccaagtctcagatgctgtgcttgatgcctgcctcgccgaggaccctgacagcaaggtcgcttgtgagacctgcaccaagacaaacatggtcatggtctttggtgagatcaccaccaaggctaacgttgactatgagaagattgtcagggagacatgccgtaacatcggttatgtgtcagctgatgtcggtctcgatgctgaccactgcaaggtgcttgtgaacatcgagcaacagtcccctgacattgcacagtgtgtgcacggncacttcaccaagcgccctgaggag

SEQ ID NO: 414609 - DNA, 468 bp, Oryza sativa
gtttgtttagctgaaattttatattttatatttttctcataagcagcggttgaggagtaaacatgttcaaaactgttccagatgaagagtacaatttctacacaactgtcaagaagttctatttataaccagccgtgttttaagtgaacaagaaccacagctcaaaacaacagaagctgatacacagtcagatgactgaaaatatatttccccatcatcgtcgaccagaatgcccatctccgcaaggtcagatgacaagatcgaaaaatgatctccacatctacatggatacatcaactccatagcatcaccagtgctttcaacagtcatttcctcgatctcgatttcataagcaatgtttgcagagttctgccttgatgtttgcagctgcttgtcatactctgttctggatttgggatcacgtaggacctcccaagctttttgcacgctgaagaattccccatgctc

SEQ ID NO: 414610 - DNA, 266 bp, Oryza sativa
atcgccgccgccgtctcctcgtgtaaccctagcttagtggattagtttaagtgtttgccggagattatggggtcggtggcggcggaggaggtggtggtgttccggtcgaagctgccggacatcgcgatcgacaacagcatgacgctgtatgagtactgcttcgcgaggatggcggacgtctgtgcgcggccgtgcctgatcgacgggcagaccggggagtcgtacacttacgcggaggtggagtccgcgtcgcggtgcgccggggc

SEQ ID NO: 414611 - DNA, 338 bp, Oryza sativa
cacaaatccgccgtcgccgacgttgagagagaagggacagagagcgagtgcttcgccgtccccgccgccgcgatgagggccaagtggaagaagaagagaatgaggaggctcaagaggaagcgccgaaagatgaggcagagatccaagtagtcgatatcagtagtgtggatgtcttcttacatcatgttgaccggtgcatttggattgatggtgccttcggattcttgatgttccagttattggtgtaggaatgtgaaaccttttctggttttggttaattctagctggtgaaatgtctctggttatgttcctagactggagtattatgtaatgtgatg

SEQ ID NO: 414612 - DNA, 473 bp, Oryza sativa
cctttcatgaaacaagaaagacaacaccaacaaactagctagctcgccaatggcctcgttgtactccttccggctcgccgtggcagaggcggcattgttggtcgttggctcatgcgccactgaggtcgccttcaaggtcggtgagggctctagcggaaaaagtctagagctcgtcaccaacgtcgccatctctgaggtggagatcaaggagaagggcggcaaggactgggtggcgctcaaggagtcgtcgactaacacctggtcgctcaagagtgaggcggcactcaagggccccttctccgtccgcttccttgtcaagaacggcggctaccgtgtcgtcgatgacgtcatccccgaaagctttacggctggctctgaatataagagtggcatcaacatctaagtgatagacatgtgtgcttttttttttgaaataattcttaacctctctataatccttttttttttaaaga

SEQ ID NO: 414613 - DNA, 377 bp, Oryza sativa
ttggtttaactaagaccagtttgatttcgtgtttgatacaaaaattaagatggacggattcacaagagagcaccctctacttaagctttacattacaaggccaaccagcagctgcctgccggccgaccactgcgtgcgcacgcgcgcgcaataatcaaccaatcacacacagtacgcacgcacataaaaaccacccatagccttcacgtacgcccggacgcacgcaccggttcgtgccaagctcaagggtagatggttctcgggatgatgatgtcgccgatgttgttgtgccacgggtccgagaggtggctggccaggttctccagtgggccggtgcccgggtacgccgactgttggacgcaaaaacccacaaaagc

SEQ ID NO: 414614 - DNA, 268 bp, Oryza sativa
tgcttcttcctacttcgtcttcttgctggtgtgttcgaggaggaggcggaggaggagaagctagcggctgaggctgaaatggctacgagcgggcttaggagctgcagatcggggggcgatccgagcctgctggcgccgtcggcgaacaggaacccactgcctgtctgagcctacgccaccacctgctggcgcgtcaccatggaaagggaccccgtgaagaataagtaccccttcggtaccttggatccccttgctttttccaaggacc

SEQ ID NO: 414615 - DNA, 441 bp, Oryza sativa
cggacgcgtgggcgaccaatccctcttccagtcaagaaaaaaggaagattacaccaacaaacaaactagctagccaatggcctctttgtcctctttccggctcgccgtggcggtggcggcactgttggttgttggctcctgtgccactgagctcaccttcaaggtcgctgagggctctagcgccaaaagtctagagcttgtcactaatgttgccatctctgaggtggaggtcaaggagaagggcggcaaggactgggtggcgctcaaggagtcgtcgtctaacacctggacgctcaaaagtgagtcgccgctcaagggccccttctctgtccgcttccttgtcaagaatggcggctaccgtgtcgtcgacgatgtcatccctgaaagctttacagctggctctgagtacaagagtggaatccaactctaagtaacagacat

SEQ ID NO: 414616 - DNA, 456 bp, Oryza sativa
  unsure (1)..(456): unsure at all n locations
cttcttcttgctgatcatcatatatctcttgtgagcttcagcaatgggggctctgccaagggctctagtcctcggcgtttgcgccgccgtcttgctggtgaacgtgctcgccgttgtcgtcgacggcgacgccgcggcggcggcgtccatggtcgtcggattggccaagtgcgccgactgcaccaggaagaacatgaaagctgaggctcgttttcaagggtgttcgcgtggcgatcaagtgcaagaacagcaatggcgagtacgagacgaaggccaccggagaggtcggcaagtgtggcgcgttcgccgtgcccctcgcggcagacctcctcggcgacgacagccagctgaggcagcaatgcttcgcgcagctgcacagcgcggcgtttaaccagccatgccccgggcaggagccgtcgtggatcgtcaacgccggcgncgacaagaagaagacct

SEQ ID NO: 414617 - DNA, 449 bp, Oryza sativa
gcctcccatcaacttcttgcacacaccctccctttggctttcatctgcatctattcagttgcagattgagagccaaagacattatcttgattctatcaggagggttgtgctagcgaattcttgttagcaacaaattgacatattgctcggcacatccccaccgagaataccaagatgacgttctctggtacacaggacaagtgcaatgcttgtgacaagaccgtgcatttcattgatctccttaccgcggacagtattccctaccacaagtcttgcttcagatgcagccactgcaaaggcacactttcgatgtgcagctattcgtccatggatggggttctttactgcaagacccattttgagcagctattcaaggaaacaggcaccttcaagaagaacttcccctcaggtacaaaggcaaacagtgaacaggctaagattcccagcaa

SEQ ID NO: 414618 - DNA, 397 bp, Oryza sativa
catgaaccttgtgaagaagcgcgtggagctgttctgtgagatcgctcagaacaaggaagactacaacaagttctacgaggtcttctccaagaatcttaagcttggcatccatgaggactccaccaacaggaccaagattgctgagctcctgaggtatcactccaccaagagtggtgatgagatgaccagcctcaaggactacgtgacccggatgaaggagggccagagtgagatctattacatcactggcgagagcaagaaggctgatgagaactcccccttccttgagatgctgaagaagaagggatatgaggtcctgtacatggttgatgccattgatgagtacgctgttggccagcttaaggagtttgagggcaagaagctcgtttctgccacc

SEQ ID NO: 414619 - DNA, 464 bp, Oryza sativa
gaagcactgagtatcaaactattttaatgtacatagacaagatgtttgacaaatctagttttacagagtcccaactcccaagttcgtcacttgctgaacacacaagttacattccattttattatcggccaagcggccatctgctgcacattattgcctataccattcccactgacagcaggaagatttccctcagatctcatcacgtcgaggacctacagtcagtgtgcctcatctactgcaagaggtacagtcttcgccagttcacggaacttcaatatgtagaacatctcaagatagcgcctggtctcccgcctctcaagcttcgagacatacttccagaagccataaaccccagccaatgtcatcaacctctcagagtagatcttccatgtatatttctcatatatacgttgtaggcctctattagaaactttcacccaatgggtggggtcttggttaca

SEQ ID NO: 414620 - DNA, 485 bp, Oryza sativa
catgaaatccaaggacagagaagaaatcgcagagattgagaagatgcatgaacttattaagacctataacttgtttgggcagttccgttggatctcggctcagacgaacagggctcgcaatggtgagctctatcgctacatagctgatactcatggtgccttcgtgcagccagctttctacgaagcattcggtctcactgttgtggaggccatgacatgtggactccctacttttgcaacagtccatggtggacctgccgagattatagagcacgggatctcagggttccacatagatccttatcatccggatcaagctgcaaatctgatagctgacttcttcgaacaatgtaaacaagaccccaaccattgggttgaagtttctaatagaggcctacaacgtatatatgagaaatatacatggaagatctactctgagaggttgatgacattggctggggtttatggcttctggaagtatgtct

SEQ ID NO: 414621 - DNA, 461 bp, Oryza sativa
  unsure (1)..(461): unsure at all n locations
aaactaaagctaataatagataccacataatagtcagcctggcataaatgtattgcacaaaacaccaccagttcgaaaggtgtatataccattcgagatttggtatataacttttggtatggcatgaactctctgcttcaaagttggagtttctccaatataatcaatggacgatagatggcatcagttactaagttttaaggtngagagaactattatgacttctggtgcaccgatggttgatcttgcaatttgtttgagttatctggctcgactttcagggagcctggttcgtctatggccatcgcacttgcatcggtaggaacagtttgtttcgaggaaccaactccatcagccgcaggttctgtgcccttggtgtgctctgcagcgaccctattaccatcctgatctgcggcatctgtttcagcagactctctcttaactctcacattctgaatact

SEQ ID NO: 414622 - DNA, 384 bp, Oryza sativa
gggaaaagaaaaaaaaaagagataaaaaaaaatctcctcctcctcctcctcgccgccgccgccatggacgcctccgccggaggcggggggaactcgctgccgacggtgggggccgacggggccaagcggcgggtgtgctacttctacgacgcggaggtggggaactactactacgggcaggggcacccgatgaagccccaccgcatccggatgacccacgcgctgctcgcccactacggcctcctcgaccagatgcaggtgctcaagccccacccggcgcgcgaccgcgacctctgccgatttcacgccgacgactacgtcgccttcctccgctccgtcacgccggagacccagcaggaccagatccgggcgctcaagcgcttt

SEQ ID NO: 414623 - DNA, 425 bp, Oryza sativa
  unsure (1)..(425): unsure at all n locations
catcagaaaaagattttattagcaaagaacaggggataaattattccacatgccgacttgatgaatgatactaattatttccagtgttaaatggaattaagttggcgtaaaaaaaaattctagctgaaacaacaccagttgaactggcatgccaattggcggtacgctgccttattctatttacttttgaccgtgatacccttcggctgttcttgggataattttctatggtttaccattcaactggactttagctagcttctctccgctttcttcggcgccatccaccttaccaggaaatgacctcccactacttgtgacaagttccttgatggttgcttggatgtccttatcngccaacagcgaatccaatgtcacatgtagccggaatctccaataatgcttcgggttagttgggtcattga

SEQ ID NO: 414624 - DNA, 496 bp, Oryza sativa
ctttcagattcaattccaggggatgttaaggacgagatttcacaggcaaagaagcagttggacaaaaaggatgttgactatgaggcatcactggcctcaaaactctcgatagcaagaaaaatattcaaattagagaaagacaaagtactaaattccagttcgttcaagcagtttttatctgaaaacgaggagtggttgaaaccatatgctgcattgtgttttctgcgggacttctttgagacatcagatcacagccaatggggccgtttttctcagttttccaaggagaagctagataagcttgtttctgaaggtaccttgcaccatgacgttatatgtttccattactacatccagtaccatctatatatgcaattatcagaggcagctgcctatgcaaggaagaaaaaggttattctgaaaggagatttacctattggtgttgataggaatagtgtggatacttgggtataccccactttatttcgcatgaata

SEQ ID NO: 414625 - DNA, 315 bp, Oryza sativa
tttgtttatttgattaaagacctttattcatgttgggatactacatcactacatgccagtttttattggtagtactaactgatcgaacgatcatgcaataggataacaatccgatggatcgatcgatcactcagctagctagctggcgaagttgcgctggttgtagcagtcgaggttgctgccgtagcctgcgccgagcatgtcgcagtagcgcttgtagtagccgatgcggtcgacgttggcgtcgttctggccgacgccgcactcgatgccgccgttgatgatgttggtgatgacgccatacccggggacgcg

SEQ ID NO: 414626 - DNA, 392 bp, Oryza sativa
ggctacattatcgacgacgacgacgaggtttgttcagcttgccgcgtgcgcggcggcgtcgctgctcgccgtggcggcgagtggcgcggtggcgcatggcgtctggtcggtcatcacgcaggcggagctcaacagcatgctgcccaaccgcgacaactcgcagtgccccgcgaggggcttctacacgtacgacgccttcatcgccgccgtcagacttcttcccggcgttcggcacctccggcggcagcgccgagctcatccggcgggagctcgccgccttcttcggccagacctcccacgagaccaccggtggaacgaggggtagttctgaccagttccagtggggatactgctttaaagaggagataaaccaggcgactattccaccctac

SEQ ID NO: 414627 - DNA, 323 bp, Oryza sativa
ccgtcatgacattatccactacaatctgaagtcaagcaacattctgcttgatggatcaggcgatgccaaggtgggggactatggattggcaaagcttctgccgatgttggatcggtatgttctaagcagtaaggtccagagtgcacttggttacatggcaccagagtttgcgtgcaggactgtgaagatcactgaaaagtgtgacgtgtatggatttggagctcttgcccttgagatattgacagggaggacgccggtgcagtacatggaagatgatgttattgtgctttgcgatgtggtaagggctgctttggatgaaagga

SEQ ID NO: 414628 - DNA, 351 bp, Oryza sativa
ctttctttgacaaaaccgtgcgggtttgggatgctgacaatacaagttattcactccgtactttcacgggtcattcagcatctgttatgtcacttgacttccatccgaacaaagaagatatgatttgctcctgtgatggtgatggtgaagtccgcagctggagcataaataatggtagctgcctgacctttgttaaggtctttaagggaggtgctactcagatgcgatttcaacctcaaaagggaaaatatcttgcagctgcctcagagaaggccatctacatacttgatggagagacacaacttgcttgtagaaaccctatgcaggggcacacaaagaatattcactcac

SEQ ID NO: 414629 - DNA, 287 bp, Oryza sativa
ggggtcagcgctccccaaggcagtggaaagacaactcttgttttcgcacttgattatctttttcgggttgctggtaggaatgccgctacattatctatcgatgacttctacttgacggcagcagaacagggtaaattgagggaaagaaatcctggaaatgctcttttggagcttcgtggaaatgctggaagccatgatctcccgttctcagttgaaacacttgaatcgctgcttaaactaactaaagaaggtttgaagatgaagcttccacggtatgacaagtctgc

SEQ ID NO: 414630 - DNA, 331 bp, Oryza sativa
tttgttttttattagagaatattgctttaattattgatctcgttacaacttaatatctgaagagatcatctcaaatctctatttacagtatatatcaattgcttgatttaggtagttagtcacttgtgcttctggatcatttccctaacctcatccatcacaagccatgctttatggcctcctatcacttccgctgcccattctccatccttccataactggatagtgggcattttagttatattccctcttttcaccacagtctgtggaacctttgttgcatcgacaaagtagaaccctggaaattctcctgctatcttctccagtctgg

SEQ ID NO: 414631 - DNA, 392 bp, Oryza sativa
tcgggagattttggtcttagcaagattatcaaagcccagcatgccaatgatgtgtacaagatgactggggagactggaagctaccggtacatggctcctgaagtattcaaacaccggaaatatgacaagaaagttgatgtcttctcgtttgctatgatactttacgagatgcttgaaggggatccacctttctctaactatgaaccttatgaagccgcaaagtatgtgggagaagggcatcgcccaccctttcgttcgaagggatttactaacgagttaaaggagttaattgagctatgctggtccggggatatccatctgaggccatcttttctagagatcctcaagaggctcgagaagatcaaggagtacttagctgcgcacgatcacca

SEQ ID NO: 414632 - DNA, 387 bp, Oryza sativa
acggagttgcttatgatgcacaacaggacatactgcgctgagattgctcacaacgtctgcacccgcatgcgcaaggagatcgtcgagcgcgctgcgcagctggacatcgtggtcaccaacaagcttgccaggctccgcagccaggaggacgagtgaaattttctgcagattttcgtgcttatggctgcattgttcgtagggcagtgccttggtaccttaaaattatccattttgtgttgctgttagatttgcccgtatggacatcattttgctgtgagtgacctgtctagttttagcaacaatgagataaaaagactttcagcttttcatcatcataaacttatgtggtttctctaagaaacgaagggggggttgaataatgagaaa

SEQ ID NO: 414633 - DNA, 426 bp, Oryza sativa
ccggaccggaacggccgggccgagcccagagcgaccggtcgtgcgtatacgcgggcttgctgtatatgggagcgtggtgagcatatcatcgctgttgccatgaagcttccgcgggctagcccttctgttgatcttcttgctgattctatcgctacagattgcgaaaagagatggattgctgtagataggatacgcatactggggctcttgccccctagcttctttcatatgctcgagcgcgttcagattgacaatggtttttacttggcactgtgtgggtgggaggatggattggcataggccatagatggcggacgtattggcccacgtgatgatccaaatgtgcgctccaagatcctgtctgaggagtacggctgggacaaggatcttgcaaagaagatttggtgttttggacctgagacaact

SEQ ID NO: 414634 - DNA, 250 bp, Oryza sativa
  unsure (1)..(250): unsure at all n locations
accacaactttttaaggatggaattgagtagcaatactttcaccccaaaatacagtttagnacaatatctanaaaagccgcttgtttgccgcatggctggaagctgagagagcagtacacaaaaacacgagacactataaaccaaacggaacgaacganaaaatacagggcttttttgctgaagaacacgaagcggttcgtttcttaatttttagtctctctcctctcatgatgggtgatggaatggaat

SEQ ID NO: 414635 - DNA, 408 bp, Oryza sativa
tcgcggtcgcgtgggctaccttctcctccggctcttcttcagtatcgaatcctctcttctcctcgtgcccaccaccaccaccgtagcaatggcgggcaacgggccgatcaacaaggaggacccgctcaactggggcgcggcggcggccgagatggccggcagccacctcgacgaggtgaagcgcatggtggcgcagttccgcgagccgctggacaagatccagggcgccaccctccgcgtcggccaggtggccgccgtcgcccaggccaaggacgccgccggcggcgccgacgagctcgacgaggaggcccgcccccgcgtcaaggccagcagagagtggatcctcaactgcatcggccaccgcggctacatctacagcgttaccaccggctttggggggaccttcca

SEQ ID NO: 414636 - DNA, 266 bp, Oryza sativa
tttgttgtttttttttttttttttttttttttttttttatgacctcattcagagaggattcactgcatccaaagttctgaagggtactcgatacaatttaaacacacgtctctcttacttggagtatcacacacacacacagacatttattctcggtttacatagaagatgatatcccttctgtcaagacttgtagggtaacataatatataaaacagggttatagatgacagccccatgacagatacagtaagatctggagacag

SEQ ID NO: 414637 - DNA, 429 bp, Oryza sativa
gattgtcaggagttaaagcaactagctggtgaagttggatcggagatatctttcataatgtcgaggaaatgccaaccatgtaacactggacattctgttgtggagctcgctattgctatacattatgtcttcaatgccccaatggataagatattatgggatgctggtcagcatacatatgcacacaagattctcacaggaaggcgctcactctttcatactattaagcaaagaaaggggctttcaggtttcacatcccgtttcgagagcgaatatgatccctttggtgcaggacatggatgcaatagtctctccgcaggccttgggatggcagtcgcaagggatctaggtgggaggaaaaaccgaatagtaacagttataagtaactggacaactatggctggtcaggtgtatgaggcaatgggtcat

SEQ ID NO: 414638 - DNA, 457 bp, Oryza sativa
ggcgccctttttttttttgttgataggatcaaaacagtgatattaccacagctttttaaggatggaatggagtggcaatactttcaccccaaaatacagtttagcgacaatatcttagaaaagccgcttgctttgccgccatggctggcaagctgagcagagcagctaacacaaagaacacgagatcactataaaccaaacggcaacgaacgaagaaaatacagggtgtgttctgtccaaagatacacgaagcggctcgtcttcttttattgttagactcctgtgcttctagcagatgggtgtatgggaatggcaatggcgatgggatcttggcttagttgatgggaaggggattgccccagcactccttgaggcagtcgagcatggggtcgatgagcttgccctggctgatgccctggaacaccttgttgcactcctcgccgggggacttgagctt

SEQ ID NO: 414639 - DNA, 292 bp, Oryza sativa
ggcattggctccgatggccacacgctgacgtcggagagggtgcggtcggccatgctcgtgcgcatcaacacccttctgcagggctactccggcatccggttcgagatcctcgaggccatcaccaagctgctcaacaccggcgttacgccgtgcctgccgctccgtggcaccatcaccgcgttcggggacctggttcccctgtcctacattgccggcctgattaccaggacgcccaactcgcaggccatcttgcccgacggcaggaaggtggacagccgccaggcgtttaagc

SEQ ID NO: 414640 - DNA, 511 bp, Oryza sativa
gcccgcggggtgcttgtacgcgagctcgacgagcggcaggatgagcccgtacagcgcggcggcgccgagggtgaggaagaagcccatccagtacttcccggtggtcaccccggcgggtcggtccttggacgcgtggaggcccagcacgacggcgccgatagtgagcagcgccacggcgttcagcgtcgccgcggtgagccgctgccgcacgatgaggcacgcgaagaagacggtgaacgcgagctgcgtggagatgaggatggcggagatggacaccggcaggtaggcgaggccgtaggcgtagacgaagtcgtcggcgccggtgaggacgccgagcaccgcgcccgccagcagcacgcgccgcggcgtgaggaacagcggcgcgccgcggtcgcgcgcgcggcggctgcggtaggacgccgacacgggcaccagcagcagcgttcttcctgttgtattgagccactcccagagccacttccctgttttcgccctttgtttaaaaagagcc

SEQ ID NO: 414641 - DNA, 392 bp, Oryza sativa
  unsure (1)..(392): unsure at all n locations
gctgttgtgctaccctccaaagctggaggcctagctaggcagacggcagcaagcctgtcccgcgcgccctcgagctgtgatcctcacgcaacacgcgcacggcgtaggtagcgcggctagccctgcacgcgtgggcatggacgtggaggcgaccaaggacgtggtccacgagcaggcggcggcgccggggcgcggcagggcggcgcgatggctcctcgtggcgctcaactgcgggatgctggtggtgggcaccacgggcgggccgatccttagccggctctacttcagcaagggcggccacaggaagtggctctcggcgtggctcgagaccgccgggtggccgctgctgctggtgcccgtgtcggcgtnctaccacagccgccgtgcgcgcg

SEQ ID NO: 414642 - DNA, 493 bp, Oryza sativa
cttgtgctgctgctgaggaggtgaaggaggagagcgggagatctctcaggagcgaggcattgacattccgctatggaggctccttcgtcgtccccgtcatcgccaagtctgaaagatcatctctcttcgccaactggccctttgcatctcaaagtatgggaggtcatatgcattgtcttgggggctttcatggtggtcatcttctttgtaaccgtgtggctcacgatccggagtcggaagagggttagacgggcttcggcaaatatcccaatcacccaaatccctgccatttccaaggaaatcaaggaagtgagggtggagcaagtcccaacaagcgattttgcagcacaagatggagtcctgatgacaatccaagacaagtctagtgagaaggagtcagacaaggtcatggtccatttggggtgaagcaaatcgaagcgtggcgatgagagccactcaagatcattcccgtacatggacaaggattttagat

SEQ ID NO: 414643 - DNA, 491 bp, Oryza sativa
tgtttatcttatcgccatgaatcacactgatttcatgatcaccagtacattccaagaaattgctggaagcaaggacactgtggggcagtatgaatcacacattgcattcacccttcctgggctttaccgagttgtgcatggcatagatgtttttgatcccaagttcaacattgtctctcctggagctgacatgagtgtctacttcccgtacaccgaggctgacaagaggctcactgccttccaccctgaaattgaggagcttctctacagtgaagtcgagaacgatgaacacaagtttgtattgaaggacaagaacaagccaatcatcttctccatggctcgtcttgaccgagtgaagaacatgacaggtctggttgagatgtatggtaagaatgcacatctcagggatttggcaaaccttgtgattgtttgtggtgaccacggcaatcagtccaaggacagggaggagcaagctgagttcaagaagatgt

SEQ ID NO: 414644 - DNA, 465 bp, Oryza sativa
ttgtttgtggacacaatgattagggatcacttattcattatagttcttccatgctgctctaccacagcaaaacgtttcagacaccatcaaaccagacttaaggatacacattacaggtaaatagtacacaatgaaacgggacacgaccaaggaccagaccagacaaccatagctccattggggaagacaaataggcagacttgtgaaccctagaacagcagcagctccatggctgaggacttactggccaccacggaggcggagcaccaggtggagtgtggactccttctggatgttgtaatccgcaagggtgcggccatcctcaagctgcttaccagcaaagatcagacgctgctggtccggggggatgccctccttgtcctggatcttcgccttcacgttgtcaatagtgtcggacgactcaacctcaagggtaatggtcttgccagtcagggtcttcacgaa

SEQ ID NO: 414645 - DNA, 438 bp, Oryza sativa
gccttttcaagatgcagatctttgtgaagaccctcgccggcaagaccatcaccctcgaggttgagtcctcggacaccattgacaatgtcaaggccaagatccaggacaaggagggcatccccccggaccagcagcgtctcatctttgctggcaagcagcttgaggatggccgcaccctggccgactacaacatccagaaggagtccaccctccaccttgtgctcaggctcaggggaggcatgcagatcttcgtcaagaccttgactggcaagaccatcacccttgaggtcgagtcgtctgacaccattgacaatgtcaaggccaagatccaggacaaggagggcatccccccggaccagcagcgtcttatcttcgctggcaagcagcttgaggatggccgcaccctggccgactacaacatccagaaggagtctaccc

SEQ ID NO: 414646 - DNA, 482 bp, Oryza sativa
  unsure (1)..(482): unsure at all n locations
gctctatgaaagcctgaagagaactgcagagacattcctattcagacctgatgctcaaggcccttccaaatttacccccctccatatagcagctgccacagatgatgcagaggatgtattggatgcacttactaatgatcctggactggttgggatcaacacgtggagaaacgcgcgagacggcgcaggcttcaccccagaagactacgctcgccagaggggcaacgatgcttacctgaatatggtcgagaagaagatcaataagcatcttggcaaaggccatgttgtcctcggcgtccctagcagcatacaccctgtaataaccgatggtgtgaagcctggtgaagtcagcctggagatcggcatgaccgtgccgncgccagcaccgagctgcaacgcctgcagccgtcaggccctgatgtaccccaactcgacggcgaggacctttctgtacaggccagcgatgctgaccgtgatgggca

SEQ ID NO: 414647 - DNA, 488 bp, Oryza sativa
cattatccaaccaaaccccaaagcatatcacaatcagtggggagggaagggccccttatttattcgcattcctctcctcatcatcactcatctcccttccctgtcgattaccttctctccttcctctgttcctgctctcctccacacatccaggcaggcaacacaagaatcatccgggagagcgacatggccccggttgccgtgggcgacaccctccccgacggccagctggggtggttcgacggggaggacaagctgcagcaggtctccgtccacggcctcgccgccggcaagaaggtcgtcctcttcggcgtccccggtgcctttcaccccgacctgcaggaatcagcatgtgccaggattcataaatcaggctgagcagctcaaagccaagggtgtagacgacatcttgcttgtcagtgttaacgacccctttgtcatgaaggcgtgggcaaagtcataccctgagaataagcatgtgaaatttc

SEQ ID NO: 414648 - DNA, 303 bp, Oryza sativa
ctctcctcaccaccatcacctcctcctcctcctcctgttcctccgcgcgcgcgagatccagggagagggagagggagagatcatggcggggacggtgacggtgccgtcggcgtcggtgccgtcgacgccgctgctcaaggacgagctggacatcgtgatcccgacgatccgtaacctggacttcctggagatgtggcggcccttcttccagccctaccacctcatcatcgtgcaggacggcgacccgaccaagaccatccgcgtccccgagggctttgactacgagctttatcaccgcaacga

SEQ ID NO: 414649 - DNA, 453 bp, Oryza sativa
gtgtgagctccttgggactttcgccaacacggtgcatctcagcgggaagctgtggctgacgagcttgctgatcgggtcggtcggcttggtcatcggcgccatcttgaagtgcatcccggtcgaatccggcagcgacgcttctgatcgtcacgacggataccggccgatccccaccggcccgagtgcggtttgatttttgcaggcattttgatcatcgttttcttcataaagaaggagatgagtttgcatgcaaacttcgtagtttaactcagttttttttttcctcccgaacggaagacattcagtttttcacacaaacatcgtagttttaactcctccaaagagtaggttttgtcattgcgtcttcttttttcccctcagatttggtagtgataataagttgtcattgttttgatccaagggatagaattcagttagacaaaattgaactta

SEQ ID NO: 414650 - DNA, 488 bp, Oryza sativa
tttgtttttgccatttcagctttggttgactgatgataaagctaataagagagagcatattgatgcagattctaacggtgttcctgggtcgaccatgaggttattaatggactggtctgatagagaacatgaagtatatgacattaagtacatggatgaactttctgtggtcttcaagcctggatttatgtcaaagaaaaatcggcaagaagcagtcaatttattttcatgcttagatgcttttctgaaggatgaacctctgggccctgatgacatgtggtactgcccgagatgcacggagcacaagcaagccagcaaaaagcttgacttatggaggttgcctgagatattggtagttcacttaaaaaggttctcatacagccggtttatgaagaacaagcttgatacctttgtcaactttccaatccatgatcttgatatgagtagatatgcaaatcactcaagaggtgattcagcccccatttatg

SEQ ID NO: 414651 - DNA, 458 bp, Oryza sativa
ggtcgtctagaatggcttgccccagtacatgaggatgtcctggaggagggggtcgctgccgccgccgccgaggccgccgaggccgccggagccggcggggtcgaggatggaggcggcggggttgatgggcccgacggtggcgaaggtgcgctcccactcgctgatcttgggctggctctgcacctcgcacgcgaactccggcgacagcacctgctccgagcagctcgagtcggcgtgcagccgcggcatcgagtccgacggccggtcgtagtacgccgccaggtccgggaacgccggccccgccaccaccggcttctgctccggcggggagctcaccgccgcgttcacccccaccatcggcttcctctcgacgccgccgccgttgctcaccatccccgccgccgtcaccgcgggccgcggctttccagccgccttctgtgaaatcggacagacatatc

SEQ ID NO: 414652 - DNA, 393 bp, Oryza sativa
  unsure (1)..(393): unsure at all n locations
tttctcaacactagtaggataaagccacagagagagcagtagtagtagcgagctcgccggagaacggacgatcaccggagaagggggagagagatgagcggcggtcaggacctgcagctgccgccggggttccggttccacccgacggacgaggagctggtgatgcactacctctgccgccgctgcgccggcctccccatcgccgtccccatcatcgccgagatcgacctctacaagttcgatccatggcagcttccccggatggcgctgtacggagagaaggagtggtacttcttctccccgcgagaccgcaagtacccgaacgggtcgcggtcgaaccgcgccgncgggtcggngtactggaaggcgaccggcgccgacaagccggtgggc

SEQ ID NO: 414653 - DNA, 428 bp, Oryza sativa
cttcttgctgatcatcatatatctcttgtgagcttgagcaatgggggctctgccaagggctctagtcctcggcgtttgcgccgccgtcttgctggtgaacgtgctcgccgttgccgccgacggcgacgccgcggcggcggcgtccatggtcgtcggattggccaagtgcgccgactgcaccaggaagaacatgaaagctgaggccgttttcaagggtgttcgcgtggcgatcaagtgcaagaacagcaatggcgagtacgagacgaaggccaccggcgaggtcggcaagtctggcgcgttcgccgtgcccctcgcggcggacctcctcggcgacgacagcgagctgaggcagcaatgcttcgcgcagctgcacagcgcggcgtcgaaccagccatgccccgggcaggagccgtcgtggatcgtcaacg

SEQ ID NO: 414654 - DNA, 494 bp, Oryza sativa
ctctcctctcctctcctctcctctcccggtggcggcgcggccaactccagccatgtcggactccaaggccgcggcggcggtcaccctccgcacccgcaagttcatgaccaaccgcctcctctcccgcaagcaattcgtgctcgaggtgatctaccccggccggcccaacgtctccaaggctgagctgaaggagaagctggccaagctgtacgaggtgaaggacgcgaactgcatcttcgtgttcaagttccgcacccacttcggtggaggcaagtccaccggattcggcctcatctacgataacctcgacgccgcgaagaagtacgagcccaagtaccgcctcatcaggaatggtcttgctaccaaggttgagaaatctcgcaagcaaatgaaagaacgcaagaacagagctaagaagatccgtggtgtcaagaagaccaaagctggtgatgccgggaaaaagaagtgaaaactcatttacatttgtactactg

SEQ ID NO: 414655 - DNA, 484 bp, Oryza sativa
tgttttatgcagaatttgtcccagtcatgaggcaggcaatgggattttgcaacaactgtttgaggatggcaatcatgattgagaagaacgtcgatgttgactctgatggggagagggttgatttcagtgacagggagacatatgaatttttgttcaaggattactgggacataattagagaaaaagaagggttgacattggataatatgcgagaagcctatactcttctcagaagtggcttaaactgtaatgaactatcagatatggagaaacttccaaatagtgagcagagttcagatgatgatttcttgggcaatagtgatgacgacgatgagccagtttatccatctggttcaaatggaacatcaaataaagtgaaaaccatactgaaggaaggaaaaacaaagaaacaggtttatgtgggatggggtttaatagaacttattggattcatgtcatcaatagggaaagatacattaaaacc

SEQ ID NO: 414656 - DNA, 420 bp, Oryza sativa
cttagacttccttcctttcttacagcggaacagaagacattccgcaattgttgaatatgtcttcagtggccaccgtttcaaactaacaattcctaaggagacttgcagcattgccttctctttctctggtgttagatgccctggtaaagatgagccctactcgaacgaagctattgctttgatgaggaggagaattctacagcgagatgtggagatagaggttgaagcagttgatagaactgggacattcttaggttccttatgggagtccaaaaccaacatggcttctgttcttctggaggctggtctggccaagcttagttcatttggcttggataggattccggatgcaaatgttctaatgagggctgaacagtctgcaaagcagcagaaactcaagatctgggagaattatgtaga

SEQ ID NO: 414657 - DNA, 472 bp, Oryza sativa
ttttccaacgcgaagctctcgtcgcgcacaaccaactcgacaccgcggcgaggcgaaccaacgcgcggcgtgggcatggggaggtcgccatgctgcgagaaggcgcacacgaacaagggggcgtggacgaaggaggaggaccagcggctgatcgcctacatcaaggcgcacggcgagggttgctggcggtcgctgcccaaggcggcggggctcctccgctgcggcaagagctgccgcctccgctggatgaactacctccgccccgacctcaagcgcggcaacttcaccgacgacgacgacgagctcatcatcaagctccacgcccttctcggcaacaagtggtcgttgattgcggggcagctgccggggaggacggacaacgagatcaagaactactggaacacgcacatcaagcgcaagctcctgagccggggcatctacccgcagacgcaccgggccgtcagcgccggga

SEQ ID NO: 414658 - DNA, 459 bp, Oryza sativa
ttgttttttttgataaccaaaaatttgaatcgttttattttgtgacggaagattccatccaggacatctcacaagtaccttgatccagaccaaatacatatatattagcataaagcaaaagagggttgcgttttccagcgcacttcaaagtgccagcttcactcgttgctgggttctccgcgctccagcttacaacggaagcaagtgttattcaccgtggatcgttatctaatccttattattgcataatatagcgtccatcttgatgagcttcgtcttggtgcatctcgtatttaggagacagggctagcagtaatgccccatatttcctttgcatactgagcgatagtacggtcgctgctgaatttgccacttccagctgtgttcagtatagacatcttgatccattttttcttatccttgtaggcttcatcaacctgggcctggtgcatcaatata

SEQ ID NO: 414659 - DNA, 340 bp, Oryza sativa
ttttatgagtgcagaggagagacaaaaggttacgccacgcactgtcatgatagggggaaaagcattcgcgacttacaccaatgccaaaagaatagtaaaattggtaaatgatgttggtgctgtggtgaacaatgatcctgatgttaataaatacctaaaggtggtgttcattcccaactacaatgtatctgtggccgaggtgctcattgctgggagtgaactgtcacagcacattagtaccgcaggcatggtagcaagtgcaacgagtaatatgaaattctctatgaatggatgtgttatcattggtactatcgatggagctaatgctgagattagatag

SEQ ID NO: 414660 - DNA, 399 bp, Oryza sativa
tttgttttctctttttttttttttttttttttttttttttttttaaaacaaatcacatagtactttcattatttcaaacgaacataatgatacataaacacatgaaagaaattaagggagatgttgcaaacatatccgcaagaaacacgacacaatgggcgtttgcactactggacatgaacacagcttgccttttaatcacttcttaattaaaccttctgcaggtcttcctgatctccccgtttgatcccgtaaacggggggatgtcccccatcttgaacatgcccgtcacaaaatccgcaaagaatgggctctggctacctatgtaagactgaacaagagcatcaggggctccgccattgaagagctcctgatcagaatgcaggagccccttcttga

SEQ ID NO: 414661 - DNA, 422 bp, Oryza sativa
  unsure (1)..(422): unsure at all n locations
gtcatcaggttattcctaccgagctcgagaggcgcaacaaaagccatctgtgctttttcgccgccgtcgccgacggctctctccgtctgaaaacacccaaaaacccaaccaaaccctagatccgccgnctccccgctcctccgtctccgactccggcgacgctcgcgcggccacgatgccgaacctcgagtgccggatgtacgagccgcggttcccggaggtggacgcggcggtgatgatccaggtgaagcacatcgccgacatgggcgcctacgtntccctcctcgagtacaacaacatcgagggcatgatccctttctgtgagctctcccgccgccgcatccgctccatgttcttcctcatcaaggtcggccgccaggagcccgccatcgtgctccgcgtcgaccgcgacaagggctaca

SEQ ID NO: 414662 - DNA, 431 bp, Oryza sativa
agcgacacgaaagtcatctgatatatatttcagataaagatgttcaacacaagatagcttcagaccaggcaatatagcaccagacacttggggattcagggttcaacaaagggatatatgatcgagtctacaaacaaacaaaaagggccgatatttcgtttcccacagatgataaggatagatatatctaagcggctgagaggaaggccttcccgggggcacgagcagagaggcgaccatggcaaccaagtagcttagcattgacaccatcaggcatgattctaccctcggtcttaagcctgacgtattcatcgcggctgaacttggtgaaaccccactttctactctaaatgaacttttggcgaccagggaacttgaacttggcacgacggagggcttgctggcaggacagcatgtgggcttgcaccgac

SEQ ID NO: 414663 - DNA, 470 bp, Oryza sativa
cccttctccgtccgccgcgcgcacgccgccgccgccatggggaggagacctgcaaggtgctatcgccagatcaagaacaagccgtaccccaagtcaaggtactgccgtggtgtccctgaccccaagatcaggatctacgatgtcgggatgaagaagaagggtgtggatgagttctcccactgtgtgcatctcgtctcttgggagaaggagaatgtcaccagtgaggctcttgaggctgcgcgtatcgcgtgcaacaagtacatgaccaagtctgcaggaaaggatgccttccacctcagggttcgggttcacccgttccatgtgctccgtatcaacaagatgcttttgtgtgccggggcagataggctccagactggaatgaggggtgcttttgggaagccacagggaacctgtgctagggtggatatttgccaggtccttctttttgtgccgtgcaagcccaacaatgc

SEQ ID NO: 414664 - DNA, 441 bp, Oryza sativa
  unsure (1)..(441): unsure at all n locations
cgttcatcttcctagcaattaagatcatggtgcagcgcacttcatccgattcggcggcgtcggctgaggccatggtcatggacctgagtcccaagcgtcccgccaagtcctacggcggcgaaggcggctcgtactttgattggtccccctccgagctgcccatgctccgcgccgcctccattggcgccgccaaactctcgcttgccgccggaggcctcgccctccccttctactccgattcggctaaggtggcctacgtcctccagggcaagggcacctgcgccgttctcctccccgagaccccctccgagaagatcctacccatcaaagagggcgacgcgctcgcccttccattccgcgttgtcacctggtggcacaacctgcacgccgncaccaccgaactcgtcgtcctcttcctcggngacacatccaagggccaca

SEQ ID NO: 414665 - DNA, 462 bp, Oryza sativa
aggggacatcaagaaagatcaacaccaggattgaagtcgaagtctcagggggagtacaaaggtgagcaaagaatagacagtatcataaaacatctgggagcacatatcacggttttgtaagctaaaaacaatacaaggctacacaatgatgttcatgtaggataatctctactgcctgtcattccaactcaaacaaattgacaacaactgacaactcatgaaaattgggagtagcaaaaattgagttcggatgggcctttgtaataatttgatatacgtgtgacgtcttcgtcacagctcagttaactgctgcctcccttctgtttgagggtgatcttgtcgcctaagctgagggcgattccttgggtcttactccgtattctgatatagccgctcagcttgccatcggcttgcttttcaacgctgatgttcaccaatgcatcctcaccaaaaacactcttg

SEQ ID NO: 414666 - DNA, 451 bp, Oryza sativa
tttttgctttacaaagatgcttgctgaaaaacaattcagagagactgaggagatgaaggccaaggcgcagatctctcatgcccagcctgatgatctcattgatttctaccacctgaagagccggaggggaatgagccaacttgagttggaagatgcagtccaagatgatttgaaggctgctactggtgaatttacaaaagatgcagatgacgcaaacagactgaatcgcattcttcaactaacagggttcagtgatcctgtgtatgctgaagcatatgtaactgttcaccactatgatattgggcttgatgttacagtcataaaccgaacaaaggaaacacttcagaacttgtgcttggagttagcaacaatgggtgatctcaaacttgttgaccggccccagaattacacgctggctcctgagtcaagcaagcaaattcgggccaacatc

SEQ ID NO: 414667 - DNA, 410 bp, Oryza sativa
  unsure (1)..(410): unsure at all n locations
gatcaaagcaaacgagacgagctttcttcttgcgatcaaaaacacagatgggcaaccacacagttaacacaaactagatagttccacacaaaactaacgatgataacgatcggatgatgatgatggtagctcgattagatagatagataacttggccatgagggccccaccgctcagttcctccagttcccgtcggagttgccgccgccgcggctgccgtagccgccgccgtagccgccgccaccacggccgccaccgtagccaccgccaccgccgtagccgccttcacggcgctggccgtagccaccgccgtcgtcaccaccaccgtagccgccgccaccgtagcctccgtctccgccgngctggccgtagccaccgccggctccgtcttcggagcggcgcgactgggc

SEQ ID NO: 414668 - DNA, 354 bp, Oryza sativa
ttttctcctccccctcccggttcggttcggttcggttcgggtccggttcgatttcggtttttccttcggttcgggggttggtgggaaagcatggcggcgccggatgttgagtaccgctgcttcgtcggcggcctcgcctgggccaccgacgaccgctccctcgaagccgccttctccacctacggcgagatcctcgagtccaagatcatcaacgatcgggagacggggaggtcgcgcgggttcgggttcgtgacgttctcgagcgagcaggccatgcgcgacgccatcgaggggatgaacggcaaggagctcgacggccgcaacatcaccgtcaacgaggcccagtcgcgccgc

SEQ ID NO: 414669 - DNA, 422 bp, Oryza sativa
  unsure (1)..(422): unsure at all n locations
tttttctcgccgctccatctccaagcccgaatccgcaaaaccctagcccaccccctgccgccatggccgcctcccccaccggctcctcctcctcggcccccgccgccgcggcggcggcggcgatggcggcggcggtggcggccgaggccaccgacgggccgaccctcagcgtcgtctcgaagcggctccgcgcgctgcggaagaagcacaaccggatcctccagatggaggagtcgctcgccggcgggaggaagctcaacaaggagcaggaggaggtgctccgatccaagcccgccgtcgtcgcgctcatcgacgagctcgagcggatgcgcgcccctattgccgacgtcctcgccgaggagctctcctnccgcccggcccccttcttcttcgccgtgccggcgacccccgcattcttcttc

SEQ ID NO: 414670 - DNA, 457 bp, Oryza sativa
ggggtttaggctaagtcggcatctcataactattcgatcctctcgcagcatcagagataattcaaacatgaattatcatatccctaaagaaacatatcgaccaatgaccatatgcatggaccgctaattaattaccagctcacacaaatactcgatcagatcatcaccctctagcttcaatattaggcgtctcccttgccgaccagatccttgcttttgttccattgcttgctcccggggctccacttggggcacccgggactgaagtacttgccctgcaccctcgcgtcgagcagctcgacgaccgggccagggcgcacgcaccgcggcgccttgtactggccgaaggacgcgccccggctgaacgcgtagcccatgagcttgcccaaggagccctccgccaagacgcgtatctcgagcgggcccatggacccggcgcacgcgccggccctgccgg

SEQ ID NO: 414671 - DNA, 407 bp, Oryza sativa
tttttctccctacacatcttacacgagccccgacgaggccatcctgtgcgtggactcctaccagagcatgtacgcgcagctgctctgcggcctcgtccaccgcgccgacgtgctgcgcgtgggcgccgtgttcgcctccggcttcctccgcgccatccatttcctcgagaagcactgggcgcgcctctgccacgacatccgcaccggcgagctcgacccggagatcaccgaccgcgtggtgcgcgacgccgtcgggcgggtgctccgcgccgacccggcgctcgccgacgcgatcgaggacgagtgcgctagggcgtcgtgggagggcatcatccggcgcctgtggccacgcaccaagtacattgacgtgatcgtgaccggcaccatgttgcagtacatcccgacgc

SEQ ID NO: 414672 - DNA, 427 bp, Oryza sativa
ttgggtgggttttttttttagcagtgtatttttttttataatatttttttttttttgcaaaccaataaaattaaaaagcaattatttggaaactcctgtttgtttgggaaaggtgagtttaactgacgttcgagcctaaactttgacctttccaaaaacagtttttcaaaccccaaacgggcaaacggtttgcctattcggactaaccctgagttggaaacaatccgttaatgggaatgccgccgtcgaccgaaaacgtttggccggggaagtaggaagcgccgggcatgcacaggaacccaaccagggaagacaccttttttgggtttccaacgcgcttaaaggctgttcgacgcacaaagctttaaaaaaaatccttccttggcaaattattttccaaaagggaaggcttaaagtaccaaggggc

SEQ ID NO: 414673 - DNA, 306 bp, Oryza sativa
ataacgccgtatactggggacgagccaggaacccgaattgggagtttttcccgaagaactgataatacggattttctcgcaaaattattcccagccgcaccctctaggccgatggccgaggcggtcgcaagcggcgcagcggggagatggacccttcgcggcaagacggtcctcgataccggcgggacccgcggcatcgggcatgcggtggtggacgagctggcggcgctgggggcggacgtgcacacctgcttcaggaaggaggccgagctgggcgagcgcctcagggagtgggagggcaagggc

SEQ ID NO: 414674 - DNA, 440 bp, Oryza sativa
tttgttgttttttttttttttgttgtttttttttttttttttttgtaccaaacattttaattaattaattaacaaaaacagttctattcattaattcgtttattttgcataatccagcatgcatgcacacttacataatactccagattcaagtccagggcatgggcatgcagttaattaaacaactccttggttcgggtccaaattaaaacactagaacacagtccgtccgtccgtagaagaactcatcacgcacatttttttttgttggctacgtacatagcacagcacgtacgtttaatagtccgtttaatccgagactaattaatcaagatacgtaggtaattaattaacacggcccgcccccccccccacagtaggtgggacgtaattaattaactgattaattaattacccggggaaaagagaggggcacacgc

SEQ ID NO: 414675 - DNA, 474 bp, Oryza sativa
ctttcttgctttgctcctggatatatagctagctgctttctttcttcctctctccctgtgcggcacgcgcctccaatcgatctcttcggtgagtagacgcatcgagatcggggggaaatgtcggtccagtttacatcggagcatgtttgctatgtcaactgcaactattgcaacactatccttgtggtgaatgtgccaaacaattgttcctacaacattgtgactgttagatgtgggcattgcacaatggtgctctccatggatcttgctccttttcaccaagcacgcactgttcaagatcaccagaacagaggatttcaaggtaataactttggaagctatgacatagctttcagaaatcagaggacatcgacagccatgtacccaatgccaaccagtcagcagcaagtgtcacctatacgtccccctgagaaaagacagcgtgtcccatctgcatacaacagattcatcaag

SEQ ID NO: 414676 - DNA, 425 bp, Oryza sativa
ccctgtgcaagaagctcatctcctcctcctctcgcgtggcagccatggccaccaccgcgtccagcctcctcaagacctccttcgctggcgcgcgcctccccgccgccgcccgcaaccccaccgtctccgtcgcgccgcgcaccggcggcgccatctgcaactccatctcgtcgtcgtcgtccactcccccctacgacctcaacgccatcaggttcagccccatcaaggagtccatcgtgtcccgcgagatgacccggcggtacatgaccgacatgatcacctacgccgacaccgacgtcgtcgtcgtcggcgccggctccgcggggctctcctgcgcgtacgagctctccaaggacccctccgtcagcgtcgccgtcatcgagcagtcggtgtcccccggcggcggcgcgtggctcggcgggcag

SEQ ID NO: 414677 - DNA, 494 bp, Oryza sativa
  unsure (1)..(494): unsure at all n locations
cttacaatgcaactctctctgtccatcagttggtggagaatgctgatgagtgcatggttcttgacaatgaggcactttatgacatctgcttccgcaccctcaagctgaccactcctagctttggcgacctgaaccacttgatcagtgctacaatgagtggagttacttgctgccttcgcttccctggtcaattgaactctgacctccgcaagctggccgtgaacttgatccctttccctcgcctgcacttcttcatggtgggctttgcgccactcacctcgcgtggctcgcagcagtatcgcgccctcactgtccctgagctcacccagcaaatgtgggacgccaagaacatgatgtgtgccgctgacccgcgccatggccgntacctcacggnctncgncatgttccgtggcaagatgagcaccaaggaggtggacgagcagatgatcaacgttcagaacaagaactcgtnctacttcgtcgagtggatcccc

SEQ ID NO: 414678 - DNA, 372 bp, Oryza sativa
aatgttcgtcccttccaaacctaactgaggaagagaggaagaagaatcttcattttgttgttattggtggtggcccaacaggtgtagaatttgctgcagagcttcatgactttgtcaatgaggacttggcaaagttgtatcctgatgtgaagaagtatgcgaatatttcagtaattgaagctggagatcatatccttacaatgtttgacaagagaattacccaatttgctgaagataaattcaagaggacaggcatagatttgaagacgaattttaaggttgtgaaggtgtctgataaggctatcactatgactaattctgcaactggagagattgctgtgccttatggcatggctgtttggtccactggta

SEQ ID NO: 414679 - DNA, 460 bp, Oryza sativa
gttgtttattatcaagcagcgtatatatgttcagaacaactgagaggatcttggcattactactattagagtttaaagatttgccacgaggtaagcaaagaatatacacttgtttggcaagtcttatttacaggagttgagagcgatattgctgccgcgcctagagcagcccaaaggtgttctcgccactgtaggtcatgtagaggaacccatcctcatccttgttctcctcgtaaattgcggacatcagagcagctgttggtggaagagtattcttcacaaagatgaagattgctttctcaggactgagcttgatccgcttccgaacaacatagacaaactgcccaacggtaagatcagcagggaccaggtacttttttttgtcgatgtcaggaatatcacttcttttagctttctcaacaatcacaggaattctgtcactgtacttttctctgatacg

SEQ ID NO: 414680 - DNA, 465 bp, Oryza sativa
  unsure (1)..(465): unsure at all n locations
tgctacccacacatctccattgcgccaaggaagaagaaaccctccccctccctctccccaatccaatccaatccaatccggcgagtcgcgtgagtttccgctcccctcttccgtcgattcggcatcgggttcgccgatcaggggggcttccttgtccgatttggtggttgattcgtgtttttgctcgtgttctccaggaccagctcagtctctcgaaggagcgccatggccaagagctcgttcaagctggaccacacgctcgagaggaggcaggctgaggctaaccgtatcagagaaaagtacagtgacagatttnctgtgattgttgagaaagctgaaagaagtgatattcctgacatcgacaagaaaaagtacctggtccctgctgatcttaccgttgggcagtttgtctatgttgttcggaagcggatcaagctcagtcctgagaaagcaatctttatcttt

SEQ ID NO: 414681 - DNA, 446 bp, Oryza sativa
  unsure (1)..(446): unsure at all n locations
tagcaaagttcacttgtgtgatcagcttgtagctataagtccgctgtatctgagaaacgctgctgtaaatccatcttcactttgtttttccaaattatatgtacacacactgtcacactgtatgaaagagcataaaacccttttcactgcataagtaaccctttttgaggattatgaatctgtgagatggatactcttttatagcagatcaaaccttagatgtcttcctgaatatgggcatttctgcatctgcactacactctgaaactgaaagactgaagaattcagggcataagatagcatatatagagaattgtttcagagcanannanannanaaaaaaaaaaaaaaaaaaaaaaaaaaaaaaaaaaaaaaaaaaaaaaaaaaaaaaaaaaaaaaaaaaaaaaaaaaaaaaaaaaaaaaaaaaaaaaaaaaaaaaagggggg

SEQ ID NO: 414682 - DNA, 493 bp, Oryza sativa
gatctcatcaaatttctcttgagaccgtagagagagagagaggcgccaaccatggccggcatcatccacaagatcgaggagaagctccacatgggcggaggcgagcacaagaaggaagacgagcacaagaaggagggggagcaccacaagaaggacggggagcacaaggaaggcgtggtggagaagatcaaggacaagatcaccggcgaccacggcgacggcggcgagcacaaggagaagaaggacaagaagaagaagaaggagaagaagcacggcgaggagggccaccaccacgacggccacagcagcagcagcagcgacagcgactgagccgtcgggcccccacaccggcgccgtgcgtgcgtgcatgcaggtgatgctgcagatgattggaggagttccgagcaggattaattagtatctgtgcaatacgtgatgcagtgatctgtctcatgcatgtatctgtgcttgattgcaagaaaaaaaaaggcat

SEQ ID NO: 414683 - DNA, 475 bp, Oryza sativa
tgtttacaaacatgggtcatggggcactcctttagttcaaatggaccggcctgctgggctcaatgacattggtatggtagcttggaccttgaagatgtccactcctgaatttcctagtggtagggagattattgttgttgcaaatgatattacgttcagagctggatcatttggcccaagggaagatgcattttttgaagctgttaccaacctagcctgtgagaagaaacttcctcttatttatttggcagcaaattctggtgttcgaattggcatagcagatgaagtgaaatcttgcttccgtgttgggtggtctgatgatggcagccctgaacgtgggtttcagtacatttatctaagcgaagaagactatgctcgtattggcacttctgtcatagcacataagatgcagctagacagtggtgaaattaggtggggtattgattctgttgtgggcaaggaagatggacttggt

SEQ ID NO: 414684 - DNA, 506 bp, Oryza sativa
tttgtttcaactggtaacgagtagagtccacacaaatcaccagtgatcatatgttggaaactatttaacagccatcagtcatacaaaatctctaaagcacaaccatgctcaatttaaatatgaaataggttccattaaacagtagtactaattctggctctaagaccattgaaacatattgctgatccaacttggaaccaaaaactcaacatggcactactaagccgcggcagtcttcttgagcttcgcaagctcttgcctgatagcacctcccctcttgatcttggccaacataaccttgaacctgtcaaagtcattgagtgacgctctcctcttctggacaattagcttcttgccccatgagctattctcccacttgttcttaacatcagcctcctccatagccttaatcaaagttgtcttcttcgggacacgtttgatgtcaatcttgatgtcggtcagggaaagccttctgaagtgatctggcacctgaccatgtcaggagc

SEQ ID NO: 414685 - DNA, 462 bp, Oryza sativa
ctccgcgcccccccgccgcttctcccgaccgccgccgcgagaatgccgttcaagaggttcgtggagatcgggcgggtggccctggtgaactacggcaaggactacggccgcctcgtcgtcatcgtcgatgtcgtcgaccagaaccgggcacttgtggatgctcctgacatggtcaggtgccagatcaacttcaagaggctttccctgaccgacatcaagattgacatcaaacgtgtcccgaagaagacaactttgattaaggctatggaggaggctgatgttaagaacaagtgggagaatagctcatggggcaagaagctaattgtccagaagaggagagcgtcactcaatgactttgacaggttcaaggttatgttggccaagatcaagaggggaggtgctatcaagcaagagcttgcgaagcttaagaagactgccgccgcttaatagtgccatgttgag

SEQ ID NO: 414686 - DNA, 396 bp, Oryza sativa
ttcagctcaagtttagagtgagaggtgagagctcagcggcgcgccatggcggcggcggcggggaggatggaggagtacggcgtcgggcggatcctggacatcacccacgcgtaccgggcggacctgccggcgttcgcgccgggggcggtgacggggccggtggtgcggctcagggactccatggcgaacgggacgctctacaacctgtcggagctcaagatggagtgccacatgggcacccacgtcgacgcgccgggccacatgaaccagggccacttcgccgccggcctcgacgtcgacaagctcgacctcgaccttctcaacggtcctacattattggttgattctccaagaaacacaaattatacagctaaagcaatggagtcgttaaatata

SEQ ID NO: 414687 - DNA, 391 bp, Oryza sativa
gattttacaagttaaggctagaaaaagtaaaagcagggagaaaaggaaatctcaatgttgctactgagatactgcaggttgcaccctctcttcatatggttgaagtacgaaaagcaaaaggcgacaccctcgaatttcacaagttctacaagaacctctccagaaccttaaaggatgttgtttggaaatcagatgatcttcaaaatcaactttcctagagtaacttgggagaggaggaatgggtgaactattttagcatcccattcttttgaatcagcattcccatttctagaggctggaaaagcagaaagcatgtttattgcatctgtaattagatgtgagtggccctgtaaactatgtttggtcttcactagtgtttgaaatgctgctc

SEQ ID NO: 414688 - DNA, 440 bp, Oryza sativa
  unsure (1)..(440): unsure at all n locations
tttgttttttatcaaaaaggcaggcacgcatcatgcaagattctgagccatcatacgatggagaaaagtacagcagctcactcagtcgccaagcaaaataaaaacagattggggggtaattcagacataggagacaataatcttaacaagttctcagactcccactactaacaaagctcttcttgctaacacctgagaaaatcttccatgtgagatgaatatctctagtagaaaaagccgagcaccttgcctccgacgttcttccgcctcgcttcttcgtggtccatgattccggcagaggtggtaaggacaatgtacccaaactgacgggagggaagcagcctagcagtccaggactcgatttccttgacaccaacatcaaagcgtgggctgatgacaccacactntgttatggcgtccattcagcttcaaccacgatc

SEQ ID NO: 414689 - DNA, 263 bp, Oryza sativa
  unsure (1)..(263): unsure at all n locations
agagtagcaaccatggaaagagatgttgcacttatcaacatgtagtacagtaacaaccatcatcaaatgtccctacaactccgtctctctcatgctcgaagaatataataatctcattgattgaaacacgtataggaaaatttaagcggcaattaaggaagtaatagtattgttgtagcagtagaagagtacagaacacacngtaattaatcangcgagagcgatggatggatcgcgcggtaaggtctcgtctcnacctcaca

SEQ ID NO: 414690 - DNA, 342 bp, Oryza sativa
ctgttttatgctagagtagtacttgattgtgcgactgctgatcctgatggcgcggatgagagctcttctcattggagggggtatagctaacttcaccgacgtccgggccacatttagcggcatcattcgggccttacgagagaaggaatccaagttgaaggctgcaaggatgcacatctatgtccgacgtggtggtccaaattaccaaactgggctggctaaaatgcgcaagcttggcgcacaactcggcgtcccgaatgaggtgtatgggccaaaagcgacgatgattggaatctgcaagcaagcaattgaatgcgttatggccgcagcataaatgaagat

SEQ ID NO: 414691 - DNA, 344 bp, Oryza sativa
gcatcatttacaaacgcccacatcacacgcagaaatgcgcatcaacagccagccatggcgtccacgctgaccaacgtcggcctgtctaccccggcggcggcggcgtcgtccctcgttaggccggtcaccggagctggacgcgtggtgtttccccgtgttggccgcggcgggttcgcggcggtgagggcgagcgggccggcgacgccgccggacatctcggacaagatgtcggagagcatcgacaaggcgaaagaggcgtgcgcggaggacacggcgagcggcgagtgcgcggcggcgtgggacgaggtggaggagctgagcgcggcggcgagccacgcgcgcga

SEQ ID NO: 414692 - DNA, 476 bp, Oryza sativa
aattaggtcagaactgttgatggaaatagtgaacttagaatacctccaggtacccaacctggtgatgtagtggttctagcaaagcaaggtgttccatcattgaataagccatctgttcgtggtgatcatctattcactattaaggtcactatacccaaacgtataagcggacgagaaaaggagctacttgaggaactggcttctttgagcaatggtggttttgctggtgcacctgtgaagccaaaatccatacgccaagagaatgaaactactgttgcccaagaaaattcggatcaacctgatgaaggggagggtgactggttgaagaaacttcaagattttgcaggatccattgctaatggtgctgccaagtggctaaaagacaacctttagcctgtaaatagttaccgcggaatgcatttatattaatcgctgttatggtgtagtccaatctgctattcttcaattcattggat

SEQ ID NO: 414693 - DNA, 423 bp, Oryza sativa
gttggttttttttttttggtaggcgaacaaaactttcgaactcttttttttctccttggtttctatttcatttcattccgatagatagcaacaagcagttcaaacaccataaccaaagcgaactcaattcatggtaacatcacggacgaagaacacctaacactggatggatggatagagggcttctcgactcgagagagccactggacacgataacgactcgactcgatgataagatgattctgacacggatagctaaggataactggccacgatgggccccaccaatcagttcctccagttcccgccggagtcgccgccgtagccgccgccacggttgccaccgtagccgccgccgccgccgtcacggtcgccgccgtagccgccgccgccaccgtagccgccctcacggggcccgtagcc

SEQ ID NO: 414694 - DNA, 434 bp, Oryza sativa
tttgtcttctcctccccctctttaccttttcctgctcggttcggttccgtggttcgtctagggtttagtgggttgagatggcggcgccggatgtcgagtaccgctgcttcgtcggcggcctcgcctgggccaccgacgaccgctccctcgaggccgccttctccacctacggcgagatcctcgactccaagatcatcaacgacagggagacggggaggtcacgtgggtttggcttcgtcaccttctcctccgagcagtcgatgcgcgacgccatcgagggcatgaacggcaaggagctcgacggccgcaacatcaccgtcaatgaggcccagtcccgccgctccggcggcggaggcgggggctacggcggcggcggtggcggctacggcggcggtcgtggaggcggcggctaccgaggaagtggccgcggcggc

SEQ ID NO: 414695 - DNA, 391 bp, Oryza sativa
tgctttctattcctactccgctgcctccctctgctctcctctcctctccgccgctgccgctgctgctgcgtgctcctctcatccccgtctcttccccctccgcgcgccgaccactcgctgggaggaggaggaagaggagaccttccccggaattcgtgctcgccggatcgggctcgccgcaatccatgtcggaggaagcaggtcgtcccttgcccaaggttggcgaatgggatgtcaacgacccagcgtccgctgatggattcacagtgatattcaacaaagccagagatgagaaaaagggtgggaatgggcaagatactgattcaccctgcaaagaaactaggactgagagggtggaatcatatgcccccaagacaaactcgaagaaatg

SEQ ID NO: 414696 - DNA, 493 bp, Oryza sativa
ttctagttggtgatggatctggctgggtgttcatatcaaaccaacagaaggaaattattaatgctatggataaatgggctccacaagctgaacacaggatctgtgctaggcacatatatgctaacttgaagagacacttctatgacaatgaacaccagaagttttggaagtgtgccaaggctccgtgcataacgttgttcgacttggcaatggcagagctggtacaacttacaactcctgcagtacaaaccatcttgaataaccatccgcagcattggagccgagcgtggttcaggtcaggctctaactgtgacttagttgacaacagtatgtgtgagtccttcaataaatggattctagaggctaggttctttccaataataacaatgcttgaaacaattagaaggaaagtaatggttaggatccatgatcagagaactatatcaggtagatggaccacatcaatttgtccaaacattctgaaaaaaatgaa

SEQ ID NO: 414697 - DNA, 421 bp, Oryza sativa
  unsure (1)..(421): unsure at all n locations
tgtttttgaaggtattaaatacttaatagaatagactcttgtgggatacaacatgcagagggataatcccagtcataataagtacacatatgcaggtcattttggtttttaatttatcgattacagattttgagcttgaatgacactgattatgtctgaataacatggtgcatacaaaagaggccacgacacagagagcggattgcattgctggcttatttgtggagtactccaattattaacaagagatgatgcattcttgtgccttagtttcttcacatgcttggcttcacgttgagcctattcgcaatcttcacccccaacgactcatcacactgggagaggtagttgacccagatggcgcggagctcaggggagacnctggggtgcgcgagctcgccggcgaagcggcggatgaacc

SEQ ID NO: 414698 - DNA, 377 bp, Oryza sativa
  unsure (1)..(377): unsure at all n locations
ggctggggccaaactacctgatgctgccggtgaacgcgcccaagtgcgcccaccacaacaaccactacgacggcgccatgaacttcatgcaccgggacgaggaggtggactactacccgtcgcgccacgcgccgctccgccacgcgccgccgacgcccatcacgccgcgccccgtggtggggaggaggcagaaggcgacgatacacaagcagaacgacttcaagcagcccggggagaggtacaggtcgtgggcgccggatagacaggagaggttcatccgccgnttcgccggcgagctcgcgcaccccaaggtctcccctgagctccgcgccatctgggtcaactacctctcccagtgtgatgagtcgtgggggtga

SEQ ID NO: 414699 - DNA, 266 bp, Oryza sativa
gttcaatatgtacagataaaaatacattgatacatgacacggatagagccatgcaaaccactgatttgaacacacaaagggcaaggatgcagagaaaatcaagcaacacaagctgaactaacgggcccacctgtcagcctctcactggtcgaggccggagactcttgtgaaaaacaggaacaccacgcatgcagaagaagacaaattattacacacacaaatcgacgacacgggggccggcgaagtacggcgaggtcgttgccgcc

SEQ ID NO: 414700 - DNA, 379 bp, Oryza sativa
atgtttctatttatggtcactaacatctcattctcctaatggtcatcactagctaatagctagcttaattacatcaatacgccatggcggccgagaagcaccaccaccacctgttacaccacaagaaggacgtcgtgccggccacctgtgtcgactccgaccgcgagggcgtatacacgtcggagacggtgaccaccgaggtggtcgccagccgacagcactagtgcgaaaggtacaagaaggaggagaaggcagcacaagcacaagcagcaccatcgctaggcctgtgccctcggcgcagcgccttcggccttgttgagaagcactaagcgaaaaacgacccggagaacgcgcacaggcacaagatcaccgaggagat

SEQ ID NO: 414701 - DNA, 424 bp, Oryza sativa
gttttgtttactatgagtactttgactgaagagggtgtgatggctgtgaaaaatgctgcatgtgagaggcttcttgatcaaagggtggagatcaagatgaaatcaaagaagatcaatgactgcctaaataggtttcatgttgctatgccaaagcctcgtgataacaaggagaggcctgcttgcatccctcaggctgttctggatgctcgagcaagtgctgctgctgcaaaggaaaagaagaagctggaaaggaaactggagaaggacctcgagaatgagaatggaggtgctggggtctattctgctagtctcaagaagcattacttattggctgatgatgaatggaaggaagatattctgcctgagatattggatgggcataatgttgcccgttttctggatccagatatactgcaaaggtgtg

SEQ ID NO: 414702 - DNA, 397 bp, Oryza sativa
ggcaaaacaatatgattgattatgttttatttcagttgctagtaatatgtcatagttgtagtttgacataaagaaggaagcaaaaaagataaattagcctataaaaacataactaacaaatgtagacaaatcattcattcccattacattaaaaatgatctagtctacatatggacggatgtaagcagagttcagctcccaaatctttagcgatttggcagtgactctaacatttgtggcattgttgaaaagaaagattttggccgactcgtaaatggctttggtgggatacacacgcgaggtaatgcatgtcctccctccttgagcgaagccctcaactatggagtgatcaaccaaaatccttattgacaggttttcgccatttagcacaggtacc

SEQ ID NO: 414703 - DNA, 388 bp, Oryza sativa
  unsure (1)..(388): unsure at all n locations
ggacgttctcgagacgtccaccccgccggggcccggcgtgaagcacgtactcaaggccagcctcgacgacgacagaaacgactactacgccatcggcacctacgacggcgagaccgatacctggacgccggacaacgccgacatcgacgtcgggatcgggctccggtacgactacggcaagttctacgcgtccaagacgttctacgaccccgtcgggcggcgtcgcgtgctatgggggtggatcggcgagaccgacagcgagcgggctgacatactcaagggctgggcctcccttcagtcaattccgaggacagttatgctggacacgaagactggcagcaacctgctccagtggccgggtgtggaggtggagaacctncgtatgcgc

SEQ ID NO: 414704 - DNA, 429 bp, Oryza sativa
gcacacggaaaagaccaaggtatatatatcaccgacagcaacaagtgagtggtccacatgacaaaatgtatatagagcagagtaccactggacaccatttcccaactacacaaacccaggcacataaagcagcttccaaacataagacaatggaagataataatatcgtctaaaagaatcccaccgggtaaatcctgaaatccctggagcacactctgcacaccccctgtaccgcttcatctgtatgactcggtgcgcttcggcttgctttggaccaccgcttcgatcttgtcgacgacttctggggttagcagcggaatgacatcgagggccttcatgttttcaacaatctggttttcttttgtggctccagtgatcacagatgagacgtttgggttcgatgcgcaccacgcgatagcaagttgggct

SEQ ID NO: 414705 - DNA, 432 bp, Oryza sativa
gatttctctctcgctgcagatccaaaccaacctcaccgtcgacgaggaagaaggcggcggcggcggcggaggcgaaggcggcgaagatgcagtacaagaacctggggaggtcggggctgcgggtgagccagctgtcgtacggggcgtgggtgacgttcggcaaccagctggacgtgaaggaggcgaaggcgctgctccaggcgtgccgcgacgccggcgtgaacttcttcgacaacgccgaggtgtacgcgaacgggcgcgccgaggagatcatggggcaggcgatgcgggacctccggtggcgccgctccgacgtcgtcgtctccaccaagctcttctggggagggcagggccccaacgacaagggcctcttcccgaagcacatcgtcgagggccttcgcggctcgctcaagcgcctcgacatggactacg

SEQ ID NO: 414706 - DNA, 416 bp, Oryza sativa
  unsure (1)..(416): unsure at all n locations
gctttatcggcgtcgccatggtgtttctcatcgtgtcggcttcctccttcctcatccgtctcccacttgtcgctcgagctcgcctcccaaaccctacctcctcctcatatacctctaggtctaggtctagggccctcctcctcctccccgcctactcccctcttcgcgccttctgccccgcctcccgccgcccctcgcccgccacctgctccgccgcctacgcctnctnctccatggccaccgacgacaacccgctcctcgccgacttcgacttcccgcccttcgaccgcgtcgagcccatccacgtccgccccgccgtccgcacgctcctcgcccgcctcgagggcgagctcaccgacctcgagaagggcgtgcagcccacctgggggaagctggtccagccgctcgagcggatc

SEQ ID NO: 414707 - DNA, 333 bp, Oryza sativa
gctttcgactactctcggagaaggaaagagcgaagaatggccgcctcatcgtctctcagactaatcctcggctcctcgtcggcgtcgcgccgccagattctcgccgagatgggatacagcttcacgcttcttagtgcggatattgacgaaaaggagatcagaaaggagaagccggaggagcttgtggtcgcgctggctcatgcaaaagcagatgctataatggagaagctgagggataatgggatgatgaaggaaattcttgattctcaagagactacactgttgataactgcagaccaggttgtggttcatgatggagtgattagagaaaaa

SEQ ID NO: 414708 - DNA, 496 bp, Oryza sativa
  unsure (1)..(496): unsure at all n locations
tgtttacttggtggacaaggcaaaggatcagtttgaaaatcttttgctgtcatcagcatgtgaaactcttatggagattggtaacttaggaaacttgtacattgatgagcaagcaccatggtcttgtttcaagcaagggggtgagagtgctgaaaaggcagcgaaggatcttgttattattttggagactatgagaataattgcaattgcactatcaccgatcaccccaagcctttctttgaggatttatacacagcttggtttcacagaagaccaatttagaacattgagatgggaggataccaaatggggaggtctaaaggcaggtcaggtaatgatggagccaaagccagtttttgcaaggatagaaacagagacggacgagaaagatcaatcaagttcgaaggcaacaaaaggcgggaagaagaaggcangaagtcaaggacttgtggagcatgagtcaagtttgtgatggtgtacatagcataaactacct

SEQ ID NO: 414709 - DNA, 481 bp, Oryza sativa
gcttaacattcaaatatggccatctgtccattccctcttcaaaagtttaaaccatttctgggtcccaaaatattacagaagaacatagcacgaactcaacacgagcaatacaaaacttttacaaatcgatcttcttgctgcccccctatgcacaaatcttcagaaatcgctgacgccctctctcagcagttgatgccgcactgcctgacgtcagggcccctggccttgatggtgaagggatcaatcctgacccagagcaaggaaaagatggaggcgagcagcacggaccagatgacaacaatggtgggcgtccggttctgcctccccatgagccccttgaggaaggggtagaggtggacgatgacccagaaggcgaagaagagctttccgaagagcgggccccacgcctcggagccgttgttgatggcgtcggagacgccggcgacgaccccgatgatgttgggatgagcaggggtgggcg

SEQ ID NO: 414710 - DNA, 449 bp, Oryza sativa
tttttcctcctctcctccttcctgcgtcgcctccctgatcagccgcagctcgttgccggccgttgttgcgcggccatggaggcgagcgccgggctggtggccgggtcgcacaaccggaacgagctggtgctgatccgggggcacgaggagcccaagccgctgcgggcgctgagcgggcaggtgtgcgagatatgcggcgacgaggtcggccgcaccgtcgacggcgacctcttcgtcgcctgcaacgagtgcggcttcccggtgtgccgcccctgctacgagtacgagcgccgcgagggcacccagaactgcccccagtgcaagacccgctacaagcgcctcaaggggagcccgagggtgcccggggacgaggacgaggaggacattgacgacctggagcacgagttcaacatcgacgacgagaagcagaagcagctgcagcaggatca

SEQ ID NO: 414711 - DNA, 468 bp, Oryza sativa
ttttcttctcctctcttcgtctctctctctctggcggcgcgttggatttgacgagctcgtcaccaccggctgcggcggcgaggcaggcatccgcactcctcggcgtcgggccgtcgtcgttgtccgctacctggaaaagatggctggtggctttagggtattgcatcttgtcaggccttttctggctttcctgcctgaagtacagagtgctgataggaaaataccatttagagaaaaagtgatctacactgttatttccctattcattatcctggtatgcagccagctaccactgtatggcatccattcaactactggagctgatcctttctactggatgcgtgttatccttgcatcaaaccgagggactgttatggagctgggtatcactccaattgtgacatctggcatggtaatgcaacttctagggggatcaaagatcattgtagttgacaacagtgtgagaga

SEQ ID NO: 414712 - DNA, 280 bp, Oryza sativa
gttgttttttttttttttttttttttttcttcttctcaaagtagggtagcatctttccttctttcaccattacataagcttaagcaataacagataacaaatcctcctcctcctctaggtaaaatattcaaacacaatacccttataagtacttattattaggaaagtagcgtgcatgggcataaatggcagcggggggcaggttaagaatcacaatgctgagcagcgaggaaacaaaacaccataattgggacaagagcaaatagccctccgaaagggg

SEQ ID NO: 414713 - DNA, 482 bp, Oryza sativa
attttacctcctccacctcctcctcctccccccgagcggatcggcccggctcctcctcctccgccgccgccaccgccgccgcagataggagaagatggccgcacttgataccttcctctttacctcggagtctgtgaacgagggccaccctgacaagctctgcgaccaagtctcagatgctgtgcttgatgcctgcctcgccgaggaccctgacagcaaggtcgcttgtgagacctgcaccaagacaaacatggtcatggtctttggtgagatcaccaccaaggctaacgttgactatgagaagattgtcagggagacatgccgtaacatcggttttgtgtcagctgatgtcggtctcgatgctgaccactgcaaggtgcttgtgaacatcgagcagcagtcccctgacattgcacagggtgtgcacggtcacttcaccaagcgccctgaggagaatggtgcttgtgaccagggacacatgt

SEQ ID NO: 414714 - DNA, 531 bp, Oryza sativa
  unsure (1)..(531): unsure at all n locations
tacgtagtttgatcctttgtgcggccgcctttttttttgtgttggaaatgaacgggtgttctattctggatgaaagcctgaaactttatttttacattaggcttgtgcagctcaggtttaaggccacatcatcactgcttattctttctttaaggcgaactatacataaagttcatatcatagataggtacatagcaactgctaaagaaccacaaccaagtccaaggcaagccaggatctccagattacaagggcaccaacagttgctcctgatcaagaaatctgatgcttcatttgcagtcttcgtcagaagaccgaaacacaaacttcatccctttcttgccacaatcgtccttctcggagcccttccagccaccagagatagtctccccacttgttgcttcaacatcgatatactctgtaacaatctttccagaagcaactgctccacccctcctgagctcttcacgatcttcatcaacgcgatagtaagccacacaggtacggngcggngaaaggactttgtatgag

SEQ ID NO: 414715 - DNA, 427 bp, Oryza sativa
  unsure (1)..(427): unsure at all n locations
acctgtccccgnngggggtgagcacagcggggggtgaacaccaacacggcctgcgccgccgggccgccggcgaagatccagtcgtggacgtcccagagcacctgcaccggcgactggtcgacgatcaccggctcgctgcccctgaacttccactgcaggctcctgacgtgcaccagcacgacgccgttcaccgtgatccgcatctacggctccctcggcccggcgatggcgctggccacgacgatctcggggtcctttctgccggcggcgagcggcgcgcgggcggcgaaggtgcgcctgccggagacgctctcgcggcgcgacacgagcacagcgtcttcgagcgacgggcgggacctggtccgcttgaacgcgtacttcttgccgtcggcgaggaggaggacgacctcctcgcggctcaccagcg

SEQ ID NO: 414716 - DNA, 465 bp, Oryza sativa
tggggggtttttttttgcgggggcattaaaatgtatttcctccatttcccaatataagtatttctcacatacatattaatattaatgaatctagatatatataaatgtctagatttattaatatcaatatgaatgtgaaaaatgatagaatgatttacattgtaaaacggagggagcggattttttttccaccatgtgattaccatgcaaagcctaactctctgttggctgatccgggtcttgggccagttagcatcaagttcttcggcccatcaatgtgcatcggccaggatttgtgcctcccgaaaacaagccctgaaatatcaacaagccttccttgatttgttgtacctcttggcacaacacgtaaacgccagaagatcgaggcaaccgaggccggccgtcatccagaagaagcgatcaaggtgccccatcgtgagatcatcggggatccaccccggccgg

SEQ ID NO: 414717 - DNA, 498 bp, Oryza sativa
  unsure (1)..(498): unsure at all n locations
nnggggttttttaaactgggcggaccacaccaatacacgattgattaatttcactgagaatagcacgggtacatcacatcacacaaattcatacgttgatacacgcatagtcgccgaagcgaccagctgcttaattaatcgataacacacgggtttaattcagcaataatcagcacacacacaaaccacactcatatgggtggtttttattgtggactaattaaggtaggtgactcgccggcggcgagtgttcggttgcttcgtgacttcacttgccgcacttgcagtcggtgcaggagcagctggtgccgtacttgcagccgccgttctcctcgccggcggcgacctcctcgaagtggctcttctcggcttcaactatgacgacgccatagctggtacctttcttcacgcactggctcttgtcagcacagtcgcagttgccgcacttgtccgacatggtcgaagatttaattagctaagtgagtgatgagtaatccc

SEQ ID NO: 414718 - DNA, 410 bp, Oryza sativa
  unsure (1)..(410): unsure at all n locations
ccgccctttttccnggggctcatgaatttggggggtnacaaccactcctcctcatattaccaatacaantatttctcacatacatattaatattaatgaatctagatatatataaatctctccatttattaatatcaatattaatgtgaaaaatgatagaatgatttacattgtaaaacggagggagcggattttttttccaccatgtgattaccatgcaaagcctaactctctgttggctgatccgggtcttgggccagttagcatcaagttcttcggcccatcaatgtgcatcggccaggatttgtgcctcccgaaaacaagccctgaaatatcaacaagccttccttgatttgttggacctcttggcacaacacgtaaacgccagaagatcgaggcaaccgaggccg

SEQ ID NO: 414719 - DNA, 477 bp, Oryza sativa
ttgtggtttttttttgacgagggcaaataagttcttattgtaactggagaacattaattacatcccttctgtaaagctcagggaagcataccttattagtatttttaccatcactaagcactaaaatatagatgtaactagctagatacattgcctcattgcatgctttcttcagagattattgacacactgatgagatgaaagcaggctatcctctatatgttggatcatggaagtgcaggcagaaccttcccagtgcaggttccgaatccgacattgtagccttcacccttgcaacaagctgtcaagatgacctcatccccatcttctaggaacttgcgggtcgagtttccaactgatatctccttctgcccattccatgttagctccagcaaacatcccaaagattctgtctcaggtccgcttagtgtgccagttgcaaacatatcccctggtctcagattgcatccattaaca

SEQ ID NO: 414720 - DNA, 401 bp, Oryza sativa
  unsure (1)..(401): unsure at all n locations
ntggtttttttatttttgggtgttttttttttttttttttttttttttttttttttagaaaggaaacacaactcattttttattgatatatgggggatgaatccaaaaaaaccgatacaaggcacgaaaaatcagactagatgaatccttcgagatcacatgagcaaaagctttcgacgaaaggtgtcctatagtcggggaagcaataacacttgataaagataggaattcagacaccagagggtgcagactataagatgtcatcaaaacttcttgaacgccgcgaaaagaacaccgttgatggagtcggtggccacaagactaaccaagaaggagctcttttggaccttggttagtatttccctagaaggggcgccctcagggaacaggcaagcccaacc

SEQ ID NO: 414721 - DNA, 515 bp, Oryza sativa
gccgccctttttttttgggggtttttttgaccacaggagatgctcagccactgcacacggtgcagtgtcagttgtagcattcacaacataccgagtttctttttaggaggtaaaactctacgagtctcacagcatagtaaaacgtagccagctattactagatacgagtagcattttttaagtcgcaaacaaaagggatacagtcccggcttaaggggtgtaaaatcagcttcactatcttcatgttcgccgcaacgggaaacagagcacaatcatctttgggtccaaaaatttacggcaaacctttgcgacgacattgatttgtgaaccaatgacgagtttcctagatgacatactctgcttactgttgcgcgcactgaactctctgggcacctccaggcatctcatcgtcctcatcatacgcctcctgagcagcttgggctttcctgcgcatctcttcctcatgttgttgacatcgtgcatcgtgggctcctcgcattcatctatgtccattt

SEQ ID NO: 414722 - DNA, 497 bp, Oryza sativa
ggggggttaacagatatggggccaaatatgttcatatgatattttgccgggacatgacttgtttgcccactcacaaggagaaaatagaacaagaagcaaagtcaagtaggtaaaagacatgtactaattttgttattccttatgccgaagcaatattggatcaaaaatattctccacaatgtcgtggagcttgattgattatatggaatggtgatatgatctctctttgtgaactctgcatcctttcgctcaaaggtcctcggggccattgatatccttgttctcgatcactgctccatctgggatttccagtttgacaccaggttgggctgtgatggtcaccttgcccttcaatgtgatgctagagccaaaccaaacatcaccggaaaccttcaaggtgtcaagctcaacaatgctggggattgacttgaagcgaccaaggaaacacccgaccttcttgaactctggacccagttcaattgagggattcgatgggt

SEQ ID NO: 414723 - DNA, 178 bp, Oryza sativa
cgtagtcctttctccagacgcggcggggtcctacgcgggcctacggagaactccccctactccatgccctcgccgacgtaccagtggacgaaggcacgcttggagtacatgaggtcgaacttgatgtcgatgcgggagaacacctgcacgacgctggtggagttggagatcatgcaca

SEQ ID NO: 414724 - DNA, 506 bp, Oryza sativa
gggggttttgtctggaaatttgttatttcattcatatgaatagtagcacactcatatcataggaataccctgtgtttacaaagtaacactaaaaaattgcaatggggctcctcacaacatgcttctcagatacccacttgaagcttccctcggcatggttagttttgctaatatcccaacttaagcttaatgaaaatgttttcttctccttcatcttggtgaattctagctttgttggtgacacacttgtcatcacctccctgggcatatcaatttccacggtgtagcttgaatttgcttctcccacattagtaacagtccggttcaccacaagcttgccagcacttgcccttactgctactgatggatagttaagttcagcttcagttattttgcttcctttgcaggcatctttctgatttgcaattatctcaacttgaacatatgtgtaacccaggccacagagatatgaaatgtattgtgcatcatcaatgtcatagatcaga

SEQ ID NO: 414725 - DNA, 475 bp, Oryza sativa
gtggttttttgaattagagggggatttaatctaacatacgcaaactgatattatcacaatgttagccgatgacaatggaaagagtaatctaggtacaagcggatcattgacggtggagacaagacattggctgcaccacaacacccaccagtggcgccaacaaggagcgctatccgttataggacgagagaaaaagtaaaacatcacgatgtgaagtgaaactgaataattctagtagacgatgatgatgatggataggctccttaggacgcccgccgcccttagcgtcttgctgctcccatcttgtccactggaaggctcactcgtcatcgtcttcatcctcttcgctgccctcgtggtcatcctcatcattgacctcggacttggacttgtcagattcctcctcgtcgtcctcctcttcctccttggcgggtgccttcttggcagtgctctcgcccttgttgtaggcagcaat

SEQ ID NO: 414726 - DNA, 422 bp, Oryza sativa
ttgttttttttttttttttggtttttttttttttttggcagcaaatccacacaagattaatatcgttgcacaagaggttgatagagcattacatatttagatgaggcacacaaccaaagaagcagcagcagctgaccaaagtttagacccatacatagggcaaccagtcattgcatacaagatgatactaggggattatggcagcttctctttttctcttctgattgagcagagagatgccaccgccattattttttgaggggagggaagcacgcggggaggtcgctcttcggatgcttcgcctcagcatgctctttgcacttggtctcagaggtggtgcagatgaaagtctgcatgcatatcttgcactggatgttcatggccttcttgttggcctcaagctggctccccttggcgccctt

SEQ ID NO: 414727 - DNA, 485 bp, Oryza sativa
  unsure (1)..(485): unsure at all n locations
ttgaccctttttaaccgccgcctttttttttnngggatattaaacatgggggttatattaattaactgaaggggaagaaacccaatcatttctgctaatacagtgaaagcaagatgcttggcactacagatgactaaataagctaaagcataaacatagtacaaatatattacatgtcgatcacatgatgcacacgataaatagatagctatgacagatacctccattgtgctggacggtctcttgagacaagaagaacccttgatgacgagtaatcgaatgtagggcagtacaaatcatcaaagccaatagcctctcttactccaagagtggctccacggtcaaagctgtaagtttgttgaccgtcctccttaaaggcgtcaaatgcaaatagtcccataccacatgcagccaagacaaggctggagttgccccatacttgggttattgaagagtgatggaagtgggcattgaaatcaggtagt

SEQ ID NO: 414728 - DNA, 412 bp, Oryza sativa
ttgttttcatgaagtaacttatatatatgttgaactccgttaattaaaaattaaaggagtatataaaccggttccgtaaatatcttaaggcgagatatacagatgccaaataggtgtacagtactcgaaattacaaagattataccagtataattaatcgttgggattaagagcatgaacgacccagttacgaggggtgcacggagtacgtgtgttgcttgcgcgcgtgtggatcgacgagattcttttgcaaaaattacctaattaattaatcggcgtgctctctggcgtcgtcgatattgtttattgtttggctagagttcgccggcggcggcggctgcgaggtcctcacaactctgggaaggggcgggcgaggcggtcggcgtcggtgtagatgtgggcgcgggtgatg

SEQ ID NO: 414729 - DNA, 465 bp, Oryza sativa
  unsure (1)..(465): unsure at all n locations
ggtgttttttttttttttgttttttttggtacagtaagatgctaactttctgaagcctcacacagtgacaaaagtatcacagatttcacagcctcatcagcaaaggggggaaaaaacttggtactggaagaagagcatgtgagcagtgacaaagttaagggcttaaagagaggttctacagagctgggtttagtttcatcctcaaattctcatccttctgctgttaggagcacgctggccctgcagtaggggcagtcgctgcgagagcgcagccatcgctcgaggcaggccgagtggaagatgtgcttgcaccgcagctcgaggagcccatctgcatccccacatctctccaggcatatagagcactccgttgaaggtcccgcgagttcgtcatcatctgttactctgcagctggctacttcttgngtaggagccggttcagaacaatgcgcgatgaacgtatgc

SEQ ID NO: 414730 - DNA, 499 bp, Oryza sativa
ttgggtttaaaaggaaagtgggctatatacacaatgttagataaaattggttattgtttttcatgcatcattacacaggtatgaatcatctgtgcaaaaacaataacgcatgcgtgacatttggccatagaagactatgcacatgttaatcaacagacaacacaatcttgaagtatttttcaagcattgcatcctttgagaagtcagtgaagtaccccttttcaacctcaagtccttgctctgctgctatctgttccacctgctgctgaacctgatcggcactgacatgatctggatccaggaagcatgcaatctctgtgcagtcatcaccatgggaaagggcaagcgcttgcactgtcgggagtcctccaccacgaccagtcacccttcgggtgatccttcttatggttgggatatccttcgatagtaccggcacattatagttcaggggtaaaggtgcagcaccgatcattatggcacctctttcacgagaaacatt

SEQ ID NO: 414731 - DNA, 498 bp, Oryza sativa
  unsure (1)..(498): unsure at all n locations
gtgttttattttactcttattgaatcgcggtaaagtattctaattcaataaaaatttcgcgggcgaatatttactctttcctgtcttatttgttaattcataaccttatcaaataagacaatttttttggtttgttccgccatcccacccaatgaagtattgggattcttttcaagaaaatcctatccagtcataggttctgtcgttcccactgcttctcctttaatggttaggtttgaatctcgcaatggagcttccaaaaaatttctttccgagtcaatttctcagttttattaactcgggacgctctttgttattccttgaaatttgtatttcttgtttcaatcaaattacgatttcgaattctctgttatttttattatattgatgctttatcacattgctttttatgatgtaattcatagaccatacatattggaatcctatatctttcttatttctcttccttctttctatcatccttccttntatctacat

SEQ ID NO: 414732 - DNA, 530 bp, Oryza sativa
  unsure (1)..(530): unsure at all n locations
gctcagccgcaccgggtccatccggaacgccgccgccatggcgaacgtcagcgccgggagcgtgttgctgagcgcgcacgccaccgtcggcgtcgtggacttgagccccacgaagtaaagcacctggttcagcgtcgcgccaaaaatggaggagaagaatatctggacaagtactttcttggtgatcaccatgccactcttcctctcgaagtagtaggcgaagggggcgaggaagacggcggcgatgatgttgcggtaggcgatgaggacgtaggggctcatgccggtgtccagcgccagcttggacaccacattcatgccggcgaagcccagctgcaccatcaccatggccagcgtcggcaagctctccctccccatctccctcttctctactctctcaactctcaactcccttacttctcgaccgtgctgcangaacttcagttcaattcctcttgagagagagagagagagagatttgtagggcggtggtattgatatgatcaagctaagctatagagagagagaga

SEQ ID NO: 414733 - DNA, 443 bp, Oryza sativa
ttgtttttttttttttttttttttttttaagggcagcaaagcagagcatggaacaagctgcgattaagatggacaggttcagtagttatcctaacaggttcagaagtgcggcatccagcctaataacatccaccccccagctggtacttaaacaaacacgacataaacaagactaccaaaacatccacaagttcaggccataacatagcagccaagcggctgctcagcagaagaacatggagctcctgactttgttatgcaggcgaggcagctcgggcaccggagcgctgcccgccgaggtatggccaccatggctcgacgacgtctccgacatctggttgaacttgatgaactggctgacctgagcagcagcgagatgcgcgtagcaaatgggtgcaacgactgatatggctgtagtgctcctctggtagacataggaaagg

SEQ ID NO: 414734 - DNA, 487 bp, Oryza sativa
gtgtttttccaatcattgatggaaaatttcctttaaccagagcgccgtttgcaattcccgctccagcgctgatgacgatctctcgttgaatgccgagggggttcctcacactgtgtagttctgctggatcgtgtcgatgtccagccccttcagcttcaccaccgattcgacgtggcccttgagagtgttcagctctctcagcctcgcgatctcagctcgtctcttggcttgctcagcgatctcagagagctcgcggtagctgctcttgtcgttgaagagcgtgttggaggcgacctccggtggctgaaggccgtgaagtgttctttgtgcgggggcccatggtgcctccctctgctccctaccgtaatccttcttggtggtgaatgcaatcttgtttctaaggaggttgtcccaggcccttccactgagcacaaagcggatgaagaacttgacgatgtcaagagggaggttgacacaatgctgaaag

SEQ ID NO: 414735 - DNA, 492 bp, Oryza sativa
ggtgttttttttttttttgtggtttagccaagcaaaaacatcttcaaaacacttaatttatgattcggacggatactgatcaacttgtaaatacaggtcttctatacacaaatgcttgctgaggttacaaacagaaatacagacttaacgatttgcgaatagacatttcaagcttagacaatacaagttaggtgtcagatgaaaatcgacacacgattttcgtcatcttcttcgctcagactgctccctcaagaatggatgcctaagcgcctcttgtgctgttagacggcaagctggatcataccttaacagaccttgcaaaaggtcaatgaactcgcccccagaatgatccacattttgcatcaccagattctgaagacgtggcagcttcataacagctttcatgctatcccgtgacgcacaaccttcaggccagtttaaacggccttttctgacatatttctcagaatgacggtctgcccttttgagcat

SEQ ID NO: 414736 - DNA, 492 bp, Oryza sativa
ttgttgttgcagagtggattgttcctccatcctgtattagacagggaaaaatatacacatcatctgtacaaaggtgagcttggagccaaaagcatccaggaacatcagtctacaagccagtccaggttataacactcttctgctacctgaacccggaggtctgggatgacctgctcagcttccctccacagcaacgccgtctcctcgtcgcacacgacgtgcccgagggacttgagcgatgaggacgacctcgggaggctcctcagtcgcgagcattctcgcatgtcgatcttctccaggcttgtcaggtgaccgagctcctcagggaggtccgtcaggttgacacactgcgaaatgtcgaggtatttcagcctcttcaggctgcataccgaaggcgggagccgccacagagccgggcaggcgtatacccttaggatgctcaggcaatgcagcttgcccagctcatatggaagctctgtgaggtcatggcag

SEQ ID NO: 414737 - DNA, 505 bp, Oryza sativa
ttcttcgcgtggggaccttgtcggcggggtcccccttcccggccgccgccgctggcgtggcccccttgtggttccggtagatcgcgtagaggatcagctgcatcaagcccagaaagctcccgcatccattggggatcgcgatgaaagggtcgcggccgagcaggccgtagatgaaccaggaggtgccgcacaggaacacggacagggagagcaggaacggcatgaactccacgctcttcgtcttgatcaccagcctcatgatggagagaggcgaggcgtacatgcagatggagaagatggtggcggcgaggccgcagaagagcttgcggccctggccgtgcagggccaggagggagacgagcaccaccatggtgaagatggaggtgacgaggcccaggagacccatcatcttcagcctggccttcctctccgcgaagatgaggaagatcaccacgtagatggcctcgatcaccgaccccgtcccgttgatcgtcgtcaccaggat

SEQ ID NO: 414738 - DNA, 466 bp, Oryza sativa
gctgcagcaggaggaggaaaacgcaaggaggcggcgggaaacgggcgtgggagaaggcagcgtgacattgacgatggaagagtacgacgagctgagccggtgagcacgggagacggaggagatcgccgggaagcgggtgacggaggcggtgaagctgatcaaggaagccaaggacgcggaggtgcggagcctggagaagatggcgcagctggcgaagcaggtcgagcagaggaggcaggcgctcgaggcggcgaccatggaggtcgaggaagcggagttcagtaagctggcggcggagcgggagctcaggcaatggcgcgccgagcacgagcaccagcggcggttgaccggcgagggcatggcgtcgccgcgcacggggctcgcggagatctccgtgttcgacggcggcgaggggcgcgggaacccgcacatactgagcccgagaggagggtatatgccgaggact

SEQ ID NO: 414739 - DNA, 70 bp, Oryza sativa
caaatgctttcgcagttgttcgtctttcataaatccaagaatctcacctctgactatgaaatacgaatgc

SEQ ID NO: 414740 - DNA, 507 bp, Oryza sativa
attacgaaggtcggatatagagtttaattttattacaagccacgacagaattaacaaattgagctaagcaacaccagctttattcaaggcacttatactgcttaccacctcctaacataggatggtgaggagtgctgctgataaacgctccacccggagtagatggacaccaagacgatcttatttgcgagctgtatagctttctggaacatatatctcccctccagcttcaccatgttgctccccactgactgttttccttgcagctgaaaactcagcactcatagcattcattccttgtatcaccgcttcctccactgtcccgtaaccatgttcatcagcatattttctaatatcctctgtgattttcatcgaacaaaactttgggccacacattgagcagaaatgtgccactttggcaccctccgatggtaatgtttcatcatggaaagacatagcggtcacaggatccagagatagagcatattgatccaaccatctaaactc

SEQ ID NO: 414741 - DNA, 501 bp, Oryza sativa
ttgttgttttttaattacggggaaccacttgataaaactgattgatatattccagataggagaggagggcatcgatacttatcgtcgctaaattaaatgggagtacaggctaaacacatgagacatccctcgatttaaaacagattacaaacacatggatgttcacttcacacacacgagaagcaggaggaggagcagctgctgaaacaaaacgaccagcggcgaacttaattttttttgaaaagggagaatcttaacacggtagaactcatcatcgatcatcatggccattgcttcatcaacgccttccagccattatcccccaacaatggcttctcgaaccccttgatatcacgcgttgctcctgaaggagccgagggccttgatggcgccggcccggaggatgtactggtggtagaacgccgcgatggcggcgccgacgaacgggccgacccagatgatccaatggttgtgccacgccttctcgttgttgaagatgac

SEQ ID NO: 414742 - DNA, 464 bp, Oryza sativa
ttggtttttttttttttttgggttttttttttttttttttttttttttggaagaggggccttgtattcatctaatagttgaggatttacattccaaacattgttatcaaacatggattgcgaaaatggagaaaaacggggcagagaacttatcagcagtctgctttgacctcaggactttaatttgcagttgccaacaccaatggcacctaaacaattccttttgcttttgcctttttgggttcacgctgcatgcggaagtcctttttttttcttgctctgtaactgttggggttctcaggttgtttctggtatgggtaaacacttaccttttttttgcttggtccatatttctggaactttacggggccatcgatcaaagaaaagagggggggatccttgcccattccaacattatttccaggatagacctaaaatgaccaatgaaaatgtataagaaaaagc

SEQ ID NO: 414743 - DNA, 450 bp, Oryza sativa
ttgttgttttttttttttttttttttttttttttttttttttttggccaagggatttgggctttataaatatactcaatataaccatataatcactaagaagggttcttgctgataagaaataggacgataacacacaacaatctggattgatttcaaaccatagctgatggcaacttttaaaagaaaatttatactaaattcatcaactgtttaccatcacatggattaaacaccaaccgaattgcgagaacaagaagcaaaccatttcagtagatcaagcctcaggcgccggctgcgagaggccggccttggcgagcagtttccccatcgccttaggcgagcacacctggtactgcacctccccggggccgggctgcaagaacaccttggcgagctccagcttctcggcggtcaagctggtcgaatccatggtcttgctaagcacctt

SEQ ID NO: 414744 - DNA, 318 bp, Oryza sativa
ggtgttgattgccaggcttagggagctccatacgctcaaggggcatgtagaatcggttgtgaagctcaaaggcctctacattgagaccatccagcagtcttacaccgttgtgatccagcctgtccataaagaaagaaaaatgaggattatctttttttccagatttttccctgtttgctttaactttgctgcaattctgcaatcacctacgtgtacttgacccgaattgctgtaaactttgtccctcctgctccagcttctactacatggcagtgttatacaattttttggtcacctgaaaaatttataagtgtttgg

SEQ ID NO: 414745 - DNA, 478 bp, Oryza sativa
acttacattgacatacaccgcgcttaaccgcttaccaaagcaggggccaagcgaaggcaccccttcacatgatcacatatatacttactcgtgacagggaaaaatgcagaagcccccaagttgccacctgtggccacttggcccaaattacgtgctgctacttagcttagcttaacctacttgaatccgacgagctgctgctgctgctgctgctgttcatcatagctcgaggaagacgaactcctcgatcgccgggatgtggccgatgtgctcgagggtctccttgtcgggctcctcgtcgacgccgatggccatgatggcctgcttgccgcggaaggtccggccgacgctcatgaagctgatgttgacgttcgtctggccgaggatgttgccgaccttgccgatcatgccgggctggtcgatctgccggcacaggatcaggttgccctccaggctgacgtccacctcgtagggcccg

SEQ ID NO: 414746 - DNA, 259 bp, Oryza sativa
gatcgacgaagatgctcttgtcagagcccttgactctggcaaagttgctcaggcagcccttgatgtcttcactgaggagcccccagccaaggacagcaagctagtccttcatgagaatgttactgttacaccccatcttggagcaagtacagtggaggcccaggagggcgttgctatcgagatagcccaagctgtcgtcggtgcactgagaggtgagctcgcagcatcagccgtgaatgctcccatggtcccagctgag

SEQ ID NO: 414747 - DNA, 277 bp, Oryza sativa
ttctgggacaacctggggttcgggctgacgccgaccgactacatgtacgtcatgcggtgctcgctggaggacggcgtcttctcccgcggcgagctcagccgctactgcaacatcgagctcagccccttctccggcgtcatcaactacggccaggggctcttcgagggtctgaaggcgtacagggcggtgaaccaacaggggtcgtacatgctgttccggccggaggagaacgcgcggcggatgcagcacggcgcccagcgcatgtgcatgccgtccg

SEQ ID NO: 414748 - DNA, 176 bp, Oryza sativa
tatttaaccgggagctgcaaacgatgcaagtttttgatcacccaaatgttgcatgcttgaagcattacttttgctcgactactgtgaaggaggagctataccctaactagattgctgaatatgcgccagaaacttgttcatcgtggtattagacaattccaataagatgagccaac

SEQ ID NO: 414749 - DNA, 316 bp, Oryza sativa
ttattcaaccacccgcatccacacaccgcaccaccaaccatcgaccgcctcgccggagaggagagagaaaggaagagcgcgagatggaggcggcggcggcggtcggccgtgcatctgggcaccttcgaagccgcagatcgcgacccaggccgagatgtcggaggcgcgccttccactgccctaccgtgaccagtgcgcccaccttctcatccccctcaacaagtgccgcgacgccgagtactacctcccctggaagtgctagcccgagcgccactgctacgagaagtgccagtaccagcttgacatggagcggatg

SEQ ID NO: 414750 - DNA, 386 bp, Oryza sativa
gtttattcctctccccaaccctagctagctccccctccttccccggcggcgacatcgacgatggcggcggctgcggcaggcggcggcgccccgcgggcgctctcccagcgggagcaggacatccagatgaatgcttgcggtggacgtccaccttggtaccaagaacttgcgactttcagaatggagcgctaccgttacaagcgccgatccgtcggtattttcatcattaacctttggaaaacctgggagaagcttcagctggctgccagagggattgttgccattgagaacccacaggacattatcgtgcagtttgtttggccttaaggtaagagggtctgtctcaaggttacacagaacacccgagcttatgccatttgcttgca

SEQ ID NO: 414751 - DNA, 381 bp, Oryza sativa
gttttcgccgcctcctcctcctctcgccttctcccgtcttctccttcgagttagctaccttcttattcaaccatgggtaaggagaagacgcacatcaacatcgtggtcattggccacgtcgacttcggcagtcgaccaccacgggccatctgatttacaagcttggaggaatcgacaagcgtgtgatcgagaggttcgagaaggaagccgctgagatgaacaagaggtccttcaagtacgcgtgggtgcttgacaagctcaaggccgagcgtgagagaggtattaccatctatattgccctgtggaagttcgagaccaccaagtactactgtattgttatcgatgtccctggtcacccgtgactttattaagaacatgatc

SEQ ID NO: 414752 - DNA, 310 bp, Oryza sativa
acgtgatactctatccattttttcgattggccccgaatccatcagatatgctctagatacatatcttgtgtgtatatagccggagctttgttttcacatatcctcacccaacgataattgcagtactcttacaataaaaccggtcggagagggagggaagagattattacatatgtggtaagagcagacgccattgagatggttcataaccaaattgtaaaatcaaaatctatagcatattatatattggtatatcatcaacatagcccaaaacaaagctgcatactattattataggcagcaatccacc

SEQ ID NO: 414753 - DNA, 304 bp, Oryza sativa
ttttctctactactactagccagcaagctagctaactaactacgtggctatggcccccaccgtgatggtctactcggtcaccttcgtggctccatttcaagggctcaagtccaccgtccgcctccctcgaagccgacgtttcaccaacttgggctttggcaatcgtcagcaatggcggaaggatcatgtgcatgcaagcgtggccaattgagggcatcaagaagtttgagaccctatcgtacctgccaccactcaccgtggaggaccttttgaagcaaaccgagtacctggtttgatccaagtg

SEQ ID NO: 414754 - DNA, 433 bp, Oryza sativa
cagcttactgccaataaccctaacaccgtggcttcttaactacacataagaatgttgcctgtcaagcatcaaacatgtacagcaccaaacatatctgtcttgggagtaatatgttatatacagcaacaccagactttacacaccaggcacgacctttcttgcaccaacaaacacactacgcacttgggagggtgaaagaagcaaagcaaccactgatgaacactttcacgtttgctcgttgtgaatcgaaaatttctttaggccccaaagcacccgatgagtttcttgggagcatggccggtggcacggtacttggctgccatctcctcggcctttaggacttcctcgccgcgctttgcctcgaccattgctctcttctcctcagcttccttgtggacgatcgcgactttgttcttcatcttctctgcatatt

SEQ ID NO: 414755 - DNA, 206 bp, Oryza sativa
ttttatgcatccctggaaacacaattgccgtgcaagcagacatgccatatagcggcttgtcatcttttgagacagcatttctatcaaagtttgaatgttctcagaagcctaatccattactggatcatttaacctatgtggacactcctggtgttctatcaggggataagtcatcgaatacagcgttactatagtacttcactgga

SEQ ID NO: 414756 - DNA, 391 bp, Oryza sativa
catttatatgggctttgaagaagaatggctttggaaatctcccagtcattgttggggagattggatggccaactgacggggacatgaatgcaaatattcagatggcgcagcactttaaccaaggctttctaacacatattgccacagggcgaggaacgcccatgaggcctggaccagttgatgctttacttgtcagtctaatcgatgaggatgagaagagcatacagccaggtaattttgagcgtcactgggggatattcacctatgatggcttgccaaaatatcaaactgattttgggcaatcacatggcctttttaaagcgaaaaacgtgaagtaccttgaaggaaatagctgcttctttaaccttctattggccttactgatccaagg

SEQ ID NO: 414757 - DNA, 314 bp, Oryza sativa
ctctgtcctaagaaaaccaccaaggggaagaagcctggcaagggcgggaataggttctggaagaacattggccttgggttcaagacacccagggaagccatcgaaggaacctacattgacaagaaatgcccattcactggtactgtatcaattaggggtcgtatcatagctggaacatgtcatagtgctaagatgaacaggaccattattgttcggaggaattatctgcactttgttaagaagtaccagaggtacgagaagaggcacttcaatattttctgcttacattttaccgtgcttccgtgttaaggaag

SEQ ID NO: 414758 - DNA, 499 bp, Oryza sativa
gaagggactaattaagcatagctgaatagatagacccaccagaagttcagagaaccaactgaacacatggcaaagcctgaagattcagttattaatcgtatacggatacagagcagttgttgcaacagggagaaattaggtcggagtgacaaaatgggagagaaaaaaaacagagaggaagagcctagtgagcgtcttcctcctcgcagtgcttggtgtacttggccgggtccagcagggcgtccagctccgacgggctgctcggcttcaccttgatcatccacccgtcctcgtacgggcttgagttaatcaggccgggtgtctcagagagcttgtcgttaacctcgacgacctcaccggagatgggggagttgatgtcattggtggccttcacactctccacgttgccgaatgcacctccctggctgaccttaggccccgcctgcggcagatccacgaacaccacctctgccagatggccctgagcatggtctgtaat

SEQ ID NO: 414759 - DNA, 265 bp, Oryza sativa
gaaaaatgaagaacgcagatactttggtaacaagcaagaaattggtacagaaatggctctgaggctgtgggctagctcagctgccaatgccctcaagatctcatgcagtggagccaccagggctgcacctgcctactcaatctccagatacttctccactgttcttgatgggttgaagtacagctactctcatgagtgggtcaagaatgatggctctgtggccacaattggaattacagaccatgcttagggccatttgggagag

SEQ ID NO: 414760 - DNA, 273 bp, Oryza sativa
ccgaatgccacccacactctcgtgctcctcttcctcatggcgatctcgaaggcttggatctcgctgctgctcgcgctcgccgtcgtgctgtcggcgccggcggcgagggcggaggaggcgccggccgcggaggaggaggcgcctgtggctgaggccgtgctgacgcttgacgcggacggcttcgatgaggcggtctccaagcacctgttcatggtcgctgagttctaccccccgtggtgtggacacttgcagaagctcgctccagagtatgag

SEQ ID NO: 414761 - DNA, 289 bp, Oryza sativa
aagtgatttataccaaatgcccgtggcccaggccttgttacctttgggccggatcgtgttatggagttctgcaacaacaatgacttacagttaattgtgcgagcacatgagtgtgtgatggatgggtttgagcgttttgttcaaggtcacttaatcactttttttctcagcatcaaattacttgtggtacggctaaccaatgtcggagcaattcttggttctaggatagagatcttggagtagtttacgaaactttatccattcttttgctcgtctgccattacaattt

SEQ ID NO: 414762 - DNA, 401 bp, Oryza sativa
agcaaatcgccccatgcgaccatgcgtgcaaatcagttggagcacaaatttacatgttacacccacaccctacacccatgcataataatacatcgtatatacgtacgtacatacatacccctttcgatcacacgcaccatcgatcgtacaaaggtgcgtacatacatacgtacacacatatacgcatacgcacgtacatacatacataattaaaaactcggaattaattaaatacgtagttgatggcatctctaatggaacttgaggctggtgaggatgttgttgtggacgggaccagcgaggtgatcaagcaggttctggacggggccaaccccggtgaagagcgcctggacggagaaacctaggaaggcgagcatggacagccctccatttttgaactc

SEQ ID NO: 414763 - DNA, 369 bp, Oryza sativa
ttttaccactgctagcttgggaagaggaggaggagcttgagcttggagagagacaacaatggcggctcaggctcttctctctgggaggcagctgctggggaggccattgcaatcttcagtctccaggctttttttctccaggaaggcacccttcatggtcagggcagaggccactccccctgccaagcaaggtgctgacaggcagctgtggtttgcatccaagcagtccctgagctacctggatggcacgcttccgggagacttcgggttcgacccgctggggctattggacccggaggggaccggtgggttcatcgagccccggtggctggcctacgcgaggtgttcaacggtcggactgttattatg

SEQ ID NO: 414764 - DNA, 248 bp, Oryza sativa
tgttttcggactccccgctggctccccagtggtaccggctcgagaacaagcgtggcgagaagacccgtggcgagatcatgctctccgtgtggctggggacccaggccgaccaggtctatcccgacgtctggcatttcgacgcccatgcggtggtcggtccgggggccgtcgtctccacgcgcgccatggtttacttttcccccaagctcggttacctccgccgttgccgccatcggagcgcatgacct

SEQ ID NO: 414765 - DNA, 308 bp, Oryza sativa
gttccagagagagagaagggatccatcgacgcgcgagcgctttgcttagattccttcgtcgccggcgaatccgtccccttcgcgccgcccgcaatggcgaatgcagcatctgggatggctgtggacgatgagtgcaagctcaagttcctggagctgaaggcaaagaggacctaccgcttcatcatttacaagatagacgagaagaagaagatggttgtcgtggagaaggttggggagccccgactgaactaccacgattttggcgctaggcctcctgccaacgaatgcagatacgccaatatttcgac

SEQ ID NO: 414766 - DNA, 532 bp, Oryza sativa
gggggtatacaaaataatactataattccctatcttaaaacaaaagcaagcacacgcactactacgtcattttagctaaagtattttacttcaataattcaagacaactcaaacttagttggcacacatgtactccaccccctatcactagagttgttttcttttttgtacaagatcatcctaacattcccacaaggacataaagaaacagcagaaccttcccgggaaaatttcactgagacaggtgcattccgtgcacgtacaataatcatcaccatcatcgtatcatccaacctacaggaaaacgcaaattcaaggtactcttgtccaaacctgtaggtggccagtgatttgctcccatcggctacaactaccagactcaaaaaaactagacacaggtatgatgctaataagcttagcatgatcgactgatggacagacagtaataacaaataggaaacggggggaactatatgtgtcaactcgatgaactctataatatatggatgatttccagcgcccttctggcaaa

SEQ ID NO: 414767 - DNA, 305 bp, Oryza sativa
gaagatgacccaagaaacccagctgtcattgcagataatgttggtgacaatgttggagatattgctggaatggggtcagatctctttggttcctattctgagtcatctttgtgctgcttttgtcgttgcttcaatttcttcttttggaattaaccatgaattcactcctatgctgtacccgctcctgattagctcagttggtatcattgcttgtctgattaccacacttttcgccactgatttttttgagatcaaggctgttgatgaaattgagcctgccctcaagagcaccttataatttccac

SEQ ID NO: 414768 - DNA, 354 bp, Oryza sativa
attgtgaatggtgggtccccagggcttaagatcagcaagatcgagaacaagacgtcgctgagggttgtccagaactgtgacattctgctggaggacgtgttcgtccctgacgatgaccgtcttcccggcgccaactctttccaagacctagtgaaggccctctctttttcttgcgtcatcgttgcctggatcagcatcggcattgcagcaggggtttatgatgcatgcttacggtatctgggggagaggaagcagttcggggcgccattagcggcgttccagctgaaccaggagaagctagtgaggatgctgggcaacattcaggcgatgtggcttctctgctggcgtctctgc

SEQ ID NO: 414769 - DNA, 242 bp, Oryza sativa
tgtttctcagaggtgggttggcttctcctccccctcccggttcggttcggttcggttcgggtccggttcgatttcggtttttccttcggttcgggggttggtgggaaaagcatggcggtgcccgaagtttagaaccgctgcttcgacggatgcctctcctgggccaccgatcaccgatcctctcaagtcgccttctccacttacagcgagatccttgagtccaagatcattaaccatcggta

SEQ ID NO: 414770 - DNA, 460 bp, Oryza sativa
gatttcgtcaagagcatgcctgtggagccacacccaggcttatggggtgcacttgctggcgcctgcaagatccatggcgaggtggagctcggtgaggaggttgccaagaagctcattgagttggagcctcagcatggcagccggtacatcctcctgtcaaacatatatgccacctcgaacagatgggacgacatggctaatgtgcgcaggatcctgaaggatcgcaaggtccccaagggtacaggcaatgccatagttggaaatgattctcagtctttaggatatgaaatcgatttgcgattagtgcttctttggactgagaaagtgcattcagtgtgacttttcacaagcttcgttgtggtagggaggggattgaaccacccaaccttggagacaccattggtactggaaacaagcctcccataaagatatttactttcatgggggcatttgggaaagt

SEQ ID NO: 414771 - DNA, 438 bp, Oryza sativa
tgtttttgttctctcaagtcttcagcaaattgatcctgttgctggtcaagttggtgcacttgtgctatgtcacacaagggagctagcttaccagatttgccatgaatttgagaggtttagcaagtaccttcctgaggtaaaagttgctgtcttctatggtggcgttcacataaaaaaacacaaggatctgttgaagaatgactgccctcatattgtggttggaacacctggaaggatacttgctctagctagagaaaaggatctttccttgaagaatgtgaggcatttcattcttgatgaatgtgacaagatgctcgattcgcttgatatgcgtagagatgtgcaggagatcttcaaaatgacaccctatgataagcaagtgatgatgttttcagcgacccttaacaaggggatccgcccagtttgaaggaaattatg

SEQ ID NO: 414772 - DNA, 443 bp, Oryza sativa
cttgggagatgaaacctgctcttctataatcccaaacacaccaagcactatataaataccaccacattgtatatgtacatatctagcagagcacacaaaggctcatccttattaacaccaacaacatgatgagcttccaatgtagcattaccagatgatagggcacatacaaatcacaccagaatgcgcttccaatcaaacccaaatgtttaggccttgcgaccagtagtatacacatataccattggttctctctctgaaagaaccattttacagttgcaagatgcaatgttcttgcttatttgaggtagtttcagctttctaggccggaaccgcctcgcgcagtttgctgctgtccgctgatggcgtcaagctgtcgtagtattcaacaaggacctttcagccacccgggcacatgaatccgtcaggggggctctggcagt

SEQ ID NO: 414773 - DNA, 87 bp, Oryza sativa
gtttccttggcgatgcaggccgactttgccgccttgatgtttccgcagctggcgcagcggaggggaagcgatcgcgcggtggtggtg

SEQ ID NO: 414774 - DNA, 340 bp, Oryza sativa
ggtgtcatcaatcaataatagttacagtattcattccatggagtagtaggattacaacaattaaggacgatgaagagaaaggggtggctggcgatacacatagagaggcaaagcagggggtagcttagttacaacttacaaacgaagctctgatcgatcaagtctgatttgattgatgcagctgaagaagaagaggaagaagacgacgatgatgatgcaatcagctgctgacgtacttgtcgatgatggtggcgagggtggtcttggggacggcgccgatgacgctctccttcttctcgccgttcttgaacatgaggacggtggggatgctccggatgcc

SEQ ID NO: 414775 - DNA, 271 bp, Oryza sativa
gttcttttcgtcaccgctccggcctgcctcccgcttcgcctgccagtgcagcaacgtcgtcgactaagtggtggtggcggacgagaagaactgggacagtttggtgctggggagcgaggtaccggtgctggtggagttctgggcgccgaggtgcggtccgtgcaggatgatcgttccggtgatcgacgagctggctcaggagtacgtctgtaagattctagtgctgtaaggtgaacacggacgatcttacctaacattgtcactaacttcg

SEQ ID NO: 414776 - DNA, 434 bp, Oryza sativa
attgtgagttcacttatatgtctactcagatacttcactttttgggaaatgaaggtccaaagacatcagatcctagtaaatacatacgttatatatataacagagtgatacttgaaaatgctactgttcgagctagtgctgtaagtactttggcaaagttcggtgcattggttgactcactcaagcctcgaatttttgtccttctgagacgctgcctgtttgatggtgatgatgaggtgcgtgacagggccacgctttatctcaaattgcttggcggggaagctacagttggtgaaactgagaaggatgtgaatgaatttctttttggttcatttgatattccactagttaacctggagactagccttcaaaactattgaccattagaggcaccttttgaaaatttatctgcatctttgggaactaaatcacaa

SEQ ID NO: 414777 - DNA, 436 bp, Oryza sativa
tgtttacggtcttgccgttcacgtgctctttatgaagggctgaaggttgctgctacaccagatttaatgctgggttatttagatttctttcttggtggggatgaaaaaaggccttgacctcccccctcgtcttcatcaaaggctgccaatgtcattaatctttggaggcgatggaagttacatggctccattttcacttcacagtgacagtgtggtcacaagtcttattagtcagggtgtaccttcatcaatatggcaccgccttgatgctggattgaacgcccagttgcgtttggctcgtcgtggaaatctaaaagccacattttttcctgtactcaaatggcttgaaacttaagcaaattcctgtttgaacacataccgcgtgcgggttgaccctgcatggtttcaagctaccagacttggtttctatcaattt

SEQ ID NO: 414778 - DNA, 247 bp, Oryza sativa
aatatagtgagcagtatccctttcatggatttgtttgattacaacaattaaggacgatgaagagaaaggggtggctggagatacacatagagaggcaaagcagggggtagattagttacaacttacaaacgaagctctgatcgatcaagtctgatttgaatgatgcagctgaagaagaagaggaagaagacgacgatgatgatgcaatcagctgatgacgtacttgccgatgatggtggcgagggtg

SEQ ID NO: 414779 - DNA, 252 bp, Oryza sativa
gggttagtatgcattgggaaatatcgcgtataatcaggtattccgagcagattctctactctatttactagtgtatgcacagcgtcctctttttacaacaaatactattgagttagttggaaaatgattaagccttgggctggacagaatgcgactgttgctgtcatgagttatagtggttacgatattgaagatgcaattgtgatgaacaaattatcccttgaccgatggtttggacggtgcattgcaatg

SEQ ID NO: 414780 - DNA, 337 bp, Oryza sativa
agatagtataagcaacacaagggattaactcatcactcacttagctaattaaatcttcgaccatgtcggacaagtgcggcaactgcgactgtgctgacaagagccagtgcgtgaagaaaggtaccagctatggcgtcgtcatagttgaagccgagaagagccacttcgaggaggtcgccgccggcgaggagaacggcggctgcaagtgcggcaccagctgttcctgtaccgactgcaagtgcggcaagtgaagtcacgaagtaaccgaacacttgccgtcggcgagtcacctaccttaattagtccacaataaaaaccacccatatgagtgtggttt

SEQ ID NO: 414781 - DNA, 392 bp, Oryza sativa
gtttatttctggaggcgccttgatccagcagttcatgatcttatcatttggatctctcgcaaattctacaccctacctgggaggaattctattggtaattgttcttgcctggttgggtgctgtaaggtcccttgactcacagttctccccactggctaagcaagagcttgagaaggagaaattgctgaaagcaaagacggtcgaaacaactgctcatgttgttgggtcaggaaaaggttctctccaagaaactctagccagtgagaactttgcgaatggttcggccatcaaagtgtctcacgaacctgagagtactaccttggagaagactggccaacaatctaatcagttctttgccttgcaaatttagttagtattagcttttccgtggg

SEQ ID NO: 414782 - DNA, 318 bp, Oryza sativa
gaacaacttgcacgagaccgtgcgaagttctattgatagagtaggaaaaaaattacaagattacaaccctggagaatcgtaaccaggaaaaaggaaaaaaaatataccaccacccacacatcgacaacgctaacacacaagcccgggagaaggctagcaccagaccggccgccgttagaccaacaaaggaacacagacgagatcgccccacctagggtatgccaaaatgacgtcttcaagaagagaaacgacggaaaaccgccgccgccgtccgttggggctcaaaagagccaagagcgggctttcgcccggcaacca

SEQ ID NO: 414783 - DNA, 455 bp, Oryza sativa
attttgaaactaatggatgcagttgacgagtatatccctgatcctgtgaggcagcttgataagtctttcttgatgccgatagaagatgttttctctatccagggccgtggaactgttgtgacagggcgtgttgagcatgggacaattaaaactggtgaagatgttgagatcctaggtttgactccagtgagtaaaatatctgatttgccttttattacttaagtccagtaatgtggtttataccgccttctagacgtaccaaatttattcttgagagtatgacctgcttggttctgaagattcgagaatccacaatctttgtaggtatatcttacccacgatttttttacaccatatgcacatttgacttcacgcaaatattcgaatggaatatgtatattgtataatgggttaagctaaaatatttttttaccactattggttttgaaagaaaa

SEQ ID NO: 414784 - DNA, 427 bp, Oryza sativa
tgtggagcttgattcgttaatgaagattgtgacagttaaaagagatgatattgctgatacacctactgttgcaacaccattccgagaacctcgttattcgttgggtggtgaaactccaatgtatcccattttgaacaccgtttcatccttaccagacaccaatgcgggaccctggagcaaccccaatacacgatggcatgcggactcctatgcgttgtggctgggctcctatgagtcctccgagggataactgggaagaaggaaatcctgctacttggggaagcagtccagcttaccagccaggaactccactcagttggccatatgaagcacccacacctggatcagggtgggcaaatacgccaggagtttagtataatgacgctttcactcccagggagagcaactactgaaatgcttcaagccc

SEQ ID NO: 414785 - DNA, 393 bp, Oryza sativa
ctcacagctcactgcatcaatggccgcggccaccatggcgctctcctccccggtgatggcccgcgcggcgccgtcgacctcctccgcgctcttcggcgaggcgcggatcaccatgcgcaagaccgccgcgaagcccaagccggcggcgtcgtcggggagcccgtggtacggcgccgaccgcgtcctctacctcggcccgctctccggcgagccgccgagctacctcaccggcgagttcccgggcgactacgggtgggacaccgcggggctctccgccgacccggagacgttcgccaagaaccgggagctggaggtgatccactcccggtgggcgatgctgggcgcgctcggatgcgtcttcccggagctctttgcccggaacggtgtaaagtt

SEQ ID NO: 414786 - DNA, 304 bp, Oryza sativa
cccaaaaaaaaacaattattattgattttttcttaaaggagtactaagcttagtactcccctttactactaccactacacttgatgaagggggaccggcccagtcattattggacgaagtccaaaaaaggaaaacgtttaagcgggtgctaattagcagccttagcatagcccaaaaccttttctccactataacgaagagggttttctttctctcttggccaaaaaaaataatttctcaaggaaaaaagaccaccacgagaaccaaaaccaaaaaggacaccggggttttatatgggggggtc

SEQ ID NO: 414787 - DNA, 283 bp, Oryza sativa
gttcttttcctagctccgccgcctccgccgccttcaggagaggagaggtaagtcgaagatggtgtccggctccggcgtgtgcgcgccgcgcgtggtggtggactctcgccaccacatgcttggccgtctggcctccatcattcgccaaggagcttctcaacgggcagtgcgtggtggtcgtccgttgtgaggagatctgtatgtccggcggccttgttcgtcagaagatgtagttccttctttttttccgtaagaggatgaacaccaagttcttccatggtcc

SEQ ID NO: 414788 - DNA, 422 bp, Oryza sativa
tgttacaccgatagctagctaactaatcttccccttcgtctccggcattattccacttggacgaacactagctcaccggccggccatggcgtcttcttccgttctgatcaagctgctcgtcgtcgtcggctgcgccgccgcggcctccgcggcgacgctcaccgtgggtggtagctccgggtggacgcttggccagaactacgatacttgggcaagtggccaaaccttcgcggttggagacaagctcgtgttcagcttcgttggggcgcacacggtgacggaggtgaacaagaacgaatacgacaactgcgccgtcgcaagcaactcgatcagcttgaccagcaccagcccagccacccttgactttgtcgcccgcgggatgcactactacatttgcaccatcagcgggcactgggcccgcg

SEQ ID NO: 414789 - DNA, 370 bp, Oryza sativa
ttttcgccccccatttcgaagcccaccgaattccattcctcgcgattcctctcccctcgcctcctcgtcctccccctcccaggggatcgccggagaggaatcgcgcggaggaaaaaaaaagaaaagggcttccccgtcgtctaagttaaaaggaagccatggagcacaaggagactggatgccagcagccagaaggcccgatcctttgcatcaataactgcggcttctttggcagtgcggctaccatgaacatgtgctcaaagtgccacatggagatgataatgaagcaggagcaggccaagctggcagcctcctctatcgacagcattgtcaatggtgggtgattcccgggaaggaaccaattattgct

SEQ ID NO: 414790 - DNA, 360 bp, Oryza sativa
gctcgaagaatataataatctcattgattgaaacacgtataggaaaatttaagcggcaattaaggaagtaatagtatagttgtagcagtagaagagtacagcaacacacgttaattaatcacgcgagagcgatggatggatcggccggtaaggtctcggtctcgacctcacacgaggcggcggcagatggtgatgccgtcggcgatggccagctggcagacgtcgatgcgcgggtcggcggcgagcctggagttgaggtccctgatggcgacggggaacctccggtccaggttcgacagcggcgtgtccggcggcagcgccacccgtgccggcccacagcgggttgtcgtacacgatgtg

SEQ ID NO: 414791 - DNA, 248 bp, Oryza sativa
ggttcagttgctggggatgctgctgaagatggccggggcgaaaaggacaatagaggtgggtgtcttcaccggctactcgcttgttggcgacggtgctggcgctgccggaggacgagaaggtggtggcgatcgacccagacagggagagctaccagaacggacggccgttcatggagaaggccggtgtggctgcacaaggtggactttctcgaggggaaggggttgtagaatttggacgagctgttttt

SEQ ID NO: 414792 - DNA, 366 bp, Oryza sativa
cacggagccgggacggaatggccggacccacgcatgcgtgttcatttgtggccttccctcccgaaacttatggaaccgagagcagcacacgttagctcttctcctccgatggcggacaaggagcccgacgtggaccgccccgaggacgaagaggaggtcttcgttgtcgtcgccgacgcgggcggctaggaggaggacacgggcgcccaggtcgcccccatcgagcggctcgaggaggtcgccgtcaccaccggagaggagggacaggacgtgctccttgacatgaaggcgaaactttaccggtctgacaaggaggggaaccatttgaaggagcgggggatggacacctgtaagctttcttaaagc

SEQ ID NO: 414793 - DNA, 512 bp, Oryza sativa
gccaagttccaaacatcatttgacatttcagtttaaacatcgttgcgcttacatgattccagtacatttcaaccaagcatcattcatactcaaatgtaacacaaatatgtcatttcttgggcaagtcacattgttcagattgcagaacggtattcaggagtaaggtgggcagaagccagccacagagcaccagcaaacacacacctttacttacaccttggaaaatgcaccctgtcgacatagcctcccgacatcgccgtctgaacattcctccggaacttttgtgggtcatctcggaggacagccgcagcatcatggttcaagggatcctcgtcattgggttgaatgaaaagaaggttcaaaccatatacaatggtattgatattcaagacaggcttccagtcttcacgcaggatattcaggcagacatttccgtccaagtcaatattagggtgataaaccttagtcgtgcacttgaccttgggcggctcgtgagggtaagtaggaggaac

SEQ ID NO: 414794 - DNA, 416 bp, Oryza sativa; identical to SEQ ID NO: 392956

SEQ ID NO: 414795 - DNA, 439 bp, Oryza sativa
ggcctagaattctaagattatataacgctgcatatggtaaaagcatcaccgatggagcttattaggtgattcgaaatcaccactttttctgaatccacaggtacaaaactgctcccaaaagcaagtcacacgagtctattacaaggaaacttccaggatgtgctcagccagcaaacatcactgtctgaatcctcagaacactgctgcggatggttttaagatgttattcttggagggagctgctatgctaccatcattcacttcagttttgtgactgcggcatggattgcatctgcaagatgcggaatggtcctcccgctcaaaccagccatactgatccttccatcagatgtcatataaatgtgggattcctgcctcatgaaagccacttgatcactgttgagcccagtgaaagtgaacattccgatctgcttaatgg

SEQ ID NO: 414796 - DNA, 538 bp, Oryza sativa
  unsure (1)..(538): unsure at all n locations
tgtttattgcttcgcatattccctcgtgagcttctccatcgtatccctgcgaagacattggatcagtactacagcagagatgctacccactgatctatgttcagaaaaatcaaatgttttctctcaagtgcagcttgaataaattgaaatgtttgaacttgtggcctttttgctgtagttatatatagtccggtcctattctttctgtcgggtgagcataattcggtcgtagatcactttgtcacgggaacttctgtaatattgtgccatgtatctttaaactttcacacttgagctctttttggttttcatttgccagaattgttagcaagagcattcgtgggccaagatggttggacctccaacttttcaaggaactggctggatctacttttgtgaattgaataagatggaacaantaactgcgatgaaatttccatgttggacaatgggggtttttgaaaaataatatatgcaaattgggccgctttaaaatcaagtacaatatgatctattgcaattcgtcttatctattcct

SEQ ID NO: 414797 - DNA, 510 bp, Oryza sativa
acggacttgcgcggagggtgtttgtttaggaagaaaggggatgtgccatttccccgcaaacataggtgggcttacatgatgcgggaacatttcaaccaagcatgatgcatactcaaatgtaacacaaatatgtgatttggggggcaagtcacattggtcagattgcagaacggtattcaggagtgaggggggaagaagccagccacagagtaccagcagacacagaccttaacttacaccttggaaaatgcaccctgtcgacatagcgctgcgacatcggcgtctgaacattcctgcggaacttttgggggtcagctcggaggacagccggagcatcatgggttaagggatcctcgggattgggttggatgaaaagaaggtttaaaccatatacaatgggatggaatattaagacaggttttcagtgttcacgcagggtattaggcagacatttccgttaaggcaatattagggtgataaccttaggcgggcacttgaccttgggcggtt

SEQ ID NO: 414798 - DNA, 451 bp, Oryza sativa
gtttgagtgtggcatgagcgacgacgaggcggaggggggcggtggttaggaggaggaggacgacgacgacgtggtcgtggtggtccccccgccggcggcggcgaggttcgttgtccgtgccgcggtcaaggcggcgcccccaactgcagatgggatgttgactacaaagcttgtccaacatgatggacctactgctagatcagcaaagcacaagaggaagaatcagtacagggggatccgccagcgttcctggggcaaatgggcagctgaaatccgagaccccagcaagggtgtccgtgtttggcttggaacatataacactgctgaggaggcagcttgggcatatgacgctgaagcccgcaggatccgtggcaggaaagccaaggtcaacttttctgatgaaccgctgttgctcaaagctcttcctgaagcaaacgctgccaagcagaga

SEQ ID NO: 414799 - DNA, 473 bp, Oryza sativa
  unsure (1)..(473): unsure at all n locations
tcgcagctaggcctcctgctacactggacatcttcccatcctggcctatgaggaggagctctcttccaacaccgaaggatggatgttcaaatgtaacggcagacacaacggactccgagagcagcagcaagaacaacggcgatcagggtgcagcagcagccgacatggcgagccagtttgatcagatcccacagcagcagcagaagcagcacaagaagatggcagcaagttccactcacagtgaccacaggatgacaaagacacttgatccaaagataatgagaaggttagcccagaaccgagaggcagcacgcatgagccggctgcgaaagaaggcttacatccagcagcttgagagcagcaagttgaggctggctcagatggagcaggatctcgagagagctcgttccagggcctcttgctgggaggatcaccaggtggaaacaccagcgcangagcggcgatgttcgacg

SEQ ID NO: 414800 - DNA, 371 bp, Oryza sativa
tcggctatactgaccagagaagctcacatggatccgtgcactagcagggctccggcgagtggtggtgtcgccgccggcgacgacgacgaggaggcggcgtgcctgcaggcgtttgagctaatgtgcatcttcaccgtccccatgacactgaaggcggcgatcgagctcggcctcctcgacgcactaaccgacgtcggcgacggtcgcgcactgaccgtggtcgagctggtcgtcgagcggatcccggacgccgcgccggacaaggccgatgcggagtactcggtggaccggatgctgcggctgctcgcgtcgagcgacgtcgacaagtgctcgatggactaccggaacccgagcgacgacatgcttctgac

SEQ ID NO: 414801 - DNA, 437 bp, Oryza sativa
  unsure (1)..(437): unsure at all n locations
ggtggccatttcangctcaagggctggcccaacacactcagttaatgaacatgatgatacagcagatgcagaattagctcaaccaagggaacaacaatgctccaccgccgcagaacaagttagctgattttcttcgtgtgaggccgcctaccttttctagcactaccaacccagtagaagcaggtgattggctacacgctgttgagaagaagttggaactgctccagtgcacggatcaggagaaagtcgtgttcgcttcacatcagttgcaaggacctgttggagttgttgctttgaagaagcgtgagttcagggcattgaagcaaaaggatcatactgtggcagagtatcttcatgagttcaatcgtctggcacgttatgctccagaagatgtgcgtactgacgaggaaaggcaggagaagttcttggaaggccac

SEQ ID NO: 414802 - DNA, 483 bp, Oryza sativa
gttacgacatcttcatgcgctcctggaccggcacaatcattggaccactcaactctgtgcacgaggggcgcatctaccagctgaagctcttctgcgacaaggactaccccgacaagccgcccaccgtgcgcttccactccaggatcaacatgccctgcgtcaaccctgacaccggactggtcgaaagcaagaagttccatatgctggcaaactggcagagggagtacaccatggagaatatcctgacgcagctgaagaaggagatggccgcgccgcacagccgcaagctggttcagcctccagaagggaccttcttctagtcataccgtgagatgttcgagggcatgttcctgttgctgctgctgctgctatatactcatataggattggattgctatctctgtccatggcacgcaccgttccgaactatcacctgcccccaaatctgtcacctgaaaggtagtagtactagatgtgtatgta

SEQ ID NO: 414803 - DNA, 402 bp, Oryza sativa
agttgcggcggcggcggcggcggagcccaacctggtggtgtcgttcggggagatgctgatcgacttcgtccccgacgtcgccggcgtctcgctggccgagtccggcggcttcgtcaaggctcccggcggcgcccccgccaacgtcgcctgcgccatctccaagctcggtggctcctccgccttcgtcggcaagtttggtgatgatgagttcgggcacatgctggtggacatcctgaagaagaacggggtgaacgcggaggggtgcctgttcgacgagcacgcgcgcacggcgctggcgttcgtgaccttgaaaagcaacggcgagcgcgagttcatgttctaccggaacccgagcgccgacatgctcctgacggaggcggagctcaacctggacctgatccg

SEQ ID NO: 414804 - DNA, 307 bp, Oryza sativa
tttgctttgaccccctgggtctcggatcggacccggagagtttgcggtggaacgtgcaggcggagctggtgcactgccggtgggcgatgctgggcgcggcgggcatattcatcccggagtttctgaccaagatcggcatgctcaacacgccgtcgtggtacaccgccggcgagcagcaatacttcaccgacaccaccaccctcttcatcatcgagctcattctcatcgggtgggccgagggccgtcggtgggctgacatcataaagcccggctgcgtaaacaccgaccccattttccccaacaacaa

SEQ ID NO: 414805 - DNA, 281 bp, Oryza sativa
  unsure (1)..(281): unsure at all n locations
nnnnnnnnnnnnnnntttgtttttttaaannnnggcggttttgcccatggccaccaccggtccaaattaattattgataccaaacagagggcacaaataaaaccatggaaaatacaggatcccaaatgtcatgatggggtagcggtaattagataatgccacacccagcaatcactggacttggtactgggggtttaagctggggggatgttttttggagcattccttttaaaaacatggctttggtttttaggttagggttgaaacataaggagcccttt

SEQ ID NO: 414806 - DNA, 506 bp, Oryza sativa
ggttcttgcacactggtgcgagtgccaattaccatgaaacgaatccataaaacagcattaaccacaagtctatgccgaatgcaaaaacatctccagatatatctttaattcgagctatctaacataatgccaaaaagtgctaacataaaccaacatattaaggacacaacctgcttgaattctgaaacccagataagcaagctacagaatttgggcccagttactcagcacagaaagttttatgatcgttacggaaacaactagcttcaaacttcttttctcattcctcatcttcttcctcaccgtcaccaccaccgccgtttgccttcttctggttcttccgattcaccctaccaggggggcctccaccgaatgggcttgtcagtgagaagtcaatgtgcttctcagactcaaccctcaccatgaatgatgggatgttgacaatttgcctgccgaccctgatgtggcgttgcctgatcaggacacgagcatggtggatggacttg

SEQ ID NO: 414807 - DNA, 558 bp, Oryza sativa
ttggtttaacccaagctccagcaatcggcggcggcggcgacgcgggagaggcggtccggcgacgatggttcacgtcagcttctaccgcaactatggtaagacattcaagaagccacgtcgcccttacgagaaggagcgtcttgatgcagagctgaagctagtgggtgagtacggactgaggtgcaagcgtgagctgtggcgtgttcagtatgctttgagccgtatccgtaacaatgcaaggcacctgctcacacttgatgagaagaatccacgccgcatcttcgagggtgaggcactgcttcgccgcatgaaccgttatgggctccttgctgatgggcagaacaagcttgattatgtccttgccctcactgttgagaactttctcgcaaggcgtcttcagactcttgtcttaaggctggcatggccaagtccatccaccatgcttcgtgtcctgatcaggcaacgccacatcagggtcggaaggcaaattgtcaacatcccatcattcatggtgagggctgagtctgagagcacattgacttttactgaccagcccat

SEQ ID NO: 414808 - DNA, 465 bp, Oryza sativa
  unsure (1)..(465): unsure at all n locations
ctctctctcgctcaccgcctccttctcctcgcgatctatccaaacaaggggctcgctaagatcggcatgtcggactctgaggagcaccatttcgagtcgaaggccgacgctggggcgtccaagacctatccccagcaggccggaaccatccgcaagaatgggtatattgttatcaagaaccgcccctgcaaggtggtggaggtttctacctcgaagactggtaagcacggtcatgccaagtgtcactttgttgccatagatatattcaatggtaaaaagcttgaggatattgttccttcgtcccacaactgtgatgttccacatgtgaaccgcacagagtaccagctgattgacatatcagaggatggattcgtgagccttcttactgagagtggtaacactaaagatgatcttagactcccaactgatgacagtctnctgggtcagatcaagactggatttggt

SEQ ID NO: 414809 - DNA, 417 bp, Oryza sativa
gtttagatgaaagcgagacacattttgttcgtcttttggatcatcaaacttttgagttcctgtcaatttatcagcttgatcaatatgagcatggctgctccatcattagctgctcattctcagatgataataatgtttattattgtgtgggaacagcatatgttttaccagaggaaaatgaaccatcaaagggccggatccttgtatttgcagttgaagatggcagactgcaattaattgtagagaaagaaactaaaggagctgtctattcgctgaatgcattcaacggaaaattgttggcagctatcaaccagaagattcaactatataagtggatgctacgggaggacggttcacatgagctgcagtctgagtgtgggcatcatgggcacatattggctttgtacactcagactc

SEQ ID NO: 414810 - DNA, 527 bp, Oryza sativa
aaggctcaacctggtgtgtccatatcatcagagaaaccaacacaggtgcatcatcagggagacagtaagctgcttggcgttcacattgccaatacaaaaaacaaaattctccacgcaggaaggtaacaagcaatccaactcaaccgttgacttgtctttgtacttcggtgcagtttttattacaaaaagcaagaataacattcattggtatgcttacagcgccggctgtcactggaaaagaaaaccattatggagtgtccgagcatttcaaaatgccttgagagatttatggcctacaggaagtttctgatgtccaacttcttgacatcaggcatctcctcgtctttgaactcctccctctttagttgaacctccattgcttcaacacattccttcttaagctccgtcagctcacttttggcaatttccaattcaagctcttcctcaatcttgggaagatcctccttgcggattccaagctttttgtttatcttctcaaactctgccaagaggagacccatattctt

SEQ ID NO: 414811 - DNA, 437 bp, Oryza sativa
aagggaggaagagaacttcacttttaaaagagtatcaacttgttttttacatgggttccataatagtccaggtccccaatcaacaggggatgcagggctccatccacaattccatcccaatacaccacccccattaacagcctactccgatcccaaaaaagaggggtaagtcgggtcgacaaacagttttttaattttcctccatgggcagccattgttaacactccaacacctgaagaactcctaatttgggggggaaggcctggaaaatgggggcgtggccggggtcggcgagatgggcaaagaggttgtcaatggggccggggccggtgtactttgcctggaaccaagctcccatgacgggaagcatggcgagccccccgtttttgatctccttggggggcagttccttgaatttctccggggagccggggccc

SEQ ID NO: 414812 - DNA, 522 bp, Oryza sativa
gttttcgtcgcggagcttggaggtttgggtgagatcggagcagcgaagcggaggcagccgcagccatggcgttggccgctcgcctcgtctcccgctcccggcagctatactctgctcaagctgccttggcaaatggaggtgccactcaagtccgcttgtatgccaaggaggcagatcgtactcccgtcaatggtgatgacctattgaagggcatattttttgaggtaaagaagaaatttgagactgcccttggtgtacttaagaaggaaaagatcactattgatccagatgatcctgcagcagtttctcgttatgcccaagtcatgaagactgtaagacaaaaggcagatcttctatccgactctgagaggattaaatataccatcgacacctttacaaagggcatccctgatgcacggacttacttgaatactcttcaggagatcaggataaagagtggccttatagatgatatgggtgctgaggctatgatgatggaagcccttgagaaagttgggaagg

SEQ ID NO: 414813 - DNA, 350 bp, Oryza sativa
gctgataaaagatccaatgttgcatctttaaaaacaaacggcggtttacacgtcaaacgaaacacaatgtaaatagaatccagaatcctgcatttaaaagggttactcagccaagcatgagtaccaaacgacacacactaaatatccacttagaacatagcagcacaccacgactccagcggatagtgattgccatgaaggcatgaaccggccatccatagagatatcactgctttcgttcaaggcttttccttccgttcacggttccactgtttaatcttcgccctgcgttcctcgctgctttccctgactgggctccttgcacgccttggggggctgtcatgcctgcg

SEQ ID NO: 414814 - DNA, 398 bp, Oryza sativa
aaccaaaaatttgaatcgctttattttgtgacggaagattccatccagtacatctcacaagtaccttgttccagaccaaatacatatatattagcataaagcaaaagagggttgcgttttccagcgcacttcaaagtgccagcttcactcgttgctgggttctccgcgctccagcttacaacggaagcaagtgttattcaccggggatcgttatctaatccttattattgcataatatagcgtccatcttgatgagcttcgtcttggtgcatctcgtatttaggagacagggctagcagtaatgccccatatttcctttgcatactgagcgatagtacggtcgctgctgaatttgccacttccagctgtgttcagtatagacatcttgatccattttt

SEQ ID NO: 414815 - DNA, 485 bp, Oryza sativa
ttctgacctatactggaagaagtttgaggatcactaccacttctcatgccagttcacaactgacttgattgcgatgaaccacgctgacttcatcatcaccagtaccttccaagagattgccggaaacaaggacactgttggtcagtatgagtctcacatggcattcaccatgcctggtctgtaccgtgttgtccacggtattgatgtttttgacccgaagtttaacattgtctcgcctggtgcggacatgtccatctacttcccttactctgagtctcgtaagaggctcacctccctccacccagagattgaggagttgctctacagcgaagttgacaacaacgagcacaagtttatgctgaaggacaggaacaagccaatcatcttctccatggctcgtcttgaccgtgtcaagaacttgactggtctggttgagctgtatggtcgcaaccctcgcctgcaagagctggttaacccttgggttg

SEQ ID NO: 414816 - DNA, 449 bp, Oryza sativa
  unsure (1)..(449): unsure at all n locations
ttcgcgccctcctaaaccctacgaccatgccgaccctcgccgccgccgccgtcgccgcccgccgcgccggcggggcactgcgatacgccgtgctgggcggggttcggtcgctctcatccctccagccgtcatcctcctcctccgccgcagccgccgccagcgaggaggtgctggtggaaggcaaggccagcgcgcgcgccgccgtgctcaaccgccccggccatctcaacgcgctcacgaccaccatgggagctaggctcaataagttttatatgtcatgggaggacaaccctgatattggctttgtcatgatgaagggcagcggccgagcattctgtgctggtggggatgttgttaggttgcaccagcttataagtgaaggaaagttggacgagtgtaaggatttcttcacgactntgtacagttttatttatgttctgggcacatac

SEQ ID NO: 414817 - DNA, 368 bp, Oryza sativa
  unsure (1)..(368): unsure at all n locations
atcggtctctccggcctcgccaccgacgcgcagacgctgtaccagcgcctggtgttcaggcacaagctgtatcaactgcgggaggagagggacatgaagccccagaccttcgccagcctcgtctccgctctcctctacgagaagagatttggaccatacttctgccagcctgttatcgctggacttggagaggacaatgagccatttatttgtaccatggactgcattggtgcaaaggaactagctaaggatttcgttgtatcggggacagcatcggagtctctatatggtgcttgtgagtccatgtacaaaccaaacatggaacctgaagaactctttgagactatctcacangctctgcagtcatc

SEQ ID NO: 414818 - DNA, 586 bp, Oryza sativa
tggctggccgccggtcccgccggggaattcctggtgggaccaacccgtccgcctactcgtccgatcaggggacaagcaaccttgatcttcttaccggacttcggaaatttgcagatgatgaaaagcttcatgctgagtgggcatcagctaagttggctagcaaaaaacgcctagccaagcatgtgttggatgtgacaggtgttacaatcgacccaaatagcctttttgatatacaaattaaacgcattcatgagtacaagagacagctgctaaacattttgggagctgtttacagatacaagaagttaaagggaatgagtgcagaggagagacaaaaagttacgccacgcactgtcatgatagggggaaaagcattcgcgacttacaccaatgccaaaagaatagtaaaattggtaaatgatgttggtgctgtggtgaacaatgatcctgatgttaataaatacctaaaggtgggtgttcatttccaactacaatgtatctgtggccgaggtgcttcattctgggagtgaactgtcacagcacatcagtacccgaggcatggaagcagtggaacgagtaatatgaa

SEQ ID NO: 414819 - DNA, 457 bp, Oryza sativa
gaaccccaaggagaagtgagcatttcagtgacaattttttcttggaaacaaggatgctacaatatattattgcagaaacggcaccaaggccgtttctattattcataggtaacatcccagcaacaagaggagacagagcaccaaccacacaccacattccactgaactcacccccaactaaatcaaactagaaaactcccaaattcaatcgaccttactttcttaaggaaaaagagcagtgcctaggaatgcaaagcatcctgaaatatctctcttctcttttcatctctgaaaccagagaatggaaacaaagcaaagaaactccaatgctctcctctttcagagtctcagcctgagatgttggccagctcacttgttcgacggctcgccctcgacggccaacgggacggtgctagccatggtgcggtacttgagggcatacagcatctcaggtagc

SEQ ID NO: 414820 - DNA, 458 bp, Oryza sativa
gatctcacctgcaaattaagccaggtaataaaacttgccgtgaaaattaagctgaaaattagctgatcgatcgatcgccatggacgagctcttctaccagtcgctgctgctgtcggtggcggccgtgacggtgctgcagctgctgaagctgctcctggtgcggcatcgccgtccccggacgccgccggggccgtggcggctgccggtgatcggcagcatgcaccacctggtgaacgtgctcccgcaccgcaagctgcgggagctcgcggcggtgcacggcccgctgatgatgctgcagctcggggagacgccgctggtggtggccacctccaaggagacggcgcgcgcggtgctcaagacccacgacaccaacttcgcgacgcggccccggctgctcgccggcgagatcgtcggctacgagtgggtcgacatactctttttcccctccggcgactact

SEQ ID NO: 414821 - DNA, 247 bp, Oryza sativa
ctccgtatcctcctccagatagcggcggctgcctcgccttctccgacgagctccaccgtcgagtcgccgccccttgccaggacaggatggtggtggccacggaggaaatgggggtctactgcttcgacgccctcgtctcccactacagcggcgaccagccgccgtcgcccgccttcgaggagggcatccacccattgtttgtcacctggaagaaggctaccaatggttcagaaccacgccttcgagg

SEQ ID NO: 414822 - DNA, 370 bp, Oryza sativa
gtgttcaacactacaccgccattgcacacttctcaccattatgattgcgccaatatacaaaatctacattggcaatttagcgcgtggaacatcgatatcaatacaagatggaatgtgaactaacagatccacatacagaaatctcatagtatgaaacaacaaaccattgtaaatatcaaaggtggtacacaagattagggtgagaaaaaaaggggagtcctaaaattacctagtgtcacgcaatggacaccttggcgccgacctcctcgagctgcttattggcatcctcggcctcgtccttgctgacaccctccttgaccttcttggggaggccctcgatgaggtccttggcctccttgagggccaggtt

SEQ ID NO: 414823 - DNA, 509 bp, Oryza sativa
tcgccttgacgccaagggtgactatgatggtgccctggagcaccttgtgcttgcctccatgaccatggtcgccaatggacgtgacattgaggtcgcgacgatcgatgtcgcgataggcaacacctaccttgccctcgcccgcttcgacgaggctgtcttctcctaccagaaggcgttgacagtactcaagtctgcccgtggtgatgaccacccttcggttgcatctgtctttgtccgcctcgcagacctttaccaccgaacagggaggctccgcgagtccaaatcctactgtgagaatgcactccgtgtctatgcaaagcccgcgcctggcgctgcccctgatgaggttgctggaggcctaatggagattgctgccatctatgaggcgcttggagaccttgatgaggcactgaagcttttgcaaagggcactaaagttgcttgaggactcaccaggacagtgtagcactgttgctggcatcgaggcacaaatgggtgtgttgtactaca

SEQ ID NO: 414824 - DNA, 321 bp, Oryza sativa
cattcaacaactcaggttcctgattttttgaatgctaaaattaacgggagaccagtgaaagaagtcattaaagacacaaagtggttagaagatgaattcaccaaaacagttcaaaagcgtggaggagtactcatacaaaaatggggcagatcttcagctgcatcaaccgccgtttccatcgtggatgctattaggttccttgtaaatcctaccccagaaggcgattggttctttactggggtttatacgactggaaatccttatggcatagcagaggacattgtggttagtatgccatgcaagtcaaagggtgatggtgac

SEQ ID NO: 414825 - DNA, 268 bp, Oryza sativa
acaattatgattgtattaatatataaaatttatattgttaatttagtgagtggaaaaaaaatattaatataagatggaatgggaactaaaagagccacatacagaaatttcatagtatgaaagagcaaaccattgtaaatattaaaggtggtacacaagattagggtgagaaaaaaaggggagtcctaaaagtacttagtgttacgcaatggaaacgttgggggcgactttttagaggtggttattgggatagttgggctaggttttg

SEQ ID NO: 414826 - DNA, 368 bp, Oryza sativa
tttcttcctcccgcagctcacctcaactccggaagcgagagctcactccccccatccccatggcttccaccgctctctcctccgccttctccctcctctccctcccctcctcctcctcccccgccgccgccgccccaaggtccttcgccgtccccagccgcgcccgcccacgccgcgccgtcgccgtggtggcgtccaccgccaccgagtcccccaaggtcctggagctcggggacgccatcgcggggctcaccctcgaggaggcgcggggcctcgtggaccacctccaggagcgcctcggcgtctccgccgccgacttcgcgcccgacgccgtcgttgtcgcgcccggcgcgggcggcgcgggcgcc

SEQ ID NO: 414827 - DNA, 469 bp, Oryza sativa
cccacctgggcgtcctgccgtctgaaccaaaacaaggagcaaagcggggatttagaacgggaaggagaaggttcggttcgttcgttctcgagctcaagtgtcagttgaagtgttttgaaagtcatggcggagcatttggcttcaatattggggactgagaaggatagggctaactgccccttttacttcaagattggggcttgccgtcatggggatcgttgctaccgtgtgtacaacaggccaactgtgtcgccgacaattgtgcttgctaacatgtatgagcgccctgatatgatcacaccaggagttgatgcttaaggccaacctattgatcctgaaaagatgcaggagcaccttgaggatttctatgaggatatctatgaggagctgagcaagtttggtgggggtgagacccttaatgtcttggataccttgctgaccacatgaacgcaatgtgtatggcagttta

SEQ ID NO: 414828 - DNA, 502 bp, Oryza sativa
ataagttgggcgcctgccgtgccggaccggaatggccgggccggcccagcccacgcgttcggttacttccatctgattctcctaattgtcatcactagcttctagctagcttaattaattaattagccatggcggaggagaagcaccaccaccacctgttccaccacaagaaggacgacgagccggccaccggagtagactcctacggcgagggcgtctacacgtcggagacggtgaccaccgaggtggtcgccggcggccaggacgagtacgagaggtacaagaaggaggagaagcagcacaagcacaagcagcacctcggcgaggccggcgccctcgccgccggcgccttcgacctgtatgagaagcacgaggcgaagaaggacccggagaacgcgcacaggcacaagatcacggaggagatcgcggtcacggcggtggtcggggccggcggctacgcctttcacgagcaccacgagacgaagaaggaccacacgagcgc

SEQ ID NO: 414829 - DNA, 470 bp, Oryza sativa
agataagctaactttggaaggtgagtcataccacaagagctgcttcaagtgctctcatggaggctgcatcctgaccacctcctcctacgcggcgctcaacggggtgttgtactgcaagatacacttcgggcagctgttcatggagaaagggagctacaatcacatgaagaagaagagcgagtcccaggaggtgttgccggaagtggtgcccgaagagcaaccggcgccgccgtcgccagacgaaaatagagaggacaactaggactacgaaacgagccaaacacatacggtgatacacggatctctggagtttctgtttactaattttgcaacggttgtttattccctcctctttttttgctcgtgatcctccctgtgtgcgagtagtctgtcaagctgtaagtgtacgccttcgtttcataggaggctcatgaaaatggcaggttgacaacaatggcatgcgactgact

SEQ ID NO: 414830 - DNA, 442 bp, Oryza sativa
gtcgcctctcctcctcctccctaacccctacgcttccagaaccttctcgaagctcccgctcccccccccttccgctccaatggcgaaggaaccgatgcgcgtgctcgtcaccggcgccgcaggacaaattggatatgctcttgtccccatgattgctaggggtgtgatgttgggtgctgaccagcctgttattctacacatgcttgacattccaccagctactgaatctcttaatggccttaagatggagctggttgatgctgcatttcctcttttgaagggaattgtcgcaacaactgatgttgtggaggcctgcactggtgtgaatgttgcggttatggttggtgggttccccaggaaggagggaatggaaaggaaggatgttatgtcaaaaaatgtgttcatctacaaatcccaagcttttgctcttgaggcttatgca

SEQ ID NO: 414831 - DNA, 309 bp, Oryza sativa
ctcataaccctcgtagcacttgatcggagaaacagatgttcacaagtagatacagagctaccgaaactggaagaacagaaacccgagggaatggacacaaggaacataactgaagggcaaagtgtttacattattatgattgagcccagcttgcaacaagtactaaaagtttctactgaggatttggtggcctggagttggcagcagaaaccctcgatccccattccagcagctttttgctggtgtcgtccttgtgcgcgaacacctcaatgaagcacaggcagtcctttttccccagcgccattccga

SEQ ID NO: 414832 - DNA, 421 bp, Oryza sativa
cgttcttttaaagatggtgctctgggtcttcggctatggctccctgatctggaaccccggattcgacttcgatgagaagatcctgggcttcgtcaagggctacaaacgcaccttcaatcttgcttgcattgaccatcggggcacgccggagcatcctgcgaggacctgcacacttgagtccgacgaggaagccatatgctgggggattgcatactgtgtcaaaggggggcttaaaaaggagcaagaagcaatgaagtacttggaaagaagagagtgtgagtatgaccagaagatctctgtggatttctacaaggaaggagattctttgaagccagctgtgacaggtgtactagtctttgtatccactcctgatccagtaggcaacaaatactatcttgggcctgctcctttggaggacatg

SEQ ID NO: 414833 - DNA, 396 bp, Oryza sativa
ggtttattgaacggtggaacgcgtacttacccacaagttaggtgcatgccatggcaccattcatggcgtgcgcctcgccaccggtactcacgctggccctgctcgcgtcgtgcggtgcccttctcgccacctccatgctcccggcgcgtgcgacggcgggcagctgcttggacgtcggcgacatggtgatgatggacaggttccgcgcttggcagggagctcacaaccgatcgtacccgagcgcagaagaggcgctgcagcggttcgatgtgtaccgccgcaacgcggagttcatcgacgccgtcaacctgcgcggcgaccttacttaccagctcgccgagaacgagtttcgagaccttaccgaggagggagttctggccacgtacaccgggtact

SEQ ID NO: 414834 - DNA, 389 bp, Oryza sativa
atcgtgattccatcagccgtgaatatgaggttgaatggatgcaggtgcggtacaggcatggaacatacagcaaaggaagtttcaacataaaagtcaccctccacagcttaacaatacacccaccatccctccagctattcgggctcctcttggcagaacactggacacaatggcctcctcaagattcaacatttgattgtagtacggcacaccgcacactaccttgtcaggggagcccattttcagctttgcaagaagatgattaggttctaaaaccttaaggtgagaaatgttatttgccctttggcatacacaggtatgagcagacaagtgtaaatgtcgtcataccacactttgtcctatggtccagtgcaaaacaatgaattaaa

SEQ ID NO: 414835 - DNA, 489 bp, Oryza sativa
tttctttctcctcccatcaccgaggagagagagagagagagagagtagtgagagaggaagacgagagagccgtctccgcggccattgccgccgccgcagcagcggggccactaccccgactgccccctaccctcctcccatggccgagatgccaggtgggcccgaccttgccggggccggtggcgccgtcgccgtcgccgtcgacgcgatgcaggtcgacgacccgccgcgtgcgtccgccgaggagaagcatggtcccactataatgggaggaaatgatccagtcacaggtcatataattccaactactattggagggaagaacgatgagcccaaaaggactattagctatatggctgaacgagttgttggaactggatcctttggtggtgtattccaggcaaaatgccttgagactggggaaaccggtggcattaagaaggtcttacaggacaaacgataccagaacagagaggtacagataatgcg

SEQ ID NO: 414836 - DNA, 359 bp, Oryza sativa
gttgctgcttgttccccggggaggtttatcggatcttgatggagacccatatcggatccgtggacggggcggcggcggccgcggacaacggcgcggtggggtgcccggcgttagcggtggtgtgcccgatgacctcggcgcgccccgcgcccgtgtcggacggtgaggcgttgatgggacggcacctgcctaggcggctggtgcaggtggtcgtcagagacgtgttctccgtgcccggggacttcaacctcacgctgctcgaccacctgatcgccgagcccgggctgcgccttgttggatgctgtaacgagctgaacgtcgggtacgcggccgacggctacgcccgtgcgcgcggtgtc

SEQ ID NO: 414837 - DNA, 480 bp, Oryza sativa
ctggacctctcaataagcatggagaaccaggaaagaagtcatctggtccccagtcaggcggagtgaccccaatggcacgtcagaattctggtccttttacctcctgttcttcctacaactgggctgatcacatcagggcctatctcctctggacctctgaattcatctggtgctccacgaaaagtatcaggccctcttgatcctagtgtatcaatgaagatgcgtgcaacttcttttgctcacaacccagctgttacaaacctgaatgccgatgatggttactctattaagggcagcattcctaagacaatactctggatggttattctgctctttttgatggggttcatagcaggtggtttcattcttggagctgttcataaccctattctgctggtagttgtggtggtcatattttgctttgttgctgctctagtgatttggaacatttgctggggaacgagaggtgtgactgggttc

SEQ ID NO: 414838 - DNA, 357 bp, Oryza sativa
gggaaaggggaaacgtctcggtggcaaacacttacggtatagtaggggagttgggtgtacagggatatagtcatatttgggcgttttttcatgccggtcgttgacttcgttcacagggtcagggtcgggtaggcgaaatcgagggtgacgccacacaggccggggccaccgacgtcggggagaatccggatgtagccgggctcgccccatgactgggcccatgagttcttgatggtccaggacttggcgccggaagaaccgtcggggccgtacccgacgaccgtgacggcgtgcgctaggcgcgtgccgcacgggcccgtgtaaacgccacccttggagaactggattccactaccg

SEQ ID NO: 414839 - DNA, 405 bp, Oryza sativa
gccgcggcggaattgccgggaccaaccccgccggtgcttatgtagagcaggggatctctttcgctcggaccatctctgcatttgcatttgcagctgctcggcacggcaatggcatccaccaacagctggacccacgagatcgagtcgccgggggccgctccgcgcctgatgcgtgccgccgtgatggactggcacacccttgtcgacaagagcgccttcgacatcgtcgccagcgcccaccccgtcgacggcgactgcagcgtcggcagcgtcaggcagttcaacttcacctcagccatgccattcagccacatgaaggagaggctggagttcctggacgtggacaagtgcgagtgcaagtcgacgctggtggagggcggcggtatcggcaaggcgatcgagacg

SEQ ID NO: 414840 - DNA, 439 bp, Oryza sativa
gacccacgacgttttaataaaaaaaggaaaaaaaaacaaaacacaggaagccaaataaaagcgacaatgggatcgctcaccaccaacatcgtcctcgccgtcgccgtggtggcagggctggtcggaggagggtcgtgcggtccgcccaaggggccacccggcccgaacatcacgaccaactacaacgccccgtggctccccgccagggccacctggtacggccagccctacggctccggctccaccgacaatggtggcgcgtgcgggatcaagaacgtcaacctgcctccctacaacggcatgatctcctgcggcaacgtcccaatcttcaaggacggcaggggatgcggatcatgctacgaggtgaagtgtgagcagccggcggcgtgctcgaagcagccggtgacggtggttattacggacatgaactacgagccca

SEQ ID NO: 414841 - DNA, 472 bp, Oryza sativa
  unsure (1)..(472): unsure at all n locations
ctgncgncatgcaactcaacttccacacgcttttgttgtgctcctgatgttagtgccacaaactttctggattttaagggtcatttctggttcgtcctggtgatgctgctgatgtggacctccgttgcctacatgtactggaaaataaagatgagagttgatgaagtagagaagtttctgcaattgcaacaaatgctgaccccaacgagatactcctacaccgacattattgccatcacaagtcatttcagagacaagcttggccaaggaggatatggctccgtctacaaaggtgtgctactccctggtgatgtccgagttgccattaagatgctgaagggtgacgcaaattgcaaaggggaagagttcatcagcgaggtctccaccattggtaggatccaccatgtcaatgtggtgcgactcgaggggttctgctctgaagaaatgagaagagcgcttgtgtacgagtata

SEQ ID NO: 414842 - DNA, 339 bp, Oryza sativa
gacccacgcgtttgatttgagcagcgacgcctctcctcctccggcctaacccctacgctttcagaaccttctcgaagctcccgctcccccccccttccgctccaatggcgaaggaaccgatgcgcgtgctcgtcaccggcgccgcaggacaaattggatatgctcttgtccccatgattgctaggggtgtgatgttgggtgctgaccagcctgttattctacacatgcttgacattccaccagctactgaatctcttaatggccttaagatggagctggttgatgctgcatttcctcttttgaagggaattgtcgcaacaaccgatgttgtggaggcct

SEQ ID NO: 414843 - DNA, 212 bp, Oryza sativa
ggaaagggaaaattcatccgaattatcaacaatgggagaccagctttaagtaatacagttcccaaaaaggtttccataggacatactaaaaaacaaattgaagacataggaagggggcgggggcattacgaggcggaaatgcggggataatgtatgacgggaacaccaagcacacaaaaccctgccctataaccaccaagcaaaagccacct

SEQ ID NO: 414844 - DNA, 555 bp, Oryza sativa
  unsure (1)..(555): unsure at all n locations
aaccccgccggttctttacaattttgcaaagatgagagagatcctggacattcaaggtgggcattgtggtaaacaggatcggggccaaattctgggaggtggtggtggataagcatggctattgactctaccgggcggtacacaggcaactcagatctgcagttggagcgtgtcaatgtgtactacaatgaggcctcctgcggtcgctttgtgcctcgtgctgttctcatggaccttgagcctggtactatggacagtgtccgcactggaccctatggccagatcttccgccctgacaactttgtgttcgggcaatctggtgctggtaacaactgggccaagggacactacactgagggtgccgagctaattgattctgttttagatgttgtgaggaaggaggctgagaactgtgactgcctgcaaggattccaagtatgccactctcttggtggtggtactggatctggtatgggtacacttttgatttaaagattanggaggagtactcttgaccgcagatgcttgacattttaggttttccctcaccaaagt

SEQ ID NO: 414845 - DNA, 563 bp, Oryza sativa
gggctgctggcgtgccggaccggaccggccgggccggcccacgcgacccgtgcctttaagcatagcgttcgagcacttctgcctccacgccggtggccggccacagagcgaccagttggagaagaaccttcagctgcagccggtccacgtcgaggcctgtcgcatgacgctccaccggttcggcaacacgtcgagcagctccatatggtacgagctcgtctacatggaggccaagggccgggtccgccgaggccaccgcatctggcagatcgcgttcggcagcgggttcaagtgcaacagcgccgtctggcacgctctccgcaacgtcaagccgtcgccggagagcccctgggaggattgcattgaccgctacccggtggagctcgtcgacggctttgccacccacaacaacacgcagcaataacaccatccatccatccatccatccttcttctccattggtgcaacaaacacaaacgtttatcatcatggatcaaaccaaaaatcctcaaaagattggttagtgagaatgacataatggcacttgcttttataggacatga

SEQ ID NO: 414846 - DNA, 381 bp, Oryza sativa
gggtgaaattggagcaatgttcggagcacccgccctccgaatcaccaggcaaaaaaaagggagctagtacaaagcctcaatacacactggagtaaaaccagcaacggcatctgcgctccacatctcgcgatgtgcagcggtctgagataaacagtttctatgtgatggaacttaaaagtctcttttattcaaaaacacgggagcgggcaatcgctcactatctgtccctctgggtattgcttagttttagttgaggcatgagtaagcgagcgttttctcctccgacagctcctgggcagtcgcgtccatcttcttccttgagaacttgtcaatcgggagaccctgaacaatcgtccattcgccaccactgcatgttactgg

SEQ ID NO: 414847 - DNA, 441 bp, Oryza sativa
acagtgaatagttacagttgctccaaaataacacagttacaatttggaaacaaaattacatagagagagagagagagaataaacaggatgacgatcgaattaagttacatgtatatatatttctactgaaattttatcaagcaccgaggagctgaagatcgatgagctagtgataatactagtagtggatgtcgttgacgagggcgcagtgcttcctgatctcgccctcggagccggtcttgacgccgaccatgcccagcttcgccatggacctcgcgaacacctggaagaacacctccggcgggctggacaccacgctggcgatgttggcctccgcggcggcgtcggtgacgagggcggcgtcggactggaagagaccgcggcgcctgaggaggccgcggtagtagcccaggtcgaaggtgaggaagctgcccgggtcca

SEQ ID NO: 414848 - DNA, 479 bp, Oryza sativa
  unsure (1)..(479): unsure at all n locations
ctttgagcttagctatggcaatggccgcgccgctgacgttggtggtggtggcggcggcggtggccgtcgtcttcgtcggcggcggcgtggaggggtgggtgctcaaggaggggttctacgagcagagctgcccgcgcgcggaggcgctggtgaagcactacgtggagcagcacgtccccctcgccccctccgtcgccgccaccctcatccgcacccacttccacgactgcttcgtcagggggtgcgacgcgtcggtgttgctgaacgggacggacggggcggaggcggagaaggacgcggcgccgaacctgacgctgcgggggttcgccttcatcgaccgcatcaagagcgtggtcgagagcgagtgccccggcgtcgtctcctgcgccgacatcctcgcgctcgccacccgcgacgccatctacgtcatcggcgggcccgtctggcgggtggcgacggngcggcgcgacgggagggtg

SEQ ID NO: 414849 - DNA, 429 bp, Oryza sativa
tcgcgatctatccaccgcctgcatgcataacgaggagggtcagatggcggacctctacgtccccaggaagtgctcggccacgaacaggatcatcaccgccaaggaccacgcctcggtccagatcaacattgggcatgtggatgagaatgggctgtacgatggccgcttcaccacctttgctctctctgggttcatccgtgctcagggagatgctgacagtgctctggataggctgtggcagaagaggaaggctgaggtcaagcagcagtagatcttgctactagttttacctggaagaactcgtttcaatttcatgtctctctagctacttcatgcaatgcctgtgttatcagttcgtactccgaaaaaattcgtgtgacttgatcggtttatcctgataatgttttatccatgttgaagctttattac

SEQ ID NO: 414850 - DNA, 432 bp, Oryza sativa
gtaataaagcttcaacatggataaaacattatcaggataaaccgatcaagtcacacgaattttttcggagtacgaactgataacacaggcattgcatgaagtagctagagagacatgaaattgaaacgagttctttcaggtaaaactagtagcaagatctactgctgcttgacctcagccttcctcttctgccacagcctatccagagcactgtcagcatctccctgagcacggatgaacccagagagagcaaaggtggtgaagcggccatcgtacagcccattctcatccacatgcccaatgttgatctggaccgaggcgtggtccttggcggtgatgatcctgttcgtggacgagcacttcctggggacgtagaggtccaccatctgaccctccttgttctgcatggtggcggtggatagatcgcgagcg

SEQ ID NO: 414851 - DNA, 354 bp, Oryza sativa
acgggttttcagccccactcacgccgagccgacaacaagcgacgatgggatcgctcaccaccaacatagtgctcgacgtcgacgtgggggcagtgctggacggcggaggatcgtgcggaccgtccaaggtgccacccggcccgaacattacgaccaactacaacgccccgtggctccccgccagggccaccatgtacggccagttctacggcttcggctccaccgacaatggtggcgcgtgcgggatcaagaacgttaacctgcctccctacaacggcatgatctcctgcgggaacgtcccaatcttcaaggacggcaggggatgcggatcatgctacgaggtgaagtgtgagc

SEQ ID NO: 414852 - DNA, 388 bp, Oryza sativa
gtggaacgaataaaatcattattgcaaccccatcatcttcttcttcatcttcttagtgtacacaacaccaactcgatcatcatctcgtcgcactaaacccatcttccccaacccaaagacaacgaactcgctggccacaaatccatccaaccacaattaaccactgctaagctacggtcccccacttcacttgccggggacgaagttggtggcgtacgcccaggcgttgttgttgacggggtcggcgaggtggtcggcgaggttctcgagggggcccttgccggtgacgatggcctggacgaagaagccgaacatggagaacatggcgaggcggccgttcttgatctccttcaccttgagctccgcgaacgcctcggggtcatcggcg

SEQ ID NO: 414853 - DNA, 354 bp, Oryza sativa
gccatatttctcagctctcacaggtcactgcatcaatggccgcggccaccatggcgctctcctccccggtgatggcccgcgcggcgccgtcgacctcctccgcgctcttcggcgaggcgcggatcaccatgcgcaagaccgtcgcgaagcccaagccggcggcgtcgtcggggagcccgtggtacggcgccgaccgcgttctctacctcgggccgctctccggggaggcgccgagctacctcaccggcgagtttccgggcgactacgggtgggacaccggggggcttttcgtcgacccggagacgtttcgcaagaacccggagctggaggtgatcccactccggtgggcgatgc

SEQ ID NO: 414854 - DNA, 433 bp, Oryza sativa
agtgcttaactaagttccaatgtttcccctccagcacagatgacaattgattccaatacacaatgcgccaatcgcataggacttcaataaacctaccaaatatagctataagtctgcagcaactacagatagaaatagaatagcaaatatgcttctccctttagagataatgcgggcatggaaactacatctactgaccacccctcagagcaagcacgagatggagcactgagccaccttcaatgttgtaatccttggcagttttatcatcagcaagttgcttcccagcataaatgagcctctgctgaacaggtggaataccctctttctcctcaacacgctccttgattctatcaatggtatcagtgggctcaatgtcgatctcgatttccttcccagtgagtgtcttcaccttgatcatggttccacccct

SEQ ID NO: 414855 - DNA, 449 bp, Oryza sativa
ctaaagaatttaatgctgattttcggagggaatcaactggaagatggacgtacattagctgattacaacattcagaaagagttaactttccatttggttctgaggctcaggggtggaaccatgatcaaggtgaagacactcactggtaaggaaatcgagatcgacattgagcccactgataccattgatagaatcaaggagcgtgttgaggagaaagagggtattccacctgttcagcagaggctcatttatgctgggaagcaacttgctgatgataaaactgccaaggattacaacattgaaggtggctcagtgctccatctcgtgcttgctctgaggggtggtcagtagatgtagtttccatgcccgcattatctctaaagggagaagcataattgctattctagttctatctgtagatgctgcaaacttatagctatatttggtag

SEQ ID NO: 414856 - DNA, 484 bp, Oryza sativa
gttgttgtgagaattcttaattcatgagttgtagggagggacgtatgtcaccacaaacagaaactaaagcaagtgttggatttaaagctggtgttaaggattataaattgacttactacaccccggagtacgaaaccaaggacactgatatcttggcagcattccgagtaactcctcagccgggggttccgcccgaagaagcaggggctgcagtagctgccgaatcttctactggtacatggacaactgtttggactgatggacttaccagtcttgatcgttacaaaggccgatgctatcacatcgagcccgttgttggggaggataatcaatatatcgcttatgtagcttatccattagacctatttgaagagggttctgttactaacatgtttacttccattgtgggtaacgtattttgttttcaaagccctacgcgctctacgtctggaggatctgcgaattccccctacttattcaaaaa

SEQ ID NO: 414857 - DNA, 361 bp, Oryza sativa
cccgattcggcaacgattctcgagtcagttggttgcgaaatcgacaatgcaaagatggaactcctgttgtctcaagtgagtggcaaggacatcactgagctcatcgcttgtggcagggagaagtttgcttcagttccatctggtggtggtggtgtagctgatgctgctgctgctcctgctgccggtggtgctggtggtgctcctgcagctgaggcgaagaaagaagataaggtcgaagagaaggaagaaagtgatgatgacatgggcttcagtttgtttgactgactgatgcggccacctcttctatcatcaataccagactttgcgcaggaaactagagtgatgatgtttggcaatttag

SEQ ID NO: 414858 - DNA, 357 bp, Oryza sativa
gccatctttctcagctctcacagctcactgcatcaatggccgcggccaccatggcgctctcctccccggtgatggcccgcgcggcgccgtcgacctcctccgcgctcttcggcgaggcgcggatcaccatgcgcaagaccgtcgcgaagcccaagccggcggcgtggtcggggagcccgtggtacggcgccgaccgcgtgctctacctcggaccgctctccggggagccgccgagctacctaaccggcgagtctccggtcgactacaggttggacagacgggggctttccttcacccacagatacgggagcaggaacccagcgaagttgacaacaacgagcacaagtttatgctgaa

SEQ ID NO: 414859 - DNA, 425 bp, Oryza sativa
ggtaaccaaaacataggagggttcattccttcttctcaaagtagtgtagcatctttccttctttcaccattacataagcttaagcaataacagataacaaatcctcctcctcctctaggtaaaatattcaaacacaatacccttataagtacttattattaggaaagtagcgtgcatgggcataaatggcagcggggggcaggttaagaatcacaatgctgagcagcgaggaaacaaaacaccataatgggacagagcaaaagcctccgaaagggagcttttaggcagaaggcttctcccacttgaggggcttcaccacctcccaggtgaagtctgggtcgtcccttccgaagtgaccgtaagccgccgtcttgagggagcgtccgttgccgcctttcttgaggtcaaggttgatgatgaacatg

SEQ ID NO: 414860 - DNA, 528 bp, Oryza sativa
acccgtttgtttccctgaggcgattggggctgattactcagaggcacagtaactggatatacggccgatcagaccctggtgacgacgctcataaagtgtgaacttgctaccaagctcggcggttgacttagcggaggcctatgatcgaatggggaccacgactcatgtggtgaaggccatgacgaggaacgaccacatgagactagctgagtccatgcaatagagagcaagggaccagggttcagtgagacaggtccacaccgcacctgtttctacccagcatgatgaggcagtcaccaacgatgagattgctgctgacctgaaggagcatgtcatcaagcctgtcattcccgagcagtaccttgatgagaagacaatcttccatcttaacccatctggtcgcttcgtcattggcggacctcatggtgatgctggtctcactggccggaagatcatcattgacacttatggtggctggggagctcacggtggtggtgccttctctggcaaggacccaaccaaggttga

SEQ ID NO: 414861 - DNA, 483 bp, Oryza sativa
actaagaccttttttttatctaattttatccacttaggctagctatctagtttatctaccggctcgaactcgaatttgatcgctttccatatttcacaagctggggtttgttcaggactccatttgcaagctgatcggataatttcattaccttcacgagcaagatcgcgccctttgttacgagcttgtacacaggcttttaaagccacccgattagctgctgcaccaggggcattaccccaagggtgtcctaaagttcctccaccaaattgcaatacagaatcatttccaaagatttcggtcagagctggcatatgccaaacatgaataccccctgaagccaccggtataacacctggcatggatacccagtcctgagggaaaaagataccgggagcacgaactttttaaataaaatcattgggcaataaatcaacaaaacctaaaggcatttcgcggtccccttttaacttacctactact

SEQ ID NO: 414862 - DNA, 566 bp, Oryza sativa
  unsure (1)..(566): unsure at all n locations
attccgggggggacccacccgtccggttatgtttgttaaagcaaaacgcttgcaacaggacgattttgagattgtgccagcagaaccagtccgaactgaagatgactcatcttcatcttctgatgagtctgatgaactagatgaggacctcgacgatgacacaaaagctgaagtactagcctatgcaaggaagatgttgaggaagaaacagagagagcagatacttgacgacgcttacaacaagtacatgtttgacgacgagggtttacctaaatggtttgctgaggatgaaaagaggcataaccagcctatgaagcctgtaacaaaagaggaggtagctgccatgagggctcagttcaaggagatcgatgctcggccagccaagaaggtcgctgaggctaaggctcggaagaagcgcgtcgccatgaagaagctggataaggcgcgccagaaggcagatgccatcgcagatcaaaacgacataaacgagcagtcaaagaggaagatgatcgacaggatttacangtaggcgattccaaagaagcctcagaaggagtcgttgtcgc

SEQ ID NO: 414863 - DNA, 438 bp, Oryza sativa
gttttgtgttgttgcccaactgcacccataatatgtgccttagatgctaccaggactggaattcaagatcacagtcttgtccattctgccgtgacaacttgaagaagactgaccctggtgacttatggatctatgttgaggaccaagatgtggttgacttggagacagtgtcaagagagaacctcagaaggctgttcatgtacataaacaagctgcctctgattgttccggatgtcatcttcagtatttatgattcccacataaaatgactcgcaacgctgctttgtcgacggcctttagccaatgctttgttctgattaagctatgcccccaagttctccatttccatgcttagactcaagctcttggaaatgcctgaaccgttgtggagacacaaaccttctggtcgtgttgagaacttatttagtggttacatgc

SEQ ID NO: 414864 - DNA, 434 bp, Oryza sativa
  unsure (1)..(434): unsure at all n locations
cactgaaaattatacagngactgagtactcgattacacgattgagttgttcagggttcagataggaaaaacatcttggggactagagatagagggaatcgacagatgcgcagcagtagcgcgcgggaaacaggacatcacgattgcgttgcatgtcgtcggctgcgcagcggcggcgcggggcttaagacctgctcttgaatgggatcgccctgatgatcacctggtggtagatggcagccagggcagcgccaacgaagggaccaacccagaagatccaatggtcattccaggcatggtccttgttgtagatgatggcagcgccaaggctcctggctgggttgatgccagtaccggtgatggggatggtggccaggtggaccaggaacaccgcaaaaccaattggcagtggggcaaggataggaacatgtgagt

SEQ ID NO: 414865 - DNA, 474 bp, Oryza sativa
  unsure (1)..(474): unsure at all n locations
gtgcggctgggggcgaacaggtactcggagaggcagccgatagggacggcggcgcagggcgccggggacgacaaggactacaaggagccgccgccggcgccgctgttcgagccaggggagctcaagtcgtggtctttctaccgggccgggatcgccgagttcgtctccaccttcctcttgctctacatcaccatactcaccgtcatgggggtctacaagtcctcctccaagtgcgccaccgtcggcatccagggcatcgcctggtccttcggaggcatgatcttagcgctcgtctactgcaccgtcggcatctncggaggacacatcaacccagcagttacttttgggctgttcttggccaggaagctgttcctgacccgggccatcttctacatagtgatgcaatgcctaggggccatctgcggagctggagttgtgaagggctttcagcagggtctgtacatgggcaaaggc

SEQ ID NO: 414866 - DNA, 543 bp, Oryza sativa
cttgcgattcctctcccctcgcctcctcgtcctccccctcccaggggatcgccggagaggaattgcgcggaggaaaaaaaaagaaaagggcttccccgtcgtctaagttaaaaggaagccatggagcacaaggagactggatgccagcagccagaaggcccgatcctttgcatcaataactgcggcttctttggcagtgcggctaccatgaacatgtgctcaaagtgccacaaggagatgataatgaagcaggagcaggccaagctggcagcctcctctatcgacagcattgtcaatggtggtgattccgggaaggaaccaattattgctggtcacgctgaagtagctgttgctcaagtcgaggtgaagacgcttgttgcgcagcctgctgagattgctggtcctagtgagggggtcacggtgaacccctaggtgagggaaggaccaaatcggtgctccacttgtcggatgagggttggtcttaccggattcactgccgatgtgcaacttgactgcgcacgcaccgctttccgatagctgact

SEQ ID NO: 414867 - DNA, 357 bp, Oryza sativa
cggctgtttctcagtctatagaagccactcctgttggttgatctgaaagttcatttggcacatattgttcacccccaagaccacttccatatgatgatcctacaatgttctctcctcagcgtgcacggttagtgtcaagggatggaccttcatgccattccccagaggaatcagaaccactgagggcaaatgatgacgaggaaatggaaacaccaagttcaacacataagtcaagtaaaacaaactatgacacaaaaatgaaaagaagcagctctactcatggagagaagctgccaacaaaggaacctggaaattatttcacatactattacgcatgcgctcaagatgaagatgtac

SEQ ID NO: 414868 - DNA, 376 bp, Oryza sativa
cgttgactccgctgatgctcccgcacaaggccagcacgaacgttaagatcggcgggtacaacatccccaagggcgccaacgtgatggtggacgtgtgggcgatcgactacgacccaaaggtgtggagcaacccgttggagtacaggccggagcggttcatcgaggagaacatcgacatcaagggcagcgacttcagggtgctccccttcggcgccggccgccgcgtgtgccccggcgcccagctcggcatcaacctcgtcgcctccatgatcgggcacctccttcaccagttcgagtggtctcttcccgagggcaccaggccggaggacgtcaacatgatggagtccaacggcgttgtcacgttcatgagcacgtt

SEQ ID NO: 414869 - DNA, 475 bp, Oryza sativa
tcgggtcaagcacgaggaagtagcatttattgaagagattgccaggacagcgccaatcaagtacttacaccggtatttagtgctcaagggagtcgcgtctcaagactatgaggacttcaagagaatgctgacatcgctatggttcgatttgtatggaagaggtggcagttctagcagctcttctgcatttgagcatgtgttcgttggtgagatcaagggacgacgaggacagggagagaatgaggtctcaggattccataattggattcagttttacctggaagaagccaatgggaatgtggattaccaaggttacatattcccaaggaggcgtggggaatcgcctgattcagagacacagctattgactattcagtttgagtggcacggtgttctgaaattggtatccagcactctgattgctgtcagccctgagtttgaggttgcactctacacgctttgcttctttatggga

SEQ ID NO: 414870 - DNA, 458 bp, Oryza sativa
gagtgatgaagagaacttcacttctaaaagagtatcaacttgttttttacatcggttacatcatagtacaagtacacaatcaacaaggcatgcagtgctccatccacaattacatcccaatacaccaccaccattcacagcctactccgatcccaaaaaagagaggtaagtcgcgtcgacgaacagtcttttcatcttcctccattggcagccattgctaacactccaacacctgaagaactcctcatttgggggtgaaggcctggaagatggtggcgtggccggggtcggcgagatgggcgaagaggttgtcgatggggccggtgccggtgtactctgcctggaaccaagctcccatgacggcgagcatggcgagccgcccgttcttgatctccttggtgcgcagctccttgatcttctccggcgagccggtgccccagccgagcgggtcaaaccac

SEQ ID NO: 414871 - DNA, 438 bp, Oryza sativa
tcgtattacacgacgcaccaatggcgctcgtgtccgcctcctcctccaccaccgccgtcgcggcgctccccggcgccgccagggcctcctccttcctcggcggcgccggcaggagcggcaggctgctgctgaggcaggccgagtcgtcgtccgcgcgggcgtcgttcgccgtgcgcgccgcggcgcccgacaggccaatctggttccccggcagcaccccgccgccgtggctcgacggcagcctccccggcgacttcggcttcgaccccctgggtctcggatcggacccggagagtttgcggtggaacgtgcaggcggagctggtgcactgccggggggcgatgctgggcgcggggggcatcttcatcccggagttcctgaccaagatcggcattcttaacacgccgtcgtggtacaccgtcggggaggcagaatact

SEQ ID NO: 414872 - DNA, 545 bp, Oryza sativa
cggtgccagacaaaggagagaagcgcgaaggcggcggcggcggcggcgcatggcgaagatgtcggagaagaagcgcggcgccggcacccgcaaggacgaggtggtgacccgcgagtacaccatcaacctccacaagcgtctccacggatgcaccttcaagaagaaggcgccgaatgccatcaaggagatcaggaagtttgcacagaaggccatgggcacaacggatatacgcatcgacgtgaagcttaacaaggccatctggaccaatggtatccggagtgtcccaaggcgagtccgtgttagaatctctcgcaagagaaacgatgaggaggacgccaaggaggagctctactctctggtcacagttgctgagatccctgcagagggtctcaagggtttgggaaccaaggttgttgaggatgaggagtaaacttttcattgttatctgtcagttagcgcttagtgcatatttccatgattccagtcactatgctgagagcaaatttggaagtctgctttaagcgttttgtatctactgttgatga

SEQ ID NO: 414873 - DNA, 345 bp, Oryza sativa
cgatagctagcaacaagcagttcaaacaccataaccaaagcgaactcaattcatggtaacatcacggacgaagaacacctaacactggatggatggatagagggcttctcgactcgagagagccactggacacgataacgactcgactcgatgataagatgattctgacacggatagctaaggataactggccacgatgggccccaccaatcagttcctccagttcccgccggagtcgccgtcgtagccgccgccacggctgccaccgtagacgacgccgccgccgacacggtcgtcgtcgtagccgccgccgccaccgtagccgccctcacggcgcccgtagtc

SEQ ID NO: 414874 - DNA, 410 bp, Oryza sativa
  unsure (1)..(410): unsure at all n locations
tcggttcaccgagacccacccctgcgacgccgccgcacaactcgagcggagcagtgcaggcgaaaccctactcgaagcccgcggcgagccaccgccacctccagatccgaccacaccgcgccgtcgcagcgatggtgtacttcgattcgtgggacgagttcgtcagcaagtccgtcgagctcttccgcaaccaccccgacaccacccgctacgttgtcaagtaccggcactgcgaagggaagctcgtgctcaaggtcaccgacaaccacgagtgcttgaagtttaagacagatcaagctcaggatgcaaagaagatggaaaaactgaacaccattttttttactctcatgacccatggacctgatgctgatataagtgatgtttcggngaaggaacaggcagaacaacag

SEQ ID NO: 414875 - DNA, 355 bp, Oryza sativa
  unsure (1)..(355): unsure at all n locations
aaggatggaattgagtagcaatactttcaccccaaaatacagtttagcgacaatatcttagaaaagccgcttgctttgccgccatggctggcaagctgagcagagcagctaacacaaagaacacgagatcactataaaccaaacggcaacgaacgaagaaaatacagggtncttttttgtctgaagatacacgaagcggttcgttttcttttatttttagtctcctctcctcctcgatgatgggtgtatggcaatggccaatggcgatgggatcttggcttagttgatgggaaggggcttgccgttccactccctgaggcaagtcgagcatggggtccgaagagcctgccctggc

SEQ ID NO: 414876 - DNA, 346 bp, Oryza sativa
aatctcgaggccatcaccaagctgctcaacgcgggcgttacgccgtgcctgccgctccgtggcaccatcaccgcgtccggtgacctggttcccctgtcctacattgccggcctcatcaccggccgccccaactcgcaggccatctcgcccgacggcaggaaggtggacgccgccgaggcgttcaagctcgccggcatcgagggtggcttcttcacgctgaaccccaaggaaggtctcgccatcgtcaatggcacgtccgtggggtcggcgctcgcggccaccgtgatgttcgacgccaacatcctcgtcgtcctgtgcgaggtgctctcggcggtgttctgcgagg

SEQ ID NO: 414877 - DNA, 243 bp, Oryza sativa
  unsure (1)..(243): unsure at all n locations
gaagggcaaataacancancggggganacgcccancaccncacgagaacagaggaagaaacaaaagctaaaaannaaaaccatcaacagcccgancgagnnngcaatactagatacacacattgcagcccttcccttccctccctccatgtatcgatatatcaacccggcccacgcacaaaacattttgtttcaattccctactcgagctgccgccgtaccacaacccccttggaaccttgac

SEQ ID NO: 414878 - DNA, 482 bp, Oryza sativa
ttcggacatggcagcatcgctccaagccgcgggcaccctgatgcagccggccaagctcggcggccgggcctcctccgccgcgctgccatcgcgcccgtcttcgcacgtcgccagggcgttcggcgtcgacaccggtgccgccggcaggatcacgtgctccctgcagtccgacatccgggaggtcgccaacaagtgcgccgatgccgccaagctcgccggcttcgccctcgccacctcagctctgctcgtctcgggcgccagcgcggagggcgtgccgaggaggcttaccttcgacgagattcagagtaagacgtacatggaggtgaagggaaccggcacggcgaaccagtgcccgacggtggagggcggcgtcgactccttcgccttcaaggccggcaagtacaacatgaagaagttctgcctggagccgacctccttcaccggtaaggcggagggcgtggccaagaacgcgccacccgagt

SEQ ID NO: 414879 - DNA, 425 bp, Oryza sativa
tttaaaaagtcctgcagagcctaatccagtggcttcaaaaggtttcaccttcagtgaggtaaattgttggcgaacaaacaatagcaaagtagtttgctgccatttttcatcagatggcaagatactggctagtgctggacatgaaaagaaggctgtactttggaacatggagactttccagacacagtatactgctgaagagcatgctgtcattatcactgatgtccgtttcagacctaactctaatcagctggcaacatcatctttcgatagaactattaaactgtggaatgctgcagatcctggcttctccctgcatacatttgctggtcattgctctggaatcacatcactagattttcatccaaagaagacggaccttttgtgctcttgtgatagcaaatggtgaaatccggtactggaat

SEQ ID NO: 414880 - DNA, 415 bp, Oryza sativa
  unsure (1)..(415): unsure at all n locations
tataacaatggcattttgtttacagaatcaggcctaaagggttcccacttcatagaattgtgtgcccagcgcaatattcctttgatattccttcaaaatattactggattcatggttgggtcaaaatctgaagcaagtggaattgcaaaagcgggagcaaaaatggttatggcagtttcctgttccaaggtaccgaaaattaccataattgttggtggaagttttggtgctggaaactatggaatgtgtggacgtgcatacagtccaaattttttgtttatgtggccaactgctaggatatctgtcatgggtggcatccaggcagccggtgtccttgctcaaatagagaagaacaacagaaaaagacaaggagtgnagtggaccaaagatgaggaagaagccttcaaagcaaaag

SEQ ID NO: 414881 - DNA, 385 bp, Oryza sativa
tccccctcgacacgccgtcgccgccgaggggagagagagagaggccgccggccgccgctaccactgacccccccccctcgccggagcgccccgtcgccgggtttgatcgatggcgtccaagaggatcctgaaggagttgaaggacctgcagaaggaccctcccacctcatgcagcgcaggtcctgtgggtgaggacatgttccattggcaagctactattatgggaccctcagacagcccatttgctggtggggtattcttggtgaacattcatttcccaccggattatccttttaaaccaccgaaggtctctttccgcaccaaggttttccacccgaacattaatagcaatggcagcatttgcctcgacatcctcaggaacagt

SEQ ID NO: 414882 - DNA, 386 bp, Oryza sativa
aaggcgaataaattgttttgaatttcgacgaaacacctgatagtaggtttgatacagtttttgcactacgctgttactgcacatgggagcagaacatattctcgtagagatatacaaacatcacacagaggaagcagcagcaagcactctagagagtcagcccccaaaacttccccggacaaatgcagctgcttaattactccgttccagcgatcttcttcttcaaggtctcgatgtcggtcgccaactctttcctgctctccttgaagaggaggtagcggtagacgaaccagccggtgtagccgaggccgacgagctccaggatcttggggagcagcggcacggagttgatggcgccgacgacgacggtggtgagccagagggcg

SEQ ID NO: 414883 - DNA, 462 bp, Oryza sativa
  unsure (1)..(462): unsure at all n locations
tttccctatcgtacctgccaccactcaccgtggaggatcttttgaagcacatcgagtacctgcttcgatccaagtgggtgccttgtctcgagttcagcaaggttgggttcgtctaccgtgagaaccacaggtctcccggatactacgatggcaggtattggaccatgtggaagctgcccatgttcggctgcaccgatgccacccaggtgctcaaggagctcgaggaggccaagaaggcctaccccgatgcctttgtccgtatcatcggcttcgacaacgtcaggcaggtgcagttgattagcttcatcgcctacaagcccccaggttgcgaggagtctggtggcaactaagctaagatcaagcatcgcgctggtggattgctgcctataataatagtatgcagctttgttttgggctatgntgatgatatatcaatataataagctatatatttttattttt

SEQ ID NO: 414884 - DNA, 477 bp, Oryza sativa
ttcgccgccgtcaccttctccccgcacactctgtcggctcccggatccacaccggcccccgccgtcgtccaaaatgaagttcatttctgcctatctccttgccactcttgctggtaaccctaacccatctgcggaggatcttacaactattctggagtcagttggagctgaagttgaccatggcaagatggagttactcttgtctcaactggctggtaaggatatcactgagattattgcttccggtcgggagaagtttgcttctgttccatgtggcggaggtggcgtagctgttgcagcagctgctccggctgctggtggtggagctgctcctcaatctgaggctaagaaagaagagaaggtggaggagaaagaagaatctgatgatgacatgggcttcaggtttgtttgactaggaccattccttggattatacccattttgggtaacttgggaaacgggaacctaaacacgctt

SEQ ID NO: 414885 - DNA, 511 bp, Oryza sativa
atgcaccccgtccgtcagctggtatcctccagagttgtcgccctcctttttttttttttttttttttttttttttttaagagaaccttcctcttttatttccagttaagaccgcaaaaacattgcgttaaaaattgaacctggattcctggggaattgctccatcattccggagcaaaaaccaccatacacaagacacctgccgattgcacaaggttgggacgaacgaaatgatgacctaacgctataagaaacgaaaatcagtcggggctagacacctagtccaaagggaaaattttgtttcaaaagaacgcaggcggcgcagcaattaatcaagatgcgcgatcactgcatccgtgacttcctgcgtggcgctgctgccgcccaaggctttggttctggacttgccttctgcgatgacacgctttaccgacgtttccagccggtcagcgaatgatgggaattgcaaatgccgcaacattatggcagatgagaggagcagagcaacgggg

SEQ ID NO: 414886 - DNA, 377 bp, Oryza sativa
atcgcatccgcctccaaaccctagacgcgggggccatggcgcggcgatccgcccctctcctccggcgcctcctctcccccactccctccccctccccctacccgtcccattctctcgccgccgccgccgactcccgccgcaccgtcacctacatgccgcggccgggggacggcgccccgcgcgccgtcacgctcatcccgggcgacggcatcgggcccctcgtcaccggcgccgtgcggcaggtgatggaggccatgcacgcgccggactacttcgagacctacgaggaccgcggagacatgccgacggatccccccgaggtcaacgactccatccggcggaacaaggactgactcaagggcggactccccacccca

SEQ ID NO: 414887 - DNA, 276 bp, Oryza sativa
  unsure (1)..(276): unsure at all n locations
nnnnnnnnnnnnnnaacggggcgcacgagacaatacgagtgatagaccaggaaaatattacaggactataaccctggagggtcataaccaggaaaaaggaaaaaatataccaccacccacacactgacagcgccaacacacaagaccgggagaaggctaacaccggaccggccgccgctaagcatgactgatcaccgctagaccgacaaaggaacgcagacgagatcacctaaaagaacacccccacaaccaacgcaaagcccaactcctagagtg

SEQ ID NO: 414888 - DNA, 331 bp, Oryza sativa
ttaaaaatcaacccaaccgtcgacggatcgcgctggttagaacgatggccgcgtcagcgctgcaccagaccaccagctgcctcgggaccggcccttgccgaaatgagctcgtccgacgggtcggcgactccgggggccgcatcaccatgcgccgcaccgtaaagagcgcgcccgagagcatatggtatggacctgaccgtccaaagtacctgtgcccgttctcggagcagacgccatcgtacctgaccggagagttcccgggagactaccggtgggacacggcggggctatcggtcgacccggagaccgtcgcgaggaacagggagctgga

SEQ ID NO: 414889 - DNA, 464 bp, Oryza sativa
aagaatagccagcacacctagagcaaaattttactaacatcagatgcaagaaagtctacatgagttctaaaaaggaaactggggaaaactaatttacaccaattatcactaatagtacactaaatataaacgaccaagaagggctctaggaacccattttgtatctagcacccgaacgttgaacctttctcccgataaaagagggatcaggcgtgcaacagactggctctcacgccagggaaaccacaggtacaaaagaggcagtgaaagaagaaacaaaacttttcctccggggcgaacatatacaacttgagaggaaaaatacacaatggccgagagacaaatcacagtactgtattgatgtgcagtgctttcaacaacgaggtggccatttgtttcaccaatacctgttgaccggcacgttgcccatccctttgttcttcgatcaggttttgtagcttttt

SEQ ID NO: 414890 - DNA, 514 bp, Oryza sativa
ttggcatcatatcataatggatccttcagcagcgcctatattcaccgatatggcggctgctggtcacatggagagaaatgataatgatcccattaggccacaacggcttagtgtttctgcaggaaggacatcaacagatagatcaccaaagcatatagagctagtatcaaatgggcatagtagtggtcaaaatgatcaaattcgtcccctactgagcctgttggagaaagaaccaccctctcggcatgtatctggacaacttgattatgttcgccacttatctggtctagaaaggcatgaaagtattttgccattactgcatgcttcaacagagaggaaaactaacggcgaacttgacttgttaatggcagaatttgctgaggtctctagacagggaaaagaaaatggtaaccttgattccaacataaaaacttcaaatagggttccaagcatgaaatatgcaccatcatcaggttcaaacaacttttaatgagggagcattaacatctggagc

SEQ ID NO: 414891 - DNA, 398 bp, Oryza sativa
tttcaatgcactcgctgggggggaacagacgggggctgaggagcaaaggtcggagctgggacgcggcggcgaggaagaacgccggcgccggcgccgacgggctggccagcctgaacatcagccagtgcacggcgctgacgccgccggcggtccaggcggtgtgcgactccttcccggcgctccacacgtgcccggagcggcactccctcatcatcagcggatgcctcagccttacctccgtccactgcgcctgcgctcaccacccgcaccggcatgggagggccattcttttcaaccatgcctactagcaagctccctcttggagaaactaggacagcttggatttgaggaagatgtaaattaaaacccccggaatggttaccaaggactggggaaaa

SEQ ID NO: 414892 - DNA, 405 bp, Oryza sativa
ttgaagcccacgtggacgaacaccctcctccgcccgacgaccgccggccgccgccgttatcatgccccccggcggcgggggcgccgtcttcctcggagtcgacgtcggcaccggcagcgctcgcgcaggtctctttgatgagaagggtaagctgctggggtcggcgagcagtcctatacagatatggaaggagaaggactgcatcgagcaatcatcaacagacatatggcatgccgtgtgtgctgcggtaaaacacgcatgctctctggcaaatgttgcgcctgagaatgttgtcggacttggcttcgccgctacttgttctcttgttgctgatgatgctgatggttcccctgtttctgtttcttggactggtgatgcgagggaggacatcatcgtgtggatgga

SEQ ID NO: 414893 - DNA, 470 bp, Oryza sativa
acccatgccgacttcaaagtgcttaactacattatcatgaccaagcggagtatacccctaaactcaaaaactttaatttgtcataacatggcagatatggagggggaaaggctttccaacaaactattgacaaaatctgccattgacacaggctaggacggtaacgaaccagaacttgatggctgcttactagcagcctaaaaatagggtcggaataagacgagatggtttgtactgggccataaccacctgctggccggccatggcctcatcttctgcaggcctatcaagcttcgtaccgatgtcctccttggcatagtcaccatgcacctccatgagcttccccaggtcaaatttcggggcctttagaatcttcactttgcggacaaacacattctgaagggggaaaatactggatgtcgccttctcaatttccttcccaataacttcaggaatgaactttgaaacta

SEQ ID NO: 414894 - DNA, 290 bp, Oryza sativa
tttgactcgtgggctcttgcgccggcggcgacgtcgaccgcctggagcaatggaaggcatagccagcggtaagaacaagcgcatctacaaggcgaggatgggaaccaagaagacgaccgaaaaggcatatgctaagaaggactggtattatctcaaggtcccataagagttcaatgggcgtaacatccgcaagacccttgaagccataacacatgggacagagaatgattgtgagggcctaaagcatactgcgtcagcggtcatactagcttgtctgcataccgactatg

SEQ ID NO: 414895 - DNA, 397 bp, Oryza sativa
ttcgccttggcacaagtaacagcagaagcaggccattctccgtacagtatgattaatcaatcagatttctcactcccgttctcgtcgacaacgacttcagtgttggcatcacaacatgtcaactcttctgccaatgtgtcatcaccacgagaaataccaactctgccatcccacacagataatagcaacattgaatcaactgaggtttcacatggattccaaactactgccctcactgaggataaacctgctgatgatggctacaactggcggaagtatggccagaaggcagttaagggtggggagtatccaaggagctattataaatgtacccatttaagctgtccagttaagaagaaagtggagcgctcatctgacggacagattactcaaatac

SEQ ID NO: 414896 - DNA, 407 bp, Oryza sativa
ttcccactcatctcacttcactctctttctggtgtcttcacttcaccaccgccacctctctcatcggatccctgcagaggaggagagggcagtggcggcgaaaggcgacatgggctcgctgtcctctctcgccgccgcggcggtgtttctctccctcctcgccgtcggccactgcgccgccgccgacttcaacgccaccgacgccgacgccgacttcgccggcaacggcgtggacttcaactccagcgacgccgccgtctactggggcccctggaccaaggccagggccacctggtacggccagcccaacggcgccggccccgacgacaacgggggcgcgtgcgggttcaagcacaccaaccagtacccgttcatgtcgatgaccttctgcggcaaccaagccattg

SEQ ID NO: 414897 - DNA, 508 bp, Oryza sativa
ggactagatgatctgattattcagagtttcaaacaacaaggtagtcgcttattacccacccacacacaacacagaacaggtacaagagatagcctctcaatctttactctcaagcatggacgatcttcaaggttcagggacctacaatactactacaaatggacgaatcatcgctccacagtcacccgccgcattcgaatttgatgcagaagacaactgacatacagcaattgattggaggggagttagccaaacacacttcagagcttacccttgagcctcttcttgaggacatccatgacggcaccgaagtcagccttcacgctgaccgggggattcgcatacttgcaggccatgtcttcgatcttgctgtcatggtagtcgatcttggactgtgagaacttcagaccatgagctgtgctgacgactaccgtgcggtcatttggcccgatgatgcgctggtcacggagcttgaacagcgctgcgagggcaaccccagtatgcgggc

SEQ ID NO: 414898 - DNA, 384 bp, Oryza sativa
tccaccaccaccacccatggcggccaccacccacgccgcctccctctccttccccctctctcacccccaccccacctcccccaaccctaaccctaacctccccctccgccgcgccccccaccgcgtccgctgcgccaccgacgccgccgccaccaggcaccggcgcgcggccgacgagaacatccgggaggaggcggcgaggcaccgcgccccgaaccacaacttctccgcgtggtacgcgcccttcccgcccgcccccaacggcgaccccgacgagcgctactccctggacgagatcgtctaccgctccagctcgggcggccctcttgacgtgcgccacgacatggacgcgctcgcccgctttccgggctcctactggcgcga

SEQ ID NO: 414899 - DNA, 442 bp, Oryza sativa
  unsure (1)..(442): unsure at all n locations
ttttctgtagagggtacgaggctgcattaggccacctcatcgatgagacgcaagagtcaaagtcaccacttgacaccgaaggccatggcacgcacaccgcttctactgccgcaggatctgcggtccctggcgccaacctatttggctatgccaatggcaccgcccaaggcatggctgtgcgtgcgcatattgccatctacaaggtgtgctgggcaaaaggatgttatgattctgacatcctcgcgggcatggatgaggcgattgcagatagaagaaatgtcatatctctttccctgggtggtcggagtgaacaactctacaatgaacccacgttcgttggtgcattcaatgccattcgcagaggcatatttgtctctgctgccgncgggaacgacggccctgacatgtctactgctaataaccttgcaccatggatggtcac

SEQ ID NO: 414900 - DNA, 415 bp, Oryza sativa
ggatgcaacttggtttaatttgatgttaagaaacacaaaatgatgcatcccaacatgggtttcaaatggtttttttcatgcggtaccaaacatccgaagcggattattcaccaaatggctgcacaggcaataattttgctgttggatcaaaggtttgattacccacggttttccaaataaaatttacaggttcaaaatggagagttgatagggtctcgctgcagtgccttttgcacaagctcggtttgctcctgcacatggacggagtaaaaacctgttgcggtggctgcaaatggggcccttccaacgtatttgatgtcgtttatcgggccccgaccaagcgcccttattgcggtcaggaggcgaggattgatgtaactgtacccccccatgttcatgggttccttttggcacc

SEQ ID NO: 414901 - DNA, 443 bp, Oryza sativa
ttaagatatccaaggaagatattgataagatgcagaagaaggtcagcactatctggaatgatgaattccaaaacagcaaagaatatattcccaataagagagactggctctcagcttactggactggattcaagtcaccagaacagatttcacgaatccgaaatactggtgtcaagccagagattctaaaacgtgttggagaagccatgactactctgcctgaaaatttcaagccccacagggctgtcaaaaagatttttgagctgcgtcgtcagatgattgagacgggcgaaggcattgattgggctgttggtgaagcacttgcttttgcaactcttataattgagggaaaccatgttaggttaagtggtcaggatgttgagaggggtacattcaaccaccgccatgctgttatccatgaccaggaaactggagagcaatac

SEQ ID NO: 414902 - DNA, 452 bp, Oryza sativa
ggtaattaaacctcgacattttattatatttgacacactggatatatagtcaataaactttaccgcaaattatgaaatgtacaggcactgcactgtaccatacgtagtttttgtgcagcatataaccataggctgtcacgtacggccttttataccacatactagtccttgaacgcttaataataattaaaagtgcgtgcatcacatcagaaaagtttcaacacgctagcacacaaacacggaattactagtctcactcttgtaggagaagatcaatctaatggtgcgacttgatctgtgtcgtcacatccgtttttattggttgtcgcatcggccttcaggagttcagggtagccatgtcggcatgaaggcagtcacgcatgagttgttcatctgctctggagtaaacccgatctgcaaggtgggctcggcggcagcttccagggaatgga

SEQ ID NO: 414903 - DNA, 780 bp, Oryza sativa
ttctttcgcttcgcgagattggttgattcatctcgcgattgatcgagctcgagcggcggtgaggtgaggtggaggaggaggaggaggaggatatttattgttttgtcgggaagatttaaaaatattattatgctatctatgttgtatattatgtgacccaatcatttacttataattgattattgatgattgtctttttgttttttaagtttattttttcttatatttttccttattattttttttcattctgtatattctttttccattttttactatttgttaaatttatgtctttaaacttttttaatttttactcattaattttatttttttattatttcttatatattttttttttatggtcatttctcttatttatttatttttattactattcttttttataatgtttttacatttttattctccttattgaaattttttctatttttttcctttgtttttttttttttttttgtttttaattcatctttttttttttcactattttttcttttatataatactttgtttttttttttggtttattatttatatttttttatactttatttttcattattatttgtttcttttatttttttttattttctttttttttttctttttcctttatattttattaatcttattttttaatttctatgtttttaacttttttccttcttttttttttttttctttttttatttttctaaaaattcccctccttttctttttatttttttttatcctatgtattttttattttttttt

SEQ ID NO: 414904 - DNA, 469 bp, Oryza sativa
accatatggaaagatttttacgttacagacatacaagttacagcacaagcagttttcatatgcttgaacatctaatgtcagcggtagcacattaaccaaaagtaaagtaaaaatcacatcttgggagcaagccccgtatcatgcttgggaacatcagctaatatcagtcttaaatcacatctcaggaaactgaccggcaagtcatcctttcctactcgctgatcctacagcagctgcttgcagtgacagtcatggtgtggccttgtcagcaagtgagtgggcagccgagctccttcgccgccgcggtgaggaaggcgagcgtcagcccggtggcgcggcggctgtgggcttcccactctatgcatctctccacatcggcttgccagttgatgatgcttgctgccaagcactggtaggttgggctctggatgccattccggtgttccccttggatgagcttactggagtt

SEQ ID NO: 414905 - DNA, 362 bp, Oryza sativa
cttgacaattcgtttgttccagcttgacattattacaggactataaccgtgggggggaataaccaggaaaacggaaacaatgtgccaccgcccacgcactgacagagccaacacacaagaccgggagaaggctaacaccggaccggccgacgataagcatgactgaacaccgctggaccgacataggaacgcagacgagatcaccaaaacgagcaccctcacaaccaacgcaaagccaactactagcgtgtgcttgcaccaaccgatcgacagggcttggctaggggaagccaaaacgacgatttcaagaagagaagcgatcgaaaaccgccgtaaccgtgcgaaggggctcaaagaagccg

SEQ ID NO: 414906 - DNA, 303 bp, Oryza sativa
ttttcggcctccctcctctcctcgtccctcctgcccgccgccgccgcagcagatttaatcctcaatggcggccttcaacaagctcggtagcttcctcaggcacagtggcttgacaagcagtgcctcggccggctcttcccctgccatgttcaatgctgctcgtttgatgtccaccaagcttttcgtggggggtctttcttggaatactaatgccgattcgttgaaggaggcattaaccagcttcggggatgtgactgaagctcgggtgaccaatgacagagaatctggaaggccaagagggtt

SEQ ID NO: 414907 - DNA, 493 bp, Oryza sativa
  unsure (1)..(493): unsure at all n locations
cctcatcctttttattcattcctcccagagagacggatccatggaagttttcttgccctcatcaggcaagcagagcacacacacacggtggcagtggaattgctatgaacaagacgctaatcaacatccagagctaaaacaaacaaggggatcaaagcaaatcccgaaaaaaaaaacacaggggaaagtccacatcttcttctcgtccccaacgcctccgtgtcaccaccacgtcttgcggatttttttttaccctgttctattcgctcaggcgtccacgatctcgccgtcgtccttcgacgccaggatcagctccgggtgcgccgccgacgacgncgtcttattgatcgtgccgtcgatggcgttcggccggccgagcgccttcagcgccaggtgcgccgacttttggccggagatcatcatggctccgaacgttgggcccattcttggggcgccgtcgatctcggcgacctccatgccggtgacgatcatg

SEQ ID NO: 414908 - DNA, 420 bp, Oryza sativa
aacgagtcgcacgagacaatacgattgatagagcaggaaaatattacaggactataaccctggagggtcataaccaggaaaaaggaaaaaatataccaccacccacacactgacagcgccaacacacaagaccgggagaaggctaacaccggaccggccgccgctaagcatgactgatcaccgctagaccgacaaaggaacgcagacgagatcacctaaaagaacaccctcacaaccaacgcaaagccaactcctagagtgtgcttgcaccaaacgatcgagaggctttggctaggggatgccaaaacgacgtcttcaagaagagaagcgatagaaaaccgccgtcaccgtccgtcggggctcaaagaagccaagactggctttcgcccggcaaccacccttgagggatgagacaggacg

SEQ ID NO: 414909 - DNA, 387 bp, Oryza sativa
ttcgcatgtcgtcggcgtcgtcgtcgcgcgggggcggttccgcgtcgtccgccgccgtggtgcggctccgcgaggcatgcgaggacgccgccgacggctccgtccacctcgtcatggagctctgcgagggcggcgagctgttcgaccgcatcgtggcgcgcggacactactccgagcgcgccgccgccaacatcttccgcaccatcgtcgacgtcgtccagctgtgccactcgaacggggtgatacaccgcgatctgaagccggagaacttcctgttcgcgaacaaatcggaggactcgccgctcaaggtcatcgacttcggcctctcggtgttcttcaagccaggcgaccggttcacgggaggtgtggggaggcgcgtactacatg

SEQ ID NO: 414910 - DNA, 395 bp, Oryza sativa
tttgcactaatgaggagattgtccaatttgcttgcacctgctcaaaggaccagcatccaatttatgataaggttgatgttaatggtgacaacactgcacccatctacaagttcctgaagtccagcaaaggtggtcttttctgcgacaatatcaaatggaacttctccaagttcttggtcgacaaagaggggcgtgttgtggagcgctatgcgccaactacttctgcactcagcatggagaaggacatcaagaagctgcttggaagttcttaaaaccttaccgccggcgccaccagatgcactgctgcgttgcattgagcacttggaacttacaataatgttgctataaaactgagcttggaattgctgggttttcatttgcgtagccctgctgtg

SEQ ID NO: 414911 - DNA, 462 bp, Oryza sativa
aaaagtggacaagcaagaagtatatatattcatccatttctcaaactactacaagaggtcgagaggaacacataatcaggagggattgcgacaatttacagcaacaggagtctggagatcgaggcaagaacaagacaggcagcagcagagctaccctcttcatttccactgaatttttacacatttggaatccatggaaaccgagccttccctcccgtcgtcgtggtgtcaccggagtccgatgagaaaaatggtcatggcgtgctcataatccggatcgctcgccggcgtcggtgaaggaggcggcgcgattgttcgggcggctgttgaggagtgggttcagagccttgacgacgatgctcatgttgggcctgaagtccgcctcgtactgcacgcacagcgcagctacggcagccattttggcaacagccttgggaggataatcccctttaagccttggat

SEQ ID NO: 414912 - DNA, 457 bp, Oryza sativa
tttgagctcagccaggaccagctctatcatggatgcagcgagtgaagattgccttgagtgctgcaaaggggcttgagttcctgcacgagaaggcggagcctcgtgtcgtccaccgtgacatcaaatccagcaacattatgctctttgacaacgatgttgcgaaagtaggagacttcgatgtatccaatcagtccccggacatggcggctcgcctccactccactcgtgttcttggcaccttcggttatcatgctcctgagtacgcgatgacagggcagcttagcacgaagagcgatgtctatagctttcgagtcgtgttgctggagcttttaactggtcgcaaaccggtcgatcatacgcttgccccgggccagcagagtcttgtgacatgggctactccaaggctaagtgaagacaaggtgaagcaatgcgtggatccaaggcttgaaggggatta

SEQ ID NO: 414913 - DNA, 530 bp, Oryza sativa
cgcacgcgcacgtgcgcggagtgaccctgagtgtgggcgccctttttttttttttttttttgtttttttttttttttttgggataaaaaaagacgtcataagagtgaataagaagctggcatatacttcggttagtagcattgcaacgcaaacagtatgacagggtaccacccattgtttaagagctaagacaaagacaaaactgatgcatccaacgtaccaaaacgaaagcggaccgtattattcggatagctatgagaagggaactaggagggggataactagaagggacagaatggcatccatgggtccatgacgttcagtcgacctcctccatcttgctctagccggcgtcgtactgcagcggcggcatgtcggcttcagcctcggcgggctcgtcctcgactatgctaaggccgagcttgagcatgcgggggatccaggtgccgaaggtgttgggggcctccaagctgaaaccggaggtcagcagggaaggcttgaagagcagcttcaccgggtccttcacggac

SEQ ID NO: 414914 - DNA, 153 bp, Oryza sativa
tttgagttcatcagctaccctatctccctatggactgagaagacaactgagaaggagatttctgatgatgaagacgaggaagagaagaaggatgctgaggagggaaaggttgaggatgttgatgaggagaaggaagagaatgagacgaaaacg

SEQ ID NO: 414915 - DNA, 393 bp, Oryza sativa
ttcgtaggaagagtctctaataacacttttgagcctaatgggcaggctccaatttcgagcaccaataagtcactaaaacctgcagtaagagccaacggcatagatgtggctactttctcaactcctaggcgattagagactgatgagatcccttttgtcgtgaatgattacagggttgctgctagaaatgcaattgaagcaggatttgatggtgttgaaatccatggagctcatggttatttgatcgatcagtttctaaaagaccaagtcaatgatcgttctgacaaatatggtgggagcttagagaatcgctgccggtttgcgctagaagtggtccaagccgtaactgatgaaaatggagctgacaaggttgggataaggctgtcacccttt

SEQ ID NO: 414916 - DNA, 375 bp, Oryza sativa
tccggatcgagggcggcaagatcattcgcgtggaggcttaccccatccccgagcacccgaggcctaagagggtggcggggagggtgacgctggtgggggacgcggcggggtacgtgacaaagtgctccggcgaggggatctacttcgcggcgaagagcgggcggatgtgcgcggaggcgatcgtggccgggtcggcgaacgggacgcggatggtggaggagagcgacctgcgcaggtacctggccgagttcgaccgcctctactggccgacgtacaaggtgctcgacgtgctccagaaggtgttctaccgctccaacgcctgccgcgaggcgttcgtcgagatgtgcgccgacgactactgtcagaggatgacct

SEQ ID NO: 414917 - DNA, 361 bp, Oryza sativa
ccaaccaaaacataggagggaaaaataatttttcaaaaaggagggaagcaactttccttctttaaccaatacaaaagggtaagcaataacagaaaacaaatcctcctcctcctatagggaaaaaattcaaacacaatacccttaaaaggacttaatattaggaaaggtagcgggcaaggagcaaaaaaggcaaaaggggggaagggtaaagaatcacaatgctgagccagaggaggaaacaaaacaccataatgggcacagagcaaaaagcccctcaaaagggagaacttttaggaagaaggctttcacccaattgagggggcttaaccaccttcaagggagaagtctggggagaaacctt

SEQ ID NO: 414918 - DNA, 248 bp, Oryza sativa
tttacctcctccacctcctcctcctcccccggaccggatcggcccggttcctcctcttccgccgccgccaccgccgccgcagataggagaagatggccgcacttgataccttcctctttacctcggagtctgggaacgagggccaccctgacaagctctgcgaccaagtctaagatgctgggcttgatgcctgcctcgccgaggcccttgacagcagggccgttggggagacctggcccaagacaaac

SEQ ID NO: 414919 - DNA, 421 bp, Oryza sativa
gaagggataatttaaatacttaatagtaatagactctttgatggagtattacaacatgcagcaggggcattaatacgccagtacattaattaagttacacatatgcaggctccattttggtttcttttaatttatcgtattacagaatttctgtagccttgcagatgatcacttggatatcatgtactagtaattaacaataggatgcatacaaaagatggcccaacgacaacagaagatgcgtgcatctgacattgactggccttatttgttggtagtactccaattaattaacaagagatgatgcattcttgtgccttagtttttttacatgcttggcttcacgttgagcctattcgcaatcttgacccccaacgactcatcacactgggagaggtagttgacccagatggcgcggagc

SEQ ID NO: 414920 - DNA, 484 bp, Oryza sativa
  unsure (1)..(484): unsure at all n locations
ttaacgacaacgaggcgctgacagtggggcccagggggccgatcctcctcgaggactaccacctgatcgagaaggtggcgcacttcgcccgggagcgcatcccggagcgcgtggtccacgcccgcggcgcctccgccaagggcttcttcgagtgcacccacgacgtcaccgacatcacctgcgccgacttcctccggtccccgggcgcccagacccccgtcatcgtccgcttctccaccgtcatccacgagcgcggcagcccggagacgatccgcgacccgcgcgggttcgccgtcaagttctacacccgcgagggcaactgggacctcctcggcaacaacttccccgtcttcttcatccgcgacggcatcaagttctccgacgtcatccacgccttcaagcccaacccgcgctcccatgttcaggagtactggagggtcttcgacttcttggcccaccaccccgagagcctncacaccttttt

SEQ ID NO: 414921 - DNA, 494 bp, Oryza sativa
ttctgcttcaaggctggtgaggatgccgactcacttggccttactggacatgagcggtacaccatcgacctcccgaccaacgtcagcgagatccgtcctgggcaggacattaccgtcacaaccgacaacgggaaatccttcacttgtactcttcgctttgacacagaggtggaactggcatacttcaaccatggaggcatcctcccatacgtcatccgcaacctggcgcagaactaggagaaaatgcacaccatttcaagttttcaaccatgacaacaacattacaggctcctctccttcccctcccctctgttgtgatcagcctgcaccgacatcgagagttctcctgggacaatcagcctcctttgttcaccatataaataaaaaaaaaccgaaaataaaagccgcaggagacaaggagccacacctggagatcttggtgtgaggaacaaacaattttgcctgctgcggttagttgtgatgttgaaccctac

SEQ ID NO: 414922 - DNA, 364 bp, Oryza sativa
ctaagcagccataatgacaatatcctttgcatgtaaatagtatcactgcgttcgatgcaccactatatacagagattcgatgaaactaaattcttctcagcgtggcgtaaccactgggtgggtacatagttacatacaaaacgctgatattttgtcttggactatatctgcttgggcctaattagtattactcatgaccaagatgcaaaatatattacagaaatgaaggctcaaatctgattgactttagcaaaacggcccttaatcctcagcctgctatcagcacgagctttgcgggacttataccggacctgcctgtcgaatcttcttggcttcctcttctttttatagccagaaatgacca

SEQ ID NO: 414923 - DNA, 134 bp, Oryza sativa
tactccctcctctagtcctcttcttcttctagcttgtacgcgccactcactgttcgagctcgacggcggcggcggcggtggaggtcgtcgagtggtggtcggtgagatggttcaagatgaggtggaggtaggtg

SEQ ID NO: 414924 - DNA, 414 bp, Oryza sativa
ggatgaaaaatttgtggtgccttttattatcaaatcaacagaatagacaaattcatgtttctgtggcatggatgatacggtgaaaccacaaaagcacaactagaggctgggctcctgactggggaaggcacattcataggaaaaaaagatgaataaacacctacgaaagcgttcttttttgtttatcctcacctacgaaagggttgggtctcggtatctcttgaagagggattcgatgtcatcaagaacttccggtgccaaaggccgcggagcactggtaaatgcataaatgttctccttgaactgaaccatggtcgttgctccgatgattgggctagctgtgaatggacggtcacgcacaaagcccagagcaagctggactggagacaggccgagctttttggcaagctagac

SEQ ID NO: 414925 - DNA, 426 bp, Oryza sativa
ttaaaaaatcataatatcggggctatgtctttatgtacgcatctacataactacaataagaaattagttttgaactgttttctgttaatttcaggcattatattcattgtggactcgaacagattttcaagccaggtgtgacaacgagctggtgaacagtttagggaacttcatcaattgagtactaagctttatcgggaaatcatagggaactgagatatggttctgatgtgcctcattgtggtgatgtggagagagatgctctgactcagacattggttgagactagagggaaatagattgatcaggacatggatgtgatggacagggtcaaattaaaacaagggctgaagaacgcaatggtcatttctagcgaaggaaatgggtacctacaagagagtcagtttttgaagctttacaacaaga

SEQ ID NO: 414926 - DNA, 464 bp, Oryza sativa
tttttacgacaaaccacgaacttggatattaaagatgccacaaagaaggttcacataaacaacacaggtcacagcagcgaaagctacaagcaaaccctgcataatcgaaaagcaaatgtttttcaaaaccagacacacaaactgatagatagaagcccacacggacagatcataggatagcagcagtaatcaagcattgccaaggcaccaggcaagaaccctgaacctctctagtactcgtcaccctcatcaccctcgtcaccatcgtcgaactcggagccgacctcctcgtagtccttctccagcgcggcgaggtcctcgcgggcctcggagaactcccccttctccatgccctcgccgacgtaccagtggacgaaggcgcgcttggagtacatgaggtcgaacttgatgtcgatgcgggagaacacctcgacgacgcttgttgagttggagatcatgcacac

SEQ ID NO: 414927 - DNA, 426 bp, Oryza sativa
tcagagaaaggcgtcttcgtactcgcctctctccgcgccctcctccgccgccgctcgccgccgttcgtctccgccgccaccgccgccgccatgagggagtgcatctcgatccacatcgggcaggccggtatccaggtcgggaacgcgtgctgggagctctattgcctcgagcatggcatccagcctgatggacagatgcccggtgacaagaccgttgggggaggtgatgatgcttttaacaccttcttcagtgagactggtgctgggaagcatgtcccccgtgctgtcttcgtcgatcttgagcctaccgtgattgatgaggtgaggactggtgactaccgtcagctttttcaccctgagcagcttatcaagggaaggaggatgcaaccaacaacttttgcccgtggtcactacaccattggcaag

SEQ ID NO: 414928 - DNA, 372 bp, Oryza sativa
ttcacgcgtccgcttctctcctcctctaatcgcaagtctctgtctcgtcgtcctcgcatctccactcgccatgggcaagattaagatcggaatcaacggtttcggaaggatcgggaggctcgtggccagggtggccctccagagcgaggatgtcgagctcgtcgccgtcaacgaccccttcatcaccaccgactacatgacctacatgttcaagtacgataccgtgcacggccaatggaagcacagcgacatcaagatcaaggactccaagactctgctcttgggcgagaagccggtcaccgttttcggcatcaggaaccctgacgagattccgtgggctgaggctggtgctgagtatgtcgtggagtccac

SEQ ID NO: 414929 - DNA, 276 bp, Oryza sativa
taattgctggtattgttactgagagagattacctcaggaaaatcatagtgcagggacgatcttccaagtcaactaaagttggagacatcatgactgaagagaaccagctgatcacggtgaagcctgataccagagtcctgcaagcaatgcagctgatgacagagaagcgcatcaggcacatcccggagatcgacggcacgggcatggttgggatggtctccattggagacattgtccgcgccgtggtcagcgagcaccgggaagagctgtaccggc

SEQ ID NO: 414930 - DNA, 107 bp, Oryza sativa
ttgtacctcctctagacctctgctacttatagctttgtacgcgccactcactctccgagcttgacggcggaggcaacggcggaggtcgtcgattggaggtcggggag

SEQ ID NO: 414931 - DNA, 493 bp, Oryza sativa
acacacacaagccaccgctatcttttatttgagtcgtatagttttaatacaatgaacatacaaccaggcaccggtgcgaactcctgccacagcaattctcgaaaggattcaaatcccagtcggttatcctcaataatcacaacaatcccagaatgtatttggctccaggccttcaggggtgggttgcgcctccctggatatgatcgctcactggtggggggttgaccacagggatatccaagctgccgccttctgattctggggagacctcccgcacatcggcgatcaatgcttccgactgctggaaactaccccactccgcatcaccgataggacggatgtcgaccccatccacggccagttggacttcagtgttatcattggaaactaggacagatcttgagtcactcacacaagctttgtcgacatcgtcatctgatgcatcgacgtgctttgtcaagggaggggagttatcggtgccggagcatgattc

SEQ ID NO: 414932 - DNA, 446 bp, Oryza sativa
ttccaccccccaccggccggccccgtctcgccgtcgccgccgtcgtctccgccacccaaaaccctagccctgcagcctcccctccgcagctcgccccctctcctcgccatggccaccaacggcagctccccgagggcgagggagactgagagcagcctggagaaggtgaagcggcagctctcgtcggggtccgggcggtacctgctgcaggggccactgctgaagcgatctgagacgttgaggaaatggaatgagagatgggtaattttagaccctacttcaggaaagatggaatacaaaattcggagaaatgaaactgccattaaaggaaccattatatttgatgcttcaagcactattacctttgcccctgtaaatttccaagggatgccaaagtatgatggctggctgttctacattggaacttctcaaaaaaggattacttt

SEQ ID NO: 414933 - DNA, 497 bp, Oryza sativa
tttttttttgggagaaaaatttgtggtgccattaatcatcaaatcaacagaatagacaaatccatgtcttgttggcatggatgatacggtgaaaccacaaaagcacaactagtttctgggctcctgtctgtggaaggcacattcataggaaaaaaagatgaataaacacctacgaaagcgttcttttttctttatcctcacctacgaaagtgttgggtctcggtatctcttgaagagggattcgatgtcatcaagaacttccggtgccaaaggccgtggagcactggtaaatgcatcaatgttctccttcaactgatccatggtcgttgctccgatgattgtgctagctgtgaatggacggtcacgcacaaagcccagtgcaagctggactggagttaggccgtgctttttggcaagcttgacatattcattcgttgcttcctgtcaaaacaaatgcaccaatcagcaagtcaccatttacgggtgagaatgaacag

SEQ ID NO: 414934 - DNA, 458 bp, Oryza sativa
ttaccatttgaggaacagttgaaagctttccagagagcttattgatgaaggaaaggttcgctatattggtgtttccaatgaaacttcatatggagtgttggagtttgtacatgctgcaaaggttcaaggacttccaaagattgtgagcatccagaacagttatagtctaattgtgagatgtcactttgaaggttaaactgataacatttatccgttcactttattcattgcaagacttcttcatgctcttggttctgagcttaagtatgatatatctttgccatatcttttgttcataaacattggttaccttgcctgttatttccaacaaacatgagatgcagataaacattcattgttagataacttaatttattgcttttcttgattttaagattaacctattaagccctaacaaaagcaaaaatgatttataccagtgtcctggattattcaca

SEQ ID NO: 414935 - DNA, 460 bp, Oryza sativa
tttcagcaaaaaaaaatcaaacaaaaagaaaaaatattccccatctgtgaaattcgcaaaaccctagcgcggcggcgatgtcgaacacgagggtgttcttcgacatgaccgtcggcggagctccggcggggcggatcgtgatggagctgtacgcgaaggacgtgccgcggacggcggagaacttccgcgcgctctgcaccggcgagaagggcgtgggcaagagcggcaagccgctgcactacaaggggagcaccttccaccgcgtgatcccggagttcatgtgccagggcggcgacttcacccgcggcaacggcacgggaggggaggtcgatctacggcgagaagttcgccgacgaggtgttcaagttcaagcacgacagccccggcattctggccatggcgaacgccgggcccaacacttacgggtcccagttcttcatctgcaccgtgccctgcagct

SEQ ID NO: 414936 - DNA, 336 bp, Oryza sativa
  unsure (1)..(336): unsure at all n locations
agagcggagcacactaagattcattcattcattcatttgatcaaagcaaacgagacgagctttcttcttgcgatcaaaaacacagatgggcaaccacacagttaacacaaactagatagttccacacaaaactaacgatgataacgatcggatgatgatgatggtagctcgattagatagatagataacttggccatgagggccccaccgntcagttcctccagttcccggcggagttgccgccgccgcggctgccgtagccgccgccgtagccggcggcaccacggacgacaccgtagccaccggcaccggcgtagccgtcttcacggggctggc

SEQ ID NO: 414937 - DNA, 367 bp, Oryza sativa
tgcttctcctccccctcccggttcggttcgggtcggttcgggtccggttcgatttcggtttttccttcggttcgggggttggtgggaaagcatggcggcgccggatgttgagtaccgctgcttcgtcggcggcctcgcctgggccaccgacgaccgctccctcgaagccgccttctccacctacggcgagatcctcgagtccaagatcatcaacgatcgggagacggggaggtcgcgcgggttcgggttcgtgacgttctcgagcgagcaggccatgcgcgacgccatcgaggggatgaacggcaaggagctcgacggccgcaacatcaccgtcaacgaggcccagtcgcgccgctccggaggcgga

SEQ ID NO: 414938 - DNA, 445 bp, Oryza sativa
ttcatcttcaaggacggcaagggctgcggctgatgcttctagatcaagtgctccaagccggaggcctgctccgacaagcccgcccttatccacgtcaccgacatgaacgacgagcccatcgctgcctaccactttgacctctccggccttgccttcggcgccatggctaaggatggcaaggacgaagagctccgtaaggccggcatcatcgacacgcagttccgccgcgtcaagtgcaagtatcctgccgacaccaagatcaccttccacatcgagaaggcctccaaccccaactaccttgcgctgctagtcaagtacgtcgctggtgatggtgacgttcgggaggtggaaatcaaggagaagggctccgaggagtggaaggcgctcaaggagtcatggggtgcccatttggaggatagacacccccaagccgctaagggcccct

SEQ ID NO: 414939 - DNA, 308 bp, Oryza sativa
gggaattaaaggggatttacgtaatttgtttggacaaaaaaagggaggagtaattgattggggggggaagaccacacaggtagcagctgcatggggtaattaaaattttagctatatatggatcgagacgggggaccaattccatttttgagactgggggcagaccatatgaaatgatatgaccagtagtcgggggggggcaattggtcgtgcgggccctggccgatgaaaatgatgtcggaaatgagcgcggctaaggcggcccccacaaaggggccgagccagtagacccaggggtttgcccaaac

SEQ ID NO: 414940 - DNA, 372 bp, Oryza sativa
tagaaaatgccggtgagccggatcgcggtgggcgcccccggcgagctgtcccacccggacacggccaaggccgccgtcgccgagttcatctctatgctcatcttcgtcttcgccggatcgggatccggcatggccttcagcaagctgacggacggcggcggcacgacgccgtcggggctgatcgccgcctccctggcgcacgcgctggccctgttcgtggcggtggcggtgggagccaacatctccggcgggcacgtgaacccggcggtgacattcggcgcgttcgtgggggggaacatcagcctggtgaaggcggtggtgtactgggtggcgcagctgctggggtcggtggtggcgtgcctgctgcttaag

SEQ ID NO: 414941 - DNA, 353 bp, Oryza sativa
ggggataacacaagcataccttgcagcttgcacgaagttactgatatctgaggtagctccattgctggggctatctacagcgaggcagaatggcaagcacagagcttgtcctagagacagactatttattggcacacaaagcaactcacatatgacatgctcaatagttcatcgaaacagacatgaaaacagggatccagttgacaatgcactaggacattcaatccagggggggatcagtggatgagataactgatcgaagggggggggcaacctagcagcttaattgttctcctgcaagttggggtggttgggctgcacgcggaaggtgaacggcatttgggccgcaaagg

SEQ ID NO: 414942 - DNA, 405 bp, Oryza sativa
tttgttgttggtgttggcttcgctttgctgcgaagctatctggaggaaggaggaggaggaggaggaggcgggatggggcgcgggaagatcgagatcaagaggatcgagacctacaccaaccgtcaggtgaccttatccaagcgcaggagcgggatcctcaagacggcccgcgagatcagcgtcctgtgcgacgccgaggtcggagtcgatatcttctccagcgccggcacgctctacaactactggttccacaagaccttgctatcaagaattttggagaagtgccagaccaattcctgaaagatactgtgtgatgagaagcacaagagcctttaacgcgtagattgctcgacccaagaatgagaacgataatttgcctattgaggttaagcttttgtaaggtga

SEQ ID NO: 414943 - DNA, 386 bp, Oryza sativa
aggcagaaaacaaacggattgattattggcaaatacttgacattccatgattccaaaaggcacaggctcctagaaattagaaacaagaggagcgaaaaaaaccgatgggggatgaggtggtcaaccaagccagatgcagaatcatggtgttgcagagtgcgtgtaacctagcctatgatcacttggatatgacgtactacgaattaacaatacggatgcatacaaaagatgggccaacgacaacagaagatgccggcatctgacattgtctggccttattggtgggtggaccttcaattgattaacaagagatgatgcattcttgtgccttagatttttcacatgcttggcttcacgttgggcctattcgcaatctttacccccaa

SEQ ID NO: 414944 - DNA, 346 bp, Oryza sativa
catgaaggattttgcatttggtgcaaggtaatacaaatgttcttcacattggctagtcaaaattttctattagatatcacagtagatggacgctacgctgacaacagttgatagggcatgtaataagatgcaagatgaaatagtacatccacctagcatgtgttatagcacaacaatgtttggaatctgttaaaataactgctcacttaatgctcgcattaggaacagaagatctacatggaccagcagatgtagtgaagggtacccctcggtatgttgcaattccatttccatcagtgtgaagatccggtgtgatcttgtcgagctgtttcttttttggattaag

SEQ ID NO: 414945 - DNA, 512 bp, Oryza sativa
ttcatttcctcctccccctcctccgccgccggcgcctcctcctccctgcttgtgctcgccttgctgccgccccccgccgcggcgaccgagcacgcgcacgagcaggagccatggatgaggagtacgacgtgatcgtgctcgggacgggcctcaaggagtgcatcctcagcggcctcctctccgtcgacggcctcaaggtgttgcacatggatagaaatgactactatggaggggattccacctcgctcaaccttaaccagctgtggaagaggtttagaggggaagacaaacccccagctcatctgggtgcaagcagagattacaatgtagatatggtcccaaagtttatgatggcaaatggcacattggtaaggaccctgattcacactgatgtgacaaagtatttgtcattcaaagcctgtgatgggagctacgtcttcagcaaagggaagattcacaaggtacctgctaccgacatggagggtctgaagtcccctttggaggggcccttt

SEQ ID NO: 414946 - DNA, 320 bp, Oryza sativa
aacgactcgcacgagacaatacgattgatagagcaggaaaatattacaggactataaccctggagggtcataaccaggaaaaaggaaaaaatataccaccacccacacactgacagcgccaacacacaagaccgggagaaggctaacaccggaccggccgccgctaagcatgactgatcaccgctagaccgacaaaggaacgcagacgagatcacctaaaagaacaccctcacaaccaacgcaaagccaactcctagagtgtgcttggaccaatcgatcgagaggctttggctaggggatgccaaaacgacgtcttcaag

SEQ ID NO: 414947 - DNA, 390 bp, Oryza sativa
ttaatgctcgccaccacacccacccacccacgaatggcgtactcccgcctcctcctcctcgccgcgctgctcgccacggcggcggtgctggcggcgtcgcagaagccgaaggccgccacgccgacgaaggccacgccggcgtcgcccggccccgcggcggcggcggccgacggccccgcgccgacgaacgtgacggcagtgctggagaagtccggcaagtacaccaccttcctccggctcctacacgagagccgggtggacacccagatcaacagccagctgatggacagctacaacgggctgaccatgttcgcgcccacggacgccgcgttcgcggagctcaagccgggcacgctcaactcgctgccggcgcaggaccagatccagctg

SEQ ID NO: 414948 - DNA, 322 bp, Oryza sativa
ggccaacgttgacaagattctgacataaacttggaaaaacagatcattggccccagggctgtttagctaaacagaacaaaaggccgtaggtatataacttgctcaaaaaacaaggtgttttggaagggcaagccaggggcgcttaacactgaattcttattttggggggctagaagctgcatgactcatttgagagggataaaccgaggggggggggtggcaccaataccgggcctaccgggcttaaccggcttgtgggatatggagaaccccgcagggaagagcccaatcatctgaggtttaatctcaacctggttgaagg

SEQ ID NO: 414949 - DNA, 253 bp, Oryza sativa
ttgacgcgtgggctccagcctccgcctccgccgccgccgtcagccgccgagctcctcccgcgcgctccgagcccatcatggcggacgtcgaagacgagacggaggtcgccgccggagcacagtcaaagaagaggacgtgccggaagcacagataccggagcgacaatctctaaactgatggcgaaacattcagcaaagagctgctaaagctgttgatgacaggtacactgattgagttccagataaacgtgga

SEQ ID NO: 414950 - DNA, 524 bp, Oryza sativa
tgaaaaactagtaaacaacgcacacgaaaagagaatcaattcaatggcttctcgatggatccgtcctgaggtgtacccgctgttcgcgaccaccggcgtggccgtggggatctgcgcgatgcagctggtgcgaaacatcaccaccaacccggaagtgagggtgacgaaggagaacagggcggctggcgtgctggagaacttcgacgaggggaagaggtactcccagcatggcgtgaggaggttctggctctccaagcgccgcgactacatgcaggccctggacaaccccaccaacccctcaaccaaaaaatagacgcaaaagtcatacttattcgatgggtacatatatatatatatatcgatttgattctcggcttcaaaatgcctatatataaatgaatgaatcgacaataagtttttaacatggggaatattcatgttaggacttgctactttacatatttggccatatatctggctggttctctaggaatgaacatttccactggattccttttattttc

SEQ ID NO: 414951 - DNA, 402 bp, Oryza sativa
ttggcacatcctgaaaggtctggatttgaaggcgcatggactcaggagcctctgaagtttgacaattcgtactttcttgagctactgaagggggaatctgaggggcttctgaagctcccaactgacaaggcattgttggaagatccttcatttagacgctatgtggatctttatgccagggatgaagacaccttcttcaaggactacgctgaatcgcacaagaagctttctgaacttggcttcactccacggagcagcggccctgcatctacgaaatctgatcttttaactggtgctgtactcgcacagagtgctgtcggggtaagctgttgctgcagctgtagttatcgtgagctacctatacgaggcttctaagaagagcaagtaagattgctatgttct

SEQ ID NO: 414952 - DNA, 496 bp, Oryza sativa
ttctcgcaggagctccaggagaagaagctcatgcacaatctccgcaactacaccgtccccctccagcgctacatcgccatgatggacctccaggagaggaatgagaggctgttctacaagctcctgatcgacaacgtggaggagctgctgccggtggtgtacacgccgacggtcggggaggcctgccagaagtacggcagcatctacaggcggccacagggcctgtacatcagcctcaaggacaaggggaagatccttgaggtgctcaagaactggccggagaggagcatccaggtgatcgtcgtcaccgacggcgagcgcattcttggccttggagatcttggttgtcagggaatgggtattcctgtcggcaaactgtctctgtacactgcccttggaggagttcgcccatcagcttgcctttcaatcacattgatgttgggaccaacaatgagtcactgctcaacgacgaattctacaatggactcaagcaacg

SEQ ID NO: 414953 - DNA, 423 bp, Oryza sativa
gaaccgaactccaataggaggaggatagcttaatttgcacatagtaaaagagggatacacaactgagtactgaaattacaagtctgtgttcagataaaaacagtagtacaacaaacttgaagaggaacgtcgactccacaataattactaacaaagcaggcagcgggaaacagccgcgcccatcagaaacagcttgctctggattggcatcttgacagtgataatagctgatgcaggttacgacctgctcttgaatggaattgccctgatgaccacctggtggtagatggcagcaagggcagcgccaatgaaggggccaacccagaagatccaatggtcatcccaggcatggcccctgttgtagatgatggcagcgccaaggctcctcgctgggttgatgccggtgccggtgatggggatggt

SEQ ID NO: 414954 - DNA, 325 bp, Oryza sativa
ttgacgcgtggggaaagtagagagatggaggggaaggaggaggatgtccggctgggagccaacaagttctcggagaggcagccgatcggcacggcggcgcagggctccgacgacaaggactacaaggagccgccgccggcgccgctgttcgagccaggggagctcaagtcgtggtccttctaccgcgcagggatcgccgagttcatggccaccttcctcttcctttacatcaccgtcctcaccgtcatgggggtcaacaactccacctccaagtgcgccaccgtcggcatccagggcatcgcctggtccttcggcggcatgatct

SEQ ID NO: 414955 - DNA, 391 bp, Oryza sativa
ttaaatacttcagtcgattaacaaaaggcctacaagagaaccagagttttcagctggaggaatggaggaaagattggattgcctactcgaatgaatggcagtccgggaaggagctctatgctgtgaaggctacgggtgatgctttggcaatttccagctcactattcaaaaagtacttcagttagctgcaattgtccacttcgaattattagatgattgaaaatatcacatttccagcccctgcactaggtgcacacgccctaactgttggaataaagccaactgtctactttgttgatgtggtaaataattcatacatcagaaacacactgtttagaagcttgagaatcgtgcaaatgaaggtcgaaaatataaaatgagtaaaaaataa

SEQ ID NO: 414956 - DNA, 296 bp, Oryza sativa
cattccgatggatagcaacaggcagttcaaacaccataaccaaagcgaactcaattcatggtaacatcacggacgaagaacacctaacactggatggatggatagagggcttctcgactcgagagagccactggacacgataacgacttgactcgatgataagatgattctgacacggatagctaaggataactggccacgatgggccccaccaatcagttcctccagttcccgccggagtcgccgccgtagccgccgccacggttgccaccgtagccgccgccgccgccgccacg

SEQ ID NO: 414957 - DNA, 378 bp, Oryza sativa
ctcaacatcaccgtcaatgaggcccagtcccgccgctccggcggcggaggcgggggctacggcggcggcggtggcggctacggcggcggtcgtggaggcggcggctacggaggaggtggcggcggcggctacgggcgccgtgagggcggctacggtggcggcggcggctacggcggcggccgtggcggcagcggcggcggctaccgtggcagccgtggcggcggctacggcggcgactccggcgggaactggaggaactgattggtggggcccatcgtggccagatatccttagctatccgtgtcagaatcatcttatcatcgagccgagtctgtatcgtgtccagtggcttcttccagtcgagaagcccctctattc

SEQ ID NO: 414958 - DNA, 355 bp, Oryza sativa
gatgaaatccttcacaatgggtttaattaattcgccatcagaaaagaaaatttctacaaatatattataatttagttacaatacttttttttttagaaacacccccgtatatgaaacttgcagtcaagccaagaacttctcgaccttctccacttcctccacgctcccgatgtacagcggcactctctgatggatctccgtaggcatgatgtcaagtatcctctggtggccatcggagcccttgccgccggcctgctcgacgatgaagctcatcggcgcgcactcgtacagcagccgcagcttgccgttcttgctcttctggtccctggggtagccgtagatgccgccgtagagc

SEQ ID NO: 414959 - DNA, 411 bp, Oryza sativa
ctgtgagcaacctgctcgccgccggctactggatgtactcgagctcggtcatcttcgtgctcaccatcgggacaggggtgtacgtgttcacgctggacccgatgtacggcgagttcgtgctgacgcaggagaaggtgcagatccccaaggcaggcaagatctatgccttcaacgagggcaactacgcgctctgggacgacaagctcaagagctacatggacagcctcaaggagcccgggccgtccgggaagccatactccgcgcgctacatcggcagcctcgtcggcgacttccaccgtacgctgctctacggcggcatctacggctaccccagggaccagaagagcaagaacggcaagctgcggctgctgtacgagtgcgcgccgatgagcttcatcgtcgagcaggccc

SEQ ID NO: 414960 - DNA, 376 bp, Oryza sativa
gaaaataccaggtaaactgtcgataaattatcatcaacttgtcacattatacaagcaagcaagcacccaacatcgactttattctgttaagtttctcaattataactatagtttctagaaaggcgcagccaatgctccaactttatcgcggggaatgaggcgcaactctgagccatgctttagaaacacattgcctgcactttgctgggggttgatgccaactccatcgttggtgatgatggcgctggtctggggcgggaccttgaactcctcggcggcgaacttgagcaccgcggtgaacggcgccgccttgggcacgctaaacactttgaaggggagcttgggggcggaggtgaggatgatcttgaacgacacc

SEQ ID NO: 414961 - DNA, 430 bp, Oryza sativa
ttaagcgagcgaaaccacacgcggcgcgtcggtcccaataccaccaacgcaacccctacccatggcggcggcgggcggcggcggcgcgggggcggccggaggcgggaaggtgtcgttcaagatcatcctcacctccgaccccaagctccccttcaaagtgtttagcgtgcccgaggcggcgccgttcaccgcggtgctcaagttcgccgccgaggagttcaaggtcccgccccagaccagcgccatcatcaccaacgatggagttggcatcaacccacagcaaagcgcaggcaatgtgtttctaaagcatggctcagagttgcgcctcattccccgcgatagagttggagcattggctgcgcctttctagaaactatagttataattgagaaacttaacagaattaaagttcgatgttgggggcttgctt

SEQ ID NO: 414962 - DNA, 483 bp, Oryza sativa
cttttccacacgaagagatagagtgaaataccaagagagaaaaaaaagagagaataatttcccccttttctctcttccgtgccggagaatcgatggagattagggcgccgccgacgagcctgaggctcgcgccgccgccgccggcctccgccagcttccgccggaccgcgctcaggacctccttcctcaacggcagcgtttcacttagacttattcaagtgcgccaatcaaatgtcaacaggtttaagtgcaatggcataagaagtaacctccttgatagattttctagggttgtaaagtcctatgcaaatgcagtcttaagttcatttgaagaccctgaaaagatcctagaccaggctgttttggaaatgaatgatgatttgacaaagatgcggctagccactgcacaggtcttggcttctcaaaagcggcttgagaacaaatacaaatccgctgaacaagcttctgatgattggtatcgga

SEQ ID NO: 414963 - DNA, 537 bp, Oryza sativa
gccataatctctgccgcgctcctcctcctctcctctcctctcctctcctctcccggcggcggcgcgggcaactccagtcatgtgggactacaaggccgtggcagcggttacccttcgcacccggaagatgacgatcacccgtgtaacataccgcaagcaattcgtgctcgaggtgatccaccccggccggcccaacgtctccaaggctgagctgaaggagaagctggccaagctgtacgaggtgaaggacgcgaactgcatattagtggtcaagctccgtactcacttcggtggaggcaagtacaccgcattccgactcatctacgataacctggacgccgagaagaactgcgagcccaagtaccgtctcatcacgaatggacttgctaccaagggtgagaaatgtagcacgcaaatgaaagaacgcaggaacagagcgtagacgatccgtggtgtcaagaagaccaacgctggtgatgcccggaaaaagaagtgaaaactcatttacatttgtactactggctctgggaacactgt

SEQ ID NO: 414964 - DNA, 282 bp, Oryza sativa
tttttgtttttttttttttttttttttttttttttttttttttttttgggataaaaatatatagccggagcttccatatatttcattcacatatgcctcacccaacaacatatagtcgtagcagataccacttttacattaagtcagagggggatccggggaaacaaaaacaaaagccgtgcccgggcgggaaaaataaaagacgatgaacaaactgggaacacacgaaaacaaggggggggacctcattggattaggggtggaccatttaaccagggtttt

SEQ ID NO: 414965 - DNA, 487 bp, Oryza sativa
  unsure (1)..(487): unsure at all n locations
gttcaccgccggcatgcccgtcgcccgccgctccggcaactccagcttcggcaacgtcagcaatggcggcaggatcaggtgcatgcaggtgtggccgattgagggcatcaagaagttcgagaccctctcctacctgccaccgctcaccgtggaggacctcctgaagcagatcgagtacctgctccgttccaagtgggtgccctgcctcgagttcagcaaggtcggattcgtctaccgtgagaaccacagatcccccggatactacgatggcaggtactggaccatgtggaagctgcccatgttcgggtgcactgacgccacccaagtgctcaaggagctcgaggaggccaagaaggcgtaccctgatgcattcgtccgtatcatcggcttcgacaacgtcaggcaggtgcagctcatcagcttcatcgtctacaagccctncggctgcgaggagtctggtggcaactaagccgtcatcgtcatatat

SEQ ID NO: 414966 - DNA, 342 bp, Oryza sativa
  unsure (1)..(342): unsure at all n locations
gaaaggaaattaaactgatttattacttgttccattaaaaccatcacactcgggtacgtggtgaaaccgtgaaagttaaaaaacaaaaacagtagtagtagagtgaggccctgctcgctgttacatgagaggtgcacgaagaaccagcacacgagcagagcattcagcccacacgcagcaaggaaacggtagggatgccgncgncgccgncggccgatccgtcgcccggcgatgatgcgtcgtcgtcggcggtcaggtgcacgcagaggctgaacggcgtgcggagcggatcggtcgagaggtgatgagtagttgacgcggagcagatatatatggatggat

SEQ ID NO: 414967 - DNA, 256 bp, Oryza sativa
  unsure (1)..(256): unsure at all n locations
gagctcacaagcccaagtcgcgtcgcaccgaagcagagtagagaaggagaggagcggagcgccatcagccgtccgatcgagtgatccgatggctctcgctctctccacctctgctgctgctgccgctgccgccgcggcgcgggcgctcgcggcgagggtgacgacgacgaggggttacgccgcgtcggcggcgtcgtcggcgatgaggcgggcggcggtggcggtggaggggaaggggcgctgcgggngatgacgc

SEQ ID NO: 414968 - DNA, 474 bp, Oryza sativa
gaaataacaggagcagttgaattagatgaacaattagaattccctgaacctgaaacacataccgactgttgaattagatgaacaattagaatcccctgaacctgaaacacatacccacacctacaaggctacaactgacagcgtacaaaaattgcaggcagtgtccgtatagagcatggagattgaagaagtttcaaagctgcactgtggacgttcagacttcatagtgcaccaggtgcgtctcatctcatgcttatattcaagctgtttctcattgttctcctcccaacacccatattgccctttgtcatcatggcaacgaattccccgtagtcaatgcgaccatcattatcctgatcagcttctttaatgacgtcatcgaaaaaagcatttggcatggtatgcctctttgcaagcttgctgaactcattcaccgaatattaaccactgccatctttgtcgaataagaaaagc

SEQ ID NO: 414969 - DNA, 373 bp, Oryza sativa
gcgcaagcccagccgcctcgtcgtgttcgcgttcgtcgcgcggctccgacctccaaagccgccgctacccttcccgtcttcgtcgtcgccgcgcacgcagatcgcgaaccagcccgcgcgccgcgcagcagcgccgcggagaggaaaggagagctccggcgcgcaccccccgacaccatcttgtagggagagagggggattacgaccacgaagcgggccagacgcctatgcgagaagaaagagatgcggagtcttatgaacgggctcgatgcagacggtaagaccaccagtctatacaagctcaagctcggcgagatcgtcacgaccatacccaccatcggatctaatgctgacaccgtggaatacaagaaca

SEQ ID NO: 414970 - DNA, 406 bp, Oryza sativa
ccaacgagaaccatcagtcctttagatcctgattaaatagctagctacatcaaaattgcacaccatgtttgcagtttcaaacatacaacgcatgaatctagagcttgaggaaaacgaattcttcaatcgccggaatctccccaatctttgtcagggtgctctttttaggttcctcatcaacaccaatcgccatgacggcatgcttgcgaggagcgattcttccaacactcatgaaactgacattaacattctcctcaccaaggacacttcctactgcgccgatcataccaggttgatcgacctgcctgcaaaggatcaggcttccttccaagctcacatcaacctggaatgatccaacctttgtcagatgggggatgccatccttcaccttcccctcaacaggatc

SEQ ID NO: 414971 - DNA, 467 bp, Oryza sativa
gtttgggaatgcatgtgattgcacacgatccgtatgcttctgctgatcgtgcccatgcaattggagttgagctagtgagcatggaagacgctttgacaactgctgactttatctcgttgcatatgcctcttacccctgcaacaaacaagatgctcaatgatgaaactttcgctaagatgaagaagggtgttagaattataaatgttgcgcgtggtggtgtaattgatgaagatgctctagtcagggctcttgattcaggaatagttgcacaggctgctcttgatgtgttcactaaagagccaccggcaccagacagcaaattagtgctgcatgagaatgttactgtaacaccacaccttggtgccagcacagttgaagcacaggaaggagtggctattgaaatagctgaagctgttattggagctcttgaaggggaacttgcagcttcagcagtcaacgcaccaatg

SEQ ID NO: 414972 - DNA, 349 bp, Oryza sativa
tccaccgccatgcggtgttcacaagcccaagtcgcgtcgcaccgaagcagagtttacaaggagaggagcggagcgccatcagccggccgaacgagtgagccgatggctctcgctctgtgcatctatgatgttgatgccgttgcctacgtggcacgggtgctcgcggaggggctgacgacgccgagggagtacctcttgtggtccgagtggcggcgattaggaggatagtggcggcggaggaaggtacgggcgcttccacgatgacgcacgcgactacggtggtccgtctactttatcgacaggattgttaatgggggtgattccggtaaggacccccatgttgttaagg

SEQ ID NO: 414973 - DNA, 461 bp, Oryza sativa
caaaaagactgcccaaacagaccaagggtatcatcatagcagcaaagttttttaacacgcaacatcaaagagacactaatgcaataagataacttgaagcgcggatcactagcaaatttcgcgcttagtcgacctcctcgatcttggggccagcaccgttgccgcctgccgggggagcatcgtcctcgtccatgccgccggccatgtccgcgccagcgccctggtacatcttggcgatgatggggttgcagatgccctccagctccttcatcttgtcatcgaactcatcagcctcggcgaggctggttgccgtccagccactggatggcctgatcgatggcatcctcgatcttcttcttgtccgctgccgggagcttcgaggcgatcttctcatccttgatggtgttgcgcatgttgtaggcgtagttctccagcgcattcttggactccaccttcttctt

SEQ ID NO: 414974 - DNA, 232 bp, Oryza sativa
cgtacgcccataaccctagccgccgtcgccggcgtactcgagagaaacatcagcatccatggcgggcaagggcgagggtccggccatcggcatcgaccttggcacgacctactcgtgcgtgggcgtttggcagcacgaccgcgtggagatcatcgccaacgaccagggcaaccgcaccaccccctcctacgtggggtttaccgactccgagagggtcattatgagatgctgt

SEQ ID NO: 414975 - DNA, 264 bp, Oryza sativa
gcttgggcgccggctttttcagaggctgttttgttcaactacctttggaccgaccttggcaccggggtggactacccctgcaagttcatagccaagcggaagctcatcaccaaggaggacctcgaggaccttcgccgcgagagccagatcatgcaccaccttgcgggccaccggtacgttgttgtcatcaagggcgcctaccaggacccgttactacctcacaatgtgatggagctttgcgccgcggccagcttattctacctg

SEQ ID NO: 414976 - DNA, 445 bp, Oryza sativa
tttttgttttttttttttttttttttttttttttagcatccaaataatctgcccacagagattctgctctgctgtgtttgcactagcttaccgatttgagtcgatacagtaaggtaaaagagtcgcacaagcacttgaagggtacaagcctgggttccgcaccagaggatataaccaatatttgaaaggaacattttaaatggacaagaaattagaaacctactagagttattacaggactgggttacacagatagtcacacgattcagctccttggagcacagctggccaagtgagtcttgaagttctccagctttgcaagaacttcattttctggacggtatatcaggtcactcatgcgccatatctgcaatgttccacctccaccagtactctcaccattatcagacacactcacaatagttcaaggatccgaagaattcca

SEQ ID NO: 414977 - DNA, 504 bp, Oryza sativa
agcaaacgctcctcatacgacagagagagcgtgacagcgcgagggggttcggaggcgggagcgggcgacggcggcggcggcgggcgccagcgagcggcgaagggcgcgctggagatgaaggagaaggggtcgagggcggcggtggacgagcgctacgcgcagtggaagtcgctcatcccggtgctctacgactggttcgccaaccacaacctcgtctggccgtccctctcctgccggtggggaccccagtttgagaaggctacctacaagaatcgtcagcgtctttacctttcagagcagacggatgggactgtccctaatactctggttattgcaaatggtgaagttgtcaaacaagggttgcagctgctgaacatatttctcagttcaatgaggaagcacgatcaccttttgtaaagaagtacaagactataattcatccaggcgaggtgaacaggattagggagctttcgcagaacagtaagatcattgccactcataccg

SEQ ID NO: 414978 - DNA, 527 bp, Oryza sativa
  unsure (1)..(527): unsure at all n locations
gcggcggtggcggcggaggcgaaggcggcgaagatgcagtacaagaacctggggaggtcggggctgcgggtgagccagctgtcgtacggggcgtgggtgacgttcggcaaccagctggacgtgaaggaggcgaaggcgctgctccaggcgtgccgcgacgccggcgtgaacttcttcgacaacgccgaggtgtacgcgaacgggcgcgccgaggagatcatggggcaggcgatgcgggaccttgggtggcgccgctccgacgtcgtcgtctccaccaagctcttctggggagnggcagggccccaacgacaagggcctcttccggaagcacatcgtcgagggccttcgcggctcgctcaagcgcctcgacatggactacgttcgacgtcgtctactgccaccgtcccgacgccaccacctccgtcgaggagaccgtgcgcgccatgaactgngtcatcgaccacggcatggccttctactggggcaccttcgagtggtacgcccagcagatcaccgaggcgtggagc

SEQ ID NO: 414979 - DNA, 437 bp, Oryza sativa
tttttgtttttttttttatatgcacaaacttcaaatcaaaatcacaagcaaccatacaattctgagagattgtttgcttcctatttctatatgactcttgctcatccaatggaagtttcatagggatatgagtaccatctatagcaccaatacaattctgaaaaaaggggtaaaattgtggtttcctcaagattggatgtgggtgtagggatggtgcacgaatgtagacagatgtgagatttgtgattgcttccagcactgctttgaaatatctatgtattgtgtctggactatgctgaaaccaatcttgaagtgtttcattggttgcattttttgccactgtatataagaatatagcaatatgctcttctactgaaacatatagtaccagttaggtactctttctcacgtaacttattgactagtgcatgaaaaat

SEQ ID NO: 414980 - DNA, 456 bp, Oryza sativa
aaataaacaaaacacaccaagccaaataaaagcgacaatgggatcgctcaccaccaacatcgtcctcgccgtcgccgtggtggcagcgctggtcggcggcgggtcgtgcggcccgcccaaggtgccacccggcccgaacatcacgaccaactacaacgccccgtggctccccgccagggccacctggtacggccagccctacggctccggctccaccgacaatggtgacgcgtgcgggatcaagaacgtcaacctgcctccctacaacggcatgatctcctgcggcaacgtcccaatcttcaaggacggcaggggatgcggctcatgctacgaggtgaagtgtgagcagccggcggcgtgctcgagcagccgggaacggtgttcatcacggacatgaactacgagcccatttcggcgtaccacttcgacttctccggcaaggcgttcggcgccatg

SEQ ID NO: 414981 - DNA, 411 bp, Oryza sativa
ttttgttttttttttttttttttttttttttttttttttttttttttttttttttttttttttggaacaaaaaggccataggctgaatgctaaaaaccataccattttagcaacagggaaagacaatttggtttgggggtttttaaaaggggccttaaataagggaaacaggcgctttacagtttgcagcaaacatgagttcgggaattggtcaacataacatcaggcaaaagagcttaaaaaaggattgtttggggcaaatagttttattttcttgcaaacaacttgttttagcaaaactccaggcagacccagcagcaaattttaagcgttggcaaaaacctgggcggaagcatcccgcttcctttgctcctcgatgatgctgagcttgatgcccttgcccttgggcag

SEQ ID NO: 414982 - DNA, 432 bp, Oryza sativa
  unsure (1)..(432): unsure at all n locations
ggtgcggtgcggagcagaggaggacgaagcagcaggcggcggcggcagagcacggcgacctagcccgacctcgcaaccatggcaaggggtttgaagaagcatctgaagaggctcaatgcgcccaagcattggatgctcgacaagcttggtggagcttttgcccccaagccatcttctggtcctcacaagtccagggagtgcctgcctctgatcctcattatcaggaacaggctcaagtatgctctgacataccgngaggttatttctatcctcatgcagcgccatgtcttggttgatggcaaggtcaggactgacaagacctacccagctggtttatgggatgtcatttccatcccaagactggtgagaactacaggcttctgtacgacaccaggggacgttttccgcttcagtctgtcaaggatgaggatg

SEQ ID NO: 414983 - DNA, 419 bp, Oryza sativa
ttttgttttttttttttttttttttttttttttttttttttttttttttttttttttttttttttttttttttttttgggccttaaccaggccctttttattttcacttttcacaaaatggggaacaacaaatttggcatcccaaatctcacaacaattccctcgcctttaaacttcagcaacaaacggtttggggaaacccaaaccttccaacatttttttagaccgcccccggggggaacacccccccctgggttttgggggtttgggcagggaggcaaaaagccctcctttaaacgggacccgccaactaaacccaaggggggttgatgctatcgggagaaaaaaactgcctccttgggggctttaaacccgcagatcccgggaaggtggtttgggaggtctccaagggggaaatt

SEQ ID NO: 414984 - DNA, 498 bp, Oryza sativa
  unsure (1)..(498): unsure at all n locations
gagcgatccaatcgcgtcgctaaaaccctagcggctggctgatttgggggattgctcgtcggagagatgaagatccagtgcaacgcgtgcggcgcggcggaggcgcgggtgctgtgctgcgccgacgaggcagcgctctgcacggcgtgcgacgaggaggtgcacgccgccaacaagctcgccgggaagcaccagcgggtgccgctgctctcgacgaccngcggcgccgcgcccgccgccgccgccccggccgtgcccaagtgcgacatctgccaggaggcttctggatacttcttctgcctggaggaccgtgcacttctttgcagagattgtgatgtttctatacacacagtaaactcctttgtttcagtacaccaaagattcctacaacaggtgttcaagttggccttgatcctgctgatccagttccacctgttgctgacaggcatgtaaagagtgctgggggttcagtgggattagcaactaaacatttgcaag

SEQ ID NO: 414985 - DNA, 468 bp, Oryza sativa
ttgtgtttttttttttttactaggcaaaccacacgaatacacgattgattaatttcactgagaatagcacgggtacatcacatcacacaaattcatacgttgatacacgcatagtcgccgaagcgaccagctgcttaattaatcgataacacacgggtttaattcagcaataatcagcacacacacaaaccacactcatatgggtggtttttattgtggactaattaaggtaggtgactcgccggcggcgagtgttcggttgcttcgtgacttcacttgccgcacttgcagtcggtgcaggagcagctggtgccgcacttgcagccgccgttctcctcgccggcggcgacctcctcgaagtggctcttctcggcttcaactatgacgacgccatagctggtacctttcttcacgcactggctcttgtcagcacagtcgcagttgccgcacttgtccgacatggcggac

SEQ ID NO: 414986 - DNA, 447 bp, Oryza sativa
  unsure (1)..(447): unsure at all n locations
ccatgtcggacaagtgcggcaactgcgactgtgctgacaagagccagtgcgtgaagaaaggtaccagctatggcgtcgtcatagttgaagccgagaagagccacttcgaggaggtcgccgccggcgaggagaacggcggctgcaagtgcggcaccagctgctcctgcaccgactgcaagtgcggcaagtgaagtcacgaagcaaccgaacactcgccgccggcgagtcacctaccttaattagtccacaataaaaaccacccatatgagtgtggtttgtggtgtgtgctgattattgctgaattaacccgtgtgttatcgattaattaagcagctggtcgcttcggcgactatgcgtgtatcaacgtatgaatntgtgtgatgtgatgtacccgtgctattctcagtgaaattaatcaatcgtgtattcgtgtgggtttgcctaagt

SEQ ID NO: 414987 - DNA, 383 bp, Oryza sativa
gatggagaagaaggagaggagcagccatggcgtcgtcggtggcagcggcggcgagcacgttcctggggacgaggctggcggacccggcgccgcagagcgggaggatcgtggcgaggttcgggttcggcggcgggaagaaggcggcggtgaataaggcggcgaggccgtcggcgccgacgacggacaggccgatgtggttccccggcgcggtggcgccggactacctggacaggtcgctcgtcggcgactacggcttcgacccgttcggtctcgggaagccggcggagtacctgcagttcgagctggactcgctggaccagaacctggccaagaacaacgccggtgagatcatcggcacccggttcgagaccggcgaggtgaag

SEQ ID NO: 414988 - DNA, 313 bp, Oryza sativa
gggttccaaaaaacgggaaaaacattgggtttgggggttttaaccgaacccggggtttacacaaagtaaccgaccaaaccctattacaaaggtgttaaggaaaaccagaactaaaacccggaagcggggggggaaaaaaaaaggggaccccctcaagtgggggggggtggtccccccaaattgttttggggctcccaaacccaccccgtttaaaggggggggtttaccccccctccccctaaatacggggggggaaaactggattccctgggcaaagggggacccccccttggggggggggggccaaaggggg

SEQ ID NO: 414989 - DNA, 349 bp, Oryza sativa
gctagtttggtcgctctcgatttcgatttcccccaaatccaccgcaagagaaagccatgtcgccgccgagaagcgaagaggagatggcccgtacgaagcagaccgcccgcaagtccaccggcggcaaggccccgaggaagcagctcgccaccaaggcggcgaggaagtctgctccgaccaccggcggcgtgaagaagccccaccgttacaggccggggacggtggcgcttcgcgagatccgcaagtaccagaagagtacggagcttctgatccgcaagcttccctttcagcgccttgtacgcgagatcgcgcaggacttcaagaccgaccttcgctttcagagccatgc

SEQ ID NO: 414990 - DNA, 282 bp, Oryza sativa
ccctacgcgttcggccacatcttattgtcacttccatctcattctcctaattgtcatcactagcttctagctagcttaattaattaattagccatggcggaggagaagcaccaccaccacctgttccaccacaagaaggacgacgagccggccaccggagtagactcctacggagagggcgtctacacgtcggagaccgtgaccaccgaggtggtcgccggcggccaggacgagtactagaggtacaagaaggaggagaagcagcacaagcacaagcagcac

SEQ ID NO: 414991 - DNA, 544 bp, Oryza sativa
  unsure (1)..(544): unsure at all n locations
ctgttttccaaagatcagaagctggttcggatgatgaggatgattatccaatggatggtattgatacctctatgaaatccgttggaattagttacccatatgtcagaaggcgtaagaagctgccagatccagtcgagaaagagaagggtgtaagcttgtggtcaatgatcaaggacaatataggaaaggatctaaccaaagtttgtctgcctgtttatttcaatgaaccactctcatctttacagaaatgctttgaagatcttgagtattcctaccttattgatcgcgcttatgaatgggggaaaaggggcaatagtctgatgaggatccttagtgtagcagcatttgctgtttctggctatgcatctacggatggaagaagctgtaagcccttcaatccacttcttggggagacctatgaagcagattatccagacaaaggcctccgttttttctcagaaaaggttagtcaccatcctatggtggttgcatgccattgtgagggaaccgngtggcgtttttgggcagatagcaacctaaaaag

SEQ ID NO: 414992 - DNA, 551 bp, Oryza sativa
  unsure (1)..(551): unsure at all n locations
cttgactcctctctcttcgtctcagcttggagctcagtctttgatttttcttcttcttgttgtttgtgcaattgtgcatcgttgttagctgggaacaagcagaagaatggcggacagcacggcgacctgcatcgacatcatcctcgccatcatcctgccgccgctcggcgtcttcttcaagttcggctgcgggattgagttctggatctgcttgctgctcaccttcttcggctacctccccggcatcatctacgctgtctgggtcatcaccaagtaggaggagaattactacccttccaaggtgatggtgaattggtgatccggagcctatgattggttgtgcctggtgtaagcggcagttgtcaaagctgtgattttctggttctttggacggatgtgctcgctgtggtgatgtgtatgctgtacatctgttttggtgtttgtgcttaggtccctcttctgttacaacaattgttttctccctgttcttccggngtaccttctncagtttatcttctgcaccttctcgtncctgactttgatattaatta

SEQ ID NO: 414993 - DNA, 432 bp, Oryza sativa
aagacaatccaaccatattttaaggaaccacgaaggtacacatattgggtttgttaagcatgaaaactggaaatttccttgaaccaaaacatagcagccgaattaacttgacagtcaacaattcaggacactgagcaaaactaaatcttttttcaggaacattggagctataagactatccaaagaagagatgctccatggcgacaagttggctggcaatacatttacagcctccttcctttcctacctccctttctgcgggtgctgtccgtgggaaccggggtcacatcctcaatgcgaccaatcttcatgccagagcgagcaagagccctaagagcagattgagcaccaggaccgggtgtctttgtcttgttgcctccagtggcacgaagcttgatgtgcagagcagtaataccaagctccttgcaacgc

SEQ ID NO: 414994 - DNA, 519 bp, Oryza sativa
  unsure (1)..(519): unsure at all n locations
ccggcggtggcgagctcgtgatctcaaccaccaggaggaacccggcgctcgcctcgatctccgccgcctcgtcccaccatgtcgaagaggaagaccagggagcctaaggaggagaatgtcactcttggacccactgtccgtgaaggagagtatgtgttcggagttgcccacatcttcgcatccttcaatgacactttcattcatgtcactgacttgtctggaagggaaactcttgttcgcattactggtggcatgaaggtcaaagctgaccgtgatgagtcatcaccatatgcagctatgcttgcttctcaaggatgttngcacagcgttgcaaggagcttggtattactgctctgcacatcaagcttcgtgccactggaggcaacaagacaaagacacccggtcctggtgctcaatctgctcttagggctcttgctcgctctggcatgaagattggtcgcattgaggatgtgaccccggttcccacggacagcacccgcagaaagggaggtaggagag

SEQ ID NO: 414995 - DNA, 367 bp, Oryza sativa
aaaaacttaatagtaatagactctttgatggagtattacaacatgcagcagtggcattaatacgccagtacattaattaagttacacatatgcaggctccattttggtttcttttaatttatcggattacagaatttctgtagccttgcagatgatcacttggatatcatgtactagtaattaacaataggatgcatacaaaagatggcccaacgacaacagaagatgcgtgcatttgacattggctggccttatttgttgggagtactccaattaattaacaagagatgatgcattcttgtgccttagtttcttcacatgcttggcttcacgttgagcctattcgcaatttttacccccaacgact

SEQ ID NO: 414996 - DNA, 369 bp, Oryza sativa
cgtgcttgttcgacacgaagacgacgacgacgaacgcgggagctccggtgtggaacgacaacgaggcgctgacagtggggcccagggggccgatcctcctcgaggactaccacctgatcgagaaggtggcgcacttcgcccgggagcgcatcccggagcgcgtggtctcacgcccgcggcgccttcgccaagggcttcttcgagtgcacccacgacgtcaccgacatcacctgcgccgactttctccggtccccgggcgcccagacccccgtcatcgtccgcttctccaccgtcatacacgagcgcggcagcccggagacgatccgcgacccgcgcgggttcgccgtcaagttctacacccgcgagggc

SEQ ID NO: 414997 - DNA, 440 bp, Oryza sativa
caaaggtaccagaatatatctatcgtgctatcagcgcaacgacagtgcaacatagctagagatgattaagtaattacaggtccagagtctccagctctgcaagacttctcgctgcatatatagtagtgtaggatatggtaggtaaggtaaatgtaactaagtttcttcagctgtaagaaccaccatgtactggacaaccgttgaagggcgtaagaacaggcgtgccacttagatggagaacgagagctgagccatgaagaggttgatgacgtcgaggtacagcgagatggtggcgatgacgtactcgttgtaggtgtggcgcttgatcagctgattgttgtcgaagacgatgaaggcggagaacagcacggtggcgaggcagccgtagatcgtcatgccagcccttcccagagggaaacagatctgaatgatgaggtatg

SEQ ID NO: 414998 - DNA, 410 bp, Oryza sativa
gttgagaagggtgggtacatcgtctctgacaactcaactggcaacaagcctgacttcattgtgatgagcactggctctgaactagagattgtcgccaaggctgctgatgagttgaggaaggaggggaagactgtccgtgtcgtgtcatttgtttgctgggagcttttcgatgaacagtcggctgagtacaaggagagtgttcttcctgaggctgttactgcaagagtcagccttgaagcagggtctactcttggatggcagaagtactgtttgaagcaaaggcaaggctaatggcatgcacaaatacggtgcatgtgctcctgctggaaagatctaccaggagtatggcatgaccgcatggaacgatgatcgaacaaggaagagcctgtaagattcacacgcgcgtttga

SEQ ID NO: 414999 - DNA, 491 bp, Oryza sativa
  unsure (1)..(491): unsure at all n locations
ctcgtctcgtctcttctctctccatttttctcgaagcgagagtgcgttgcgttgcgagcgggaagcgaaaactcgaaaccatggccacggccggcgacgagcagcagcagcaggcggcggcggcgcagacggcggaggtgacggaggcggcggcgaaggaggtggtgtccgtggagatgccggcgccggaggggtggacgaagaagtttactccccagagaggggggagatttgagattgtntttttgtttcaccaactggagaagagattaagaacaagagacagctgagccagtatctgaaggcacaccctggaggccctgcatcctcagagtttgattggggaactggtgatactccaaggcgctctgctcgcattagcagaaagttaaggctttcgatagcccagagggaggaagatccgaaacgttttggaactcatctggcagaagggcaagcaggagaaaaaggaggccaccgaaaatgaagaa

SEQ ID NO: 415000 - DNA, 466 bp, Oryza sativa
  unsure (1)..(466): unsure at all n locations
tgttattccaatctcacttggtcgtttagtttttgaggctattccccgcctgccaatcacacatggcatcaagtgcaatgatttattctctttcagcattggatgttatattatctggagtgcagcagctggaaccagatatgcaattgattacattcgatcacgacgactggccttcctagtgcaacaaatctgcaagtggtgctctattgttgtgaagagttctgctctcctgtcaatatggatctttgttattcctgtgttgattggactcctgtttgagttactggtcattgtacccatgagggtgcctattgacgagagtccggttttcctgttgtatcaggattgggctcttggattaatattcttaaaaatatggactaggctgngttatgttggatcaaatggcacctttggttgatgaaagctggaggacggacgtttgagagggttagagaggatg

SEQ ID NO: 415001 - DNA, 441 bp, Oryza sativa
tgtgtgatgaaaaatttatgatcatgatatgtcatgcaaccaaatgctgttttgaaggataaaaataatcaaatgttgataggcaagactaaagttgtgagaatctaatcagtgtttgttgtttatgtataaattttcattgtaaatgtgtcttgacatcagatagatctgcaggagaaatagctcttattgcggatggtatgaacatgataacggaaacagctgttggaggacatgctgttggtgctgttcgaagtcaaagttttcttggaactagcacaaaccagatgtcgcgccacagtactttctattggcacctgtcagatcattagttgatcttcttggaagcatcctgagagtatgtcggaattaggagctgggcgaaacagctacttccctgtcttcacaagtttatattgtggaacaagacagacgagtgag

SEQ ID NO: 415002 - DNA, 377 bp, Oryza sativa
attggagaggcaaaacacggggtttgtttttcaaacgctttaaaaaagattcatgggatgaaatacatgatgaaccacgtttgttctcaagggaaaattaattaatgcagtatagttttaactttggccattgatctcaacctgtaactgggaccacacactggttacagggcccttggggtactagcagtttagcagtagctgtagtacgtagcaacagcagcagcaggttcactgtcttgattggattggatcggattagtagacgtagtttttgacaaacatgcccttcttggccttgggggcctcgccgtcgttggtgtacttgccgagctgcgccagcgagttggccttggcgcggaggagcaacgcgttct

SEQ ID NO: 415003 - DNA, 558 bp, Oryza sativa
  unsure (1)..(558): unsure at all n locations
gacaggaccttcgaggtggcgcagaaggtgtgggcggagaccttcttctacatggccgagaacaatgtgatgttcgagggcatcctcctcaagccaagcatggtgacacccggtgccgagtgcaaggacagggccacccctgagcaagtatctgactacaccctcaagctcctccacagaaggatcccccctgccgtccccggcatcatgttcttgtcgggtgggcagtcggaggtggaggcgacgcagaacctgaacgcgatgaaccaggggcccaacccgtggcacgtgtcgttctcgtacgcgagggcgctgcagaacacgtgcctcaagacgtggggcgggcagccggagaacgtgaaggcggcgcaagacgcgctgctcctncgcgccaaggccaactcgctggcgcagctcggcaagtacaaccagcgacgcgaggccgtcgaggccaaggagggcatgttcgtcaagactacgtctactaatccgatccaatccaatcaagacagtgaacctgctgctgctggctgtacgtactacagctactggtatact

SEQ ID NO: 415004 - DNA, 467 bp, Oryza sativa
atcattatggaaggaataaaatttccttagatttgcaataaatatcagcagtagctcaattcaggcaatcaagacaacatgtaaggagccgaacacatcggcaacctgaataacaagtggcaacctgaataataacaagttaagtttatgcagtataagaactgaaccttggatctaataacaacaacaacatggccatgggacacgaaaaggtttcacctttgcggccacagctcacaccgcggagggctcctcgacatctctgccccttccgccgacgccagcggcgctgtggtgcggcaggtcaacgccagtggcgccctcgggtatcagggacgcggggcggttctcaattacctcgtcgatgagcccccaatcgcgcgccttctcggggtccatgaagaggtcgcgctccatgcactgctcgatcttgtcgatctcctggccggtgtgcttctgtagatctt

SEQ ID NO: 415005 - DNA, 398 bp, Oryza sativa
atttgtttgtagaggtgatcggaggcaagcgcaccggggcacaccggctgcgactgcaccggtaaacggcagcatgagtcgatacactgaagtgaagtggactcagaggatagatacggtatacatatctggacaattagatgatgctaaggatgctaagggcaatctggaaccagaaggtgtattctatttctatgatacagctggaactgatgggaacttatacgaatcaaagctagagtggaacgacaaaggaaatgttggggagagcaaaataagtgtaggtggaaggtacatattatgtattgtaaaataagctgaggacacatggtcgaagaagctggttttggaagagcaaaaggcaccacactttgtgaaagttgactgggacaaatggg

SEQ ID NO: 415006 - DNA, 297 bp, Oryza sativa
cgtttatagaaccttatcgaagctgccgatctcatcactttcttatctaatggcgaaggaacccatgcgcgtgctgggcaccggctccgaatgacatatcgggtatgctcttgtgcccatggttgctaggtgtgtgatgttggttgctgaccaccctgttattctacacatgctggacattccaccagatactgaatctgttaagggccttaagatggagctggttgaggctcgatgtactcttttgaagggaattgacgaagcaactgatgactcggaggcctgcactgacgtgaa

SEQ ID NO: 415007 - DNA, 441 bp, Oryza sativa
gttcgttaataagcatcgatcgaaggcgaggccagccagccagccggggcgccgggggagctggggaagatggtgcaggggacgctcgaggtgctgctcgtcggagccaagggcctcgagaacaccgactacctgtgcaacatggacccgtacgcggttctcaaatgccgctcgcaggagcagaagagcagcgttgcgtcaggtatgttccaataccctttctcatatactcctacaatgcagaagaaaaatgttttgccttttgtgatcatagtctagggaaggttgtcaggatggtagctttgttcagataatctttctgccaaccaaaagattaaaacttcagatgctcttgtaacagtgctcatacagattgtttatcatagtgcatgagccattttttgaggaacgacgtgctattatatggttggaactttgagc

SEQ ID NO: 415008 - DNA, 504 bp, Oryza sativa
gcacgccctcgccgccatgtcgtccgccaccgccgccgccaccgccaccatcgccgccgccgccgcgaagctcgccgccacccccgcccccgccccctcccggcgccgcctcacgctccgcgggaaccccaccgcgcgccgctgcgtcgccgcgatggccgtgtccacccccaggtcggccgccgccgccgcgttcctcgagcgccgcgagtcggagcgcgccctccacttcgtcaagtaccagggccttgggaacgacttcatcatggtggacaatagggattcggccgtgccgaaggtgacgccggaggaggcggcgaagctgtgcgacaggaacttcggcgtcggcgccgacggtgtgatcttcgtcatgccgggggtcaatggcgcggactacaccatgaggatcttcaactcggacggcagtgagccggagatgtgtggcaatggagtcccgtgctttgccccggttatagctgagcttgaaacctacagggaacacat

SEQ ID NO: 415009 - DNA, 457 bp, Oryza sativa
aacgcaacaagaatgtgaacactataacttagacagcaaaaagatgatccaggttccacatccgttacatcacgacagagtaaaaatagtttctcagtagcacgcgaacataggattgttgatgtgaaacacatgcattcgacaaaagggaaatgaaatacgacaacgaaagcagttctcttagcagtagaccaactagaacatgtaagggtaacggcacaacacatgcggcggccaaaaatttagagcttgtcctcgaaatcggagaggggagtcatctgctccttgagacccttcctcttgcggatatcctgcaccagggttgaagcctgcgagccagcttcaagaggatcagaggtcatcatgtcccaatggtcgaacacacactgggggaaggcctggccagatgtcgcagccctaagctggcttgagaacccaaaggactcgatgacaggga

SEQ ID NO: 415010 - DNA, 421 bp, Oryza sativa
agttgattcccgcatcagacaaaggtaggttctttgcctttggtcgtgtcttctctgggagggttgcaactggcatgaaggtgcgtatcatgggtcccaactatgtccctggccagaagaaggatctgtatgtgaagagtgtccagcgtactgtcatctggatgggaaagaaacaagagtctgttgaggatgttccctgtggtaacactgttgctatggttggtttggatcagttcatcaccaagaatgccaccctgactaatgagaaggagtcagatgcctgcccaatcagagcaatgaagttctcagtgtcccctgttgtgcgtgttgctgttcagtgcaaggttgactctgatctgcccaagccttgtgagggtttgaagcgtctgacgaagtctgatcctatggggcttttgtacta

SEQ ID NO: 415011 - DNA, 513 bp, Oryza sativa
tctgatttatgccaatgggaatgtaatatcagcacagactttcaccttccgagaacttgcgaccgccaccaggaatttcaggccagagtgcttcctgggcgaaggaggctttgggcgcgtttataagggccgcctcgagagcactggccaggttgtggctataaagcagcttaatagagatgggcttcaaggaaacagagaatttctagtggaagttctaatgctcagtttgttacatcatcaaaatcttgttaatctgattggctattgtgctgacggagatcaacgtcttcttgtttatgaatacatgcactttggatcattggaagatcatttgcatgatctacctcctgataaggaagcattggattggaacacaaggatgaaaattgcggctggtgctgctaagggactagagtaccttcatgacaaagcaaatccaccagttatttatagagacttcaagtcatcaaacattctcttagatgagagttttcatccaagctgtctgac

SEQ ID NO: 415012 - DNA, 465 bp, Oryza sativa
caaaaaacctcgcaaaaccctcggccctcacccgccgccgtcgccgtcgcctccaccggtaaacggcagcatgagtcggcaccctgaagtgaagtgggctcagaggattgacaaggtttacataactgtacaattagctgatgctaaggatgctaaggtcaatctggaaccagaaggtgtattctctttctctgctacagctggaactgatgggaacttatacgaatcaaagctagagttgaacgacaaagtaaatgttgaggagagcaaaataagtgtaggtgttaggtccatattctgtattgtagaaaaagctgaggccaaatggtggaagaagcttgttcgagatgatcaaaaggcaccacactttgtgaaaagttgactgggacaaatgggttgatgaagatgatgatggggcttgatgtcaacgtggattggaatggaacttttcgaattttggtggca

SEQ ID NO: 415013 - DNA, 458 bp, Oryza sativa
  unsure (1)..(458): unsure at all n locations
acgacaaaccacgaacttggatattaaagatgccacaaagaaggttcacataaacaacacaggtcacagcagcgaaagctacaagcaaaccctgcataatcgaaaagcaaatgtttttcaaaaccagacacacaaactgatagatagaagcccacacggacagatcataggatagcagcagtaatcaagcattgccaaggcaccaggcaagaaccctgaacctctctagtactcgtcaccctcatcaccctcgtcaccatcgtcgaactcggagccgacctcctcgtagtccttctccagcgcggcgaggtcctcacgggccttggagaactnccccttcttcatgcccttgccgacgtaccagtggacgaaggcgcgcttggagtacatgaggtcgaacttgatgtcgatgcgggagaacaccttgacgacgcttgtggagttgagatcatgcacac

SEQ ID NO: 415014 - DNA, 440 bp, Oryza sativa
gagaaaggcgtcttcgtactcgcctctctccgcgccctcctccgccgccgctcgccgccgttcgtctccgccgccaccgtcgccgtcatgagggagtgcatctcgatccacatcgggcaggccggtatccaggtcgggaacgcgtgctgggagctctattgcctcgagcatggcatccagcctgatggacagatgcccggtgacaagaccgttgggggaggtgaaatgatgcttttaacaccttcttcagtgagactggtgctgggaagcatgtcccccgtgctgtcttcgtcgatcttgagcctaccgtgattgatgaggtgagggactggtgactaccgacagctcttccaccctgagcagctcatcagtggcaaggaggatgcagccaacaactttgcccgtggacactacaccattggcagggagattgttgatct

SEQ ID NO: 415015 - DNA, 505 bp, Oryza sativa
  unsure (1)..(505): unsure at all n locations
attaacttgtgtgggaagtactggatggtggtctgaagagcaagattgagatacagtggtctgacatctgtgccatgaaggtggtttctccagaaaatgaacctgggatcttggagatcgcattgtcccggcagccacttttctttcgagaaactaatccacagccaaggaaacacactttatggcaggcaacatctgatttcactggtggacaagcaagcattcacaggaggcattttcttcagtgcccgccaggaatgatgaataagcatgttgagaagcttgttcattgtgacccacgtctatattcactaagccagcagaacgacatcaatttggataatccgtactttgaatcaaagtcttctatatttgaagatgcagagggcataaaaggccaagattttgagcataaagatgatggcgatcagttagctccccaaagatttacagaactgttaccgnctcattctgcatcaggtaggatagatactgaagccagaca

SEQ ID NO: 415016 - DNA, 554 bp, Oryza sativa
  unsure (1)..(554): unsure at all n locations
gttttgttggcccccattcctcccccaccccggtgtcctcccctccgccgctcgcgtcgccgcctttttcccctatggcgctgccgaatcaggggaccgtggattaccccagcttcaagctggtcatcgtcggcgatggcgggactggtaaaactacatttgtgaagaggcatctcactggagagtttgaaaagaaatatgagccaaccattggtgtcgaagttcaccctctagattttaccaccaactgtggtaagatccgcttctactgctgggacactgctggacaagagaagtttggtggacttagggatggatactatatccatggtcaatgtgcgataattatgtttgatgtcacttcaaggctgacttacagaatgttccaacatggcatagggacttgtgcagggtgtgtgaaaacatccncattgtcctgtgtggtaacaaggttgatgtgaagaacaggcaggttaaagccaagcaggtcacattccacaggaagaagaatctgcagtactatgaaatttctgccagagcaactacaactttga

SEQ ID NO: 415017 - DNA, 545 bp, Oryza sativa
  unsure (1)..(545): unsure at all n locations
atttctgtgaaattgtgtgcagcaatcatgtctggtcgcggtaaaggaggtaaaggtctcggcaaaggaggcgctaaacgtcatcgtaaagttctccgagacaacatccaaggaatcaccaagcctgccatccgacgtctggctcgccgaggaggtgtgaaacgtatttcgggtctgatctacgaagagacccgaggcgtgttgaaagacttcctggaaaacgtgatccgtgatgccgtgacgtacaccgagcacgcgaagcgaacgaccgagactgctatggaccgtcttctacgcgctaaaacgactagggtcgcaccctctacgggttcggcgggtgagcgtcgaagacttaaaaccaaagaagcccacgcggaagcggcaattctccgttcgttcttaatctcaacaactcaacaacgcgaaccgtcatcgggacggtattgcccgatccagtgtatagacataatcgtcaatctctctttgtgcgatatgattgactcaatcttncttgtgcaccgatcatttcgaagctcttaatcata

SEQ ID NO: 415018 - DNA, 403 bp, Oryza sativa
gtttgtggggaacaagttccggatgtcgctgggtctgactgtggcggagacggggaactgcgccgacaacaccggcgccaagaacctatacatcatgtgcgtgaagggcatcaaggggaggctcaaccggatgacgatggcctgcgtcggcgacatggtcatggacaccgtcaagaaggggaagcccgacctccggcagaaggtcatgcccgccgtcatacgacgtcagcgcaagccgtggcgctgtaaggacggtgtatacatgggcttagaagacaatgctggggtgattgtgaatcccaagggtgagatgaaaggttactgtatcactggacccattggttaggagtgcgccgacctttggccaaggattgctagcgcagcaaatgccattgtctagagc

SEQ ID NO: 415019 - DNA, 455 bp, Oryza sativa
caaattcaaaaaccacgatttataaagtgccggagatgaagtacacaaattaacattacatcgagttttaataaaacatcatgcgaaaagccagcaaaaacaaaaggcagcatacagctaatgaagctctactggagtagctcgcaaaaggtccgacttattttcagtagcactctactccatttcttccgaaagagtgaccatcttctactgggtgttgtacatgtgacggatcaggtcaacaacgcgagagctgtatccccattcgttgtcataccaagacacaagcttaacaaagttgtcattgagagcaataccggcctttgcatcaaagatgcttgacctgttgtcaccctggaagtctgtggaaacaaggtcctcctcaacgtaacccagaatacccttgagttttccctcagactcctccttgatagctgccttaatctgatcatagg

SEQ ID NO: 415020 - DNA, 389 bp, Oryza sativa
atcgcacttgtagctctcgacccccgcatctcatccctcctctcgcttagttcagatcgaaatcgcaaatggcgaagattaagatcgggatcaatgggttcgggaggatcgggaggctcgtggccagggtggccctgcagagcgacgacgtcgagctcgtcgccgtcaacgaccccttcatcaccaccgactacatgacatacatgttcaagtatgacactgtgcacggccagtggaagcatcatgaggttaaggtgaaggactccaagacccttctcttcggtgagaagggaggtcaccttgttcggctgcaggaaccctgaggagatcccatggggtgagactgacgctgagttagatgtggagtccactggtggttttactgacaa

SEQ ID NO: 415021 - DNA, 413 bp, Oryza sativa
tgcttgaccccgccatgcgccccgcggtcgccgccgccctcctcctcgtcgccgccgccgtcgcggcctcgccggtttccgccctctactccgccggctctcccgtgctccagttcaaccccaacaacttcaaatccaaggtgctgaactcgaatggggtggtgctggtggagttcttcgcgccgtggtgcgggcactgtcagcagctgacgccgatttgggagaaggccgcgggcgtcctcaagggcgtcgccacggtcgccgcgctcgacgccgacgcgcacaaggagctcgcgcaggaatatggaataagaggatttccaactattaaggtgtttgtgcctggaaagccttcagtagattatcaaggagcaagagatgtgaagccaattgttgaatttgctctttcacag

SEQ ID NO: 415022 - DNA, 395 bp, Oryza sativa
ttcatgagtgtgtgcagcaagtatggagtttctgggtacccaacaattcaatggttccccaaaggatccctggagcccaaaaagtatgaaggacaacgcagtgcagaggcccttgctgaatttgttaacactgaaggaggcactaatgtaaagctggcaaccattccttcaagtgttgtagtgcttggcccagacaactttgactcaattgttcttgatgaaaacaaagacattcttgtggagttctatgcgccatggtgtggccactgcaagcatcttgctccgatatatgagaagctggcttctgtttataagttggacgatggagttgtaattgctaaccttgatgctgacaaacacaaagacttggccgaaaaatatggagtttctggcta

SEQ ID NO: 415023 - DNA, 404 bp, Oryza sativa
  unsure (1)..(404): unsure at all n locations
aaataattcgatggatttgacgagagcggagcacactaagattcattcattcattcatttgatcaaagcaaacgagacgagctttcttcttgcgatcaaaaacacagatgggcaaccacacagttaacacaaactagatagttccacacaaaactaacgatgataacgatcggatgatgatgatggtagctcgattagatagatagataacttggccatgagggccccaccgctcagttcctccagttcccgtcggagttgccgccgccgcggctgccgtagccgccgccgtagccgccgccaccacgggcgccaccgtagccaccgtcaccggcgtagccggcttcacggtgctggccgtagccaccgtcgncggcaccaccaccgtagccggcgacaccgta

SEQ ID NO: 415024 - DNA, 352 bp, Oryza sativa
ggtgggttggcttctcctccccctcccggttcggttcggttcggttcgggtccggttcgatttcggtttttccttcggttcgggggttggtgggaaagcatggcggcgccggatgttgagtaccgctgcttcgtcggcggactcgcctgggccaccgacgaccgctccctcgaagccgccttctccacctacggcgagatcctcgagtccaagatcatcaacgatcgggagacggggaggtcgcgcgggttcgggttcgtgacgttctcgagcgagcaggccatgcgcgacgccatctatgggatgaacggcaaggagctcgacggccgtaacatcaccgacaacgaggccc

SEQ ID NO: 415025 - DNA, 388 bp, Oryza sativa
aaccttttcggcgcaaggggacgggttcatggcgatcgggatggggttccagaacacggcggtggcggcgaagcaccaggcggtggcgctgctggtgcagtcggacaagtcggtgttcctcaactgctggatggacgggttccaggacacgctgtacgcgcactccaaggcgcagttctaccgcaactgcgtcatcacgggcaccatcgacttcgtcttcggcgacgccgccgccgtgttccagaactgcgtcctcacgctccgccaccccatggacaaccagcagaacatcgccacggcgcagggccgcgccgacggccgcgaggccacggggttcgtgctccagaagtgcgagttcaacgccgagccggcgctcaccgacgccaag

SEQ ID NO: 415026 - DNA, 523 bp, Oryza sativa
  unsure (1)..(523): unsure at all n locations
attgaaatgcgaaatgtgtgaacaagacatttttggtacttcctccgtccccctaatataagagattttggcatttgcttgcactgtttgactattcgtcttattaaaaaatttagaattattatttattttatttgtgacttactttattatccaaagtactttaagcacaactttttgttttttatatttacacaaattttttgaataagacgagtggtcaaacagtgcaagcaaaatgtcaaaatccgttatatttggggacggagggagaangtatggtggcagcgtgacttaaactgggattgctgtgtcatgctagatatctcaggagacggtattgttttggtcagagttaggggaaaagacaaatttcttgatgtactgatggttccttttgcaggatttgcccgatgaggttggaagcgttaatgtcttttcttggataagctgtctggatctttcgactcttgctgtgctgacaaattccaccatatccagctcaagtgatccccataacata

SEQ ID NO: 415027 - DNA, 518 bp, Oryza sativa
ctgaaggagtcgacatcatggttgttagagagcttacaggaggaatatacttcggccaacctaggggttttggaaagaacgacaaaggagaagacactggcttcaacactgaagtatattcagcttctgagattgatcgaatcacacgtgttgcatttgaggttgctcgcaagaggcgcgggaagctttgctcagtagacaaagcgaatgtgcttgaggcatctatgctttggagaaaacgggtgacttcattagcttctgaattccctgacattgagctgtcgcacatgtatgttgataatgcagcaatgcagcttattaggaatcctaagcagtttgacacaattgtcacaaacaatatttttggtgacatattgtctgatgaagcatcaatgcttactggaagcattggaatgctcccatctgccagtgttggggaatcgggaccaggtctttttgagcctattcatggttctgcgcccgacattgctgggcaggataaggcaaacccattagct

SEQ ID NO: 415028 - DNA, 528 bp, Oryza sativa
  unsure (1)..(528): unsure at all n locations
gctgaatctgcagctcgtctagatcctgatctattcacaaactttatgattcctagttggtttgggactgaagtgcaagaacctacaaaatgctgtccttttccattgcctgaaatttattgtgcatcccagagcaaaaagcttgctgcactggaagatattaggaggactattcgggagctgcaaattgatgacaataggaagaaggaattgacaaatgccctccatgcacagttcaaagattggttatatgcttcaggcaacatccgccagctctactgcctgcaaggcgactgaacatgcgatcatctgctttcataaaatggacctgtttactcaaaatattcgaccggtgtcggttgaagctgaccttactcccaggtgcgaaccaataatgtaaaaaaaacatgtacttcatcctatttctgcaaagtagtttgatgtatttctccaattcttttcccatttgctgnggcgtcaagtcgtgggatgtcatctttcttttcatttctggngatacacattttt

SEQ ID NO: 415029 - DNA, 435 bp, Oryza sativa
atatcaaacgctctagaaaagattcatgtgatgaaatacatgatgaaccacgtatgttctcaaggtaaaattaattaatgcagtatagttttaactttgtccatcgatctcaacctgtaactgtgacgacacactggctacagtgccctcgaggtactagcagtatagcagtagctgtagtacgtagcagcagcagcagcaggttcactgtcttgattggattggatcggattagtagacgtagttcttgacgaacatgccctccttggcctcggcggcctcgccgtcgctggtgtacttgccgagctgcgccagcgagttggccttggcgcggaggagcagcgcgtcctgcgccgccttcacgttctccggctgcccgccccacgtcttgaggcacgtgttctgcagcgccctcgcgtacgagaacgacacgtg

SEQ ID NO: 415030 - DNA, 458 bp, Oryza sativa
  unsure (1)..(458): unsure at all n locations
tcggaaaaggcctgtgtcaaggagagggtagtagcaccttgctctcctttgccttcagagaaaccggaagcaatggcgtctgctactctcctcaagtcatctttccttcccaagaagtctgaatggggtgccacccgccaggctgccgtccccaagccggtgactgtctccatggttgtccgcgctggtgcctacgacgatgagcttgtcaagaccgcgaaaaccattgcatcaccaggaaggggtatccttgccatggatgagtcgaacgcgacctgcggtaagaggcttgcgtcaattggccttgagaacaccgaggccaaccgccaggcttaccggaccctccttgtcaccgcaccgggcttgggacagtacatctnncgtgctatcctcttcgaggagactctgtaccagtcaactgtagatggcaagaaagatgtcgacattcttactgagca

SEQ ID NO: 415031 - DNA, 461 bp, Oryza sativa
gttataatatggatgcaaaggaggctttaaatggagggagactaagaagccaaatcctaatatccttattggagcactggttgctggccctgataggcatgatggcttcaaagatgtccgtacaaactacaattacacggagcctactcttgcagcaaatgctggcctggtggcagccttgatttccctaactaacattcacgtcaaaagtggaatcgataagaacaccatcttctctgcagttcctccgatgtttccaactcccccacctccaccgtcagcttggaaaccatgaagagtcagatcgctgaatatttcttgagcatcaaacggagggaacgacagatgtttgtttggtacagcaaaggacacatacagaaagcagacaacataagcttacagagcctctattttctgtatcagtatgacagatcggtatatattcatctgtcgacaataga

SEQ ID NO: 415032 - DNA, 444 bp, Oryza sativa
  unsure (1)..(444): unsure at all n locations
ctcaccgttaccgccaccgacgagctccggtcgccgccggcgagaggcgccgtgcgatcccgggagatgccgccgctcacggggcccaagtccggggacgccctcttcggcagcgtcgagcgcgtcaacgcggagctgttcacgctcacgtacggggccatcgtcaggcagctgctcacggatctggaggaggtcgaggaggtcaacaagcagcttgatcagatgggctacaacattggaactcggttggttgacgagttcttggccaaatcaaatgtatcaagggtgtgttgacttcaaggagactgccgatgtcatcgcaaagcttggattaaaatgttttgggtgtgactgcaactgtcaccaattgggatgctgagggtacaagctgcagctttgtattggagggacaatctcttgtagactntgttggactttctgata

SEQ ID NO: 415033 - DNA, 400 bp, Oryza sativa
ctgttcagcccggagagacgatctcgttcgatcgatcgatggagtgcctgcttggcttgctcaaggtgcgcgtcatgcggggcctcaacctggccatctgcgacccgctcacccacagcagcgacccctacgtcgtcctccgccacggctcccagaaagtcaagtcaagtataagatatcattccatcaacccagaatggaacgaggaactcacgttatcaatcacaaacatgatgctgcctgttaaaattgaagtgtttgacaaggacaccttcaccaaggacgacagcatgggcgacgcggagttcggcatcctggacttcgtcgagatcgccaagcaggaccacagccatctcggcgacggcgcggtgatgaagaccatccacccggacatggagaa

SEQ ID NO: 415034 - DNA, 515 bp, Oryza sativa
  unsure (1)..(515): unsure at all n locations
ccctaacctccgcctcctcctcctccccctcctcccatgcccgcatcgagatcttagccgcgccggagatcgagagggaggagcggcgacgcgggcgcccccgatccctcctcctcgccgccgccgccgccggcggcgccggagcagcagcagccgacgacgacgacgaccgccgcagcagccgatcgggggagggggaggnggagggactctatggaggcggactccgggaagctcttcgtcggcggcatctcgtgggagacggacgaggaccgcctccgcgagtacttcagccggttcgggggaggtcaccgagggccgtcatcatgcgggaccgcaacaccggccgcgcccgtgggttcggtttcgtggtcttcaccgacgcaggcgtcgccgagcgggtcaccatggataagcacatgatcgacgggcgcatggtggtagcgaagaaagctgttcccagggacgaccagagcatcaccagcatgaacaatggcagcagcatagggtcacct

SEQ ID NO: 415035 - DNA, 558 bp, Oryza sativa
  unsure (1)..(558): unsure at all n locations
aatggcgtcctccaccaagatccccttcctcctcctcgccgtcctcctcctcctttccgtcgccttcccagcggaggtgatggcaggagggcacgggcgcggcggaagcagcggcggcggcggaggggtggccggcggcgggaacctgaggccgtgggagtgctcgcccaagtgcgcgggccggtgctccaacacgcagtacaagaaggcgtgcctgacgttctgcaacaagtgctgcgccaagtgcctgtgcgtgccgcccggcacctacggcaacaagggcgcctgcccctgctacaacaactggaagaccaaggaaggcggccccaagtgcccctaagatgcatgctttgtttcttttcttctttttttttaccctatgattaatacctcctcctactagttctacattggtgtcactgcctcactgacactggtttagctcatggatccggttgattagttaaatggtgggggggttatngcttagatctggggctataagtattagtttattctgttctagtagggggtgtgttgggggaatgtgtgtgagaa

SEQ ID NO: 415036 - DNA, 428 bp, Oryza sativa
gactagcatccgaaatgtcatggacatgaatgctaatattggtggatttgctgtggcactaagcaatgatcctgtctggattatgaatgtagtaccccatacaatgagcaacacattgcctgttatctatgatcgtgggttaatcggttcttaccatgactggtgcgagccattctcaacatatcctaggacatatgatttgctgcatgctttccacatcttttctcattaccaaagtcggaaggaagactgttcattggaagatatcatgctagaaatggaccgtatcattcgccccgagggttttatcattattagagatgagaatgccatcttgtcaggaatcaatgatcttgcaccaaagttcctttgggatgtcaccacacatatgttggaaaatgaggaaagcaagccggagaaagtcttgg

SEQ ID NO: 415037 - DNA, 435 bp, Oryza sativa
  unsure (1)..(435): unsure at all n locations
tggagcccaacaataataatccccccttttcatcgcggcgacgatacccgccattttcatctcattctcaccaccaaaagcgaccacgcagcgaccggccaccgatcgagatggagcagcatgaggaggcagcggagaggaagccttcgccgccggtgatattccggctgttcggcgtcgaggttcgcggcggcggcggcggagttgatcaggaggagtacgaggaggaggaggctgactggtaaaattgaantgtttgacagggacacctttaccaaggacgacagcatgggcgacgcggagttcggcatcctggacttcgtcgagatcgccaagcaggaccacagtcatctcggcgacggcgcggtgatgaagacgatccacccggacatggagaactgcttcgcggtggatagccacattacatggaaggac

SEQ ID NO: 415038 - DNA, 364 bp, Oryza sativa
gccacacaaggttctgaccacctaaggcaggtcttttctgcgcagatgggtttgagtgacaaggacatagttgctctttctggtggtcacaccctgggaagatgccacaaggagagatctggctttgagggagcctggacgtccaaccctttgatctttgacaactcttacttcaccgagcttgtgagtggcgagaaggaaggccttcttcagctgccaagtgacaaagccctcatggctgacccagccttccgtccactggtggagaaatatgctgcggatgaggacgccttctttgcggattacgccgaggcccacctcaagctctctgaaccgggatttgctgaggaataagaagccttta

SEQ ID NO: 415039 - DNA, 450 bp, Oryza sativa
  unsure (1)..(450): unsure at all n locations
cctccgcctccaccaccacccgccgctcgccgctcgcccaccatggccatggcgacggcgctccgcaagctctcctccgacgccctccgccgccagccgctctcccgcatcaccccgctctactacatggcgtccctgccggcgacggaggagagatccggagtcacctggccgaagcagctgaacgcgccgctggaggaggtggatcccgagatcgccgacatcatcgagcacgagaaggcccgccaatggaagggtctggagctcatcccgtcggagaacttcactcggtgtcagtgatcaggcggtgggatccgtcatgaccaacaagtcagcgaggggtaccccggcgcgagatactacngtggaaacgaatacattgatatggtcgagtcattgtgccagaaacgtgctttggaggccttccgcttggacccagcgaaatgggga

SEQ ID NO: 415040 - DNA, 404 bp, Oryza sativa
caggcacaccttgcttccgtgggtatggcaggcgtgatggtgagcgcaggaggaagtctgtccgtggttgcatcgtcagccaggacctatctgttattaacttggtgattgtcaagaagggtgagaatgacctgcctggccttactgacactgagaagcccaggatgaggggacccaagagggcctccaagatcaggaagctcttcaacctttccaaggatgatgatgtccgcaaatatgtcaacacctaccgcaggacattcactaccaagaatggcaagaaggtgagcaaggctcctaagatccagcgtcttgtgactcccctcaccctccagaggaagcgtgccagaatcgctgacaagaagaagagggatcgcagaagaagtcggaggctgctgagtacc

SEQ ID NO: 415041 - DNA, 390 bp, Oryza sativa
gggtgagatgatggaggctggtttggagcctgataacacgacctacacaatggtgattgatgctttctgtaggaaaggggacgtgaagacaggccttagactcctgaaggaaatgcagaataagggtagaaaaccaggagttgtgacatataatgttattatgaatggtttctgcaagctggggcagatgaagaatgcagacatgcttcttaatgcaatgattaatataggtgtatctccagatgatatcacatacaacattctcttggatgggcattgcaagcatggaaaagttacagatattgaagaactgaagagtgcaaaaggaacagtgccagatttgggtgtctatacttctatagtcggtgaaattgtcaagaagaaaacaac

SEQ ID NO: 415042 - DNA, 428 bp, Oryza sativa
gtccgatcatattcgattcttattcttattcgaaataatccgtatttgtttccgtattcgttttcgtatccggtaaaaaatatgaaaacgaatatggtatgaacattatccatccgtatccgctctgttttcatccatacttcgaagtcgatggtaacctcaatctttttccaaaacaacctgcatttcgtcattaattccaagagaaattattgtcagcttttgtctaagatttttggtacggattattcgctctatgcttcttagattattttttaaaaaaaacttctgctgtcatattcacctggtctaaactattgtgaagtttatttctcaaaatattgtttattgtgttaaataagtataaaaatctgcctcaataattacgcaaaatcgatttcaatggggtgacacacattttagataaa

SEQ ID NO: 415043 - DNA, 363 bp, Oryza sativa
ttttgttaccaactcactaggtgagtttcactagatagaaagcataccacatgacacagcactgcattcttaattacgtacacaccacaagactggagaggaaggactacatcatcgtacagacgccatagatgtctcaaaacatctttattcttagcacttatttaactaggatgcatttcttcagtctcaggtcttagatcacaaactcagaggaaacacaaagttacagtgacaataactcatcacttgtaactggatcaaactactagcttagcagtactaggcccttccatcttcttggtttcgtcaggaggttgcttgcttcacttgccgcagttgcaggggttgcaggtgcagttg

SEQ ID NO: 415044 - DNA, 407 bp, Oryza sativa
gaatgaatgatgtcgtgctgcggaggaaactgcggctgcggatccggctgccagtgcggcagcggctgcggaggatgcaagatgtacccggagatggctgaggaggtgaccactacccagactgtcatcatgggtgttgcaccttccaagggtcatgccgaggggttggaggccggcgccgccgccggagcaggagcagagaacgggtgcaagtgcggcgacaactgcacctgcaacccctgcaactgcggcaagtgaagcaagcaacctcctgacgaaaccaaggagatggaagggcctagtactgctaagctagtagtttgatccagttacaagtgatgagttattggcactgaactttgtgtttctctgagtttgtgatctaagacctgagactgaagaatgca

SEQ ID NO: 415045 - DNA, 500 bp, Oryza sativa
gttgtatggatgcatacccaacttgcacaaaatcaaactcaggatctcgtattgcagtacattgatcagctatgtgaccgtcttcctagtcctatgggagaatcatctgttgactgcagcagccttgcatccatgcctgacattgccttcacaatcggtggcaacaagtttgttctcaaaccagaacaatacatcctgaaggttggtgagggaactgctacccagtgcatcagtggattcacagctatggacattcctcctctcgtggtcctctctggatcttgggagatgtctttatgggagcctaccataccgtgtttgactatggcaacctgaaggttggtttcgcagaggcggcataatgcccccatggtgatcggacgagtcggagagcccttagcttttcagtcgggtttatctcccgcagcgtgtaggtatatattttagtgcatgctcaataaatatggctactgtgatctaaaacctgtctgttttatttg

SEQ ID NO: 415046 - DNA, 350 bp, Oryza sativa
tttgttttttttttttttttggttttttttttttttttttttttttttaacaaaaaacatcatccttatttttcctttaaacgatcaaatttaacttaattttaaggcactttttttttaaacctttcctcctcaccagggagggaggctgctttttttacctcagctggtgatctgcgagattttttttggtggtttccctctgtttcttccgctggggagtgaatgaaggtaggtgttgtttgttgtccccaatgactttgttgcactatttgctctcgacgggcttgcggaggagcaccatgtgcatcggcgtgaagatgccggtctcgcccccgcgggtgaggtgc

SEQ ID NO: 415047 - DNA, 356 bp, Oryza sativa
tcgggtttgctctgctgcgagggtgggtgttgcttgtaccgggcggggatggaggcggcgacgatggcgtggacggcggcgggggtggggatggcgctggtgtactggttcgtgtgggtgatgggagcggcggaggtgaaggggaagcgggcggtggatctcaagatgggatccatcacgaacgacaaggtgaaggacaagtacacgcagtactggtcgttcttccgccgtcccaaggagagcggcgaccaccgaggcctccgcgagaaggtgccggccttcgtcgacaccttctacaacctcgtcaccgacatctacgagtggggtttgggggtcaggacgtttcactttctccc

SEQ ID NO: 415048 - DNA, 421 bp, Oryza sativa
  unsure (1)..(421): unsure at all n locations
gctaaggctgagacaaaggcgaatgcatctgttatatatgttccaccaccatttgctgctgctgcaataatggaagcgatggaggccgaacttgaccttgttgtctgcattaccgaagggatacctcagcatgacatggtgaaagtgaaggctgctctgaacaagcaatcaaaaactcggttgattggaccaaattgccctggtatcattaagccgggtgaatgtaaaattggaatcatgccaggttacatccacaagctcaggtcgtgttgggatagtatctcgctctggtaccttgacatagaaggcggtgtttcaaacaacagccgtaggctgggngcagcaacgtgtgttggtttgtnggtggatcccttcaatggcacgaatttgtttgattgcttgaaaggtttgtggatgatcc

SEQ ID NO: 415049 - DNA, 484 bp, Oryza sativa
aaaggaaacacaactcatttgttattgatatatgttggagggatccaataaaaccgatacaagtcacgaaaaatcagactagatgaatccttcgagatcacatgagcaaaagctttcgacgaaagctgtcctatagtcgtggaagcaataacacttgataaagataggaattcagacacgagaggttgcagactataagatgtcatcaaatctccttgaacgccgcgaagagatcaccgttgatgtagtcgttgtccacaagactaaccaagaagtagctcttctggaccttgtctagtatctccctagatgagtcgccctcagggaacaggcaagcccaaccctttgaccaaatttcgaaagcttcgtctttccaaaccataaagctggctgagtcaacgacagttggctggactatttccttgccagggaaaacaccccatgtgaccgcattcacagcgttttggggaaatgttgagatgac

SEQ ID NO: 415050 - DNA, 511 bp, Oryza sativa
  unsure (1)..(511): unsure at all n locations
aagataacgaggaggcggtcaaagcatatggaatccaccttggtactgaaatgtgcaagaaaattttagctactggaatcaagaccttgcacctttacacgctaacatggagaagtctgctctaggaatattgatgaaccttggattaattgaggagtccaagatctcaaggtcattgccttggaggcccccaacaaatgttttccgtgtcaaggaggatgtccgccctatattctgggctaacagaccaaagagctatatttcaaggacccttggtctgggatcaatacccacatgcgggtgggggtgattcccggaacccatcgtatggagcacttactgactaccagttcactcgccacgggaggnngtacaggaagctcaagagatntgggcggctccgtgaaatctgttgaagacattaacgagcgattatgaacttctgtaaggaaaacttacatgcagccatggtctgagcttgatggccttaacctgagacaaagaattagac

SEQ ID NO: 415051 - DNA, 458 bp, Oryza sativa
gatccctgatcccccccaccgccgccgccgcccgatcgtaccaaatccccactacgcgtcccaattccgggccaattcgaccccccgagcgaccgccatctactcacctcccgatcgattcggatccccaatctagcgggcgcggggcggggcggggaggcgggattgggctagggttttgtgggggattggtgtattggattaggtgatggcggagaagggatgccttaagcgcctccagaaggagttccactcgctctgcaaggagccgtcgccgcagatcgtggttcgcccgctgcccaacgtcatattggagtggtattttgtacttgaaggttgtgctggccacaccatttgaaggtggatattatttactggaaactttaatttccacctgattactcttttaagccttcaagctttcagtatgactccttctagcgtatggtttgtccctc

SEQ ID NO: 415052 - DNA, 314 bp, Oryza sativa
cagtgtttatatctgctaaactctctgactttggtctggcaaaagctggcccagaaggcgatcaaacccatgtatcaactcgggtgatgggaacatatggttatgctgcccctgaatatgtgatgactggtcacttgactgctagaagtgatgtctacagctttggggttgtccttcttgaactcttgactgggcgtaagtccatcgacaagtcacggcccagcagggagcatagccttggttgactgggccctccccgatgctgatcgacatgaggaggcttatcctaattattgacccaaatctgtgaggta

SEQ ID NO: 415053 - DNA, 382 bp, Oryza sativa
gtcaggctttcagacttcagaagttcagagacttcatttaaactggtgtgcctctgtctagaatcctatgttgactggagttatatatctgccttgaccggccaaaagaagccagatctaggaaaatagataaacctagaaataatagaagaaaccaaaatctcaaggacattgccataggaggcccccaacaaatgttttccgtgtcaaggaggatgtccgccctatattctgggctaacagaccaaagagctatatttcaaggaccctcggttgggatcaatacccacattggcggtggtgtgattcccggaacccatcgtatggagcactttactgactaccagttcactcgaccccctgggaagggttaagaagcttc

SEQ ID NO: 415054 - DNA, 362 bp, Oryza sativa
gcaggaacacggattgggcgtgtaattaaacagtgtggggggcgaacagactactacattttctcagcacttatcattaaacagaaaatcacaggtaactctggcaaagcccaaaaagactagcaaaaagtgctggcaacagtgcaaggcaatacctcgagcacactgagatgggttcagcactcaacggatcggcttggctacacgctcaatcttatacttgttcttgatggcatagctggcggatgagcccttggcggcattgatgagctcattagcaaggcactcagcaatggcctcgatgttcctaaagggactcttcctggcgccagtggtgaggacgtagattggctgcttgaccc

SEQ ID NO: 415055 - DNA, 428 bp, Oryza sativa
  unsure (1)..(428): unsure at all n locations
ggaaaaagcctcgggttccttttactaaaaagtttccaggtgtggatcctatggctctccatttgcttgaacgccttcttgcttttgatcccaaagatcgtccaagtgcagaagaggccctgacagacccctactttaatgggctagcaaactctgaacgcgaaccaatagcacagcctatctcaaagcttgagtttgagttcgagaagaggaaattggccaaagatgatgtccgggaattaatttaccgagagattttagagtatcatccccatatgctgcaagaatatttacgcgggggagaccagatgagtttcatgtatccaggcnggtgggatcgcttcaagcgtcaattcgctcatttggaggaagggagtttcaaagggtgaataattccagtccacagcttcggcagaatggcttcctta

SEQ ID NO: 415056 - DNA, 320 bp, Oryza sativa
  unsure (1)..(320): unsure at all n locations
ctactggacatactctactactactagccagtaagctagctaactaactacgtggctatggcccccaccgtgatggcctcctcggccacctccgtggctccattccaagggctcaagtccaccgccggcctccccgtcagccgccgctccaccaactcgggcttcggcaacgtcagcaatggcggaaggatcaagtgcatgcaggtgtggccaattgagggcatcaagatgttcgagaccctatcgtacctgccaccactacgtnggagggatcttttggaagcagaatcgagtaccggntttcgatcaaagtgggtgcc

SEQ ID NO: 415057 - DNA, 431 bp, Oryza sativa
agtatgggaactgttcaactttcataacgacagaggtgattctcaggctgggcaatcaggctagtaaagatcaccgtaaacaagcaaaggggttcaaggactctagataagtctaaaccgtcatataacaacaacaacggcaaataaaaaaacagagaaaggtttgcctcctgcctgttacctctggtttggccaattaccgtcaaaatacatcactggcagcctttaacgtttacacactccaggaaatattatctactggaggattatgggcattatgtacatatcttaaatgaaacgtgacaatccacggtatgctgcaggaagttcagttgggaagcagacaacggcataattaaaggactctcagctgagttagaaaggcagagcacaggtccagaaagagaagctgtggtccactgaccctttgc

SEQ ID NO: 415058 - DNA, 470 bp, Oryza sativa
gcagactttggcttgagtaatgttatgcgtgatggtcactttctgaagacaagttgtggtagcccaaattatgcagcacctgaggtgatatctggtaaactatatgctggccctgaagttgatgtgtggagttgtggtgttattctttatgctcttctttgtggtacccttccatttgatgacgagaatattcccaacctttttaagaaaataaagggtggcatatatacccttcccagtcatttgtcacctttggcaagggatttgattcccagaatggcttgtgtatgatcccatgaagaggatcaccatacgtgaaatccgtgacatcagtggtcacagttggtctccgcgttattaagctgtgccacctcctgacactgcacaacaggttaaaaagctcgacgatgaaactctgaatgatgttatcaatatggggtttgacaagaataggctaatcgaatcacttc

SEQ ID NO: 415059 - DNA, 482 bp, Oryza sativa
  unsure (1)..(482): unsure at all n locations
gctggaaaatttgatgaggtatttctcacttatatcatgatatacaaatactaacacatgcgaaaattatcaagcagaaaagttccatacaaattcatccagacaaacaagtgtaaaaaaccttttttttcccatttcccccttgaactatccgtaaataccaccattccaccaaactcccctctgtcttctacgacaaataatcttttcaacccagtaacttataattaattacagagagattagcaaacatataatggtaagaatcagttgtcgtaggtgcggcactcgtcggtctccgggttgtccttgcagtaggcctcgagcgggtcggaggtctccttgagcttgtcgcgcgcgtggctcgccgccgcgctcagctcctccaccttgtcccacgccgncgngcactcgcncgtcgccgtgtcctccgcgcacgcctccttcgccttgtcgatgctctccgacatcttgtccgagat

SEQ ID NO: 415060 - DNA, 449 bp, Oryza sativa
gaaccaagtgatccaattggtattcactaattaagcaaaaaaggaaataaaaacaagtacaaaattgtttgacaaaaaaaaaatcgagcacgctagcacgaggacaatgtacgtgtcacactctcctagaccttaatgttgaccaggcgctccgacgccaacgacgcggcgtccaccgtcatggcgcggacggtggcgttcgttcccagggacgggtggctcactgtcaggttgtagtcgccgtgtgggaggtcgagctcgacggcgccgtcggcgccggtcgtcgccgccgtcttgtgcgtcttccactcggcgatcagcttgtcgacgagggtcccaacgggcaggttcttgaagctgttgtccgtcaggcacatcacgtagcaacccttggcgtgccacgccgcccacattatcatcccgttcaccgacgggtgcgcgtacccttc

SEQ ID NO: 415061 - DNA, 345 bp, Oryza sativa
  unsure (1)..(345): unsure at all n locations
tacccacccaccctctcgccgtcgcagatccgatccaggaagagctcgccgccgccgctgccatggcgctctccgtggagaagacctcgtcggggagggagtacaaggtgaaggacctctcccaggcggacttcggccgcctcgagatcgagctcgccgaggtcgagatgccggggctcatggcgtgccgcgccgagttcggcccctcccagccgttcaagggcgcccggatctccgggtccctccacatgaccatccagaccgccgtcctcatcgagaccctcaccgcccttgcgcncgaggtccgctggtgctcctgcaacatcttctccacgcaggaccacg

SEQ ID NO: 415062 - DNA, 451 bp, Oryza sativa
ttttcctctcgaccggccacatcttactgcgggtttggtttcattttgataacagtcaacactagctactagctagattaattaattaattaggcatggcggatgataagcaccaagaccacctgctccaccacaagaaggaccactagccggccaccggagtagactcctacggagagggcgtatacacgtgggagaccgtgaccaccgaggtggccgccggcggccaggacaagtacgagaggtacaagaaggaggagaagcagcacaagcacacagcaggacctcggcgaggccgacgccctcgccgacggcgcctccgcccatgatgagaagcacgaggcgaacaaggacccggtgaaggcgcacaggcacatgatcacggaggatatcgcggccacgggggcggccggcgccgggggctacaccttggacgagcaccacgagaaga

SEQ ID NO: 415063 - DNA, 484 bp, Oryza sativa
cagagaacaaggtctgggggatatatataattctgggggatttgaatacacataaacgatcaaactgtgaaacggtacaggatctgagataattaggaaactacagagcagcagctacaatattaaccatagcagctgcaggataaacacggtgctaaataggcaggctttgttcttctttcacagcctggatatctggaaggggaccatgacttcagtcatctcctccctcatgataatcttcccaacctggaaaaggtcggagatgcctagctgcgtcgacagatgccttcggcaatcctctgcagcaacaatgcctgaagaataagcttcatgcacggacccagagtgatcgatgcaggcggcctccccagcgaaaaacaggttgcccaccggagcacagaatctttcatacaagtcagctggcttcccacaaggtcgcaggaataagaaccaagcgaattcgggtcggttccccaccttt

SEQ ID NO: 415064 - DNA, 545 bp, Oryza sativa
atgaattcctttcttcgagggttatacaaacattttcagcatcctgctgacgcatgcacttgatatacatatgaacaagtatagtttgcattaccacgttcatttcagaacccatcttgatgagatgagcgtgtatctgccttccataatgcaatagtccttggtaccggcaaaggcttaaaagccctgccaaagtgtatttgtcaggcctaatgcatgccagctccatttggcggtaaatatttatcgttgcaactggctgtccatctgctgcataacctgaaagtagggcattccaggaaataaggtttctctcattcatccgaagaaatagtagccgagcgacctcaatgcagccacactttgcgtacatgtcaataagctccgtttccaaaaccacattcatcttgtttatggtcttaatggcatgcccgtgaatttgccttccatactctttatacctctgactgccacagagcttaagaaggttaagcaaattatgcctgttatactttatgtttgcacaacccattttgccggaaaat

SEQ ID NO: 415065 - DNA, 378 bp, Oryza sativa
ggaaacgaatgagagtcattattgcaaaaacatcatcttcttcttcatcttcttaggggacacaacaccaactcgatcattatctcgtcggactaaacccatcttccccaacccaaagacaacgaactcgctggccacaaatccatccaaccacaattaaccactgctaagctacggtcccccacttcacttgccggggacgaagttggcggtgtacgcccaggctttgttgttgacggggtcggccaggtggtcggcgaggttttcgagggggcccttgtcggggactatggtctggacgaataagccgaacatggagaacatggttaggcggccgttcttgatcttctttaccttgagctccgtgaacgccttggg

SEQ ID NO: 415066 - DNA, 322 bp, Oryza sativa
tggtatcggcgccgaccgcgtcctctacctcggcccgctctccggcgagccgccgagctacctcaccggcgagttcccgggcgactacgggtgggacaccgcggggctctccgccgacccggagacgttcgccaagaaccgggagctggaggtgatccactcccggtgggcgatgctgggcgcgctcggctgcgtcttcccggagctcctcgcccggaacggcgtcaagtttcggcgaggccgctgtggcccaaggcggtctcgcagatcttcagcgagggctggtatcgacttccttcggcatctcgagcctggatccacg

SEQ ID NO: 415067 - DNA, 284 bp, Oryza sativa
gaaaaataattacctccaaaaaaaagaaaaaaaagggagaaaaaacgccgcgggttggattaaagagccgccgccgccgtcgccgccgaagtccgcaggtgcgaggacgccgacgagtctccagagagcagggtaagacaagatgaacaggaagccaggagactgggactgcagggcgtgccagcacctcaacttcagccgccgggacctatgccagcgctgcggcgagccgcgtggcgccgctgatcgcggcagcggtggtggccggtgactacgccaacttc

SEQ ID NO: 415068 - DNA, 445 bp, Oryza sativa
gcatgacttgtttatgagagccccaacatgaatagggcagtaagctttgagtacatgaaccggcaactggtttggaatgaattttcggaaatgttgcttttgctttttcccctcttaaactcatcctcagtaaagaagtttcttctacctttctccaaagataaatcagcaagttcttctggcgatgaagcagactgccctatatgtcgctccagtcctagcattcccttcgaagctctcccatgtcaacacaggtattgctattactgcctgcaaacacgttgtgcagccacaaactcgattagatgtgcaaggtgtaatggacttgttgttgcaattcaaagacaaggatcaagttagtttagagttgaatccatatacatacagtgtaacaaaagccaatacagcttactggattcgcgacatctcacatgattttttccca

SEQ ID NO: 415069 - DNA, 460 bp, Oryza sativa
aaaagaaaatcgacatgtggcgtatttgtttctgacattttgcatgcaaaaagctatagtaattttactctgaactctgaagatacaacgccatgaagctaaacccaagcaaatcaaaccgtctgagccgatcgaattgcatcagaatccacacgcttcggtctcatcacagattgcacatgcgctctcagcatgtgtgcctctcagccgggctccctcgcggcgtccgtcgcgtcagaggcggcgatgcagatgtcggccttcttcagcgctagcgcgtgcgatgttggcggcgcccctcgcggtgtccgtcgcgtcagagacggcaatgccgaagtcggccttcttcagcgccagcgcgtcgttcacgccgttgccggtcagcacaggtggcctcctcgttgaatgaacctcacgatctcgtacttgtgctccgggaacacgccggcgttcaccggaa

SEQ ID NO: 415070 - DNA, 409 bp, Oryza sativa
  unsure (1)..(409): unsure at all n locations
gcagtaacatcggctgctgtgatatactgcttacggtgcttggtcgatgttgatatacctctaaatcaaggctgcctagcccctgtgaagatcctaattcctaaaggctctttcctttctccaagtgacaaagctgcagtggttggtggtaatgtattgacctctcagagagtgacggacgtagtcctaatggctttccaagcatgcgcctgctcccagggttgcatgaacaatttgacatttggagacgacaccttcggttactatgagaccattggaggcggttcaggagctgggncgagttgggcatggacaaggtggtgttcagtgtcacatgacaaacacaaggatgactgaccaagagatctttgagcagcgataccccgttcttttacatagatntagcatc

SEQ ID NO: 415071 - DNA, 550 bp, Oryza sativa
ggtttcggttatggaggcggcccatcgtgtgctggagcatgtgactacgacggacgcgtcgtaggccgaggcgctgtacctccgtgttctacgacgccttcgtgctgaggggcatccgcgaggaggccgaggagcccggccgcctgctatgccgcttcaccgcgccctacagactcctgaattcgggcggcttcctgcacgggggtgccacggcctcgctcattcacctagacgactccgccgtgttgcacaccaccggcaacagcagctgtagctctagctctacctcgcccctggagatgaacatctcctacttggatgcagcttgccccgatgaagagattgagatcgaagcaaaggttcttcgtgccgagcaggcagttggcgtggcgctcgtggacctcatgaagaaatcgggcaaactcattgctcaagcccgatacttcaactaccttgcaccatttagcaaactctagtaatcatctgtaatagggagataggaaaaccaattcgccataccaagagtgagttcatcattcatccatccatc

SEQ ID NO: 415072 - DNA, 540 bp, Oryza sativa
aatcccaaaaatcacatagaacaaatgttccatgatttcacaatcttgaatagtaaaccacactagtcagctctgccagagaaaatgatagcctcttgttagtgacaaaaaatggcaactgtcttcccatgcatccatccatacttattattgcctagcccagcaaagcctatgtaaagaatccactggcatataatacttgtttacaaaaaaaaaaagactaacaatgaccagtacttatttcatggtttcttcttttggagggccttcagcaatcttgtcacttgtttgcgtttgggcgtctttagactctatggcggtggcctgagctctcttacttgcgatttctctttgcattgctatttgatcttgcattactttcgtcatctcctttatttgcttctcttctttctccagttgcatgtccattatgatcttagcattcttatcgattggtttgaaatattcatctatggcggtttcagctttttcaagctgctgattgagggcttgcatctgctgaacatttgacgaactttg

SEQ ID NO: 415073 - DNA, 537 bp, Oryza sativa
  unsure (1)..(537): unsure at all n locations
gaacacaggggtccattcgaatagttactgctatatagcttgctattagtctacaaaccgcataaacaaggtaatagagatacaacacactaaggattacacaagctttacacccccaaaatcgtggcacggcattgcaaacagaacagaattgaaaagcctagttagttttccagaactatacaaccaaactaacggaattatggacaaggtggggagccccaactgaaagaatgaaccattcaaatgctacctacttgccagcttgctagaatacagttatagctctgaaagaattgcaggaatatagtgtgaaagctcagctgtgagcgactgaaagccattgactagttgagtgtggaattcctggtcttcttcccctatcaatctaaaatgcacacggattgcgcgcttgcagacggccatgaattccagcaatgcaccgatgagctgctgcagttcttgagatcggagcctagttgcgggctcaccagatangaatgcagtgcacacacttaatacaccactttttacctg

SEQ ID NO: 415074 - DNA, 538 bp, Oryza sativa
  unsure (1)..(538): unsure at all n locations
gcgttgaagaggccaatgacaggtacgtggagcagctagtaactagtgctgaggctgcagttgaggaagttgttaggagagggattgagctttattttcactgttctttaggtggctcaccctgataaaattgctgttggtggtcattcatatggtgcattcatgactgcaaaccttttagctcatgctcctcaccttttctgctgtgggattgctcgttctggagcttacaacaggacactgacaccatttgggtttcagaatgaggacagaactctatgggaggcgactaacacctatgtcgagatgagccctttcatgtcggccacaagatcaagaaaccatatttgcttattcatggagagcaggacaacaactctggaacacttacgatgcagtcagaccgattcttcaatgccttgaatggccatggcgcactatctgnnttggtgatactcccttttgaagccatgggtattctgcgaggggagcatatgcatgttctgtgngagactgatagatggctgcagaagtactg

SEQ ID NO: 415075 - DNA, 416 bp, Oryza sativa
cgccaccacaaaaccctagccgccgccgccgtcgccgccgccgccgccatggccacccaaacccgccccctcgtctccgtcaaggccctggagggcgacatggccaccgacaacagcagcagcctcgccctcgccgaggtgttccgcgcgccgctccgccccgacgtggtccgcttcgtccacaggctgctctcctgcaacaagcgccagccctacgccgtgtcccgccgcgccggccaccagatcctcgcggagtcgtggggcacggggcgcgccgtgtcgcgtatccccgcgtccccggcgcgggacgcaccgcgccgggcagggagccttcggaacatggcgccggcgggcgcatgttcgcgccgacaagacaggcgcaagtggaccgtcggttaaacgtcactcgccgtttt

SEQ ID NO: 415076 - DNA, 465 bp, Oryza sativa
caacagatggggccattttagggatgtgataaccgcatatcaaaatatcgatccatgagagtatgtatgtcagttcgaaccacttcactcgcggcagcgaggaagtcgaaaagcttattcacgactcatctagcaaaacttgacgataagcctatctcaagttcttcatacaagcattgacattgcaaagttacaccgagaggtctgaaacaaaagtgcagactgctgatggagacaagccgaattagcttacgcttcatcaagggcaagaacacctgggagggtcttgccttccagcaactccaagctagcaccaccgccggtggagatgtggctcatcttgtcggccagcccagccttctcgaccgcagcaacggagtcaccaccaccgatgatggtcgtggcgccctttggggagtaagatcagccaacttcttggcaattgcatcagtgcctgctgaaact

SEQ ID NO: 415077 - DNA, 475 bp, Oryza sativa
  unsure (1)..(475): unsure at all n locations
ataattaattcacaacaccgtatttcattgatcaggttcagaacctgcacagaaatacacactaccggtacagatctcaccttctctccaatactcgtacatccatccacgcggtccacacgaatacgtacatctatacggtacacgtacgtacatctactgcaccgngtacacacacgcacactctcctgcagagacgcgcatcgtcgtcaacctagctagcttagctgaaggcgatgcgtcgccatggcagcacggcggcggcggcgctcacttgccggggacgaagttggtggcgtaggcccaggcgttgttgttgacggggtcggcgaggtggtcggcgaggttctcgagggggcccttgccggtgacgatggcctggacgaagaagccgaacatggagaacatggcgaggcgggccgtcttgatctccttcaccttgagctccgcgaaggcctccgggtcgtccgcgagg

SEQ ID NO: 415078 - DNA, 699 bp, Oryza sativa
gtgatccactctcaggtgggcgatgctcggcgcgctgggctgcgtgttcccggagctcctcgcccgcaacggcgtcaagttcggcgaggcggtgtggttcaaggcggtgtcgcagatcttcagcgagggcgggctcgactacctcgtcaacccgagcctgatccacgcgcagagcatcctcgccatctgggcggtccaggtggtgctcatgggcgccgcctaggtgttccgaattttcgtctttcctttctgtttaggttatcttttctattttttctcttttgttgtttatttttttttttacttttttacattctttttttattttttttatttcttatttttataagttttgtattttttttattatttatttttttttttttattttttttaatctcttttattttttttctttttttttttatatatttttttttttctttctttagattttacttttatatttatttttttttttttttattactttcatttttctattttttttcttatattttattttttttttcttttaaattttttttcttcttcttttcttacttatataatcttttattttttttttttcttttatcttttattacttcttttctttattcttatttttatctttttctctatattttattctttcaatttatcatttttttttactttctttttttctattttttc

SEQ ID NO: 415079 - DNA, 491 bp, Oryza sativa
aactggacaggctctccacagtgctaaacaactgaacaacattggttcaaagacatcaagcaggtatacattatgcgggaaccgatcgatgctattgtacagttgggtgtaaattagagccgctaccgactgataccaaccgagtttcagaggattgcgcatcggtttctttgttctgcgggagatattgtcgcctgttggaacctgtttggatcaaaggtgtccaccccatacttttctctcattctttggctccacgcatcgtttcggattggacggtagtcaagggtgggcaccctagggtcagcaacaggttgcttgtttaccaacggctgccgggttgaagaccttggggcaatgtactcgtcatcactggcatagtctgcttgattgcctgactgcactatgagagctacagtgaacagcactgcctcaaatagtacagtttccagtgcaacccactttgcgattcttcaatttttcttcaaaaa

SEQ ID NO: 415080 - DNA, 460 bp, Oryza sativa
gtaatcaaatttgggattttttttaaaagatggggtaaatttgatcgtaacacattcatgctactatctctggcctattggctgcacgtccagcgcacagagcaacgacagaatgaacttcatacacgtggctatgaacaaatacgcatacctgttccaaggattctcatcgaaaggtaagttggcaacactaagcgtgatctctgaggaactcccattacagtgacacgtcggacaagacaggactcgggactcgccagaagtttccagcctacggagttatacaagctcaaggtgatctaaaacccaaagagaacctacctcggtagcccctatctttctcgaattgttgtcaaaatactggagagatgattgtaacagcgagcagcatcccagttcctgaaccaattgccccgatgaaatcagataggacagttaatgcaccaatgcagacttcacc

SEQ ID NO: 415081 - DNA, 372 bp, Oryza sativa
ctatcgttgcgtgcagcactgctcaagctgttgaatgggacgcagactggtccaaaaaccttgatccatctggtcgtgctgctcttggtgttcatgatgctgcatatgaagatactctacaaaaatctcctgcctctgccaatcctgtcttggataacggctttggtccagcccttggggaaagcatggtcaaaaccgttgcttcagccactgccgtttaactttctatcgtcgcataaaactccgtagttttgttgctcttggttcaatcccagcttctttcagacgtcgctagtttcttcaaacatgtaatgcagatgacgtgattctcccggctctgttagccactgtatgctttgtcatgttgtattg

SEQ ID NO: 415082 - DNA, 370 bp, Oryza sativa
gaagtgataatttaaatgcgtgaatttttatagactctttgatggagtattacaacatgcagcagtggcattaatacgccagtacattaattaagttacacatatgcaggctccattttggtttcttttaatttatcgtattacagaatttctgtagccttgcagatgatcacttggatatcatgtactagtaattaacaataggatgcatacaaaagatggcccaacgacaacagaagatgcgtgcatctgacattgtctggccttatttgttggtagtactccaattaattaacaagagatgatgcattcttgtgccttagtttcttcacatgcttggcttcacgttgagcctattcgcaatcttcac

SEQ ID NO: 415083 - DNA, 372 bp, Oryza sativa
gtgttagattgcgaataggctcaacgtgaagccaagcatgtgaagaaactaaggcacaagaatgcatcatctcttgttaattaattggagtactaccaacaaataaggccagacaatgtcagatgcacgcatcttctgttgtcgttgggccatcttttgtatgcatcctattgttaattactagtacatgatatccaagtgatcatctgcaaggctacagaaattctgtaatacgataaattaaaagaaaccaaaatggagcctgcatatgtgtaacttaattaatgtactggcgtattaatgccactgctgcatgttgtaatactccatcaaagagtctattactattaagtattttaaattattcacttc

SEQ ID NO: 415084 - DNA, 468 bp, Oryza sativa
aacaattctgataattgagggttttgtgggcaattttgataacttattacagataacattaagtaaaacacaatgaactgaaaaatgttaaaaacaaaatgattccaaacatatgcattacttcattgtcgagcaataacgaacacatgaaagtatcccctgttttcagagtcttagttttgagctgtcggttgaatcaggcatcaagaggagatgcctgggtgcatcagtcatcatcctcatggtcggccaaatgccaccgaccatccgtgcctttcaccatacctttgttctgcaccacccaccaagacgatggaattgcatactcattcttcagtgcgtcttcgtgtttgttaaccaaagcaatgtctcgatcaatctccagcttgaaccctccgttgctgccctgcgtcccggcaaccccatgcatgtagcacttcatgtcatgccacgttaggggatttccag

SEQ ID NO: 415085 - DNA, 481 bp, Oryza sativa
  unsure (1)..(481): unsure at all n locations
tcggttccaagcatcacagaccaaccatatacggcaaagatgagctccctaagagggcttggaaatatcgccagaagatggagagagctcaatggtgtgagttactggaaggggttacttgatcctcttgacgttgatctccgcaataacatcatcaactatggtgagctttctcaggcagcctacacggggttaaacagagagagaagatcaaggtacgctgggtcttgcctcttcagtcgcaaggacttcctcagagggtgngatgtatcaaacccaaatctgtatgtcattacaaagttcatatatgctatgtgtacttgtcagtttgcctgatgcattcatgataaagtcatggtcgaaggctgcatggagcaagcagtcaaattgatggggttgctttggcggtggccacagatgaagggaaagaagtgcttgggagacggatgtggtggttggatggcgtggaacaatcggatgt

SEQ ID NO: 415086 - DNA, 401 bp, Oryza sativa
aataagaatatggagcattttcaaacttgcagctcaaataaaacatcaacaggaatgagatgcaaatgagcaaattgagcacatatttaggttcaaatccaacttattcataaagcatactgctgtcccacaggaaactgtttcataaaactaacatatcatacggactcgatggtccattaaaccagacacaagttgacatcagcaccacaaatacttgacgaacagaggctcgggatgaccaggcacatcggcagctccaccaaactggctgattactgaccaccacggaggcggagcaccaggtggagggtggactccttcttgatgttgtagacggcgagggtgcggccatcctccagctgcttgccagcgaagatcagacgctgctggtctggggg

SEQ ID NO: 415087 - DNA, 487 bp, Oryza sativa
caaaatcgcatagaaaaaaaaatctcccctcgaagcgaagcgtcgaatcgccttctcaagatgcagatctttgtgaagaccctcaccggcaagaccatcaccctcgaggttgagtcctcggacaccattgacaatgtcaaggccaagatccaggacaaggagggcatccccccggaccagcagcgtctcatctttgctggcaagcagcttgaggatggccgcaccctggccgactacaacatccagaaggagtccaccctccaccttgtgctcaggctcaggggaggcatgcagatcttcgtcaagaccttgactggcaagaccatcacccttgaggtcgagtcgtctgacaccattgacaatgtcaaggccaagatccaggacaggatgggcatccccccggaccagcagcgtctcatcttcgctggcaagcagcttgaggatggccgcaccctgtccgactcaacatccaaaggagtctaccctc

SEQ ID NO: 415088 - DNA, 528 bp, Oryza sativa
gctcttattgaatcgcggtaaagtattctaattcaataaaaatttcgcgggcgaatatttactctttcctgtcttatttgttaattcataaccttatcaaataagacaatttttttggtttgttccgccatcccacccaatgaagtattgggattcttttcaagaaaatcctatccagtcataggttctgtcgttcccactgcttctcctttaatggttaggtttgaatctcgcaatggagcttccaaaaaatttctttccgagtcaatttctcagttttattaactcgggacgctctttgttattccttgaaatttgtatttcttgtttcaatcaaattacgatttcgaattctctgttatttttattatattgatgctttatcacattgctttttatgatgtaattcatagaccatacatattggaatcctatatctttcttatttctcttccttctttctatcatccttccttttatctacatcccctttagttttgcttcacaacttagaatcctatttttttt

SEQ ID NO: 415089 - DNA, 206 bp, Oryza sativa
caaataaggtattaaaaaaaaatagaatgaaccctactatgtaattatagaaaatgaactaataaccaacctattgcttcgtattgtcgagatcctaactaagataacagtcactatatgaataaatacatctatcataaatgagtaaatctatcatatacgtgtagcaactgcaatttcttctttaaaaaaaaataggattctaa

SEQ ID NO: 415090 - DNA, 242 bp, Oryza sativa
gtccggggttgcgccgtctgggttaaagaacagcagtagcaccagcatgggtgctgagaagttgcctgatcagatgcatgatctgaagataagggacgataaggaagttgaagcgactattattaacggcaagggaacagaaaccggccacataattgacacaactactgttggcagaaatggtcagccgatacagacagttagctacatggctgagcgtattgtagggcaaggctcatttg

SEQ ID NO: 415091 - DNA, 502 bp, Oryza sativa
gggggggtgacgacaactttaaatattgctcaataaaacactatctggagacaacacacacgagagtcatatccagaggaaaacaatcagcccagacggaccactagcaccaaatgcaaagcaatgggaagaactaattcgaccgctaccaccctagtaaaaaccagagaagagagaggaaggggggacaggaagaaaaacattctagtagaacaggagaagaatccatccatcatggggacagcagcatgaggcatctaaatcgatggtctccaataacatgcggagccatcgatcgatcgatcttcccattttactggccctcgccggcgtcgcccttggaggcttttttcacctcatcaccaccgtcctccgtgaggtcagaggtccagagggtcaagttgtccctcaggagctgcatgatcaaagtgctgtccttgtaagactcctccccgagggtatccaactcggagatggcttcgtcaaacgcctgcttagcaag

SEQ ID NO: 415092 - DNA, 454 bp, Oryza sativa
  unsure (1)..(454): unsure at all n locations
catggagtaccgtggcaagattgaagctgagctgagcaagatttgcgatggtatcctgaagttgcttgactcacaccttgtgccctcatctactgctgcagaatctaaggtgttttacctcaagatgaagggtgattaccacaggtaccttgcggaatttaagactggtgccgagagaaaggaagctgctgagagcacaatggtggcttacaaggctgctcaggatattgctctggcggatcttgctcccacccatcccataaggcttggactggcacttaacttctctgtgttctactacgagattctaaactctccagacaaggcttgcaaccttgctaagcaggcgtttgacgaagccattnncgagttggataccctcgggagggagtcttacaggacagacttttgatcatgcagctctggggacaacttgacccttggacctctgacc

SEQ ID NO: 415093 - DNA, 417 bp, Oryza sativa
gggggatctttttctgaatgagtgtggcccctcctcctgcacttacatcacccactgtttcatctcatagcaatcactggctcgcaaaaggacacacactgacacaaactcgaggacggacggacaccattgactgccatactccgatcgatcgaacgaacgaacacggtcttatttcggtagcagatcgatcaaattattagctagagtagaagcagagcagacgcgacgacgatggcaatgcaatgcagctccccctccccggaatctaccaggggaggatcttccagcgctggttgtgacccttgcaccactttcacagcacgatctcggtgccatcgtggatgccgccgtgatccttgtcgccatggaaggcgtccaaagtgaggtagatgttgttcaccatgccgatgcagc

SEQ ID NO: 415094 - DNA, 83 bp, Oryza sativa
acaaaaacatttctctcgcgagtcgcgagttgcaccgatcgaattaagggtcgcagatgtttgcgtccgggccccaccacacc

SEQ ID NO: 415095 - DNA, 184 bp, Oryza sativa
aatgtctggttctgtaaatcaacagaagctggaaaagaaatttggccaatcttctgtttttgtcgcatccacacttcttgagaatggtggaaccttgaaaagtgcgagtccagcatctcttctaaaggaagcaattcatgtcataagctgtgggtacgaagataagacagactgggggaatgag

SEQ ID NO: 415096 - DNA, 413 bp, Oryza sativa
gacgcctcgcgtgatcgcatatagcgggggggaaaacgtcaggccagcctgcgcgacaacgtctagttacagataagagcagaactgcaagtcaaatacactcttttctctccatagtagagtttgagcagcgagcgggcaaacataaattattcaattattaaatgatatgatcactcttgatcatctcaacactataggaacaaaacttcgctaccgcgattttactattttagttgtccacaacttcaatgagggttggttcgtagtcagcaggagcctctaaaccatggaagttcattacggttgcagcaacattggcgagcccaggggtctgaatgtcagaccggaatttcacaccagggtgaagaccgggacctccaatagcaaccgggaccggctgaagagtatgt

SEQ ID NO: 415097 - DNA, 313 bp, Oryza sativa
aaccaggcaaaccacacaaatacccgattggttaatttcactgaaaaaagcccgggtccctcacatcacaaaaattcatcccttgaaccacccaaagtcccccaagccaccagctgtttaattaatcgaaaacccccgggtttaattcagcaataattagcacacacccaaaccacccttttttggggggtttttattggggaccaaataaggggggggacccccccgcgggaaaggttcggttgtttttaaacttaaattgcccaactttcaatcggagcaagaacaactggggcccaacttgcaacccccg

SEQ ID NO: 415098 - DNA, 173 bp, Oryza sativa
agattgcatttgcaacacaagggattaactcatcactcacttagctaattaaatcttcgaccatgtcggacaagtgcggcaactgcgactgtgctgacaagagccagtgcgtgaagaaaggtaccagctatggcgtcgtcatagttgaagccgagaagagccacttcgaggag

SEQ ID NO: 415099 - DNA, 449 bp, Oryza sativa
gtgctaaacaaaaatataagtgaacttttatgtatcttccagataaccattcaggccatcgactaggggattttacaggcttactttgcgtcttagcctaaacaaaacacctgctattgctacaacacagcaccaaaatctaacctggggggcacaagttcaccattcctgaagagagaggggtgcatgacatgcccaaggattgaagatctgctacatgcagcgcatgtacatatattatacttgacgtatattcacagtggtggcattattctctgacatcttcgtcgtcgtcctcatcctcgtcaacatcctcgccatcatactgtagaaggctgaaatccctggattgcgccttgagcctctcttggatccgctctttgatggcagttcccattgagtggcagccttcttcaaacttctccagaaaaccagcaacccatcgatct

SEQ ID NO: 415100 - DNA, 396 bp, Oryza sativa
ggggactcttttttttctcctgggtttctattccatttcattccgatggatagcaacaagcagttcaaacaccataaccaaagcgaactcaattcatggtaacatcacggacgaagaacacctaacactggatggatggatagagggcttttcgactcgggagagccactggacacgataacgactcgactcgatgataagatgattctgacacggatagctaaggataactggccacgatgggccccaccaatcagttcctccagttcccgccggagtccccgccgaagccgccgccacggttgccaccgtagccgccgccgccgccgccacgggcgccgccgaagccgccgccgccaccgtaagccgccctcacggggcccgtagccgccgccg

SEQ ID NO: 415101 - DNA, 155 bp, Oryza sativa
cgggtgagtctcgtgggtttggcttcgtcaccttctcctgggagcagtcgatgcgcgacgccatcgagggcatgaacggcaaggagctcgacggccgtaacaatacccgttattgaggcccagtcccgccgctccgtcgtcggaggcggtggcta

SEQ ID NO: 415102 - DNA, 438 bp, Oryza sativa
agaagccctaaatttcacaggcggggggtcacattcagttccataaatttttaccagatcggcaaccaaattgccactaaaccatggcaaagggagcttaattgtaacacgaattcctcacaagcgtgcagcgtacaacatttatttagcccaaggccacacttttcgcacataaacaagggaccttaaaacgggatcatcaggaaaaggaaaaaaaagatttaaccctttccagcaccatagagggagagagagaaaccccagcaaatcgaaaaagtttctcactacagcttgtacttggagcgggcgacctcggagtcgttggggaagaagcccatgaggcggccggcggagttctggtaggcgtacatgaaccctcccatgaccccgatgagccctcccgtcaccatcgatggcccgcggatccccggtttgatc

SEQ ID NO: 415103 - DNA, 527 bp, Oryza sativa
tcgggcttcttctccgcgctcgactacctccgcctctccaccatctccgccgtctccgtcaccgtcggctacctctccgggatcaagccggggatccgcgggccatcgatggtgacgggagggctcatcggggtcatgggagggttcatgtacgcctaccagaactccgccggccgcctcatgggcttcttccccaacgactccgaggtcgcccgctacaagtacaagctgtagtgagaaactttatcgattcgctgcgttctctctctctctctctctgctgctgcaagcgtttacatctttttttttctttttcctgatgatctcgttttagcgtcacttgttgatgtgcgagatgtgtggccttggctgataaatgttgtacgctgcacgcttgggaggaattcgtgctacaatttagctccctttggcatgttttagtgccattcggttgccgatctggaaaaattattggaccttaatggaccccctgcctgggaaattggggcattctataatactcatct

SEQ ID NO: 415104 - DNA, 175 bp, Oryza sativa
cagtctcttctctcctcctctaatctcaagtctctgtctcgtcgtcctcgcatctccactcgccatgggcaagattaagatcggaatcaacggtttcggaaggactcgggaggctcgtggccagggtggccctccagagcgaggatgtcgagctcgccgtcgttttcatcccttt

SEQ ID NO: 415105 - DNA, 409 bp, Oryza sativa
cttgcgaattttttacttggtaagggtgacagccgctccagttacaccacaaattttgctatagtgaccctgtttatttcacttcccatgggaacaaatcaaattgtctggaaactactaaaatctaaccaaaattgagattcaagcctactacccaaaaattgacggccagtgaccttcccggagaacaagtaactgtaacttagtcatcagtacccgtagccggagttgtccatcgggttggtgacggtcgcaggctcaggctccttgatctcgtcgacgacgacatccgatgtgaggaatgtcttggccaccgacgcagcatgctcaagacaacatctcaccaccttagtggggtcaatgataccagcagccatcaaattctcgtactgtccagttgcagcattgt

SEQ ID NO: 415106 - DNA, 132 bp, Oryza sativa
ggagtatccctctgaaaatattggagctaagttggttaggggagcagctgcaaagaccaatgatttagctggagatggcacaactacttctgttgtgcttgctcaaggggctggttgctgagggtgttacgg

SEQ ID NO: 415107 - DNA, 303 bp, Oryza sativa
gagctttccatagtaaagtatgagcctctatgggtcaaaggaggaaaccactgtaatttggaactgtacccagagtacattaagcatctaaagaagtttgttgggggccattgaaaaatcgccacccctatatgatgaatctccagagagctcaggtccatcagataatactcaaacaaaccctgaaggcacagaggaatctaggaaaagcacagactgcagggagaaaacaaggccaagcatagatcacagacaatgcacagatcgccgggtcatatcaaggggcagcacagataggaggga

SEQ ID NO: 415108 - DNA, 536 bp, Oryza sativa
agcaatgtatactcgcattcgacaacatttgaagggcaataataagtcttaacatccaaatttaaaccgaacagaaaatagagttttaaacgactgacatagtgcacaaagcgagcagatattaacggtcaatgcaacaactgaaatgaccgtcgacaaaacttaacgagtactaaaagagctagatatctcaaatgcagatatggaaagcaccacttgaacgaggctcatttcttcttggcggcagccttggtcaccttggcaccggttgggtccttcttctccacgttcttgatgacgccaacagccaccgtttgcctcatgtcccgcacggcaaaacgaccaagaggagggtactcagagaaggtctccacaaccatgggcttggtgggaatcatcttaaccataccagcatcaccgttcttgaggaacttgggctccttctccagctccttaccagatcgtctgtcgatcttggtcaccagctcagcaaacttgacggcaatgtgggaggtgtggcagtccagcactggggc

SEQ ID NO: 415109 - DNA, 315 bp, Oryza sativa
acccctcagctgccgccgccgcagcctcctctcggctgctcccatcctctccttcgagttagcttcctccttattcaaccatgggtaaggagaagacgcacatcaacattgtggtcattggccacgtcgactccggcaagtcgaccaccacgggccatctgatctacaagcttggaggtatcgacaagcgtgtgattgagaggctcgagaaggaagccgctgagatgaacaagaggtccttcaagtacgcgtgggtgcttgataagctcaaggccgagcgtgagagaggtatcacctttgatatcgccctgtggg

SEQ ID NO: 415110 - DNA, 439 bp, Oryza sativa
ctcatcgccattgccatccaaagcaaagaagagagccaccctgcagacacagtacgcacacgcagagagagagagagagagagagcaagggatgaggcttctcggagctcatcgtgctgctctgctggtgctcgcgtgcgtcgtcgtcgtcgtcatccatggcctaggagaggcggaggccttgggaggagggggcggcttcgtgagggcgcaggggacacggttcgtgctcgacggcaacccgtactacgccaacgggttcaacgcctactggcttttttgcttggcccgcgaccgttcgcagagggccaaggtcaccgccgccgtggtcgaggccgccggtcacggcctcaccgtccagggcgttgtggcgttcagcgacggcggcggcggcaacccctgccaattgtcccccggcaactacaacgagaacaccttc

SEQ ID NO: 415111 - DNA, 437 bp, Oryza sativa
ggaatcaaatataggagtccattttaaaagataatgaaaattgatcgcaacacatccagttactacgatggccattgctgtactcggggcaggagcaggacaaataactccatacactggcatgaacaaaacgcatactgctacaagattctcattgtaagtaagtcggcaacctaagctgattctgaggtctcccattacatgacagccggccaagcagcactgcgactcgcaagaagttccagctaggagttatacagctaaggtgatcaaaacccaaagaaacctagctcggtagccctttctttctcgaatgtctcaaaatactggtagatgattgtaacagcgagcagtatcccagttcctgaaccaattgcacccatgaaatcagctaggacagtcaatgcaccaatgcagactccaccaaatgcagcagc

SEQ ID NO: 415112 - DNA, 322 bp, Oryza sativa
gacgtgctcgtcaccaccggctgcggcggcgaggcaggcatccgcactcctcggcgtcgggccgtcgtcgttgtccgctacctggaaaagatggctggtggctttaagggtattgcatcttgtcaggccttttctggctttcctgcctgaagtacagagtgctgataggaaaataccatttagagaaaaagtgatctacactgttatttccctattcattttcctggtatgcagccagctaccactgtatggcatccattcaactactggagctgatcctttctactggatgcgtgttatccttgcatcaaaccgtggcact

SEQ ID NO: 415113 - DNA, 300 bp, Oryza sativa
cccattcgtccgcaaagcaaaccttccccctcctcctcctccggccaccgcggcgagaggccccgatggcgccaacggtggagatcagccacctctccttcacctacccgggcatcgacggccgcccgccgcccggcgcgccgccgctcatcgtggacgtctgcttctccctcgacgccggccaccgctgcctcctcctcggctccaacggcgccggcaagacgacgatactgaagatactgggcgggaagcacatggttggatccgagcatgttgcgggtcctgggcaggtcggtcttt

SEQ ID NO: 415114 - DNA, 432 bp, Oryza sativa
catggatcatacgacgaccatggcgcctctccctctggggaccacgacgaaactgctgcggggggttcttcctcgcgtcgtcgttcgccgccgacgtagtcgtcgcgggcggcggcggcggcggcggcggctacgacggcggcggcgacggcgaaggcgggggcggcagcgacggcgaatgctgaagcagcggtggaggagccaagatgccacacgtgaaccacggcaggtacaagtgcggaccgtgggtggacgggcacgcgacgttctacggcgggcgcgacgcgacaggcacgactgagggcggagcgtgcggacacaaggacacccactggtacagtgcgatgactgctgcggggagccccggcctggactacaacagctccgaatgcggagcgtgctaccagcccaaggaggatgccaggaagaccg

SEQ ID NO: 415115 - DNA, 529 bp, Oryza sativa
tctgtattataacttaatgtcaatcagactggcttctatagagtgagctatgatgaggaacttgcatctcgacttagatatgcaattgaagccaacaaactgagtgcagcagacagatatggtgtacttgatgacacatatgccctctgtatggctggcaaacagaagctagtctccttattgcatttgattgctgcgtacaaggatgaaaccgagtatactgtgctcgcccgtgtcatagatgtatagatctttctacccgacaaatgtttttgttagattgattctgttctaagcatttcaattcttggcttgatagacaagtctgagcattgtcgagatggtggctgttgctgctcctgaggggttgggcaagctgaaaaagttcctgattgactttcttgagccatttgcacagagaattggttgggatgctaaaagcggtgagggtcacttggatgcattattgagaggtacacttttaactgctctggcagaacttggccatgaagctacaataaatgaagct

SEQ ID NO: 415116 - DNA, 319 bp, Oryza sativa
ggcaaccaacagcttcacttatttatataaataaataaatagagagattaccaattcaagaatcaagctgcacctaaacacattaggggaactctaccgctaatccagaatatgctaatctatcctgcttaacgaccatgtcgtaatggggttacaagggccataatgccatgcgaagggacatccacaatgccttttccattgagatttaatttgtttggcgcagtagcgtaaggagtacttcctccgtttcatattataagactttttagcattgcccaaatttatatatatggtaatgaatatatatatatatatg

SEQ ID NO: 415117 - DNA, 514 bp, Oryza sativa
gtggttctcagaaggccttggaagtcttggatgaactttggttggaaggatgtcaaccagatgtcgtcacctataatgctctcatcagtgcatcatgcaaggctggcaggctgaatgatgcaaagttcatcttaactcgtctagctgctgaagggcttgaaccaaatggtacaacctactgcatcttactccatgccctctgcaacatgagaaggtgggatgaagtatgcgatttgcttgaagacatgaaccaggtgaatcgtgatcctgatgttacaacctacaatatttttatcaattacttttgtaagtatgggcatctggatcaggcaattgatgtgttggagaggatggttatcaacaattgttctcctgatattgtgacctgcaacacactcctgaatgccatctccaaaaagggtatggttgaggaagctcttgggattgctcgctgcatcagagaaaacggatacaagttggttctcatcacatacaataccctcatagatgcttt

SEQ ID NO: 415118 - DNA, 528 bp, Oryza sativa
ccaatgtctagcttcactcacttcatctcgcttccggtgggtatccacccacaacttggtgataagctgaatgaattcaagaggtcaatcctgacttctaatgaatataaagctgcaggtttccgcatcgacgagtcaatatttgctattcccgaatcacttcacctaacggttcttatgttggagctaaagggtgagaacattgctaaggcttccagtgtgctccagtcagtatcggacaaactaatggaagccttgaaaaacagacctatctccatacagcttagaggtctggcatgcatgaaaggctcaccagataaggcctgggtagtatatgctcctgtgctggaagttggtgaacagggacgcctacaacaagtttgcgacattataattgatgcctttaccagctcaaacctagcacctacaagtgatgagaagcgagaactgaagttgcacgctaccgtgatgaatgcaaggttcaggaagggctactgtccggatgcttcatttgatgctcgcaagata

SEQ ID NO: 415119 - DNA, 485 bp, Oryza sativa
atggttcttgagtcgcaccactctacaccggctagctggcgctgcctcagaggcggatgaaggctgccttacactttcggcgcctgctcgcggacggacgggcagcacatagccatagatggctgcgagcaatgcgcagataccgtcatcaaggacgacaggcccaccaaaggtacgaggctacggacactgtggctgaacgtgcctatgccgttgctcccgctcgacggccagccgatggcgcacaacccagtatgccgctgtggacgaattcctaagctggctcagatatacctggtcgggccactacgaggagcggtagtaccagctacacgtgtcctggatctctcaacgaggtcaagttgcttgtcagggaccagaaggaggataaggaccatggatcagatggagggctttacaacttacaggagtacatactggatgacagtgcacaccacactgtcctgctgtactgtgatgcatgc

SEQ ID NO: 415120 - DNA, 507 bp, Oryza sativa
gtatctgatccgggcgcagggtgcgagtgcgtgagggggaatccccaaatcccccccggggctcgccgccgtcgtcgcccgtctgcacgcaggcctcctcgtcgcttcacttcatcaacaatcaagatgagtcgtggtgggagtgccggtggtggccaaagttctctgggttacctttttggaggcaatgaggcccctaagccagctgctaaaccagcacctgcagctgcacctgcaccagcgccagcaccagcaccagctgcggctgtggctgctcctgctgagaaaccatcacctgcaaaggctgatgccaccaagcagattccagctgggattcagggcagccggagcaataacaactaccatagagctgatggccagaacactggaaactttcttacggatcgcccttcgaccaaggtccatgctgccctggtgtgggatcttccctgggctacctctttggtggaaactgaaggagtgatccctgtgcactggagcaccgga

SEQ ID NO: 415121 - DNA, 451 bp, Oryza sativa
  unsure (1)..(451): unsure at all n locations
gctggtcggcgcctacgccgacgccgagaaggccaaggactccgtcggcatccgccccggcaagggtaagatgcgcaaccgccgctacatcaaccgcaagggccccctcatcgtctacggcaccgagggatccaagatcgtcaaggccttccgcaacctccccggcgtggatgtcgccaacgtcgagcgcctcaacctgctcgacctcgcacccggtggtcacctcgggcgcttcgtgatctggaccgagagcgccttcaagaagcttgggaggtgtatggcaccttcgaggcgccgtcgctgaagaagaaggggttcatcctgccgaggcccaagatggccaatgctgatcttggcaggatcatcaactctgatgaggtgcagtctgtgntgaagccgctcaacaggaggtcaagcgcagggagaagaagagaacccgctcaagaatgtc

SEQ ID NO: 415122 - DNA, 527 bp, Oryza sativa
ggaattcacggctacgaatcataatgggagtagcctactgcctggagcacatgagccagctagatcctcctcctcttctcccaacaaatttgagctcatcatccatctacctcaccgaggacaacgcagccaagatcgccgacatcgaattctggaaggatgacatcaacaagcaggacgaccaagaaagcgtggtgtacaagttcgggatactggttctggaggtgatctccgggcggcggccattctccgaggacgaccggctcctggtgctgtgggcgtccagctacctggacggcaagaggccactcagcgccatggctgaccggacgctggtgaggtcgtcgtctgccgcgccggagaaagatgtggcggcgctgtgcgacgtggtgcggcagtgcgtgaggaggccggagggggggaagagagcgataagcatgggcgaggtggcgaggctggtgaggggcatcgccgggttgtcgccggagcaggcggcgccgagggagaagcccctgtggtgggcggag

SEQ ID NO: 415123 - DNA, 520 bp, Oryza sativa
cgcctctgtcgccatggtggcgatccatggacacctccacttacgtgaggccatgccagacccgttcggcgtcgacgagggcttcccgctccccgtgaagctccgcggggtgcaggtcaacgaggaggccctcgttcacctccccctcttccgcgccgccgaggccgagagcttcgccgtcgtcttcaacagcttcgcggcgctcgaggccgacttcgccgagtactaccgtagcctggacgggtctcccaagaaggtgttcctcgtcggcccagcgcgcgccgccgtctccaaactcagcaaaggcatcgctgccgacggcgtcgaccgggaccctatcctgcaatggctcgatggccaaccggcagtgccgttgttgtacgcgtgcttcgggagcacatgctggatgggcgcgagccagctcacggaactcgctgctggcctgcgcgcgtcgggccggccattcctctgggtcatcccgacgaccgcggcggaggtaacagaacaggaggagcgcgcg

SEQ ID NO: 415124 - DNA, 423 bp, Oryza sativa
agacagcaactcaataatctttcgatatttcaccgagggtaatgtatggtaggaaaatcgccagacataacagagccggccagactcaactcaaactcaaccctatgatggtaaactgtttgcgattaacgcctccgcctatgacaatgtttggagataaacgcttccaccaaaaaacgaatgtcggggagtgttctcccctacaagaattattattgttttcaatgttaaaaaggcaaaattcaccagatcccgttagtgcaggaccaggaataaacacttgttcgtcatcattttctgccagtttaggcaccgcccgagccgtacttctttccaaagaagaggatctgcagctggtcatagcctgagagcacaccagcaccagcaatggcacgtaggatgttggcccagcacccttgaaca

SEQ ID NO: 415125 - DNA, 539 bp, Oryza sativa
gagaatggtggcaaaaacttcatgattgatttcctcatgggtggagtgtcagccgcagtttcaaagactgctgctgctccgattgagcgtgtgaagctgcttatccagaaccaggatgaaatgatcaaggctggtaggctctcagagccatacaagggtattggggactgcttcggacgcactatcaaggatgagggttttgcttcattgtggagaggaaacactgccaatgtgatccgttacttccccacccaggctttgaactttgctttcaaggattacttcaagaggctgttcaacttcaagaaagacaaggatggttactggaagtggtttggtggcaaccttgcctctggtggtgctgctggtgcttcatctctgttttttgtgtactcccttgactatgctaggacaaggttggccaatgatgcgaaggctgccaagggaggaggtgaaaggcagttcaatggccttgtggatgtttaccgcaagactctcaagtcagatggcattgctgggttgtaccgtggatttaacat

SEQ ID NO: 415126 - DNA, 541 bp, Oryza sativa
ctgctttcttgctttgtttggcaggaaaagcttcaggatgccccaaagccaagggaggagctcgacttgctgttcttccagttgcaggagacagctagaagggttgctaaccttcagcttgactgcaagatccaaattgacgtggagagttttgtgaactctttccggcctgatataatggaagcggtgtattcatgggccaaaggatccaaattctatcaaatcatggagatgacccaagtatttgagggcagcttgatcagggccatcagaaggcttgaggaggtcctgcaacagctaattctggcatcgaaatccatcggtgaaacccaattggaagcaaaacttgaggaggctgtcagtaagatcaagagggatatagtgtttgcagcatctttatacctgtaaaatagcttgatggtctcctgagcatgtgaaggctatcaaagtcactctttctgttgagctgcctgattactggtgaaggggagcaggtccttggcagaaaaatttgttgttactaccccagtaggcgctaact

SEQ ID NO: 415127 - DNA, 525 bp, Oryza sativa
  unsure (1)..(525): unsure at all n locations
gtctcctcgcaaatacgacgcgttcccaaatcccccaatccgatctgcctttcctcttcctcctcgtcaaaccctagccaaatccacgatcggggctagctcgtcggcggcggcgatggggaacccggagaagctgatgacccagatcttcgacctcaagttcacctccaagtcgctgcagcggcaggcgcgcaagtgcgagaaggaggagaaggagcagaagctcaaggtgaagaaggcgatcgagaaggggaacatggacggcgcgcggatctacgccgagaacgccatccgcaagcgcaccgagcacatgaactacctccgcctcgcctcccgcctcgacgccgtcgtcgcgcgcctcgacacccaggcgaagatgcaggtcatcggcaagtccatggccaacatcgtcaagtcgctcgactccgcgctcgccacggggaacctgcagaagatgtccgagaccatggacaacttcgagcgccagttcgtcaacatgaggtncaggccgagttcatgggggcg

SEQ ID NO: 415128 - DNA, 505 bp, Oryza sativa
ccggtcatgtcgctctcgtcggcgcgtcagcgtcgggccacggccgcgtcgccgccgaccgacgacggctactccaaggaagccaaggacaggaggcggcgccccagcggcgaggaggaggaggagggcatccggtggttcctcccgttcctcgccctcggcctcctccgccacatgagcgcgtcctccaacctgatccacgactgcgacgaggtgttcaactactgggagcccctccacttcctcctctaccgctccggcttccagacctgggagtacagttccaactttgctcttagatcatatctgtaccttttcattcacgctcttgtagctgggcctgcttcaatgatttttggggagcataaggttcgagtgttctactctgtgagaatctttcttggccttatatcaactataacagaaactgttctggttgttgctctttcaagaaaatatggaaaaagacttgcttgttatggccttgcaatgctgtgcttaacca

SEQ ID NO: 415129 - DNA, 432 bp, Oryza sativa
aaaacattgcattgaattctgaacgataaacaccaggaaccggcgtttatttgaggcaagcactgcccaaaatctcgcaaaagtactgaaaccttagacatagtacacatccatggcaaacatggatgccaaatgacaactacagaaaattatcaaattcgaatgcagctgacggcttctcctgctgaagatgcatattttcccctccattacttggatgtgctctctccatcgacagccaatgggacggcgctggccaggctgcggtatttcagagcatagaacatctcaatgtaacggcgagtctcgcgcctctcaaggttgcttacgtacttccagaatccatatacaccagtcaaggtcattaacctctcagagtacagcttccaggtgtacttctcgtaaatcctctgcagacctccctgtgaaata

SEQ ID NO: 415130 - DNA, 493 bp, Oryza sativa
gtttttgaccaccattggttcctgaaattgagtcatggctgccaagctagctcgcctccacagtctccgcgaacgcctcggtgccaccttctcgtctcatcccaatgagttgattgcactcttctctaggtatgttaaccagggaaagggaatgctccagcgtcaccagctgcttgcggagttcgatgccttgatcgaagctgacaaagagaaatatgctccctttgaagacattctccgggctgctcaggaagccattgtgctgccgccctgggttgcactggccatcaggccaaggcctggtgtctgggactacattcgggtgaatgtaagtgagttggcagtggaagagctgagtgtttctgagtacttggcattcaaggaacagcttgttgatggacacaccaacagcaactttgttcttgagcttgattttgagcccttcaatgcctacttcccgcgcccgtccatgtccaagtccatcggaaatggg

SEQ ID NO: 415131 - DNA, 523 bp, Oryza sativa
  unsure (1)..(523): unsure at all n locations
gtatctgcctgcattgctctgtccaaaaatgattcctatgtgatgtctgcatccggtggcaaagtctcattgttcaacatgatgacattcaaggtcatgactactttcatggcacctccacctgctgcaactttccttgcattccaccctcaagacaataatatcattgctattggaatggaggactctaccattcaaatttataatgtccgtgttgacgaggttaaaagcaagcttaagggacattcaaaaaagatcactgggctggcattttcgcagtcaatgaatatgcttgtatcttcaggtgctgatgctcagctatgtgcttggagcattgatggttgggaaaagaagaaatcaagatatatccaatctccagcaaatcgttctggtgctttagttggtgatacaagggtgcagtttcacaatgaccaaacacatattttggtggttcatgagagccagttggcgatctatgatgcanagctagagtgcttgcgctcgtggtccccaagagaagcac

SEQ ID NO: 415132 - DNA, 532 bp, Oryza sativa
gtcatctctacgcatgatgcgcgctgaggcttttgtgaaccttggtgaaccaaatatcccagttgcatgatatgagatgatatggatatgacctagagatatctatgcatgtattctcatcatgagcgacgccgaggaatttctagatcacatgatacctgatgctgagattcgcatgcatgagagacacttacaccacctcatgtcctgcacggtgaaatagtggaaatctgcttgaggataaacagctttggttttatcgtcaccttggaattttgatatagcatcaaagcaaccttgacactagagcatgattacagagtatgggccatcgatctaacttcttcttgaagctgcaccacttcttgcaaacgtttatgcttcagaactaggacccatggtcccattatgctttttagattagatcttcatcctaagtttcgacaactcatagctgtagtttttgtctttcttttggcacagaattctgtcattgttaagcctagctttgttccctctattatgtaacctg

SEQ ID NO: 415133 - DNA, 528 bp, Oryza sativa
ctttatgaacaacaaattgagcagctcgggaacttccagttgagaattcatgatcagatgatcatgttagaagctgcaaaagctacgacagaaaccgttgatgctttgaggactggagctgcagctatgaaagcaatgcaaaaggcgacaaatattgatgatgttgataagactatggatgaaattaatgaacaaactgaaaacatgaaacaaatacaagatgctttgtcagcccctcttggagcatctgctgattttgacgaggacgaactagaggcagaacttgaagaactggagggagcagaattggaatctcaacttctcgagcctgttgcagctccacctgtgcatccagtgcaggtcccaggcaccaggataccaactcgccctgctccacagaaagcatcagctgaggaggatgagcttgcagccttgcaagctgaaatggcattgtgatcaggttcacaatgaagaggtgaaatgtacaaatgattggctgtactctacggaatttcaacgagtctagct

SEQ ID NO: 415134 - DNA, 208 bp, Oryza sativa
aacctacttaggcactgacgggactggggaaagtctagagcggcgtgggagacaaggccgacatcgacctcgccgtgaaggccgccagggaggccttcgaccatggcccctggccaagaatgttcggctttgcgaggggaaggatcctgcacaagttcgcggacctggtggagcagcacgtggaggagctggcggagctggacacggt

SEQ ID NO: 415135 - DNA, 427 bp, Oryza sativa
gaacatagaaacagtaccgagaaaggaactgtagaaactttattccagatttatcatttattacccatccctaggacggtaacattcttgtgatgaaaatacatatgcccatgcttaaggtaactggatacaaggaacttcacatcacgtcgaaaaggaaatattacaatacaggcatgaacgacacggggaaaaaaaggcttgaagtaactccggtagactcatcagaattacagcgtgcagtactgaacaagtagtaagattttgcaggaaacagttcatagatatacatgactggaatagatccggataccggatgaccagattcaccggtagttgcggtaaagtgggctgtacatgcagctctctgcatacttaaccaggtcctttggccgagggcgcctgcttgccaaaccaagttcatatg

SEQ ID NO: 415136 - DNA, 521 bp, Oryza sativa
gtattttgcaaaccataatgcatttgaactccttgcaaaatatggaacaactcaccttgtattcaatgatgatattcagggaacagcttccgtggtcctttctgggcttgttgcagcactaaaattagttggtggttcattgtcggagcacagttacctgttcctgggagctggagaggctgggacaggcattgcagaacttatagctctcgagatatcaagacagaccaaagcaccaattgaggagtgccgcaagaaaatatggcttgttgattcaaagggcttgattgtcagttcacgaaaggagacccttcaacacttcaagaaaccatgggcccatgagcatgaacctgttggaaatctcttagatgcagtcaaaactatcaaaccaacagtattgattggcacatctggaaaggggcaaactttcactcaggaggttgttgaagccatttcctcatttaatgagaggcctgtcatttttgccttgtccaacccaacatctcaatctgagtgcaccg

SEQ ID NO: 415137 - DNA, 516 bp, Oryza sativa
atgatcattgcaagaactgcaaattcttgttgaacggaagaggttccttgaatccacttatggcatgaatcagctagaagtcacggacttgcgtttccgtggcactcctatcgaagatttgtgtttagattttactcttccaggttatcctgattatattcttaaagaaggcgaggaaaacacaattgtaaatatttacaacttggaagagtatgttactttggtagtggatgctacagttaaatcagggataatgaggcaagtcgaagcatttagatcaggatttaaccaggtctttgacatctcatccctgaaaatattttcacctgaagagcttgactatctaatatgtggtcgccgagaaatttgggagcctgattcattggtggataatataaaatttgatcatgggtatactgctaaaagtcctgcaattgtaaatctactcgagatcatggctgaattcaccccagagcaacaacatgcattctgccagtttgtaactggtgctcctcg

SEQ ID NO: 415138 - DNA, 473 bp, Oryza sativa
  unsure (1)..(473): unsure at all n locations
gataataattccatctgtttcatcgcttggaatgaattgtatgggaaaaaaaaatcaatgcaaatcaagagataacgaaacatatgattctggagttcaattgaccagaatttgcaagagcactacatccatatcggctattgttcttatctagtaggctgtatgattcttgaattcgccaagaaaaagatcacctcctcctacatcacctgagcatgtcgccattgtcaatgaacgggccactgaacgccggcgaggcgctgaagttgctcccggcctcgctgaacatggcgctgtgcccgtacggcagcggccggtccggcagctccgggatgtccatgtccccctccagcatcttcaccgcctcggtgatggtcggccggagcgccaccatgacgtgcgcgcacaggatcccgacgagcacgaaccttttcatggcgccgncccgggggcctgccgcagtcgacagcgcg

SEQ ID NO: 415139 - DNA, 501 bp, Oryza sativa
ctctgtctagctattagctaagctgctctgctccaccactcgtcttccgcgcgcagcaactgttcgcggaaatgccgagcctggcgctgctcagggcggtcgccatggcgctgctgctgctgctcgcccgctcgatggagggggtggatggggcgacctgcccggcgtggatgtcgccaacgtcgagcgcctcaacctgctcgacctcgcacccggtggtcacctcgggcgcttcgtgatctggaccgagagcgccttcaagaagcttgaggaggtgtatggcaccttcgaggcgccgtcgctgaagaagaaggggttcatcctgccgaggcccaagatggccaatgctgatcttggcaggatcatcaactctgatgaggtgcagtctgtggtgaagccgctcaacaaggaggtcaagcgcagggagaagaggaagaacccgctcaagaatgtcgccgctgtgctcaagctcaacccctacttcggcactgcacgcaagat

SEQ ID NO: 415140 - DNA, 490 bp, Oryza sativa
agatacaatctgcagatggaatttagttaggatccctgattttagcagtgtggtcttgcaggaaaaaaagtacaagattttccttcgcaaaaagaagatatatatggctcagtttgaactagtgctgcttgatcaacgggagccacagaaaatggcagaagaaaacaaaatcttcaaaacgccagttttgatctcattgtctgcagatggtatgcttcattccgtataatctcgatcctaacataattttcacaaaattcttcccctcgaaagtgttgcttgtcacagagctgaacacaaagctcctgagggccaggatgaacaacatagttttgcttcatttacatgcttcacagcaagaccaattaaccatgatcctacactaacatcatcatgtgcatatgtccggagaacagacctgtttatagagatgaattgagctacagcctttgagatgacaaacatttcaccagaagcttggcggaagtac

SEQ ID NO: 415141 - DNA, 483 bp, Oryza sativa
  unsure (1)..(483): unsure at all n locations
cggtatgcggcgagctgaagctgctgggcgtttggagcagcccgtacgcgatcagggtccgcgtcgtcctcaacctcaagtcgctgccgtacgagtacgtggaggagaacctgggcgacaagagcgacctcctcctcgcctccaacccggtgcacaagagcgtccccgtcctgctccacgccggccggccggtgaacgagtcgcaggtcatcgtgcagtacatcgacgaggtctggccgggcggcgccgggggacgcccgtccgtgatgccctctgacccctacgagcgcgcggtggcgcgcttctgggccgcctacgtcgacgacaaggtccggccggcgtggctggccatcctgttcgggagcaagacggaggaggagagggcggcggcggtggcgcaggccgtggcggcgctggagacgctagagggcgcgttcggngagtgctccaaggggaagccgttcttcggcggcgacggcgtcg

SEQ ID NO: 415142 - DNA, 524 bp, Oryza sativa
gttgttcttccgtttagcatctaggctctagcaaacctgtaaagatggaatcctacacaactggagccaagtttgattgtttgttgtttgacatggatgatactctgtacccactgagcttaggaatcaacttagcttgccgcaagaacatacaagactatatgctgaacaagcttcagattgaagagagccttgttcccaagatgtgtcttgatctgtacagggaatatggaactacaatggctggactgaaggtcttgggttatgatttcgactatgacgatttccacgcttgtgttcatggcacattgccatacgagaagctgaagcctgaccctgtcttgaggcacctactgctttcactgccacaaaggaagattatattcacaaactctgacaaggcgcacgccgcgacggttctgaagaagctcgggctggaggattgcttcgaagggatcatctgcttcgagactctgaacccatcgactgaacctgaagaagacgactatgacagtaccgatgga

SEQ ID NO: 415143 - DNA, 396 bp, Oryza sativa
atacacgacttaattcataataatataagaatccaatcgcaatatacagggggcacacatcttcttctcagttctcactcgattcgattcgtgggcaccgacccagaccaattctttcacggttaaaacagcgacaaggaaacgaaagaaaagggggggaaaaagaaaaagaaaaagtagaagacgaggcaaacgaactttgaataatcccggtttgagcagagcagcgggtggtggcggaggtgggttagccgcggcagcgggtgatggcggagcagccgcgggagtaggggttggcctggccgccagggcggcagttgtagtaggaggcgccgcggacggagcacggcgtggtgtcgcgccgcagcgcgccgtagctgatgtacccctgcccct

SEQ ID NO: 415144 - DNA, 528 bp, Oryza sativa
ccacctccgagcaagcaaacaccaaaggcaggcagggcaagaggcgaccgaatccgaaggagccaatggcgaaatccctactggcggcgtccgcgctgctgctggcgctgctcctggcggtggccgggggagcggcggcggcgggggaggtgccgctcgcctgggagctcggggtcggcggcggcggcggcggcggcgaggaggacagcttcgggttctcctccgaggatgcggcggccgacggcgccgcggtggtgaggcgggtgctgcaggggcaggggtacatcagctacggcgcgctgcggcgcgacaccacgccgtgctccgtccgcggtgcctcctactacaactgccgccctggcggccaggccaacccctactcccgcggctgttccgccatcacccgctgtcgcggataacccaccttcgtcaccacacgtttgtttgcttaaaccgggattattaaaagttcgtttgccttgtcttttactttttttttttttttttgtcccccccttttttttgttt

SEQ ID NO: 415145 - DNA, 525 bp, Oryza sativa
cccttttctccctgtcgagcaccgcttggccgccgtgcggcgaaaccctagcgattgtagcggccggaatcagaggcggcggaagccatggcggacgacgactacaacgacatggacatggggtatgaggatgagccaccagaacctgagattgaggaaggggctgaagaggaacctgagaataacgaggatggccctgatgaggttgtaggggcagaggctgaagataaggaacaagaaaaaactcagcgcccacgcaaaacgtcaaagtatatgacaaagtatgagcgtgcccgcatcctgggtacacgtgcattacagataagcatgaatgctccagttatggttgagcttgagggagaaactgatcctcttgagattgccatgaaagagctgagagcacgcaagatcccattcacaattaggcggtacttacctgacggaagctatgaggactggggcgttgacgagcttattgggaggactcctggaaacgccaggttggaggcggcttagctgtgactg

SEQ ID NO: 415146 - DNA, 481 bp, Oryza sativa
ccttaaaaatcttaattctattattgcgggtgtatatatataattacagatcacaaaccctttttcagttttcgacccagtcctacatgaaacaatcaaccaaaatcaccacttgaagcttgtagatcactttcagataattccatcaagaatgagatcaatgacatacacggccattttcctaacttatcatacaatttttcttttctcctttttcaggcaaactgctctccttcacacggtttgcagagctagcattcgctccatccagtcgatgatgtctgtggcgatctcatcacgctcaggctcaaagagcagatcgtgcaagaacccatcatacagcctcagatccttgtgcctcgatgaggcctcgttgtagaggtcctgtgaagccagggggtcggtcacccggtctgcggttccatggaggaccatgaatgggacggtgacctttttcagttgtgcagcaggtaggaggaga

SEQ ID NO: 415147 - DNA, 527 bp, Oryza sativa
ttctatcgatggttcacgtcagcttctaccgcaactatggtaagacattcaagaagccacgtcgcccttacgagaaggagcgtcttgatgcagagctgaagctagtgggtgagtatggactgaggtgcaagcgtgagctgtggcgtgttcagtatgctttgagccgtatccgtaacaatgcaaggcatctgctcacacttgatgagaagaatccacgccgcatctttgagggtgaggcactgcttcgccgcatgaaccgttatgggctccttgctgatgggcagaacaagcttgattatgtccttgccctcactgttgagaacttcctcgcaaggcgtcttcagactcttgtcttcaaggctggcatggccaagtccatccaccatgctcgtgtcctgatcaggcaacgccacatcagggtcggcaggcaaattgtcaacatcccgtcgttcatggtgagggttgagtctgagaagcacattgacttctcactgacaagcccattcggtggagggcccccctggtag

SEQ ID NO: 415148 - DNA, 485 bp, Oryza sativa
  unsure (1)..(485): unsure at all n locations
cccgatcaccgagcccctcctcctcgacctcgccgcagatcctccgccgctcctccgccgctagggcataaccgcccgcctctcgccggcatccgcatctcccggggaagggaagggaagggaagggaaggaaggaaggtgagggcggatatgtcggcggcgccgataccccgcgagtgggtggggctgcagcagtttccggcggctacccagaccaagctgcacgagctcctcggcaagctcaaggaggagaatgtgagcacattgacaattctggtgatggggaagggcggggtggtngaagtcatccaccgtcaactccatcgttggcgagagggtcgctactgtcagcgccttacagtccgagggtctcaggccgatgatgtgttctcgcaccagggcaggcttcaccttgaacaataatgacactcctgggctcattgaaggtggatacatcaatgagcaggctgttgagatcataaaaa

SEQ ID NO: 415149 - DNA, 462 bp, Oryza sativa
aaaaacggtgagggtatattcctcattttccccgaataagagggtatattcttttttatgattacttttaagtgcatcctacatgatgctgcacttgactcagttttaacacggaatttatgcaacatccgtgttggtcttcccaaatactgtatcatcagaaaatatcggagtagtcgtgcagggcgctgtcatcttggcagcaaaaccaatcgcagctagtacaatagtacaagactacaacttggatttgctttgcataggcaggcttcccatggccctggccttctcccggagcaagaacttctgcgtcttccccgtcgacgtcttgggcaggtcgccgaacaccaccgtcctcggcgccatgtaacgcggcagccgcgcacggcagaacgcgatgatctcgtgcgccgtcgcgcttgccccgtcctttagcgtgacgaacgcccacgccgttttgcc

SEQ ID NO: 415150 - DNA, 445 bp, Oryza sativa
aacgttttggtttagtgttggtcatccgtttaattatcctccaactcactttggacaaatcggattgcattagttgcaattggttcttcttcagagaggctaattagtgtgacaaatcgatcccgattgctggtacacgagctgccatggaaggctgtatgccgagcgatgcaaactacgcgccgctcaccccggtgagcttcttggagcgcgccgccgtcgtgtacggtgaccgcacggccgtcgtctctggcggcagggagtactcgtggcgcgagacgcgggaacggtgcctcgctggggcgtccgcgctcgcgcgcctcggcgtcggccgccgggacgtggtcgccgtcatcgcagcgaacattccggcgatgtacgagctgcacttcagcgtgccgatggccggcggcgtgctctgcacgctgaacacccggcacgacgc

SEQ ID NO: 415151 - DNA, 455 bp, Oryza sativa
aaaaacggtgagggtatattcctcattttccccgaataagagggtatattcttttttatgattacttttaagtgcatcctacatgatgctgcacttgactcagttttaacacggaatttatgcaacatccgtgttggtcttcccaaatactgtatcatcagaaaatatcggagtagtcgtgcagggcgctgtcatcttggcagcaaaaccaatcgcagctagtacaatagtacaagactacaacttggatttgctttgcataggcaggcttcccatggccctggccttctcccggagcaagaacttctgcgtcttccccgtcgacgtcttgggcaggtcgccgaacaccaccgtccttggcgccatgtaacgcggcagccgcgcacggcagaacgcgatgatctcgtgcgccgtcgcgcttgccccgtccttcagcgtgacgaacgcgcacgccg

SEQ ID NO: 415152 - DNA, 486 bp, Oryza sativa
cctttctctcgccgccgccgtcgccatgaagttcaacatcgccaacccgaccaccgggtgccagaagaagctcgagatcgatgacgaccagaagctccgggcattttatgacaagaggatctcccaggaagtcagtggtgatgctcttggcgaagaattcaagggctatgtattcaagatcatgggaggctgtgacaagcaaggtttccccatgaagcagggtgtgcttacttctggacgtgtccgccttctcctccacaggggtaccccctgcttccgtggatatggcaggcgtgatggtgagcgcagaaggaagtcagtccgtggttgcattgtcagccaagatctctctgttatcaacttggtgattgtaaagaagggtgataatgaccttcctggcttgactgacactgagaagcccaggatgaggggacccaagagggcatctaagatcaggaagctgtttaaccttgcccaggatgatga

SEQ ID NO: 415153 - DNA, 439 bp, Oryza sativa
ccatgaattacttcatgcataaaccgcacgacataatggaatggacggggaacaacaaaccgaattagatacagaacaaaacgtaaaatacggtagcaaattattcactccctacaatgctccctccatctgatggaaatggaagtcatcagatcggaggcccagaagggaatcctgcgttccagcaattattcgtcaggcgatggactaaaaaggcagagaaacaagaggctggctgattacaatttttcgacagagtttcatctcatgaagagagatatactgctcactcaggccttgagctggagcttcttgattgtgtcgatgtgcttcgctgggttgaggcccttggggcaggcgtgtgtgcagttcttgatggtgtggcagcggtacagcttgaactcgtcgttgatggaatccaggcgctccttaatgaact

SEQ ID NO: 415154 - DNA, 528 bp, Oryza sativa
cccatatccgccgcgatggccgccgccgccctcctccgccgctcgccggcggcgcgcgccctcctctccccggcgctctcctcccgcctcgtcgcctccaagccccactcgtcgtcccccgcgccgccgccgccgccgtcgaaggcgggggcgaacaccaagacgttctcgatctacaggtgggatcccgactcgccgtcgacgaagccccacctcaaggactacaaggtggacctctccgactgcgggccgatggtgctcgacgtgctgctcaagatcaagaacgagcaggacccgtcgctcaccttccgccgcagctgccgcgaggggatctgcgggagctgcgcgatgaacatcgacggcgacaatggcctcgcctgcctcaccaagatctcgtcggcgtcctcggcctccacgatctcgccgctcccccacatgttcgtcatcaaggacctcgtcgtcgacatgaccaacttctacaaccagtacatgagcgtggagccgtggctcaagcgcaaggacgcgccg

SEQ ID NO: 415155 - DNA, 529 bp, Oryza sativa
cgctgttcgatcttttttcgggagggcgttgcttgctcggatcggcggccatggctgagcccgctggggaggcggccccgcaggcggacggcgtctcggaggaggtggcggcgaggccgagggggtttaggcttcttggggaggacaagtccgtgcaccaggctctcggcggtggtaaagctgctgatgtacttttgtggaaagacaagaagatctctgctgcagtgataggtggcgcaactgtgttgtgggttctctttgaagttgttgattaccatttcctcactctgatatctcatgtcctgatcggtgtactggccatcttgttcttatggtccaaggcaaccatcttcatcaagaagagtccacctaatattccagaagtgaagatatctgaagatcttgctgtgaatgttgcactagcactgcgcactgacatcaaccaagcactttacttgctttgggagatttctctagggcatgacctgatgaagtttttaggcgtgatcgttgctctttggattctttt

SEQ ID NO: 415156 - DNA, 533 bp, Oryza sativa
cgacttttccgcccaaggcgtccaagaaggacgccgcccccgccgagcgccccatcctcggccgcttctcctcccacctcaagatcgggatcgttgggttaccaaatgttggcaaatccactttctttaacatagtaacaaagctgtctatcccagctgagaacttccctttctgtaccatcgacccaaatgaggcacgggtatatgttccagatgagagatttgattggctttgtcaactttacaagccaaagagtgaggtgtctgcatatctagaaatcaatgacatagccgggcttgttagaggagcccatgctggggagggtttgggcaatgccttcctatcccatatacgcgctgttgatggaatttttcatgtattgagagcatttgaagacaaagaagttactcatattgatgattcagtggatcctgttagagatttggaaactattggtgaagagctgagactcatggacattgagtttgtgcagaacataattgatgaccttgagaaatcaatgagagaagca

SEQ ID NO: 415157 - DNA, 329 bp, Oryza sativa
aaagcaactgacattgagtcatttctgaattctgagtgctaatgctgggagaagcacaaaagcaactgacattgagtcatttctgaattctgagtgctaatgctgggaggagcacaaaacaactgacaccctctcatcagtgggagttcattcagacaggcatgagagaaaccacagatacatctagcagcgcatgaggaaatgcaaagctagcaagcaggaggttcagccaaattggcagtgctcagcagcctacttctcctgctggaggttggggtggctgggctgcaccctgaaggtgaacggcatcgaggccgcgaagtcccttg

SEQ ID NO: 415158 - DNA, 172 bp, Oryza sativa
ctcctcctcaaccatggcgtccagtcgtccacaccccccgccatccccaccttaaagaccggaggaacggcaactccccaaccctcttgtttcttcgagagcgaggtgaagatttgtttcttggtttgtgttcttggagtggaggaggaggaggagttggatatggggcgcg

SEQ ID NO: 415159 - DNA, 508 bp, Oryza sativa
tttttccagacctgagcctgagcctaaaccggagccaaagccagaaccaaaacctgagcctaagcctgaacctaaaccatacccagagccaaaaccggagccgaagccagagccaaaacctgagccggagcctaaacctgagcctaagccagaaccaaaaccagaaccaaagccgtacccagagccgaagccagagccaaaaccggaaccgaagccggaaccaaaaccggagcccaaaccaaagccagagcccaaaccacacccagaaccaaagcctgatccgaaacctgagcctaagccacacccagagcctgagcctaagcctgaacctaagcctgagcccaagccacaccctgagcctgaaccaaagcctgagcctaagcctgagccaaagccagaaccaaagccggagccaaaacctgaaccaaaaccaaagccaaagccagagccaaagccaaagcctgagcccaagccataccctgagcctaagcctaagcctgaaccaaag

SEQ ID NO: 415160 - DNA, 342 bp, Oryza sativa
gcaaaaaacatcatcgggggatttgatcatcagttcacgagacccggggaagaaacaaaagctaaaaattaaaaccatcaacagcccgatcgggtttgcattactagatacccccattggagccttccttccctttttccatggatcgatatataaacccggccacgcacaaaacattggttcattccctacttgggctgggcgtaccacaccccttggatcttgacatccttgggccccttggcccccggggctgggtcccacgggtggaccccttcgaagaccccaatcacctcgcccgtctttggcttgcttttggggaccctccacgggaaggtgccc

SEQ ID NO: 415161 - DNA, 455 bp, Oryza sativa
ttctcacggacacggccacaccacccaccaactgagagctgagcaggcgagcgagcggacatggcagcatcgctccaagccgcggccaccctgatgcagccggccaagctcggcggccgggcctcctccgccgcgctgccatcgcgcccgtcttcgcacgtcgccagggcgttcggcgtcgacaccggtgccgccggcaggatcacgtgctccctgcagtccgacatccgggaggtcgccaacaagtgcgccgatgccgccaagctcgccggcttcgccctcgccacctcagctctgctcgtctcgggcgccagcgcggagggcgtgccgaggaggcttaccttcgacgagattcagagtaagacgtacatggaggtgaagggaaccggcacggcgaaccagtgcccgacggtggagggcggcgttttctccttcgccttcaaggccggcaagta

SEQ ID NO: 415162 - DNA, 514 bp, Oryza sativa
gtccaccgccggcgcctcggccgccgcgtccgccgccgcgtcggggctccccagccacatgttcgaggccggcgcctactccttgggctcccgcgtcgcgacgctgctatccaagggcgccacgttcgccgccgtggggttcgccgcggggctcgccggcaccgcgatctccaacggcctcatctcgctgcggaaacgcatggacccggcgttcgagaccccgaacaaggcgccgcccacgctgctcaacgccgctacctgggcgatccacatgggggtcagcagcaacctgcggtaccagacgctgaacggcgtcgagtacctgctcgccaacgccgcgccgccgtcggtgttcaaggtgtccgtcgttgctctccggtgcataaacaacgtgctgggtggcatgtccttcgtgctactcgcgaggttaaccgggtcgcagaagtctgatgcgccggccgcctcggcgactgcggaggaggagaagggaggttgatagccgtgggcaatgaca

SEQ ID NO: 415163 - DNA, 442 bp, Oryza sativa
ttataataaaagagaaaaagaaaagaaaaaaaagaagaagaagagagaactcgaactctcgcctaccatttcgcccccctccgcaagcaatccaccactgcatcggcggcgagggctcaccggcggcgagccatgtgcggcggcgccatcatccaccacctgaaggggcacccggaggggtcgcgccgggcgacggaggggctcctgtggcccgagaagaagaagcccaggtggggcggcggcgggaggcgccacttcggggggttcggggaggaggacgacgaggacttcgaggccgacttcgaggagttcgaggtggactccggggactcggatttggagctcgggaggaggacgactatgacttcgtctagatcatgccggtcgccttcaagagggccctttccagagatatacttgagcaccattaccactgccggat

SEQ ID NO: 415164 - DNA, 464 bp, Oryza sativa
aaaaagtcaatggtgtcaaacatttcgaaacggagggagtataagttcagaaatgcaatgtttgacatattacagtactagcaaacatctcacaatcgcacaccgacatcaccttacagatctagctcttacaggtggccatgcctacgcgaggactcaaattttcaccttattttcagcacgatttccctccgggttaccctcgaaacgtccaatcctgaaatacccaagctccactccggcctccgccgccgtcttggcctcgccgtccatggccatctcggcgaggatcctcccgactgcaggtcccatcttgaagccatggccggagaacccggcgccgacaaccacatccttttcaaactccccaccaacgaagtcgatgatgaaatcctcatcaggggtcatggagtacatgcacgactgccggatgaccggcccaccggcggtgtcgacgtggccgg

SEQ ID NO: 415165 - DNA, 510 bp, Oryza sativa
  unsure (1)..(510): unsure at all n locations
gtactggacggaggtgatcgacatcgccaagcaaggggatggatcgatcttggtgaagacgtcgagcggggaggagttccacggcgccaagtgcatcatcacagtgggcgcgtgggcgagcaagcttgtcaagtcggtcgccggcgtcgacctgccagtgcagccgctgcacacgctcatctgctactggaaggcccgccccggccgcgagcatgagctcacgccggagtccggcttcccgacattcgccagctacggtgacacctgcatctactccacgccgtccatggagttcccaggcctgatcaaggtgtgcgcgcacggcggtgcgccgtgcgacccggataggcgggactggtgcgctggcggcgacgccctggcggacccggtggcgtcgtggatcgacgagctcatgcccggccacgtcgacaccgtcggtgggccggtcatccggcagtcgtgcatgtactccatgaccnctgatgaggatttcatcatcgacttcgttgg

SEQ ID NO: 415166 - DNA, 522 bp, Oryza sativa
ccatgtaaacagaccacatgcatataatacagaccattcaaaagattggtaatagtaaaaatacaagttcgtgaatggcgataatacttaaagctacctccaaatagcgtgtagcattgcgtagcaaaccaagcatataacttaggacaaacattcagttgcagcttcacatcatcgctgcttatcataactgcaataacagcgcagatggagcataaactaagtatatttcgtagttctagcttatatataatatcagaatcaccaactgtgaaccatccacaggatggtcgggggactactgatcagaatctactcctttgaggtgtggatagcagacacggtggagaccatagaatccacgccacatttgttgcggacgttggagcccctgcagatcttgtagtacccatgctctccccagttctcgccccaagagttcttgatgatccagtaggccttatcctttaagcggattggagcaaaaccagatgcgccgtagccaacgagaagaacaccgtg

SEQ ID NO: 415167 - DNA, 449 bp, Oryza sativa
aaaatattaaaaaaaaatctgctcttaacaactccctataaagctaccactacgcccccctaccgcggagaagcaaccaatccaattccgaacaagcaaggcaccaaatccccccaccatggatcaccgcctcctcctcctcggcctcctcctcctctccccggcggtggccgccgcctcagtccccggcgaggaggagccgctgatccggcaggtggtcggcggcggcgacgacaacgagctggagctgaacgcggagcgccacttcgccagcttcgtccagaggttcgggaagtcctaccgtgacgccgacgagcacgcgtaccggctctccgtgttcaaggccaacctccgccgcgcgcgccgtcaccagctgctcgacccctccgcggagcacggcgtcaccaagttctccgacctcaccccggccgagttccgccgggcctacc

SEQ ID NO: 415168 - DNA, 456 bp, Oryza sativa
ccatgtaaacagaccacatgcatataatacagaccattcaaaagattggtaatagtaaaaatacaagttcgtgaatggcgataatacttaaagctacctccaaatagcgtgtagcattgcgtagcaaaccaagcatataacttaggacaaacattcagttgcagcttcacatcatcgctgcttatcataactgcaataacagcgcagatggagcataaactaagtatatttcgtagttctagcttatatataatatcagaatcaccaactgtgaaccatccacaggatggtcgggggactactgatcagaatctactcctttgaggtgtggatagcagacacggtggagaccatagaatccacgccacatttgttgcggacgttggagcccctgcagatcttgtagtacccatgctttccccagtttttgccccaggagttcttgatgatccagta

SEQ ID NO: 415169 - DNA, 455 bp, Oryza sativa
ggagtttttaaaccacctgatcgagcccgtatctttgcagccgcaggagaggaggacgagtcgttcgttgtgcagcaggaggcggcggcgaagatgtcgtggcagacgtacgtcgacgatcacctgatgtgcgagatcgagggccaccacctcacctccgccgtcatcgtcggccacgacggcaccgtctgggcacagagcgccgccttcccgcagttcaaaccggaggagatgaccaacatcatgaaggacttcgacgagccggggttcctcgccccgaccggactgtttcttggaccaaccaagtacatggtcatccaaggtgaacctggcgctgtcattcgtggcaagaagggatcaggaggcatcacggtgaagaagaccgggcaggcgctggtggtcggcatctacgatgagccgatgaccccagggcagtgcaacatggtggtcgagag

SEQ ID NO: 415170 - DNA, 432 bp, Oryza sativa
aagaattaagatctccatcacataaaaacatacagtgactgagtactggattacacgattgagttgttcagggttcagataggaaaaacatcttggggactagagatagagggaatcgacagatgcgcagcagtagcgcgcgggaaacaggacatcacgattgcgttgcatgtcgtcggctgcgcagcggcggcgcggggcttaagacctgctcttgaatgggatcgccctgatgatcacctggtggtagatggcagccagggcagcgccaacgaagggaccaacccagaagatccaatggtcattccaggcatggtccttgttgtagatgatggcagcgccaaggctcctggctgggttgatgccagtaccggtgatggggatggtggccaggtggaccaggaacaccgcaaaaccaattggcagtggggc

SEQ ID NO: 415171 - DNA, 514 bp, Oryza sativa
cacatcttctttgcagaggagaggcgacaatggaggggaaggaggaggacgtgcggctgggggcgaacaggtactcggagaggcagccgatagggacggcggcgcagggcgccggggacgacaaggactacaaggagccgccgccggcgccgctgttcgagccaggggagctcaagtcgtggtctttctaccgggccgggatcgccgagttcgtcgccaccttcctcttcctgtacatcaccatcctcaccgtcatgggggtctccaagtcctcctccaagtgcgccaccgtcggcatccagggcatcgcctggtccttcggaggcatgatcttcgcgctcgtctactgcaccgccggcatctccggaggacacatcaacccagcagttacttttgggctgttcttgggcaggaagctgttcctgacccgggccattttctacatagtgatgcaatgcctaggggccatctgcggagctggagttgtgaaggggctccagcagggcctgtacat

SEQ ID NO: 415172 - DNA, 533 bp, Oryza sativa
gttgttctttcaaagaagaaagtaaagaaaactaatgttggagttgctgagttggtttatggtgccttggggactacagagttgcagaaggctgtggaaaaagagtatgaaatggctcttcaggacagggtgatggaagagacaaaagataagaagaatgccgtggagtcttatgtttatgacatgcgaaacaagctgtatgacaagtacaatgattttgtgactgctgaagacaaggaagcattcattgctaagcttcaagaggttgaggattggttgtacgaagatggtgaggatgagaccaaaggagtgtatgttgctaagcttgaagaacttaaaaaggtggggggtcccattgaggcaaggtacaaggaatggatggacagaggcccttccatcgaccaacttgcttactgtatcaacagtttcagagatgctgccttgtccaaagatccgaagtttgatcacattgagatggaggagaaacagaaggtgattaaccagtgttccgaagcagaagtctggctgagaga

SEQ ID NO: 415173 - DNA, 528 bp, Oryza sativa
ctctatacggcctccggatcaagtcgtacgaggactccaagtcgcagctgagggcgaccaagttcctgtacgacggcatcaccatggacaacgtgagctacccgatcatcatcgaccagaagtactgccccaacaacatctgctccgcgtccggcacgtccaaggtcgccgtcaccgacatcgtcttcaagaacatcgtcggcacgtcggcgacgcccgaggccgtcacgctcaactgcgccaacaacctgccgtgccagggcatccagctgcacaacgtcgacctcaagtacgccggccaagggaacaccaccctctccgtctgcaagaacgtcgccggcaagtccagcaacgtcgccaaggagctcgcctgcgtctgattttcatcttattatactactcttccgtttcatattacaaagtcatttgtttttttttaaagccaatttttttcaaagtttgaccaaagtttttttaaaaatatagtagtattttcaatatgaaaagaacatattatcagaatatatt

SEQ ID NO: 415174 - DNA, 508 bp, Oryza sativa
aagctgcaggtggacgcgtggttcggcacccgccgcaccatggccgccatccgcaccgccatctcccacgtccagaacctcatcaccggcgtcaccaagggctaccgctacaagatgcgcttcgtctacgctcacttccccatcaacgcctccatcaccaactccaacaccgccatcgagatcaggaacttcttgggcgagaagaaggtgaggaaggttgacatgctcgagggggtgaccatcttgcggtcggagaaggtgaaggacgagctcgtcctcgacggcaacgacatcgagctcgtctctcgctcagcagccctcatcaaccagaaatgccacgtgaagaacaaggatatcaggaagttcttggatggtatctacgtgagcgacaagggtaccatcacagaggatgcgtaaactcctatcttcacctagtatcatgaagtgctgtttcttgtcttccgtgtctgatcatcccttgagttgcaattttctgagagactgaatt

SEQ ID NO: 415175 - DNA, 435 bp, Oryza sativa
gttctagatcgcgagcggcccctttttttttttttttttttttttttttaggggatgataaatagacttcataatcgcaaacagaaacaatatgtaggataagataccatgctccattacatcctaaataacccaccattacaaaattcagtctctcagaaaattgcaactcagaggatgatcagacacgggagacaagaaacagcacttcatgatactaggtgaagataggagtttacgcatcctctgtgatggtacccttgtcgctcacgtagataccatccaagaacttcctgatatccttgttcttcacgtggcatttctggttgatgagggctgctgagcgagagacgagctcgatgtcgttgccgtcgaggacgagctcgtccttcaccttcttcgaccgcaagatggtcacccccttgagcatggtaa

SEQ ID NO: 415176 - DNA, 516 bp, Oryza sativa
agcatccaaataatctgcccacagagattctgctctgctgtgtttgcactagcttaccgatttgagtcgatacagtaaggtaaaagagtcgcacaagcacttgaagggtacaagcctgggttccgcaccagaggatataaccaatatttgaaaggaacattctaaatggacaagaaattagaaacctactagagttattacaggactgggttacacagatagtcacacgattcagctccttggagcacagctggccaagtgagtcttgaagttctccagctctgcaagaacttcatcttctggacggtatatcaggtcactcatgcgccatatctgcaatgttccacctccaccagtactctcaccatcatcagacacactcacaatagtccaaggatccgaagaattccagtggaagtctacaatcttatccctatgaccagcatgttgaaagaaaagcccagcaagtgcgctgggatttttcttatttccaaccttctcatgatcccacacatt

SEQ ID NO: 415177 - DNA, 386 bp, Oryza sativa
aggtcaatagtatgggatcatactgcttggcacagaatttgtcatgtcaaatggagtatatggtaaactacaagaggcaagtctagtgtacaaaaattaatgaaagggatacagttgagaaatgcccaggcaagtgctttcttgcaaaagccagatgcatctacaataacagcatccaacagcaggcatctctccgtccaaacatatcctttcgtgtatatatacaggacatttcctataactcaaatgctaacttaaagaaccaagtgatggatcttttgcttcaagaactcatacaatgaatgtcttctttaacactttcttgcctcttttcctgttcgtgctcaaagcattaagaatttctgcatcctcgtcgttcgaaagaa

SEQ ID NO: 415178 - DNA, 528 bp, Oryza sativa
ttgatcatgcagaagctgaatgagatttatcgatataaaacagaagaatattcctatgatgctgtgaacaagttcaacatatatcctgatcaggtttctccgtggcttgttgagtggatacctcctaaaggaggttacttcattgggaacctgcagccagctcacatggacttccggttcttttctctggggaatttatggtccatagtaagcagcttggcaacaactcatcaatcccatgccattttggatctgattgaatccaaatggtctgatttagtggcagagatgccattgaagatatgctatcctgctctagagaaccaggaatggaagatcattactggaagtgacccaaagaatacgccttggtcatatcataatggaggatcctggccaacattgttatggcagctcacagtagcatctatcaagatgaacagaccagagattgctgcaaaagctgtagaggtagctgagaggcgaattgctatcgacaaatggcctgaatactatgacaccaaacga

SEQ ID NO: 415179 - DNA, 500 bp, Oryza sativa
gatatgctgtattatgttgatctcattgatttgttcagtgaggttgagtttaagactgcttcaggtcaattgttggatcttattactactcatgagggagaaaaggatctcacaaagtacaacttgacagttcaccgccgcattgttcagtacaagacagcttactactcattctatcttccggttgcatgtgctttgctgctatctggtgagaatttggataacttcggtgatgttaagaacattcttgtggaaatggggacatacttccaagttcaggatgattatctagattgttactggtgatcctgagtttattggcaagattggaacggacattgaagactacaagtgctcatggttagttgtgcaagctctcgagcgtgctgacgagaaccaaaagcacattctatttgaaaattatgggaagccagatcctgaatgtgttgcaaaagtgaaggatctgtataaagaacttaatctggaggccgtatttcatg

SEQ ID NO: 415180 - DNA, 492 bp, Oryza sativa
gccgtgagtgtgcagttcaaggaaatgggcggaagtagcatttcgagaagtagagcaattgctgatgctgccaaacctcctgaacaacaaaatgataggaggaaaaatttccttgattggaggaacttaatgaagcccatgaacgaggagaaagaccactgggtcccagatgaagccgtcactaaatgcacagcatgtacagcagatttcagtgctttcaatcgcaggcatcactgtcgaaattgtggtgatattttctgcgacaagtgcacccagggaagaactcctttaactactgatgctgatgctcaaccagtgcgagtttgtgacagatgcatggctgaagtttctcaaagactgaacaatgcaagggaagcggcaaatcggcctattgttcacagccatgaggatcttgccaaaaaacttaaggatgcaatggatataaataagaagtcatcttcagcctcgtcaaggtctacggatggttctagc

SEQ ID NO: 415181 - DNA, 484 bp, Oryza sativa
agaagaaatcgtgcacattgcaacgattaattaagcacgcacaattgcacaatacatgaacacggatcgcctccttgaaagaaaaaacaacaaggaaaaaaaaactagaaaaaagaaagaaagaagaagaaattaacagcggcttaatcagaagaaacgaaccaatcaatgtacatctctcgcgatccaatccatgtctcgtctctataatctgtgtgtatatagctcatcatccatggcggctaccatggcttgaggtcgttctcgaggccctggtcccagtcgatgcccttctcgccgggctcgaggaagacgcccttggggtgcggcagcttgcgcgcgagcccgttgagtatctggtggaacgcgtcgccgggcctcgccggctggtggaacagcacggcctgcttcatcgccggggacgccagcagccgctgcttccggatgacctcgtcgagcgggacggacgccaggatggtgtcca

SEQ ID NO: 415182 - DNA, 394 bp, Oryza sativa
gatgggggaatgacaatttcctttatttataggggacttatttattgggctagcactgtgccaaattcatgtgcgagcacactacaagatcgtttatgctcttcatgaagcataacaaagaacccaaaaaaatgtgaataaactttacccaacatttcagagaataaattatccctcaacactaaacaaatattacagtcatcaataaacgctgtgctagctcagacctcagtttctaaaaggaagcataccagtatgaatatatttcaaagcacgaagcatctgataaagaaagaactgatgatgttctttggttaagtcatcatttgccttgatgacttggtggagatcggtatccatcagcttaaagacaacatatatgtccttgaagtcc

SEQ ID NO: 415183 - DNA, 461 bp, Oryza sativa
gtagtatgtcactctggtattctcccatggcgactgcgaccgaggaggttgccgctgcggctgctgccgccggcgaggcgccgccgtcgccgccgccagcggtggtagaggaggtgaaggaggcggtggaggcaccgaagccggaggaggcgccgaaggctgaggagggggaggagaagatggcggtgggtgagaaggagaaggagatggcgaatagggagatggaacagcgtaagagcctggctcttacgttagagatattagagacctcagtgttaccattaagaagggtggtgaataagacgttgaactcgcttctttcaagtttattctcatcgaatagaacaaaggttaaaaccacttttgaaggcataaactaactcttgcgtttgtttagtgtctacaaatgctataaagagtaagaaaactgctgggaaaatcaaatgacgggaacaattaaa

SEQ ID NO: 415184 - DNA, 524 bp, Oryza sativa
ggtacagtaagatgctaactttctgaagcctcacacagtgacaaaagtatcacagatttcacagcctcatcagcaaaggggggaaaaaacttggtactggaagaagagcatgtgagcagtgacaaagttaagggcttaaagagaggttctacagagctgggtttagtttcatcctcaaattctcatccttctgctgttaggagcacgctggccctgcagtaggggcagtcgctgcgagagcgcagccatcgctcgaggcaggccgagtggaagatgtgcttgcaccgcagctcgaggagcccatctgcatccccacatctctccaggcatatagagcactccgttgaaggtcccgcgagttcgtcatcatctgttactctgcagcttgctacttcttgtgtaggagccggttcagaacaatgcgcgatgaacgtatgcttatctgcggtgttgaggtttcagctgtgctctctttgagtttgcagggagcgatcgatacgtagtgtggaagcacttgttagact

SEQ ID NO: 415185 - DNA, 507 bp, Oryza sativa
ctgtcagtggccgctcctcttcgccatcatctccgaggggttcggcctcaagtactactccaggctctacaacttcggctccgtggcgagccccgtcggcgcctacgtcctcaacgtccgcgtcgccggctacctctacgacgtcgaggcggccaggcagcacggcggctcgctcgccggcggcgacaagacctgcctcggcgtgcagtgcttcaggaaggccttcctcatcatcaccgccgccaccgtcgccggcgcgctcatctccctcgtgctcgtctggaggacaaggaacttctacaagggggacatctacgccaagttccgcgagaacaccgtcaccgacgaagctaccaccaacggtaactccgccgatacagcggcggaaaaaaggtcaaccttagtcaatgacgaggacagtaaaaaggggtagtaatgtagtttactgatataaagattactacaccaaaagacaagagcttgttacttcttattagcagaaaagtc

SEQ ID NO: 415186 - DNA, 356 bp, Oryza sativa
caaaggattaaagcaataccatatatcaagagcaactggtaaatgcatgcataacatgcaacataatgaagaaaaacttcagttcgcacagacaaaggttcttgagatgctgatctcaattctcaactataaaatagcagctaaatagcacggtagatcttcagatgccaactctccaggttcatagtgacaaggcattttagacctcatagatccatgggtgctggttgctcctccactcggcgatgccctcagggaaccacagagcaatctccttcctggcgttctcgaccgagtcgcttccgtggatgacattcctgccaatgtcgacagcgaagtcgccacggatggtgccc

SEQ ID NO: 415187 - DNA, 509 bp, Oryza sativa
ctcctaccacctccaaaaccagaccccgaaatctcgaggagcttgtcttttttcggtagcaatggcgttggagcagaccttcatcatgatcaagcccgacggcgtccagaggggcctcattggcgaggtcatcggccgcttcgagaagaagggattctacctcaaagccatgaagctcatcaacgtggagaagtcgttcgccgagaagcactacgccgatctgtcctccaagcccttcttcggagggctcgtggagtacatcgtctccggccccgtcgtcgccatggtctgggagggcaagcaggtcgtctccaccggccgcaagctcgtcggggccaccaaccccctggccgctgagccgggcaccatccgtggcgacttcgctgtcgacattggcaggaatgtcatccacggaagcgactcggtcgagaacgccaggaaggagattgctctgtggttccctgagggcatcgccgagtggaggagcaaccagcacccatggatctatg

SEQ ID NO: 415188 - DNA, 506 bp, Oryza sativa
ggcttccagacgcttctctcctcctctaatctcaagtgtctgtctcgtcgtcctcgcatgtccactcgccatgggcaagattaagatcggaatcaacggtttcggaaggatcgggaggctcgtggccagggtggccctccagagcgaggatgtcgagctcgtcgccgtcaacgaccccttcatcaccaccgactacatgacctacatgttcaagtacgataccgtgcacggccaatggaagcacagcgacatcaagatcaaggactccaagactctgctcttgggcgagaagccggtcaccgttttcggcatcaggaaccctgacgagattccgtgggctgaggctggtgctgagtatgtcgtggagtccaccggtgtcttcactgacaaggagaaggctgctgctcacttgaagggtggtgccaagaaggttgtcatctctgccccgagcaaagatgcctcgatgtttgtctgcggtgtcaacgaggacaagtacacttcagata

SEQ ID NO: 415189 - DNA, 531 bp, Oryza sativa
gcatcttgttgtagcagattgagagagagttgggaagaatgacacaagaaatttagagaaatagtactagctagctagcaagaatatagatatataatgtcgatcaagcactgcgagcaacacaaggattgcgagcggcagcgcctgtaccggcgttgctgcgcggccatcttcggcatccttctcctcctcctcctcatcgtcctcatcgtctggctcatcctccgccccaccaagcctcgcttctacctcaacgacctcaccgtcgtctgcctcaacgtcaccaccggtggttcctacgccggcgccaccgcctcctccggctacttctccttcctcaccgtcaccatgcagaccaccctcgccgcccgcaacggcaacgagcgcgtgggcatctactacgaccgcgccgacgtgtacgccgagtacaagggcctccgcatcaccgtgccgacgtcgctgccgccggtgtaccagggccacccggacctcaccgtctgttcccctttcctctccggcaacaacgtccag

SEQ ID NO: 415190 - DNA, 518 bp, Oryza sativa
ctttttctcgatctctgcacggcgacgataagataagggagggcagtctagtcgccggggcggtcgtctctgcatgtgccgatggccgctgcggcactattagggatgctgatgatgatgtcgtcggcgccggagatgaaggtggaggcggccggcgggttgtccgtcgggttctacgccgaatcgtgccccaaggcggaggcgatcgtccgggacacggtgaccaaggcgttcgagaaggcgcccggcacgccggccgacctcatccgcctcttcttccacgactgcttcgtccgcggatgtgacgcatcggtgttgctggagtcgacaccagggaacaaggcggagagggacaacaaggcgaacaaccctagcttggatgggtttgacgtcgtcgatgatgccaaggacctcctcgagaaggagtgttcacacaccgtcttttgcgccgacatcctctttctcgtggctcgtgatagcgcctaccttgctggtgggctcgactcgagatcccaaca

SEQ ID NO: 415191 - DNA, 496 bp, Oryza sativa
  unsure (1)..(496): unsure at all n locations
atattttcgcataatttatcgatgctttcgttaaatattgagtcccatcggtttgcctaataagctaaagcaaaagataaaattaaattttcgaacttaatttttgaagttgattttaagatattttgaacgtattttttttagcattggtttttaagtcgttacgaacaaatatataaaagttttacctataaaataatttttatttcctaatgagccgttttgacttattagaaaataagagcaactgatgaggctcattgacaaatcttatcgatacctttcagcgagtaataacaaatgtactggaagacgctggatacacangggattgcacgctttctttggaagattttaccaggattatagatcatcctggcctaaagatggaggtggaagtgcctattgactagtggcccgtgcatacctctggttttggttgctgaacataactgtgcctaatcaatgggacatgcaatgcaccagaagaacgggc

SEQ ID NO: 415192 - DNA, 531 bp, Oryza sativa
ctcatctcgcacgcacaccaacctcaagccatcgggcggtctccccccgcacttctcccaccgccaccgaggcacggctctcgaaccttcccactgcttcctccctcccctcccctccccgcgacgagacgagacgagaccggcggcggcggccggagtcaagagccttccctatgcagcggcggcggggcctcgccgcgctcgccgtcctcctcgccctcgcggcgcgcggcgcggacgcgtccgtccacgagtactcgggcggggggttcgcgccgcgggccaactccttcttcttccacggcggcagcgaggggctgtacgcctccgaccccacctccaactcctccgcctccttcatcaggtttgactctgtcacatttcgacggacccaggagtcagcaggtaggcatgaggctatgcagcaaaagacagggttagttgaggctattattgttgagatccaggacagaagcaagattggtggttcttacttgcattctgatgcaatatgctgcactcctgagctcg

SEQ ID NO: 415193 - DNA, 474 bp, Oryza sativa
gtatatgtcacctagagggatgaataggtatttccaaaaatttcttaaacttacaaacagcttagaactaactggatagtccggtaccactgcagacaatctgactatagagcagtcggatagtccgactgcatcagaacaatccaatcagagcatcgccagagaaaaactataagtgacctggaaaatagaaatagaaatgaaaaaataatggtggtggtggcaggatgtagcgtgggttgatcgtttagaagcacgaaagctccttgaggcagccggtggcagtgcccttggcattcttgcagacggccatggtcttgttgtttttgccagagtactcgaccttgatgtcattcaaggtgacgccggtgcacggcagcttgtcggagcagaggaggctaacagcctcgggcgtggaggaggtgccggttatgttcttgaaggtgatgtccttgatggtgaccctggagttgc

SEQ ID NO: 415194 - DNA, 256 bp, Oryza sativa
ttgggtttttttttttttttgtttttttttttttttttttttttttttttttttttggatgaaagccgagggagattatattaaaaagcccggcccccatgaggggatggggccggagtccatgatgggatcaccctgatgatagatgatccatccaagctagctaggggtccatccaacattgatcgacacacgcacacactgacaacgaccaccacgggtttatttaggcgtcagagcaaaaaggaaggcccgc

SEQ ID NO: 415195 - DNA, 506 bp, Oryza sativa
caattcttgagctcaatcagcaacaacatctatctgggtcttgcttagttaagtccttggccctcccaagaagaagaagatgtcttgctgcggcggcaactgcggctgcggcagcggctgccagtgcggcggcggctgcggcggatgcaagatgttccctgatgtggaggccacagccaccaccaagaccttcgtcctcgctgctccatccaacaaggcgagctctggaggaatggagatggcggtggagagcggcgagaacggcggctgcggctgcaacacctgcaagtgtggcaccagctgcagcggctgctcctgctgctcctgcaactgaatctatcgtcgtcgtcgcccggctgcatgaggatttatcgtatggatgctgctactgtcgatcagagctttgatcgaggccttaatttgcttgcattagtacccagcttatatgtaggcaggccttgccttttgctctgacgcctaaataaaaccgtcgtcgtcgttgtcag

SEQ ID NO: 415196 - DNA, 408 bp, Oryza sativa
agctgctccaggcactcctccccaatcaccgtctggtggagcagcacgtggttgagcacgctgccgaggcagtacttggtgtcggcgtccctcgccgccacctccaccgcctccgagatggcgatcccgaggctgcccgggctcgccgggtcgcgttccaggatcctcctccccgactccgtcgccgccgacggcgacgggtgcaccgtggcgccccacgtctccatcatcagccgccggtacggcttctggtcgtacgacgcgcgcacctgccacacctcgcaggtgagcccgaacaggctgctcgcgaacgacagcgcgctgccccactgcccggcgccggtctccgtcaccacgctcctcaccccggcggcggcgttgtaccacgcctgcggcaccgccgtgttc

SEQ ID NO: 415197 - DNA, 418 bp, Oryza sativa
gtgcaacaccggataaataaataccagctcgatgatacaaatagtttaagcataaccatagaagtaacacagcagtgttaaaaaagagccaacaaattcatggcagcaacatgtaacaccacacatcaaaagttttcaacccatcaggcacgcaggaaacgtccacattccacagacaagctaacactagcatgcattggcctaattcagactcttatgaagagactcaggctgaagcatgatagactcatgatcctctctactcgatcagatcgtcatcgtcatctgggagaggttgtgctgctgcagccgcaagctcagcctcatgctgttgctgcattgccaggtcaatgggaacttccggaggtttaagagcaacagcttcaacgaaatgcaagttcgggtcaccagcaagctt

SEQ ID NO: 415198 - DNA, 498 bp, Oryza sativa
cttctgctgggacactgctggacaagagaagtttggtggacttagggatggatactatatccatggtcaatgtgcgataattatgtttgatgtcacttcaaggctgacttacaagaatgttccaacatggcatagggacttgtgcagggtgtgtgaaaacatccccattgtcctgtgtggtaacaaggttgatgtgaagaacaggcaggttaaagccaagcaggtcacattccacaggaagaagaatctgcagtactatgaaatttctgccaagagcaactacaactttgagaagcccttcctttatcttgcaaggaagcttgctggtgacccgaacctgcatttcgttgaagctgttgctcttaaacctccggaagttcccattgacctggcaatgcagcaacagcatgaggctgagcttgcggctgcagcagcacaacctctcccagatgacgatgacgatctgatcgagtagagaggatcatgagtctatcatgc

SEQ ID NO: 415199 - DNA, 278 bp, Oryza sativa
gctgcgaatccagggccccgcgccgcgccgacgaccaccgccgatcgcgaccaggagggaggatgctgggcgccgcgaggaggcagctcggatccggccccatgctggggcaggtgctgcggaggctccggccggcgacggcggctgcagcggatgcggcgagggcgtactccgcggcggcgaaggagatgactgtccgtgaagcgctgaactctgcactcgatgaagaaatgtctgctgatccttctgtttttctgatgggtgaagaggtggtagag

SEQ ID NO: 415200 - DNA, 434 bp, Oryza sativa
gttcttgcattgcctcccagtgatgactgcagtatccgggtgagctttgaatctctgtatgggatatggccatttctccccttgctacaccaccaagaagttgttcagaaatcattttaaatgaaatgaagatgtcttgtttcaaaagaaagagagagaaaaatgaacttgtagaatgatttgaaagacacagaagagaattctgtgaacctgagttggcgaatgacctttcctagagtaagcaggcttctgttaatatggctgccctcctttagcctcataccagccgatgccgtctgagatgcacgctcacttcctgctaaatcaacaaaattctgtccacaagaaactcagattctatggaaaaacatgtgcaaaataatacaaagcttacaagatgcaagtatttcatcaataccacacaagcaataaga

SEQ ID NO: 415201 - DNA, 387 bp, Oryza sativa
gtatgaagaagggcgaacatgcagattgataaactgacgcgtggtggacaagaatgaccgatttgtgacggcctgacactggtcatgtcgtcggcagatagccatgttcccacgtcgcacctgcttccggcggaagtggaggtaggtatgggccgtcctatcagaaggtcattcggacggcaaccattacaaatctccgcccatttatgaaggaaaggcgggcgaagttttagaaaaaagaggatgggtccccaccaaaaagggaaataggtagaagtggtgcatgtggtatccccttgagatataaaaggaggaccttgcccacttgcgggagaaaaaaaagaaaaagaggggaggagaagatcccacgagaggaaaaaaggagga

SEQ ID NO: 415202 - DNA, 427 bp, Oryza sativa
ctgtatacttgatgccggcgaatccgacgccgacaagcccaacgacggcctccgctccggcgagcacgtctcggtgatctgcgaacgggctgctacaaaattgtggctggcgcgtcgtctgtagaagaaattcgagtgcgcaacgcatcgacgcccaccccgaatcgttgaggtcgagatcgtgtcggctgctcggcggccatggattccgcgacgggggctatgggcaacctgctgctgaagctaggcgagcttgccatggacgagtacaagctgcagaagggcgtcaagaggaacgtcgaggctctccggagagagctggagagcatgcaggccgccctccgcaaggtcggcgacgtgccctccgaccagttcgacgagcaggtcgagctttgggcgcgcgacgtcagggaggttttctacgacg

SEQ ID NO: 415203 - DNA, 370 bp, Oryza sativa
tgctttggtttagagactacagtagcagatagcttagtagatggttcagttagcaagatagttgcaaagaaaacatctgaaagcaaacttccagttattgcattgtcagaagttcccagcaaacaagcaagaaatgagcatgaagctgcagagaagcttaagtttgttatttgtccaaggcccaaggctttccaaaatggtgcaggtgatgccggtgccaagaacaatgcagcaagaactgttgaagagaggatagaggaatacaacaaagcacgagcacgcattttcaacggttccatttctgatattgaaggcacaagtgatttgtgagctttatctgttgcgagagatgaaccaattaatgttgagc

SEQ ID NO: 415204 - DNA, 270 bp, Oryza sativa
aaaaaaatatttttatagaaacaggaagttaaagttgggttttggagaccgggtcgttgtaaaaaacgatttcagtttggggggggtacatccagttaagcaaagctggccttgttgttggatttacaacggggtaagcaaaaaaggccatccgacgcctggtcgggcagaagagcaaaacaaaacagagactatttccggccgttacgttgggacttttaagatttcttctttttctggggtttgtttttggagctggggccggagttg

SEQ ID NO: 415205 - DNA, 546 bp, Oryza sativa
  unsure (1)..(546): unsure at all n locations
gtgtcccctcgccgccgcagccagcgtcgagggctcggcgaccggaggaggagaggccggaacccgccgccgccgccgccgcctccgcctgtagcgagatcgctcgatccggttcgcctcccgcgcgccagtccgccagcccagttcgatccgttgagggggaggggacgctctagtgtggggattgggggaatcgatggcggcgccgccggcgagggctcgggccgactacgattacctcatcaagctgctcctcatcggcgacagcggtgttgggaaaagttgtctcctcctacggttctctgatggttccttcaccaccagttttattaccaccatcgggattgatttcaaaataagaacaatcgaactggatggtaaacggattaaacttcaaatctgggatacagcttggtcaagaacgtttncgaactattacaactgcctactacaggggagcaatggggtatttgcggtttatgatgtcaccgacgagtcatcatttaataatataagaaactggattaggacatagagcaacatgct

SEQ ID NO: 415206 - DNA, 555 bp, Oryza sativa
gcattgtctgctgatgaggttgataagttcatatcagcacaattacctgatccttctgtcgatccaattggttttgatgctgtatctgcatttatgattcatggtccttgtggtgagggacatccatcatgtgcttgcatggttaacggcgaatgctctaagaactatccaaaagaatattgtgagaagacaacaatcttacaaaatggacatgttagatatgctcgaccaaagaatagaatatctaccaaaaagaatggtgttgctgttgataatgcatttgttctcctgcataatgtggatttatgtgtgaagtaccaagcacacataaatgtagagagagttagccgtgatgggatggaaaaatatttattcaagtattttaccaaaggttttgattgttcaaaggttggtctccaacgtaaaagagcatccggtgaatcatctacctgtaccaaaggtgttaatgagatccaagattacctagagtgcagatgtatagctcccaatgatgcagcttggcgcttgctccagtttgaaattcaccacactaac

SEQ ID NO: 415207 - DNA, 388 bp, Oryza sativa
aaccaaaacataggaggtttcatttcttcttctcaaagtagtgtagcatctttccttctttcaccattacataagcttaagcaataacagataacaaatcctcctcctcctctaggtaaaatattcaaacacaatacccttataagtacttattattaggaaagtagcgtgcatgggcataaatggcagcggggggcaggttaagaatcacaatgctgagcagcgaggaaacaaaacaccataatgggacagagcaaaagcctccgaaagggagcttttaggcagaaggcttctcccacttgaggggcttcaccacctcccaggtgaagtctgggtcgtcccttccgaagtgaccgtaagccgccgtcttgaggtagcgtccgttgcc

SEQ ID NO: 415208 - DNA, 509 bp, Oryza sativa
  unsure (1)..(509): unsure at all n locations
attaatttacctcctccacctcctcctcctccccccgatcggatcggcccggctcctcctcctccgccgccgccaccgccgccgcagataggagaagatggccgcacttgataccttcctctttacctcggagtctgtgaacgagggccaccctgacaagctctgcgaccaagtctcagatgctgtgcttgatgcctgcctcgccgaggaccctgacagcaaggtcgcttgtgagacctgcaccaagacaaacatggtcatggtctttggtgagatcaccaccaaggctaacgttgactatgagaagattgtcagggagacatgccgtaacatcggttttgtgtcagctgatgtcggtctcgatgctgaccactgcaaggtgcttgtgaacatcgagcagcagtcccctgacattgcacagggtgtgcacggccacttcaccaagcgccctgaggagattggggctggtgaccagngacacatgtttggatatgcaactgatgagaccc

SEQ ID NO: 415209 - DNA, 500 bp, Oryza sativa
  unsure (1)..(500): unsure at all n locations
tcggatggaaatggaggattaccatgcaagactctcgatgtgggaaaatacccgggagaaacaaaggcgaaggcttcttgttcaagaagctgaggataaacagcgtgatggggtgtggatagatgagaaaagggggtttcttgacaagttagtgtcaaggaaaagaagaggaaatatagaacctggagttgggaaatgggtctcatatttgaaccgagaaaagaaactggataccttggttggccagaagcctgttgcacccattgctccgaaaggaatatatctttacggcaatgttggaagtggaaagacaatgctgatggacatgttctatggggccacagaaggtcttatcaagcacaggaggagattccactttcacgaggctatgcttgaaatacatgatcatatgcatgatgtatggaagagacgtgatgaggacaagtctattgagtcgagtgctttcagntggatatcaagcctccctttgatgggaaaat

SEQ ID NO: 415210 - DNA, 393 bp, Oryza sativa
gcggtataaaacatagaaacttcagggaatttttgtctgtttcaaacctagatgccgctgttaaaaattacacataaatattctctatactcgaatcggcactgacaatccaagctacctgaaattcactgtgtgtactaatttgaagtctgaactctgaagcgacctcgatttccctgaatacaaaactctcagcaggaacaaccgcctgctttctgttcttcttgggcttctgcccctgaaggtatttgcccggaggcagcaggccgtaggtttatgtccaccatgtcttcctgctttgccgatgagagcgccttcattccaggcagcgatgcagcgatcttgcgaaacagtggcttgatgttgaatccagcttttgcgctggtttccatg

SEQ ID NO: 415211 - DNA, 556 bp, Oryza sativa
  unsure (1)..(556): unsure at all n locations
tcgctttccttctccgttcaaagcaagcccacctcgggcctcctcctttacaccttcctcttttccatcatctgcacgcgttcgtccaaactccgaaacaagaaagctcaaactcgatttcgaaattttcgaagccccaattctctcctcccacacgcggaatcgatcagcgcagcgcagggtaggctaggcgtcggcgtgctgtgatggcgccggtggtgtcggcgctggccaagtacaagctggtgttcctcggcgaccaggcggtggggaagacggccatcatcacccgcttcatgtacgacaagttcgacgccacctaccaggcgacgatcgggatcgatttcctctccaagacgatgtacctcgaggaccgaaccgtacggctgcagctttggtatctgagattctgaaaactctctctctttgtttttcccctatcatcatactctgcttatcaagcttgtcctgcttacgagaattcagttggtgcagcttagctgctgttacttgtccgatcaccgattntactctgcacaacctgttttattaccat

SEQ ID NO: 415212 - DNA, 538 bp, Oryza sativa
tcggttgtttgcgcgccctctccagggcccagattgagctctgttctggatcttgcacggtgcaccattgtgtccgagctgtccaacaaggactttgactcctatgtcctctctgagtccagcctgtttatctattctgataagattgtgattaagacctgtgggactacaaagctcctgctcacaattccaaggattcttgagcttgctgaagggctttctatgccacttgctgctgtgaagtactcccgcgggatgttcatcttccccagtgcacagcctgctccccacaggagcttctctgaggaagttgctgtcctcaaccgctactttggccatctgaaatctggtggtaatgcttatgtgattggagatccagccaagcctggccagaagtggcatatctactatgctactcagcacccggagcaacctatggttacccttgaaatgtgcatgaccggactggacaaggagaaagcttcagtctttttcaagacttctgctgatggtcacacatcatgtgctaaagaaatga

SEQ ID NO: 415213 - DNA, 537 bp, Oryza sativa
  unsure (1)..(537): unsure at all n locations
gttacattcacaaacttgaccatgatgaccaatgcaatatcaagagccttgttagcaccaaggctagcaatggtgggaatctgatggcaggtgggcgcattgggttcggcgagcactctgacccgcagatccttagcttgctccgagcaaacgatgtggaagggctacaggtgtttgtgccggaccacgagggcaaggagatgtgggttcaggtgccatcggacccatcggccattttcgtcaatgttggtgatgtcctccaggctctgacaaatgggaggctgataagtatccggcacagggtaattgcaaccgcctgcaggccaaggctgtccacaatatacttcgcatcaccacccctgcatgcacgaatctcggcactcccagagacaatcacagccagcagcccacgccgataccgatcattcacctgggctgagtacaagacgacaatgtactcactccgnctgagccacagccgnctagaactcttcaaaattgacgatgatgacagcgacaatgccagtgagggaaaag

SEQ ID NO: 415214 - DNA, 432 bp, Oryza sativa
ggcgagctctggaggaatggagatggcggtggagagcggcgagaacggcggctgcggctgcaacacctgcaagtgtggcaccagctgcagcggctgctcctgctgctcctgcaactgaatctatcgtcgtcgtcgcccggctgcatgaggatttatcgtatggatgctgctactgtcgatcagagctttgatcgaggccttaatttgcttgcattagtacccagcttatatgtaggcaggccttgccttttgctctgacgcctaaataaaaccgtcgtcgtcgttgtcagtgtgtgcgtgtgtcgatcaatgttggatggatccctagctagcttggatggatcatctatcatatggtgatctcatcatgtactcctgctccatctcctcatgcgtgccaggcttcttaatataatctacctctgctttcat

SEQ ID NO: 415215 - DNA, 359 bp, Oryza sativa
aaacaagctaattttataattaattcacaacaccatatttcattgatcaggttcagaacctgcacagaaatacacactaccggtacagatctcaccttctctccaatactcgtacatccatccacgcggtccacacgaatacgtacatctatacggtacacgtacgtacatctactgcaccgtgtacacacacgcacactttcctgcagagacgcgcatcgtcgtcaacctagctagcttagctgaaggcgaagcgtcgccatggcagcacggcggcggcggcgctcacttgccggggacgaagttggtggcgtaggcccaggcgttgatgatgacggggccggcgaggtgggtcggca

SEQ ID NO: 415216 - DNA, 506 bp, Oryza sativa
  unsure (1)..(506): unsure at all n locations
agctgagcttgaagcagcagagcgaggtagacatggccgccgccaccatggccctctcgtccccggcgctggccggcaaggccgccgcgaaggtgttcggcgaggggcgcatcaccatgcgcaagtcggcggcgaagcccaagcccgccgcgtcggggagcccgtggtacggcgccgaccgcgtgctctacctcggcccgctctccggcgagccgccgagctacctgaccggcgagttccccggcgactacgggtgggacaccgcggggctctccgccgacccggagacgttcgccaagaaccgggagctggaggtgatccactccaggtgggcgatgctcggcgcgctgggctgcgtgttcccggagctcctcgcccgcaacggcgtcaagttcggcgaggcagtgtggttcaaggcggngtcgcagatcttcagcgagggcgggctcgactacctgggcaacccgagcctgatccacgcgcagagcatgctcgccatctgggcg

SEQ ID NO: 415217 - DNA, 463 bp, Oryza sativa
tcgagctgagcacgtctagctagctatatctctcaacatcttccgagctactactagtagctagctagctagaggaagcagcagcaatggcgaaatcttgcaccttggtactactacttgtcgcactggtcgggctctcacttcttgtgagccccattgcttgctcccgcaagctcagcaagccgaaacccaagccgaagccgagcatgaagaagccggtggtccgggctcacaacaactacaccggtagcccgtcggtgacggtcaccaccggctgggccgccgccggcgccacgtactacggcgcccccaacggcgacggcagcgacggcggcgcttgcggctaccagaccgccgtcgggcagcggccgttctcgtcgatgatcgccgccgggagcccgtcgctgtacaagggaggcaaggggtgccgcgcgtgctatgaggttaaatgcacgaccaacgc

SEQ ID NO: 415218 - DNA, 361 bp, Oryza sativa
agcgagaccagtgaatgaaaaaggcatattaaatagcaaacagtcgatcttatcaaaggatgatataggccttgaagtttcgtaacactacctaccgctctcaagatagcataaccaaggaggagggttcatcctatcaatgcgccctcaacattaaaatttaacccacaagttccatccccaccacaacgtttcgtgattccactagttcgtcagctccatgatggcagtgacaatgtcaccgttagcagccttcagcgccttcaccgccctcgatctcgacacggtggcctgtgtcatcaccagttcaatgtccttcggctcgacgccagactcatcgacctcctcgtcatcctgagct

SEQ ID NO: 415219 - DNA, 361 bp, Oryza sativa
gagccgtgtcactatcaaaaagagcaagaacattctggtcgtcatctctaaaccagatgtcttcaagagcccaaactcagacacctacgtcatcttcggtgaggcgaagatcgaggatctgagctcgcagctgcagactcaagctgcagagcagttcaaggcacctgacctgagtaacgtcatctcaaaggccgagccttctgcagcagctcaggatgacgaggaggtcgatgagtctggcgtcgagccgaaggacattgaactggtgatgacacaggccaccgggtcgagatcgagggcggtgaaggcgctgaaggctgctaacggtgacattgtcactgtcatcatggagctgacgaac

SEQ ID NO: 415220 - DNA, 382 bp, Oryza sativa
aatatatgaaactgaataaaaaccatgattttgacatgtatttcctgctaacagactaaatacaaagcccaagttaaaaggtacagtccattgtgaaagtttgtacatatgtgatctatattttccatcatctttatagtcactaactaaatatcctcagagtttatattctcttctatgaccccgatgcaagatccaactgacttcccagaggacattgcctccgcgagctgtgatctggcctttttatggcgacgcagtgcaggtacagtattcagcacagcccatctcacctgtgaatcagctttcttctgggtgaaacctagacctttgagcaatccatctagttgcccaatgtcagctagtcctccttcagcatatc

SEQ ID NO: 415221 - DNA, 311 bp, Oryza sativa
tcgaatctatctgccacgatgttgaacaagttctcatgcattgccttggctggagtagcaacagagtatcttttgtatggatatgctgaaggaggactagctgacattgggcaactagatggattgctcaaaggtctaggtttcacccagaagaaagctgattcacaggtgagatgggctgtgctgaatactgtacctgcactgcgtcgccataaaaaggccagatcacagctcgcggaggcaatgtcctctgggaagtcagatggatcttgcatcggcgtcatataatagtttttttattttgaggatat

SEQ ID NO: 415222 - DNA, 521 bp, Oryza sativa
tgttatcatagatgcatacgtagagcatggtcccaatgatcaggcttttattttagttgagaagatgaagagtaacggaatatctccaagtatagtaacctacaatttgcttataaaaggcctttgcaaccagtcgcagatatctgaagctgaggaaattattaacagcttaagtaatcacaggttgatacctgatgctgtcagctataatactttaatatcagcatgctgttacagaggcaatattgataaagccttggatcttcagcaaagaatgcataagtatggcatcaaatctacggtgagaacataccatcaacttattagcggataggtggtgcagggagattaaatgaaatggaatatctgtatcagaaaatgatgcaaaataatgttgtacccagtaatgcaatacataatatcatggttgaggcctactcaaaatatggaaatgaaataaggcagaagatctgaggaaggaaatgttacagaaaagggacaaccatgatgacacatgagaa

SEQ ID NO: 415223 - DNA, 445 bp, Oryza sativa
tcggttaatacatggttgaacaatgactaaacgatcagggcatgtcagatggactctgttaagatgcgacatcagcctgaccaagatcagacatactaatgaaccttacagcacttgaaaaactggaaactatgctcctggaaatattggatagctttgagaagacagatttctggtacatagatcagagaaagcagtccttcagtgacagcatgaagtttcagcgcagcgaggacaagtggtggctccctgaaccatgtgtcccagagtcaggcctgtctgatcggatgcaccgtgagctgcaacaaaagagggaccaagcaagccaaatccacaagatggccatggagatcaacagcggcatcctctctgaaatgcaggttccactgtcatacatagaaacactgccaaagagtgggaagggttggcgtgggtgatgccatat

SEQ ID NO: 415224 - DNA, 532 bp, Oryza sativa
  unsure (1)..(532): unsure at all n locations
ctcttgcattttgataccaggaggattcggggatcgtggaatatctgggatgatattggctgcaaaatatgctcgtgagaataaagttccataccttggcatttgcttgggaatgcagatatcagtgattgagatgtccagaaatgttcttggcctaaaggatgcagacagtgaagagttcaactcagaaacaccatttcgtgtggttatgtacatgcctgaggtttcaaaaacgcacatgggaaatacaatgaggttgggttgccgaagaacgttctttcgcaggacagattgtcttacatcaaaactatatgggagccctgagcatgtagatgagcgtcatcgtcacagatatgaggtgaacccttctttcgttgctatgcttgaaaacgctggccttcattttgttggttgcgatgaaagtggaaagaggatggaggttgtagagctacaagaccacccattntacataggtgttcaattccatccagaaattaagtcaagggcctcgagaccttcacctncatttact

SEQ ID NO: 415225 - DNA, 411 bp, Oryza sativa
ctcctcttcttcttcttctccatcttctcacccagcatagccaccttcttccttggtgcaactcggctttctggtccggaggcggctgctcccgctccttcgccggcagaggatggcggtgctcgcggcgccggtggtcgccgccgtgctgctgctcacctgggcggcgtacggcgaggcccaatacgtgctgtacaaggacgccaccaagccggtggaggcgcgcgtcaccgacctcctggcgcggatgacgctcgcggagaagatcggccagatgacgcagatcgagcggcaggtcgcgtcgccgcaggtcctcaaggactacttcatcgggagcttgcttagcggcggcgggagcgtgccgaggaagcaagccaccgccgcggagtgggtgagcatggtgagcgactt

SEQ ID NO: 415226 - DNA, 372 bp, Oryza sativa
gttgtctagagccccggttgcccacccccgcggggacgatggcgggccaggagtcgctcaccctggcgggcgtcctgcgcggccacaacgacatggtgacggcgatcgcggcgccgattgacaactcgcccttcatcgtctcctcctcccgcgacaagtcgctgctggtgtgggacatcaccaacccgtccaccgccgtggccacggatcccgaggcggccccgccggagtacggcgtctcgtaccgccgcctcaccggccactcccacttcgtccaggacgtcgtcctcagctccgacggccagttcgcgctctcgggatcctgggacggcgagctccgcctctgggacctagccaccggccgcaccaccc

SEQ ID NO: 415227 - DNA, 521 bp, Oryza sativa
gttgattgctgccgaattacgcggtgattgagcagaggtacttcgattgcgagatgttccctgcaaacgatgaccacccctcgcacgacgtagcgagggggcagaggttcgtcaaggaggtgtatgagacgctgcgagcgagtccgcagtggaacgagactgctctgatcatcacctatgatgagcatggtggattctatgaccatgtgcctacgccggttgtcggggttccacagcctgatggaattgttggccctgatccttactacttcaagtttgatcggcttggagtgcgcgtgccttctttccttatctcaccatggatcgagaagcgcactgtgatccatgaaccaaatgggccgcaggactcctcacaatatgagcactcatccatccctgcaacagtaaagaagctatttaatttacattctaacttcctgacaaagagggatgcatgggctgggacctttggaactacttcaaaaatccggaaacacccagaactgatggtccagagaaac

SEQ ID NO: 415228 - DNA, 477 bp, Oryza sativa
gctgctgccatcaaagttcagaaaaaccatcgtatgcatcaggctaggaggtcctataaacacctaaatgcttcggttcttgtagtgcaaacggcattgcgagcgatggcagcaagaaatacgttcagatacaagaagcagtctaaggcagcagttaaaattcaggcccgttataggtgccatacagctcatgtgtaccataagaagttgaaacgcgcagccattgttgcgcaatgtagatggagaggaaagattgcaaggaaggaactcagaaaacttaaaatggaagctagagaaacaggtgctctcaaggaagcaaaggataaactcgaaaagaaagtggaagaacttacatggcgtgtgcagttagagaagagaatgaggacagacttggaagaagcgaaagcacagaagttgtcaaaactgcagagctctatggaagctctgcaggctaaattggacgagacaagtgcaaag

SEQ ID NO: 415229 - DNA, 524 bp, Oryza sativa
  unsure (1)..(524): unsure at all n locations
accactcagtgttcaccattgctgaccctccctctccaatccaagctccaacaatggctaaaccatccttgctcctccttcttcctctgctcatcttctccatcggcgcggctctcgcccgcgccgatctcatgctggacaggttcgagcagtggatgatcaggcatggccgcgcctacaccgacgccggtgagaagcagaggaggttcgaggtgtacaggaggaacgtcgagctcgttgagacgttcaactccatgagcaatggctacaagctggctgacaacaagttcgccgacctgacgaacgaggagttcagagccaagatgctggggttcagacctcatgtcacgattcctcagatttcaaatacctgctccgctgacatagcaatgcctggagagagcagtgatgatattctgccgaagagcgtagattggaggaagaaaggngcagtggtggaagtgaagaaccaagagattgtggttcttgctgggcgttctccgcgtggcggcgatagaggggat

SEQ ID NO: 415230 - DNA, 395 bp, Oryza sativa
gctatgaacaagacgctaatcaacatccagagctaaaacaaacaaggggatcaaagcaaatcccgaaaaaaaaaacacaggggaaagtccacatcttcttctcgtccccaacgcctccgtgtcaccaccacgtcttgcggatttttttttaccctgttctattcgctcaggcgtccacgatctcgccgtcgtccttcgacgccaggatcagctccgggtgcgccgccgccgccgccgccttcttgatcgtgccgtcgatggcgttcggccggccgagcgccttcagcgccaggtgcgccgccttctggccggagatcatcatggctccgaacgtcgggcccattctcggggcgccgtcgatctcggcgaccttcatgccggtgacgatcatgccg

SEQ ID NO: 415231 - DNA, 429 bp, Oryza sativa
agagcatgaagctcatctcctcctcctctcgcatggcggccatggccaccaccgcgtccagcctcctcaagacctccttcgctggcgcgcgcctccccgccgccgcccgcaaccccaccgtctccgtcgcgccgcgcaccggcggcgccatctgcaactccatctcgtcgtcgtcgtccactcccccctacgacctcaacgccatcaggttcagccccatcaaggagtccatcgtgtcccgcgagatgacccggcggtacatgaccgacatgatcacctacgccgacaccgacgtcgtcgtcgtcggcgccggctccgcggggctctcctgcgcgtacgagctctccaaggacccctccgtcagcgacgccgtaatcgagcagtctgtgttccccggcggcggcgcgtggctcggctgtcagctgttct

SEQ ID NO: 415232 - DNA, 391 bp, Oryza sativa
aaacggagcagaggcggcagagctacaattgaagatgaaatcacgcgatactacaaagaaataacgaaactcatgtcatttacaggttcgaagtttgcaactctttgtggaagaggcaatgccaacactaatttattcatgtgttgatcggtgctgatttcaggagcagccggtggtaaagataagtgctcgatagcacatcacaagcattgacaaaagggtcaaggcgcattctttgcagatcacaagtcactggtatttgttcaatgcttgctatcttcttcctcgcagaatttcgagtatttcgcgtcatccatcagtgaattgagctcacctgaatcactaaccttgaccttgatgatccacccactctcgtatggacttgtattaa

SEQ ID NO: 415233 - DNA, 532 bp, Oryza sativa
tcggttccgaggaggagaggagcaataatccaattccaatccattcctccgcgacctcgtcgtccgatcatggccatggccgcctccaggttgctgtgggcttcccgcgccgcctcctacctcaagatctccactttccccagggccttctccaccgtgctgaaggatctgaagtatgctgacactcatgaatgggttaaggttgagggtgattcggcaaccgttggaattacagaccatgcccagcaccatttgggtgatgttgtgtatgtggagcttccagaagttggcagcagtgtatcccagggaaagaactttggtgctgttgaaagtgtgaaggcaaccagcgatatctactctccagtatctggagaggtggttgcagtgaacgatggactaggcgatgaacctggattggttaatacaagtccatacgagagtgggtggatcatcaaggtcaaggttagtgattcaggtgagctcaattcactgatggatgacgcgaaatactcgaaattctgcgaggaagaag

SEQ ID NO: 415234 - DNA, 407 bp, Oryza sativa
gtctggtgcgacacctgcctcgccggcttcgagacccccgcctccacctacatcgccggagcgaaggtaaaggttgagtgcagatcgaaatccactggcgccaagacatgcagcttcgagggccagactgaccacactggcacctacaacatccctgtcaacgatgagcatgagcacgagctctgcgagtctgtccttgtgagcagcccggacgcaaagtgtggcaagattgttgctggacgggagagggctcctgtcttcctcaccaacaacaatggtgtgacatctaatgttcggttggcgaacgctctgggcttccagaaggatgctcctcttgctgcgtgcgcacaaatcctcaagatgtacgaggaagtggacgaccgcgtttgaaggatgtgagttatgta

SEQ ID NO: 415235 - DNA, 529 bp, Oryza sativa
attaagaaaaaaaaaactcgttttcttttcttctcttctcttctcttgttgcggcgaagggggagaggaaggtcgaggtcgacgagatgggcggcggcaatgggcagaagtcgaagatggcgagggagaggaacatggagaagaacaagggcgccaaggggagccagcttgaggccaacaagaaggccatgaacatccagtgcaagatatgcatgcagactttcatctgcaccacctctgagaccaagtgcaaagagcatgctgaggcgaagcatccgaagagcgacctcaccgcgtgcttccctcacctcaagaaataatggcggtggcatctctctgctcaatcagaagagaaaaagagaagctgccataatccactagtatcatcttgtatgcaatgactggttgccctatgtatgggtctaaactttggtcagctgctgctgcttctttgggtgtgtgcctcatctaaatatgtaatgctctatcaaccttttgtgccacgatataaatctgtgtggatttgctg

SEQ ID NO: 415236 - DNA, 406 bp, Oryza sativa
cggcgtcgcccgccccttcggcgacgccgtcgtcgacggcatcgacttcttcatcgaccagggcgccacggagcactacgacgagctggcgcggcggctgtacgcgcacaacaaggactacaaggggaggctcggggtgatgctgacggcgacggcgaggtgcgtgttcccggaccagcggctgcaggcggcgctgtccacggggctcttctcgcggatccacgtcaaggtgttcggcgacgggcggtgcgcgtcgaggagggaggagctggagaagtggatggcggcgtacccgcagagccgcgtcctcgtcggcgtcgtcgcgtcgccggaggctgacagggacggctacgtgtcgcacaaggatctctactacgacgtgctgcagttcatcaacaagctgccc

SEQ ID NO: 415237 - DNA, 502 bp, Oryza sativa
  unsure (1)..(502): unsure at all n locations
cttgcagttgagcgccccgattcctcccccttcgcctcgccaaaaaaaaacccagctcccccgatctccccaccaccaccacccagatctcgaaaccctcgccgtcgccgccctcctcctcctccaccgtcgcggcggccatggcgaaggagttccccgtgccgccggtggtcttcactccctccacccctacccaccgccgccatcctcccccagggaccggcccctccccgccgccggccttcgcgcctccccgcccctccacctcatccggcgcgaaccctctccccttcatgtccttcgacgtcggcaacgcggccacctcctcctcgccgccgctgttcgccgggccgatcggcgtcggcggctccggggcctccttcgaggacgagccgccgctcctcgaggagctcggcatcaacacgcgccagatctggcggaagacgctctncatnctncacccgctccgctccgncgatcccttccttcacgccgacgccga

SEQ ID NO: 415238 - DNA, 511 bp, Oryza sativa
  unsure (1)..(511): unsure at all n locations
ttgtgttaacatgttggttatgccaaacaaggccaaggtgaaagtcattagtgtacactgtgatgaagatagagtgagaagtgctgcacctggtgagaatgtccgagtcaaactgtcaggaattgaagaggatgacatcactgctggttttgtgctatcaagcattaaaaatcctgttagtgctatatctgaatttcgtgctcaactacagatattggagttgcttgacaatgcaatttttactgctggttacaaggcagtgctgcatatccactctgtagttgaggaatgtgagattgttgaactcatagaagaaattgatttgaagaggaggaaagaaggtgacataaaaaaaaagaagtcaaagaggaaacctctttttgtgaagaatggagctgtcgtcgtttgccgtgttcaggtcaataatttgatttgtatcgagaacttctctgagtttcctcagcttgaaaatttacgctccggactgaangtagacagttgctgtaggaaa

SEQ ID NO: 415239 - DNA, 415 bp, Oryza sativa
gtggtgagctccggcagggtgcgactgtccaccgaccgcctcgacgagtccggcgacggcgtcgccggcggcagcttccccctcgagcacctcctcgtgtacaggctcctgatcgatgagtcgccctcgtagccaccgccaccgccgcaaccgccatcgacgccgcacttggcgagcctcacgttcaccgacttgcccttcgccaccacgtagatgttgcagtagtccggcgcgcccttcatcaggctggacggcacgtcggcgttcttgaatttcttggtgaatgcatttctgttggatgcgccgagcgcgatgctctggatcttgttcacggtgatgaactctattaaggcctttgacacgtctgcctcttccagtaccaactccgatacatgcaccccattcctggtgcaga

SEQ ID NO: 415240 - DNA, 531 bp, Oryza sativa
ctacgccttctcccgccccatccttgtcctcctcggcgagtccccggagatcgccagcgccgccgccgtcttcgtctacggcctcgtcccgcagatcttcgcctacgccgccaacttccccatccagaagttcatgcaggcgcagagcatcatggcacccagcgcctacatctccgccgccacgctcgccttccacctcgtcctcagctacctcgtcgtctaccagttcggtcttggccttcttggcgcctcgctaatgctcagcatcagctggtgggtcatcgtcgtcgcgcagttcatctacatcgtcaccagccgccggtgcaggctcacttggaccggcttctccatgctggccttctccggcttgcccgacttcttcaagctgtccctcgcctccgccgtcatgctctgcctcgagacctggtacttccagatcctcgtcctcatcgccggcctcctcaaggaccctgagatggcacttgcctcgctctctgtctgcatgacaatttcttggatggtgttcatgat

SEQ ID NO: 415241 - DNA, 532 bp, Oryza sativa
ttgtttgaacggcggggcggcgtgcgggaagcggtacgtggtgacgtgcacgggcgccaccaaccagggggtgccgcggccgtgcaccggccggagcgtcaccgtgaagatcgtcgaccactgcccctccggctgccagggcaccatcgacctctcccaggaggccttcgccatcatcgccaaccccgacgccggcaagatcaagatcgactaccgccaggtgtaaggtgaagacaatacatgcatatctacggagtatatagtcaataaagtgcagtgcttttccaaacgagacagggaagcgaacgtgtgtgttcagtgttccagctgattttcggttgttgccaataaaacaatttgtatgagagagcgaaaagaagaaacttattaatttggtttttttgaacgaatttgtactgtgggtttagcaaatattttcaatctttctttacgttttttctctctattttaatttgtttcgttctttatggtaatttttttttttttattttaataaggggggcctttttta

SEQ ID NO: 415242 - DNA, 390 bp, Oryza sativa
gcaatgaaacaatggcaatcacatatatgttgttccagattcacaactcaaacggcagccgaaatgaccaaaccggcaaaaaagaaaaaaaaacacacaattattagccgaaacgacacgaagaaacgagagggactatggcactgcaggaagtgatctgcaatgtgtggtgttgacaggggaagatgagaaaaaaaaattaaaccacaattaatcccatgcatgcgcggtggtggctagaaaaattgcatatggatctagtaatgtgactcgtttggctgagttaatttgttggtgaaatttgggaacggtgcgccacaatggatgtgatcgatcgatctacaggccctgctttacgaggtagtcaccgagcctcttaaccaccatgtt

SEQ ID NO: 415243 - DNA, 431 bp, Oryza sativa
ttgattctgaccaaatccaccctagctacaaattttcttggccgcgcgcggcaggcagatcgagcaggcgagcgaagatgtcgtggcagacgtacgtcgacgagcacctgatgtgcgagatcgagggccaccacctcacctccgccgccatcgtcggccacgacggcaccgtctgggcacagagcgccgccttccctcagttcaaaccggaggagatgaccaacatcatgaaggacttcgacgagccggggttcctcgccccgaccggactgtttcttggaccaaccaagtacatggtcatccaaggtgaacctggcgctgtcattcgtggcaagaagggatcaggaggcatcacagtgaagaagaccgggcaggcgctggtggtcggcatctacgacgagcccatgacctcgtggcagtgcaacatggtg

SEQ ID NO: 415244 - DNA, 476 bp, Oryza sativa
ttctatggtttagagactacagtagcagatagcttagtagatggttcagttagcaagatagttgcaaagaaaacatctgaaagcaaacttccagttattgcattgtcagaagttcccagcaaacaagcaagaaatgagcatgaagctgcagagaagcttaagtttgttatttgtccaaggcccaaggctttccaaaatggtgcaggtgatgccggtgccaagaacaatgcagcaagaactgttgaagagaggatagaggaatacaacaaagcacgagcacgcattttcaacggttccatttctgatattgaaggcacaagtgatttgggagctttatctgttgcgagagatgaaccaattaatgttgagcctcctgttgatgagaataaggtgaacacaatgaacagccgttccagagttgctgtttttaaggacactgaaaaggatcgtagtgatcctgactatgatcgtaacta

SEQ ID NO: 415245 - DNA, 402 bp, Oryza sativa
gatgtaatcccgtatgccacctttggttcccaatcacaaattcacaataacgaagaacacaccattgacgggcgaacgaacgatcgtgtcaaggcaaaaagggcagcagcagattggacctaaatgctcaatcaagtaggatttacatgagagtcgctgcggaaatcgcctactacacccaggaagctgtttttgttttgggcatagcaatccactcactccagcatgtgtcatttgaggaagctcagcttgtctgaagggcctcgaccttacccctggccttctcgctgtcgtcgacaatgagcttctttcggagggcgagcagctcctctcctgcaccacagatgtaggccgcggttctcctgcctgagagagttgccccttccatgctgtcaatgtagt

SEQ ID NO: 415246 - DNA, 487 bp, Oryza sativa
ttggtggggatgtagggaggttctctatgataagctgccacttcataaatcatatgaggaacgtcctatcctatccaaggctacaagtagagagataataaaagcagatgcatatgtcgcagcttgtgatgtcccggggatcaaaagacttttaccttctgaatggaggcaatgggatacatttgacaacatctacaagttagatggtgttcctgtagtcacagtacagcttcgttataatggatgggttacagaacttcaagatttggagaaatcaagacaactgaaaaaggcagttggcttggataatcttctctacactccagatgcagatttttcatgtttttcagaccttgcactttcatctcctgctgactactacattgaaggacaagggtcctttgatccaagctgtgctaacccctggcgatccttacatgccattgcccaatgaggagataattagcaaggttcaaaagcaggtctt

SEQ ID NO: 415247 - DNA, 332 bp, Oryza sativa
ggatccaaacagcacatatattattatagcagaggggtgtcacagttcaaagggcttttaagcgaaacgggcagaataattcaatttccaaggctggtagatctggattacaatttggcgggacacagctcaaaagcacagccaaaagcagatgaaccatcatcggttcatttatcagtggccagaacacaccgaaggcagccaccttcatgcagcaggtcaaacgccttgttgatgtcagccaggttcatgctgggagtaacgtactcgtccaccttgatttccttggtcaagtactttttaacgagccatggaacttggcttcggctttt

SEQ ID NO: 415248 - DNA, 505 bp, Oryza sativa
  unsure (1)..(505): unsure at all n locations
gtctgttgaccatgtcattccttgttaccaagcagaatgcagagaatgcaagttttgcaagagtggaaagaccaacctctgtggcaaagttcgtgctgccacaggggtcggtgtcatgatgaatgatcgcaagagccgtttctcaataaatggaaaacccatttatcatttcatgggaacatctacattcagccagtatactgttgtgcacgatgtcagtgtcgcaaagataaacccacaggcacctctagacaaagtttgcctgcttggctgcggtgtttctactggcctcggagcagtatggaataccgcaaaggttgaagcaggttccatcgttgctatttttggacttggcacagttggacttgcagttgctgagggggcaaaatcagctggtgcttctcggattattggcatcgacattgatagcaaaaaagtntgatgtcgcaaaagactttgggngttacaganatttgtgaaccccaaaggaccatgacaaaccaat

SEQ ID NO: 415249 - DNA, 583 bp, Oryza sativa
ggccgcccgcctgaccggcccgaattcccggctccggacccacgcgacgcgttctcttgtacctgtcccacagttagccccgatccgaggggttcctagacctgattcgagggaaaaaaggggaggagaagatgagggagatcttgcacatccagggcgggcagtgcgggaaccagatcgggtccaagttctgggaggtggtgtgcgacgagcatggcatcgacccgacggggaggtacgccggcacgtcggacctgcagctggagcgcgtgaacgtctactacaacgaggcgtcgtgcggccggttcgtgccgcgcgccgtgctcatgcgcccacgttcctggggaccatggactccgtccgcacggggccctacggccagatcttccgtcccgacaactcgcggttatccgccagtaccggcgctcggcaacaacctgggccaagggccactacaccgagggcgccgggctcatcgactccgtcctcgacgtcgtccgcaaggaggccgagaattgcgactgccttcaggttttcaggtgtgccactcgctgggcggcggcacgggctccggcatgggcac

SEQ ID NO: 415250 - DNA, 398 bp, Oryza sativa
gacacaaatatattttattcagcgctgatgcggctgctaccccaaaattacaaaatttattacacaaaagacattgcggaaagctttgtacagtttcactacatgctctcgatcatctggatagggtaagacttttgctaccaagcgtctaagctaagtaattaagcgatacctttcttccaaaatatggcgactcccaaaaagagatctaccgggacctttagctgacagaagtgcaaattgactgctgggaatagagaccatgtatgggatgcacaaagtgctgcttgcttcttctacgttttgaaactactgtaaatccttctgtatccttctcactcttaggtaccacggtggccttctgctgtttgtcaagctctttgcgacctgacggactt

SEQ ID NO: 415251 - DNA, 446 bp, Oryza sativa
gtcatgatcagcagcaaagaggttctttcaagtgaaccggaggaaatcggcaatgatgaaaaagctccggacagcaacagtgatgaaagcccaactgaatctaagaaaaaaggtggaagcaagctttcagcttcagcgcctacattcaatcctggatcactcttatcgatgtcgcacccttacagtacagtggcaatatatgatgctagcgtcgttcttcagccaataccaagtcaaccaatggagattctccctcacgccattgatactagggtaccccgtggtcctcggtccacattgtactaccgtactgggcataccttccaaagaaaacagggttacgcacacagccagagcaccattctgaggggtagcaactcccccccaaccatgaattctcatgctgccgagtttgttgcctggaaaaacttcgcaacaacctgatg

SEQ ID NO: 415252 - DNA, 527 bp, Oryza sativa
  unsure (1)..(527): unsure at all n locations
tcgtctcactcccactaccatggatccttgcaagttgcggccgtcgagctcgttcgacacgaagacgacgacgacgaacgcgggagctccggtgtggaacgacaacgaggcgctgacagtggggcccagggggccgatcctcctcgaggactaccacctgatcgagaaggtggcgcacttcgcccgggagcgcatcccggagcgcgtggtccacgcccgcggcgcctccgccaagggcttcttcgagtgcacccacgacgtcaccgacatcacctgcgccgacttcctccggtccccgggcgcccagacccccgtcatcgtccgcttctccaccgtcatccacgagcgcggcagcccggagacgatccgcgacccgcgcgggttcgccgtcaagttctacacccgcgagggcaactgggacctcctcggcaacaacttccccgtcttcttcatccgcgacggcatcaagtttcccgacgtcatccacgccttcaagcccaacccgcgctcccatgtncaggagtact

SEQ ID NO: 415253 - DNA, 527 bp, Oryza sativa
tcgctcaacctctcccaaaattagccccgatccgatcgcttcctagccctgattcgaggtaaaaaaggggaggagaagatgagggagatcttgcacatccagggcgggcagtgcgggaaccagatcgggtccaagttctgggaggtggtgtgcgacgagcatggcatcgacccgacggggaggtacgccggcacgtcggacctgcagctggagcgcgtgaacgtctactacaacgaggcgtcgtgcggccggttcgtgccgcgcgccgtgctcatggacctggagccgggcaccatggactccgtccgcacggggccctacggccagatcttccgtcccgacaacttcgtcttcggccagtccggcgccggcaacaactgggccaagggccactacaccgagggcgccgagctcatcgactccgtcctcgacgtcgtccgcaaggaggccgagaattgcgactgccttcaaggtttccaggtgtgccactcggtgggcggcggcacgggctccggcatgggcaccct
